United States Patent Application Publication US 2015/0240253 A1 - sequence listing, part 38

SEQ ID NO: 178184 - DNA, 467 bp, Zea Mays
gccaatgctaatgaatgaaactgaaatcctcggtgcccccatttattttgatgttggcttgatgttcatggtcttgaagtttgatacattaggtagaagtaatgcactctaaatcatcaaaattttattaccttgagacattattgaaccaaaatctatagtttcggggccgaaactagtaagtttattgcactcgatcaggaagtgagggatagagtcagactcgttcctctaacattttttcctgatatttccaagagatatagaggttcttattgctagctggagcagtcattatgccatactatcttatcatttcttggctgactaaatagaactgcatagttgatctttgcgtgcatgtgaactctctgaattcttgtcacagtgcaaccggcgttctgtattcatatatcactgtgtattttaatcattgctctagttgctggataagttaagttttgtca

SEQ ID NO: 178185 - DNA, 1187 bp, Zea Mays
atcatgtataggaatttttctataattttttgagccttttgagatatttttcgaacgttaaatacgatttcagtattttctggaattattttaattctacaaattgattcctttcaaaaaataaaatatctttaaaccctggcaatagcaatatatatacggctcggaacatctcgccgaacccgttccaaatatcagatccgttttgcgagacaagattcgtagcgccatcagttcctcgtcgaagttcggggcagttctaacttcggcaagcaattactttcaagttgtgcgtcgttggcgaaatctgagagtgttgttgcgttcgtctcatcgaggacttcgtctttgtgctttcgattcgttgatccgacctctggttcaccgtcaatcgacggatttctcctggactccggcaagggccttcctcttcggtgagcaaccaccatgattttggtgccttgttcttcatttttcacggttttgtggtagcccctccccagtcgacccctcccttgtgccgcccgccccctttctctcctctctcccctctcactgcgctccttctctctccccctcccccctcccttgtgccatgtgtggaagagagatggagggaggtagaagaaggcatttttgctaaaaaaagagcatggggttacgtctaagtgcgcgtagatgtttgatttattagaatattcgatatcttttgcgttataaatccaattcactccgttcaagtcgctttagattcgtattaaagttgtatatatgttaaaaatactatttcaaaatgtcacatgttttaaataatttattaaatggttgtttggctaacgtttattaaattatcgttccattttatagttttcaacttgctcttttatagttttcaattagcgttccaattaaatcacctctttctaatttatagtttttaacttgtgcttttataaataaatctcatcatggttaatattaacttaaatacttttctattaataattgtttggtataaatgtgtcatctatttagtagttctcgcgtgtcatgtttgtctatgcgtcgttcgcgcatcgttcgcatgtcgcacacaacgttttcacgtcgcacgtttttcttgcgtcgtgaatccgcctcgcttagaatcactcatattaattaacttacttatttaactaggggct

SEQ ID NO: 178186 - DNA, 549 bp, Zea Mays
cttaatttttcacatttatctttggcatatttaagggaggttttgagctcatttttggtggatgacatagttttatttccttccttcatttcttcactagctttaacaactatgtcatacttggtagttaagaactcattttcatcctttaacttgtcacatttagcttttgactttctaatgatctgggtatattctttaagtaagttagctaattcatcataggtaggagaagcatactcgtcatcactatcactatcacaaccatcaacaatatcattttcaggttgtaccttccgttcacctttagccatgaggcatagttgtgaagtggatgaaggtgatggtggtggtgaagagaaatccccagcgatggcggtaaccttttcatcattttcttcttcacttgaagaagacccgcttgaggattcaatgtcagcgagctagtcaccaacaatatatgcttttccatttttctttttatgaaatctcttgtgcttgccttccttcctcttgaagaatttgttttgcttcttctcagcatcattg

SEQ ID NO: 178187 - DNA, 595 bp, Zea Mays
acgagattcctttaaggggggaaggctgtgacaccccagtgtcacctagggtttctctcaaaatgctaacccaagaaccatcattttatgtgaaccaaattgagcatgagcatcaaattgacttaagagtgaagaacccaccaagcctatacttaaaagtatcatgatcaaaacaaatgggtctttcaaaaagggtaataatgttgcaaccctaataaaaaccctaagtgagccctatgagcaaaattcaagaaaatggggaaaagggtatgaaaaatttaaaattatggcttgggccaattataaacattgaagtatattcattaagcaacaagaaagattgaggaagcttggccaaaataactcaattaaaaccccaaaacaagcttctcatgtggggactcaatggggaattctgaatttcagaattctgaatttcagaccttgagccaaagatcaagtgtgttcaccttgatccctaactcaaatcctaatggccccattaacaaaaatgtgcctaactaacccctctgtcgtgtgccagaagatggcattgggacgcgagccctagacacgacaaaaccctggatttgcc

SEQ ID NO: 178188 - DNA, 614 bp, Zea Mays
ggccaaaactgctgcttcggccactctagatgagcctgcgccgaagagcaaaaagttgaaagtccttacccaccggccacgttatattgagtcggctgtggtacctaagtttggcggggggagacttcttcagctgctgaaccaaaagagcccattcttcctacgcagaaggctgaaggaccggccataatgccgaaggtaccctcagctgagctagctaagtcgaagactgataaagataagaccgaagagccaaaaattgaaggatcaaaaatgttagaaattttaagcccttcggcagaagtaacagcgccgaaggcacaaaaaagttttgcggcaactcccaagagaagaaggatggctaatgtactagatgtgctagaaacagtaaagactttgaacttgactcctttaaagaaaattgccgaagcctcgaaggcgcaaactgaagttgaaacagagcaggccgaaattgaaactgcagtaattcaagctggtgccaaagctgggccttcagagtccgctgaaataaatcatgcggaaattgaagaaaaagcaacagaagaaaaaaacacagagcaaatttcgcctgaaaaggttgccactcctgctcc

SEQ ID NO: 178189 - DNA, 723 bp, Zea Mays
cgttttgcttgttgcgagatgaaggaatgagcacaagaacacacacgagtttagagtggtttgggccgctggagcataataccctactccactgtgtgttatattgcttgagagcttgagttgtcttggatgacttgggtctaagcctcaagcttgagcttgtgttataacgttgcatgcctccccttttatagctaaagggggacatgtacaagagtgctgagccccgacatgtgggcccaggaacacggcggatgtagctactaatacttgatgctggagtgaccttcttgcgccctgacacccgagatctatatagcatcgacgtgcagggggaagcttctcgtataagggatgagtacagtgcactgcgcagcacgagtgtactgtttcgacaatggactggacaggtgcgccgtttgcagggtggcctagcgccgcctgccagtggaatggacaggatgcaataaatgtcgtgggggcacatctcctgttagaagggtgacaggcggcgtgtcctctccgcaataaatgtgagggtcgtgcggcctagagcccttacgtcatgctccacccgctggcctacgtcacggacaataagccatatggtagcattagaccctcgaccgagtggggagcggaggtgctccggatagagcctggacacgcgtcaataccggacccatgcctaggtcacgacacttcctttcctgggaccttgtt

SEQ ID NO: 178190 - DNA, 810 bp, Zea Mays
aattagttatgcattttctaagtttttagaattaccttggcaataaaaatcaatttttgaattaatttcattaatatacaaatactcatggactgcgggcactatttctttgaaatccgggggtctaacttgtaaatttcagggcctagttgtagtttctgttgaactaaggtggactgcaggtttattttgataaaacacatgggctcataggtaagactgactggccgaaaggggtaatggacgacctgagccatccgatccagacctaagggcctagattagaaatctagccacgatgaaccggtacgacacaatgaccacatgatctaagatctatggccccaacacacccacgccatgacgaacccccagccctcggatataaccttgacgtctctgatttaatcaagccaaaggggtaagctgcttctaattgtggccgcccaacggccgatcgacggcacaagtgcactcttcttctcaaccctcaatcccaagatcgacggtcgagcccccgtcttcttcctacccgtcgaccggtgatggagacgctttccatgccccgacgaggacgccgacaagttggcgaccccgtgccccaacaacccaatcgcgatacggttcaatattacacaaacaggagaaaagcgtgcatcaatctagggacaactcaccccgtatcgggtagctagactccacggcgacgaagcagggcggatccacggcgaagaaggcgccccgacgatgggttctcggcctcccagatgtttcccccgcttgacgacatgacgagaacgtgcagcatgg

SEQ ID NO: 178191 - DNA, 641 bp, Zea Mays
gccactatttaacagaaacccagggggttctgcgcaaaagacaccaagactcagaactcccacagtgtggactgcgggttgtttattaaaacgcgaggggttcttctgtgaaaacacacagccgaaggggtacgggtggatttcagccgcccgatacatgatcgacgactgcgattagatccccagacattatacactggtaagggctccttgccgcaggatcgaagatctacgaccgaagcatgtccacgcgatcaaccacgctcatccctcagatccgatccaacgaccaagatttaatctagctaaagaggtatgcatgacccaatcctagtcgttgacgcagaaaacggcggccacaacctttcccccatccggagcaacaccgacaccggtggcgcactcccagcagcggcggcgccatgactgcccacactgggaaccgcccccaagcgcaaagctcacccgaatgatgcaaaaccgaattggagttgccactaagctaataaaaatatccttaccgcggcttcagcgcctggacgccctgaccacggcgcgcggcggacgacgaccagtttcgatggcgatagggcaatcccggcggtgcaggccgccattcccgaacgccaaggccgccacgc

SEQ ID NO: 178192 - DNA, 761 bp, Zea Mays
gctttattgataatgaaaccctttgcttacaaagtacaactcgcccacaagaggtttgaggtattgctatggatagaatttcctgaggtgctcaatattccacgaattcccactttggtgccatccatttgagtaagccggtaggattctagccgggtaacctctgcaacgaggaatggtccttcccatggcggtgatagtttgtgccgtccctctcctgtcaatactcggcggaggaccaaatctaccactacgaaggattgatgtcacactgctttgtcgtggtagcgcctcagagtcttttggtatctggccaaatgaatgaccacattcagtcgttctccctctaatatgtcaatgtcctccagcctagttgcttccgcttcatctatgcttttgaatgttaatctgggtgctccaaagatcagatccgctggtaacactgcctccgacccatataccatgaagaatggggtgttttcatgtaaagcccggctcggctgagttcgcaggctccagaccacatacgataattccctgatccattttcctgtaagcttttcgctcttgtcaaacacctttttcctgagtgcatcgagtatcatcatgttggctctttctacttgcccattagctcttgggtgtttcaacgtcgtggtgatgttgtatgttacgacgcttgtttcaacgtcggcgtgcatcgcactacggggctcctcccctagtacagtgggctcatcgtcaaagaaaggtacatcctc

SEQ ID NO: 178193 - DNA, 587 bp, Zea Mays
ggcgggttgattcagaaaaaaaagacagggtctctttagaaagattcccaggtcgaaggggtatggatggattctggccattggatcagcacccgatggttcagattagatctagtgcattatgaatccgcggacagcgcaggaccgcccaatcacaaacctacgacctagatctaaagcaaccccgagtcgatcacgatcgtccaatgatggatcaaggatccagatttaatatatcgaagaggtatccgatgacatgatcttgcccgtccgctaccaaatcgacggtggcagcacacgcacacctagatctaatcctagtcattcgcagagagatcaacggtgggggtgtatcttcttccccagactccacggctgacggcgcatcgccctgcccgacgggacatcaccggcgaggcccccctccagccataccaatggccaaaccccacataaaacggtgctacacgatgaggacaacgaggcgaaccatatagggtagcgacttaccagaattcgtagcaagagctccttggtcgcggtggaatgcggaccgcggcgcggaggcccaccacgggacggtgcag

SEQ ID NO: 178194 - DNA, 867 bp, Zea Mays
caccgttcggtttaaagagtgaattttatttatttcatcggatttagagccaacacataacccatctatctctcttacgactagaacctctacgctcatcattaatcctctctctgaccaagttctttttagagaagctcaaaaaaacaatcatgctctctgtaaaatataagtttttgcggtcatctgataagttaagctagacgactatcttaccgacgatagcgcaatagcctcgatgcccatcatcaagggcaaagaagacaatggcaaggagaagaacattcctaactagtcttctaggtgtgctcaacaatagatcaataggttgtagctcttactttcatctatgaccaaagatgatctctcttaggtcatgatatgtcgaactactctaaacatgtaaggttgtagaaggaaactacgcaccatcaataagggcacactccatcaattcaaggattgctctttttattaccaaaaaggagacatctccatcgccgaatacattagcaagatgcactccttgtgtgacgagctagcatccaccagcaagctaatcgacgatgacgaattgatctccaacatccccatcgacctcgactacaagtgcaacctagtcgtcaccacacttgcaaaggatcatctcaccatcaacgaggtgtattcacaactagtcagctttgagaaatgcatggaacccccacatcaactaccacacaaaaactaatgcaactagtcatgcgtgaggatgcacacacacaatagaggaaacactcgagaaggtgatcgcggtccaagagttcacaagcaaaatgttgggtgtgtcccagaagcgacaaacaataggagaacaaccttgatgcc

SEQ ID NO: 178195 - DNA, 411 bp, Zea Mays
gtaagttctgacttcgaaacaaagaggatggattcattttggccctttttgctatttatggcccagctcaagatgatttaaagaatgatttttagctgaagttgtaggtgcgtgtagttctgaaacacatccatttatgatagggggactttaatatcatgcgaagagcggaagacaaaagtaatgataacttcagctttcgatggcctaatttgtttaatattatcatagcgaatttagaattgcgcgaaattgaaatggtgggacgtcaatttacttggtcaaatgatttggatccacccatgttttaaaagcttgatagggttttaatgagcccggagtgggaacttaaattccctaacgtctcagtgcaagcggttgacagatctcggtctaatcatacgcctcttc

SEQ ID NO: 178196 - DNA, 535 bp, Zea Mays
ttggtggtggcgcctctcccagaagctggtacaaccttggatattcagagacctgtcagtgttcgcccaaaacgcccttgccgagccaatcaacctgattctcctgctgatgagcagaaaaagaaaaagagacgtcttcggcgagtatctagtttggatcgggacgttggtcctcccgttcctgctgcggaggaagtacctgtgcctgaatttactgacgctgaccccaataggtgtgatctatctgtcgctgatcccaatgggtgtgctccatctgctgctgatcccaatgggggtgttgtctgtgttgctgatgaaaacggcggggaggaagaagatgaggtccctttgactcggaagaacagtcggcaatatgtcgccagtggggaaagtagtggagttccttctcctgctctgtctgccctcattggtctacaagaattgtccctggcgaactttgatcagactcttgaagatatggttccagaggatctgttatcagagccagcggatgatggtgcgacgaatgtttgtg

SEQ ID NO: 178197 - DNA, 973 bp, Zea Mays
aagagaaaaaggtagagtctggttacctggagagaaggttggcgtaggttttaagtgcaagtattgtacagaaacaaagagcggagggatggtacccgattgaaggagcatctcgcacatagagggaagaatgtcaagaaatgtctccctatttctctagacataaaggcatacttccaacatgacatagataagtcaaaggaaaaaacatgtctaggttcaggcaacaactgagggtagatgaggcagcacaaacccattttggttaatcaaatgacgatgagtatgaggatgaactttaggtggttttgcatcagtcacgtatggagcacagatttagtcagagggctggtgcaaggtatgacaggggtggtggatctggatcctccagccaaagggtatatcgagggccacttgataggatgatgggaaggagtagggaacaagtacctgagcgtgttaaagactacaatcttgctcaatcctctggaccaaagcaacagaggatagatactggtccctaaacaagtaagggaaggagctcgaaagagattcttggtagggcttgggcaaaggcttgtcatgccattggcatcccgggtcaaaaggtcgataacccatattttagggccgcaattatggagtcccaaaaacaaggtatattttcacccatgccacacaagattcttaccttgatgcacctcattcacagtgagagacaataagcggtcaacatcgttcggtttcatttctcgtctaagatggaatctgtagctcaagtagctccagttcttctaactgtccacctggacaagacccaatctataacccttatgcatggcaatggaacctggacaagggaccaccaggcgaagtaccaccatcgatcatgaatggatatggaccccctccactgccatatttaaatttgtcacatatatatatccaccaggaccacaatatgggtatggac

SEQ ID NO: 178198 - DNA, 574 bp, Zea Mays
cactgatgaaatagacgggatgttgtactggatatgcgtgtccttcctctgcccgttcgactactaacgcggtgctcaccacgtgagtcgtgcaggagatgtacaacagcagatcttccaccggcagatctggcatggctcggcgtggcggctttagcactggtagtgtggtcaaaaacttcttcagtgcatcaagagcttcctgagcttctaaggtccactggaacttgtccaccttcttgagcaatttgtagaatggtaggcctttttctcctaaccttaatatgaacctgcttaaagctatcatgcatccagtaagcctttgcactttcttttgtgatcgtggtgcttccatcctcatgatagccttgattttctccgggttagcttcaattcctcggtggctgacaatcaatccgagcaacttccctgttggcactccaaagacacatttttctagattgagcttccaccggtaccgcctcaggctgttgaagaccagatgcagatcctcaatgaagttttctgagttttttgtctgaatcaccacatcatcaatgtaagcttctacccg

SEQ ID NO: 178199 - DNA, 546 bp, Zea Mays
ccagccagtaggccatttggtgcggtatccaatcacagaagctttcatatcttttcgatatgcaaaattataacacccaaggtttttgtgcagaccatcggctctggccttcgtctgatagtgaagttcgtgcactcagcataaccctttggcattggcacttttaccttggcttcagagagcccatatataaatgttaagcctaacaatagcatttgggtcagctggtggagatatatctcaaatctgttcaaaacttcccctatcatatcatacagggggaaccgaagccccgccctgaagaaactcttgaatacaacaacctcatcatcttttggctctagaattacttcttccccagcgaaacgaatcaatccatcttcattttctccaaagtaccctagcttcttcatcgcaatcaagtcctctgctgtcatggtggatcttccaaattcaatgtgactaggtttggccgcgctcagaatgttgttgtcctcttcactctcatcggtactcccgacctcatcctcagtctgttcagcttcg

SEQ ID NO: 178200 - DNA, 377 bp, Zea Mays
gtgttcacatgaaatgataaacatagatagcacatagatacaaagtagtataatttccctttttagacttttcttaaaaagtgggtattacaaatcctacccccttaaaagaaatctcgtccccgagatttgtaagaaaagggatataataggtttggtctagaattttagtttctcatttggttttgggaatcaaggttttgttcaagtttttacataacagttagtagatgatttgaatattgtatgtctagacatttattaggtcagatgaggtacggtgatggcaagtagaggttgtggcaagggtatgataaggaaagacttcatcctgaactctggatcttgattcctctggcgatccaacttgatctttg

SEQ ID NO: 178201 - DNA, 667 bp, Zea Mays
gcaaggccgaagataatgctctgtccgcagacttcggaggtcgggggaagaaaagactgaacagagtttttgatgcgatcggctttatatagcttgattaccactacccactatggggacaggagaaaaagaggaagattgctgcttcggacatcccaattgagcttgcgtcgaagagcaaaaagatgaaggttctgacccactggccgtgttacattgaaccagccgtggtccctgactttggcgcagggtcttcttcagcagtcgaagcaacacagactgctccgattgcacaaagcaccgtagaaccaaatgtaatgccgaagactcatacaattgaaacaatcaaagataaggttgaaaaggctgaagatccgaaagttgaagaaataaaaatgccaaaaattctgagccttctgcggcgacccccaagatgagaaggatggccaatgtgctagatgctgtactggagactacaaaggcgctaagccctgctcctgtgaagaaaattgttcaagctgaagccaaatcacaggccgaagctgaaactgggcaagcagaagccgaagctgctcaatctcaagctgaagccgaagctgggccttcagtgcctattgagacggagcctgtcgtgtctgaagaaaaatcggcataacaaattgctcct

SEQ ID NO: 178202 - DNA, 833 bp, Zea Mays
gctacggccagacggcatgggcgaaccggccgagcgagggagaagggccggtcgccggtgggctcgacgacggtttgccgtcggtggcccggttcttggtccaagggagggtggtttagcacgggcagaggttggctattctaagggtaggctcaattcggccagagggggttgggagagggccgtccacggggaggtggcggagttccgcggcggggatcgccgccggtgggctctgggtgagggactggggctgggaagtggtgcttcgggttcgtggccatgtgagggagctgcttggtccacttaatttctcgctggaccaacgaagagggagagagaggaggggggaggactcaccggagagggggaagacggtggcgctccacgaattgtgctcgggcgagggaaggaggggagtggccgaggccggtgcagggaaggaggtgcccggggcagcctttttataggcgcctgaggggaggggagcgacggagctcggcgggcgccggtgaggtgcacaacgccggcattgatgccgcacagcgctgccgatgagactccacggtggggcagtaccgggcaaggatgttggtcaagcggggaggatggggcggtgccgaactcttcctgtgcggcgaggggacggcgatggaggggacggcggtgaggggacgacagagcgtcgtacgtgaggaagacgacgcggctgaccggtggggccggtctgccagtgagggaaagcgcgcgagcgagaggggctggcgggtggggttggcgtgtcagcgagagggagcgaggggagcgcgcgggcgacttcgcgcgcgagcggg

SEQ ID NO: 178203 - DNA, 1382 bp, Zea Mays
gaacaccggcgcgcggggcgccaaggaggcagtggtgacgtccggcaagcgcgtcgccctcgggaacctcactaacgtcttccgcggcagctgggggtccggcgcggcgaattctgcgtccgatgcggtacggctactcattgcgcgctcgcacgatcggagcgtaaggtttatctgatggatccgttccggtaggttcgtcgctttggttctcgtaggagggggccacgccacgcgtaggaatttgccatgagttgtggtacacccgtacagggaaatgtgttgatcaattcaattgcttcagtttaatttggcgtggcatttctagggtttatgccgctttgcactcttctcgatccatttgatctaataacggcacatgttagttccgcattttctcgatcattttaacaacatttgctgatgtcttttggagatattgattttccttctcttttttatttggctgccttgttcgatgaaatacttctgttccacgggtcttaagacagtatattgtatttcgttgtatcataaggtattttggtaatatattgtatttcgtggtgtcataagagatgttttggtgttttcggaatcgagcaacttgcaatcgcaacttaggtttttcatagtttttggggtgctgggtgtttcagttccagagatactggcgtttcatatgcactgcactgtttcgaatattctgttactaatatattgcttccctcgtgaagtttatatgcttaattgcttatgtagctctctgtttgtcattgtaatcgttcagttgaacaactttaatagacaacgttaatacgttatagtttcctcttactacagaaattgagttctaccaaaccagatgatgttaagaaaggatcctatgcttgcctgcgcaatgtgaacacggaacggggttctagcagaaggctggcctctgaacagtttgatcaggcagtatcacttcttcagaagaacacatctcttccttctgtgccagacgttgtatcaacaggttgcagctcacccggcctgtctcaggattgctcggtctccatggaggatgctatgtcaacatgcaactcaacagaaagctctgatgttgagtacctcaataataatgacgacccctcaatgacatcttcttcgcattggtgggccagtgatagacctcatttctctgatagtatggatgttgcaggtttgtttactaatcaaaatgggggcagttctggttagaattttcgtgcgatgctgggtttacaggacctgtttattcttgcagaattcaactggaggaaacatagtcctaatcattacacctataaggatccacgactttctacaactcttgcctgtgaaatttacgagagcttgcg

SEQ ID NO: 178204 - DNA, 412 bp, Zea Mays
tatgtaactggcacaccagaatgccctccaacagccgatgagtgaaaagcaagaatcaacttatgctgcaaattgggactgttacccacaataactcgattattgtatcgaagaatgccatcctaccaggaataaggtggtagagcctgaggatccaaggccaactttgcaatcatatccaacactgtatggtcattggcatatgaagaagccacttcagtaacccactgtggaatacaggatgacaaagcgcaggaacccgctgagctagctggacgacgcgataacgcatctgctgcaccgttatccacacctttcttgtgaacaatgcgatattgcaaccccaaaagacgagtaaatattttcttttgccagggcgtattcagtctttgttcatccaactgaaccaagc

SEQ ID NO: 178205 - DNA, 787 bp, Zea Mays
gtgacgacggcgacagattaggttagagcagttggggcacgtgggatcgttgtggtggggtctcacaatatggtcacgggtcgcggttgaccgagtggatgcagtcgtaatcagggagcaggacacagtgtaaaccatcgtaaacgtttctgtaactaatcataaaatctattgatatcatgttggtggttcaggtggtggtgcgtctggattagtgggtcgatcgatcgaattaagagcattctctagttagagagagcccagggctctaaatacataaattatatatataggagttctaggcttccaataggtatgggaagccctgacccaatgttatcttctggttgagccataccagctcctggacgtctataaaagcagccctaggtcactatggttcagttttttaacggtgtttacgataactctccaccccgatgcacaagcgacaccctcttaggtgcgcatggtggcggtggctccccgaggcgcgagcgcagcgacggttgcccgagggcgcgcaacagcagtggcccactgaggcgcacgtgacggcgacgttgtccgaggcggaagcggcgacagcgacctcccctaggcgtgagcgacggtggtgagcactagacgcgtgaacgatgatggatcctagaggcacgcacgacggcgattcccatgggcgcgatgaagcaacgaccccttgaggcacgcgcgacggtgacgccatacgaggtgggagcggcaacggtggctcctcagaggccgcacagtggcgacgacctgctcc

SEQ ID NO: 178206 - DNA, 626 bp, Zea Mays
aagcacgaaacatgtttgaggccaccctctctagcgtgcacgaggacatcatacttgtattgtgaagataagcaatcacccactattatagcagcgagctcaccattggctggtaagttgtattgtgcgtcatgacgtgtgttacagcctaacaatcgcaacatcaccttttggtcaccttcttcgtctaaatgttctttagcaaagcgaaatgtcgcgaccagcttgttatgcttatctagcatgttaagtaataaacgggccacctctggatccggacgatcatggacatcagcctcattctcaaacatgcccaacctgttttgcacctcatgttcagtggcatatatgtaaagttgtgcaaactgtggtcacaatccatgactgggtagtagcgagccaatgcgatggtgtacgacaccattgattttgaaaacataaggtgcagtatcgttatttatcgatctatcaatgacggcatctagtgaggtaaacgcgaaaagggaattgtatgagagaatttgcctaaggaaccttctggcacgactatcaccatcgaatcacagtaggtcacataagggtgccggtggacatttgtaaggctccaaaacaatcttacctcctct

SEQ ID NO: 178207 - DNA, 684 bp, Zea Mays
gatagatgacaaatgcaaggatatgatgttaagtgccgcactttgagtggaataataatagacacacgcgcgcgcgcattcttagctgtggccaatgaaatggatcctcaagagcactagctgtagttttatgcccatatgattggcttccaaagtgatcgagagatttgtgtgagaaaatgtgcatgggagtggggacagacaggcagttgagaacgcatgcacatatagttttatgtagagagagtgaataatatggcaagttgcatatatatggtgaaggagcatcatcacaattcacacaacatacataggggagtactgtaccgcgctactagaatcgaaggaaagtgagggagtagtagagacgggtgagcaaaaagccaagaggtagaggaggaccactactactagctcgcatgcacgcagcaggtggtgcagtgctgcaattccctcatgcatggcgcggagcggacgtgtccgcattggttttgtgctggcccatgcgtacgtgtacgatgcagctgccgccatctgtttcgaggggacgggggggggggggggtccgattaaagccagcgttgttggccttgatagatcgaccaagccagagctgcatgcagctttagagaaagagcagttagctagaacaaggagttttacgtacgtgctcaatcatcaaca

SEQ ID NO: 178208 - DNA, 850 bp, Zea Mays
aaccatggtttctcttgccccccacgtccagtacactactagctgaagctcgaccagcagaacctacattctgggcgacaccaatcaacatattttcctcgcctgcatcaacctgttctctgaccggcactcttgctggtattgctctttgcttattactgcaacctgattgttcagctaacgtgtgatgctctcccctatagtggacatccatcacaacaccaagaccaactatgcgttgatttgcaatcatttcagccctacgttccccctcccagctagcagaattattcatctctagtgcagcccctacatcaagcctcatgcgcttgctgctcatcccttgatcaccaccactttgcagcatgctcccttgtgatttgtttgttccagcagcagttacgtgtccatgccctatgtttggcttagctggcacttcttcacccttctttgtgtaattcctagtgacagccatctgatcattctgctttgccacctctgcctgggaaccttctgtagcatttaatatgtcgtactccactgttcccactatgatttttgagcagctcttgctcagtggctcatctcgcccatcaacaatatcaccctcttcttctgattttttgcccatatgcagccctctggcatccgttgggttgtgaggagcccatttcttttgaatctgcgagcgcaactccttggggccttttgatatggcaacagccctgggccgactccccatacttctccctagcctgctccacacttcacctccatgccttcgctctgtctccaaatgtccgcttcgggaattcacgttgtgagaacaaatatcggctttctgcatgag

SEQ ID NO: 178209 - DNA, 1119 bp, Zea Mays
agaattcttgcaccagatccctagtaccaatgtgctccgcaataactcgcctagtgcaatttggcatggactatccggtttcatgttgcactgcggcctagtaccaatgtgccgaaggcttcttttctaatgggctttgaaccagcttctcctttttctcatcaactttgacataaaaccattcagtcttccagccagctggccatttggtacgatagctgataactggagacttcacatctttgcgataagaaaaattgtagcagccgaagttctcgtgcagcccgtcttctctagcttttgtctgataatgaagctcatgtgcccggcagaagccttcggtaagcggttctagtgtggagggacgtataaggtcgggcgacaaccatcggaacaaccaacgctgcgaaggccacttcgaccccaatagggaccgaagcctgagcctgccaccaccggggcctcaagcctttagctgatgcatcctttgaccattggtgtcgcagcaatacatggcacccaccaatatcacaaaatatttgggagaatcaaacccaacctttggctaggagactacatgacatcctccactattacccgttggcaaagacgcaattaacctagttggcccaattatagtcgcacgacgaccatgtgagcctcaaaattatctcgccttacttaacttgggtggaggaagccactataaaagggagagctacccttccatcattggactagtcttttagggcgattgggtctttccatgagttcggtgtgcttaatgaaatgttgggctctgggcaatcctaatttgttgggcctcggccaaccccacctaggctggatgtatcaactatcgactagtgtgtcatgtgcgaggagcagaccacatcgacttcataatccacaacctccacctgtatttgcaagattcaacacttgaggttgggttgcatccaaaactaggccgaccttgaggaaatcttcgtcagaaattcccaaggcacgtacgttcgccctggctacccatgggacctcaagaatcaccgtcaaaaagcatgatgagacattaagggactacatccggtgtttctcgcgacaatgcaacaagctgac

SEQ ID NO: 178210 - DNA, 595 bp, Zea Mays
aagggtgcagccggaataataggtgtgcacaatcgaagtcgctcccaaaagactctccgtgcagaagtggcctatgggcgcagctgtatcaagcgaaggcgcgcagccttatcatacaaattatggttacatacacacagcgagggcatcacatattacattggctcaaccttcggggtgatgcccatctccctgtagttgaacaacattatccttaattcctcaccctcaaaaagattttgcagctccccttcacccacactagccccagccggcgaggacaacaattcccgcttaccagtcccgtccacgcgaagacggccactctccatctcaccacaatgacgcctgttacttcgcgacaattcactcactctccgtttcgccaccgcccttcgccgcctacacccagtactcgcacccggaagatcctcagcacccaccacacgcggcgaagtctccgccgcagccacgtccaatgccgcaaaataatctaagtcatcatctaaagactcctccgtccacacaatcgaactcccagaatcattagactcaaaacacttagacacagagccaaacgaatcgtcatcagcag

SEQ ID NO: 178211 - DNA, 909 bp, Zea Mays
ccgccgccgggctctgcgggatgccaaccagcttcgcctacctctataaacctggtcatcgttgcagggaaaagcctttgcagccaccgctcctacctagtaatcccggcgcactgtggaggaaaagcaaaccacaggttgctgcggcgcttgcagttgcaggaggggggaagtggggcgaggttcaccatcgcactccgagggagtgtaccatgcgggcagggccaagaggcaggactcggcgattttctgtatcgcacagaggcgatttcggtttgggcatcaccgcgcgccattgaaccacacgcttcaccagcgacatcgttggtcgtgttcacttcaccagcggtgagactccttttcacgctccgttttattcgtttctatggttgtgcgcggggcgacgatctgtgcaatgtcggagagaggggctggccgctgcgggtggtgcacagcctgggaggcttgaggttgaagaaggacggtggatcattgatctcatcttcaacagtcacgattagatggatagttgagagtgtgggagccatagatattagatggacggcttaaatcgaatcctggtgtaccccttcgagtcattaaatcagggccttgaattccagatccgacggctagggttgaacgcggatgtgtaactcgcctggatctaatctggcgcgtccgtttcggatcaggcggccaggacttcgcgataccccttcgcgactgcagttttgtaaaagaacccctctattattatgtaatcaacccgcgctccatcctggtggctggctgagtctgttggaatttagcgagaaaacccctgcgcttccctgtatttgaggcccagtcctgatagttgataaaaccaggaaaactattttgaaaatagtttttagtacaaattta

SEQ ID NO: 178212 - DNA, 351 bp, Zea Mays
gtataggtcggcctgaggagcgaggaaggcaaaccacaacacagggggcgtgcaaccgccccagggatatgtgccccttcactttcgaaacaaccagtggtcaggaagacaaaccgccacacaaggagcgtgcaaccgcctcgcggttaggcgccccctcttttttcgccaaaaccgatggtcaagaaggcgaaccgtcacgcgggaagcgagcagtcgccccacggttgtgcgctccctcagcttcgctacaatcaacggtccaacatgcggatccaggcccacacgtcatgcaactggcgcgatcggctactaggtgcgaaagaaccacaccgccgcttgcgccaatga

SEQ ID NO: 178213 - DNA, 450 bp, Zea Mays
aacaaggcggactactgtcgcgttcacggcttcgacatcttctacagcaccgtgttgctcgatgctgagctgtcggggttctggtccaagctgccgttgctacggacgctgatgctcgtgcacccggagacggagctcctatggtgggtggactccgacgtgatttttatcgacatgctcttcgagccgccgtgggacaagtacgctggccacaacctcgtgttccctggctcggaggagaaggtgtaaaccgtcaagagctagattggcatcaacgccggcagcttcatcatgcgcaactgccagtggtcgctcgacctgctctgtaaggggtagactgccaccccgttctgccctccctcgtccgttattgttccgcccgcatcaaaaaaaattcctaccatctcagggatcgaaccctagatgtcttgagtagaatgcctaggcttc

SEQ ID NO: 178214 - DNA, 468 bp, Zea Mays
gggttgcaaatacatctctataccgtttctccatcaacaagtgagtggcaaataaatgtaagtcgctgccttcatctgatccatcttcaattacttgttgcaactgagcagcaacctctacatgaactgggtcggtcttagcagaggttatggacttgttagtgttcatggaacgcgactcaaaagcctccacaaggcgtttcatgtattcatccttcgtatcttttttcttcttaggtttaggagaatcatgcagcaccttacgcttccctgtcgcatttgagcaggtgtcaggtgtgctgttttcacccccacctaaagtggcttgcacgtggtcatcagatgaagaatttgcatcctcaactccaggaacaagggttgtttcactggtgcagacaatgggtccaaacataaccttaagctcgtcctcattctcaaggggggctgttttgaacataatacaccctg

SEQ ID NO: 178215 - DNA, 273 bp, Zea Mays
tgcttcgccattaacacgctcgccagctcggtttggcgccttgcgccaccgcgcactgtgcccgagctgtcccttcaccccgcctgcccgagccatcccgtcgccaccactgtgtgccatcatcgctgtcgtggcaagctcgccggtgctcgccacctcgcctcccttcaccgccccgggcgcctataaaaaggatcgcccgagctcccttcttcctcacaccggccttggccactccctctcccctcctttgagccgaatcgagctccgcgc

SEQ ID NO: 178216 - DNA, 444 bp, Zea Mays
tggtattcgacacatggagtttcctggccacgacgtgaggcggcacacggcggaagaattccccgttgagcaattcctgcgactccgacgacccccccgggtttggcagagcccttgctgaagtctcgtaggtcctggtaatccaatatgcgtcacccaatacgcaccataatcggaacagaggttggtgggatctggaggggataaatccgacagcttgggcccacgagtcagtgaaacttggcgtggagggccaaggcggtgtgggacagacatcccgggcccgcttggcggtgaccgttagtggtagtcatatagcgagggagtgaggatgggccgcggagtgagtttggcccacagcgcgccgaggacagttgggccaggacgcaataaatgtgcccaaacgcagatccacccacttttctttttttctctcttttttta

SEQ ID NO: 178217 - DNA, 299 bp, Zea Mays
gtccgccatcacataaagatcatctgattcctctgtgggggacatgatagaggaattcagagatctcgataaactaggacaggggtttacatcggctgatcctttggaggagatcgacataggaaatggtaaaactccaaggtcgacttttgtaaacaagaccctagagaccgatcctagaaatgaaatgatcggtctattgaaggaatattcggattgctttgcttggaattacactgagatgccgggattaagccgagagatcgtagagcatcgactgcccattaagtccggtttca

SEQ ID NO: 178218 - DNA, 695 bp, Zea Mays
tgcttaccacgtcactgtaaatgtggccgacggtgaaacacatcccagagccctttgtttactcgcgcgccacgacacatgaacaccagagagttatcaggtcgtctagtgaactcgacctcggccaaattcacggaactagaagtcgacttctttaaattgagtgtcatgccagcttagcccatccatcgcgaacccagtccaccgcgcactactctgtttcgtccatcagagcgtgagttcacaggagttccctgaaatcggtcgtcagcgccaccgtgataccctccgccgtggccagagctgttcaggtcagttcatgctcctctggtccatgttttagcatcttctggtgctagtgaagctcattgagcttcccgattgaactctaccatagtagatcagccagaatagatcatcgtcattactgaacaccgccggaaccagccttcacgtcgactagctcttctgcgcttcctccgttcaacttcgcgcgagtactgcaactctggtgagccaatgctgcttttcaagtcggtgaattaaacgctaccgcatggagccgctaggaacaagctcgccggagctttagctccgccgttgtcgtgaacaaacatggattttgggcagaccagtcaaattagcttcggtattatgcttgggattgtctctggaatggtgttcgggtacccgct

SEQ ID NO: 178219 - DNA, 314 bp, Zea Mays
atttggaaaggtgagcttcatctaatatcttctttctgagctccgggtccttgggaacaaccaatcgatctccaaaccataaaattcctttgttgtcctgccggaagcacttgtaattttcggccttttgcttgatcatgtccttgataacctgaacacccttatcctcaatctgtgccctgactatctgctcttgcaatgtgggctctaccgagatataacttaagtcacccgaagaaacaacttccaggttcaacttgcacaattcatcgcacagggtggtaactcttgcatccatactcatacaattgcac

SEQ ID NO: 178220 - DNA, 1055 bp, Zea Mays
attccatccagcgagcttgattgttgctttgcctttgcgctttgcttgtttactcctactacaatagcctctcgccgccgctggctctgctacccgcgttcttcgctgcatctggttcttctcggactccgccgctccccccgcagacgcaagaaactgctggccatggagcccccatccgcccaggcgatgtccgcgactgacgacttccaggacaaggccgtcgacgagtggtaaggggactcgactgctccctccaaaccccgatccttctcgtttccgctttctcctttacgagttatatatgaccgacggcggtccgccgtttgtttggttgcagttgctcttgctgctacgattgctgctccagcatcctggacttcctgtgctgctcgtcctgatcgatcgatgcctgccctttcgacggccccgtggaatttctcagggaaccggaggccttaccgtggcccactgatcttggattctagatgccgtgggattcgtgtgttctttaggtccttcggtgacgatgtttgtaatccggattcgaatcatcggtaacagtaaaggaaacttgatagactgctgaacagccgagttatcttcaaccctgcggtgtgtttcctctgataaagcttttctgcgcgtttgcagatcgattcgctgtttggaattcttatgggtgacgtgcggtcgcacttgacgcacgcttcattgcagattttatttacaggagttcttttttttttccgcaaaccatttggttctgcgtttcttgtgcactgaacactgagaagtgagaagtcctcattgcactagcaagttagcaaagttacgtgacctacttgctgatatcatcgagacctcggtagaagtagcaaaagcgggcacagattaatacaaaagaataggcctatatacatcctgcgttttggtgtttggctgtttgctatcatgatggatcgtgatattggaaagctgaattggaccaccatagactagcctcttctccgtccgcgttttccgcttgctgtggtggactgacctataacgac

SEQ ID NO: 178221 - DNA, 1467 bp, Zea Mays
agtagcctcgcgctcagactgattagtccacaagaccttaacatacttaattgatctcttcctcataacacgctccaaggactccaagatacgcaccggacgacactccagagtcagatcctgctgcacagcaattggttccatcttgatctgatggtccggatcccgcaagaacttcctcaacatagagacatgaaataccgggtgtacccctgccatggaatccggcaattgcaagcgataagccaagctgcccacccgggccaagatagtgaacggtccaatgtatctcgggctaagcttcccggagacaccgaaccgaacaactcctttaataggtgataccctgagaaggacttggtcaccccactgcaaattccaaagtctcgcctcctcacatcagcataactcttctgacggctctgagcggccaaaatattctgacgaatttcctgaaccttctcagaagtctgctgaacccaatcaggaccaaccagagatctctcccccaaggtctcccagcacagaggggagatacaccgcctgccatataaggcctcaaatggtgccatcttgatgctagcctggtagctgttgttataagcgaactcggccaacgcgagatgatcctcccagctacccttccaagctagaacacaagcacgcaacatatcttccaaggtttggatagttcgctctgactggccatcagtctgagggtgaaaagcgacactaagcgagagcttggtacccaatgcactgtgaagactctcccagaattttgatacaaatttggagtctcgatcagaaacaatggacttaggcaccccgtgaagcctgattacttccttcatatacaagggaaccaactctgaagttgaatttgtggtcttcatgggaataaagtgcgcagacttggtcaagcgatccactaacacccatatagcatccctgctcaaggagaacgaggtaagcccaccacaaaatccatggtgatatgctcccacttccactctggaatttccaatggcttcagcaaacctacaggcctcttatgctcggccttcacgcgctgacatacttcacaggcagccacatacttagaaacgtcaaccttcatccgcttccaccaaaagttttgcttcaaatctctgtacattttggtttcgccagggtgaacggtgtaaggcattttatgagcttctctcaagatatccatcttcacctctgatttctgaggcacacaaaggcggcccctgaaacgaaccaaatcattctcatcaatggtgaacaaccggggtctaccatcgccaaccctctttcgagcttcctgcaacaaacgatcctgctgctgagccgcacgcaccctctccatgagggaggattgaataagcatccgagtctcctcactagcggtgccgacatagcacaaagcgatccccaaacggtccagatctgcgatcaaag

SEQ ID NO: 178222 - DNA, 657 bp, Zea Mays
ccaattgcttggactgcttgagtttgcatcatgaacatctgctcaactgtcattgtgggtggtggtggcaactgctcctgctgagctgcctccttctggggtgcctgctgtttcggctgagcatgccttgcacctatgcgcctattctcagacatctgtagaaagcacacacacatcagatctgactctgtagtctttgagcatgagaaaagatatatggaaatcttcatagcactgaacaattgatcatcttcactaacagcttctcagataaataggaaagtggaaataaagggattacccaactaaataactgacattattaataactacaccaagttgcaggggatacccacaccttgatgacaatcatttcaaatatccaacttcattacatgttcatcacgacaagcatccaacttatgataagcaaactaactctaactaagtctgactagactaagacactgaattaagcattattacagactccgactccgtcgatccatggatccaaatctatctgggtcctgcagtctggggtaccgtaattgaagtgaccatggggcggcgaacggtaagggtgctgaatcccgataggggcgggagaaccaccatccagatagtggcgtgctacacactcagcacacaattccg

SEQ ID NO: 178223 - DNA, 579 bp, Zea Mays
atcccttgagacggttttgaaagtggttttactgatgtgttatttttagaaatctatattatggggggtggatatccttgggtggccataactcgactatgatccgtgggtcgctcgagagaccttgttgggtcgggtggctaggcatcacaagttataagtcggatacgaccagacataggcggaaccgtggttacatgggcgtcaaggcgcgtggaccgaatcttgtgcatacatagggcacgatgtgctcctaaggactcgtcgacttccacatgggacgaagttggtttgggttggcaacggatgtgggacgtggtgcgtgggacttagctctcccatctgcataaggcagaagaaccacccctaagaaaaagataaggcatctcagtaggcatagtcatcttctacctccataactctctgtaattataaccaccaagcaaaacaacctcgcaaacacatagggtgttgggtcgtagtgcgagctgcaccggcacacgcccagactcaaggaccatgattcatccgcgtgccaagccagactgttgttgcgtcggtcggacacagattcgcatc

SEQ ID NO: 178224 - DNA, 376 bp, Zea Mays
tgaggaaggttccggaggaggctgtggaggtcgacggagatcgtccccacgatccaggcgagcacgatgctgtcgaggcgcacccacgccggtggggtcgcagagtacgtggtcgtccagggcgtagcggcgaagggtgagaaggagcaggtcccaccagcgagcgtaggacggcgactcgggctccagaacgacgggaaccatcaggcgaatgttctggacactcccagcctgaaggtggagctgagccacgagtgggtcggccgggtcgtgccagggcaccgtggtggtggaggtggtgcggtgcccggctccgacgaccggcgcggccaggacgccgtacaccacgcccgaggtatcagaggaggtggccccg

SEQ ID NO: 178225 - DNA, 1235 bp, Zea Mays
caaacttgtagacataataaaggagaacaactttgcttaagagtgtaagcatagttgttaagaagaaactggagataattaagtctaaagtctggctgtcaggctgatacagtctgaatctcagactaatagtgactttgatccaagtttgagagccatttcgactaagatccagtgagaatctacctagggttgctataacaaagttatagagctactatagagaaacaactttgctgtagaacttggtatgagttgccataaagatatgggagaaaatccagcccaaagattgactgtcaggtgcactgaaggagtatcccatggtacagtaaccgcctggatcagtttcagtgatcctcaccgccgacgaccgattcttcgccgtgattcgtgtcaccggcaactggattcgtgcctggagttgatggatagcgtcgcagggtaaaagatcatcgccgccggtgagctggaagccactccagctagccgcggtacctctccccttgctcaccgccctcggataaggattctcaccgccgttaagccgtcgtcgttgtccgccgcgtgtctctagcctgtctaccgcatcaccgtgactcactcttgctccccgttgatcgccggagcaattgccacggcgcaggacaccaatccactacgctagtgctcttctctttctccggccgccagcattgctcgaccgaattacgcgccaccgcttaagccctctattaattgaaggccggggcagctgcgctacatcatcacgaaactagagcccccaatcccaccctcaatcgttcaccaaagctcacgaattttgggttctccccaaatcggtttccgccaccgcaaagagcacctcaccgcgtccagcacgatccaggtcagtccatgtcttctgcttccccgtttaagtattctcatgtgtctacgatgctcgccgacccacataattgagctagaccaccgccaatcgccgggaacgcatgattctttggttcatccgcacggttaccgtggccagagcgaattaggtcaccatttctgaaattaagttaggggaaacactcggggaaggttcaattcagtgatagccgctcgggagcactggtcattgtgtaaatccaccggcacaacctcaccggagttcatcctccgcgctgccgttgtcgtggacctcgtgcggtgaaggattagaacgtgggggtcttttctgtaaaccatcagtg

SEQ ID NO: 178226 - DNA, 643 bp, Zea Mays
attgtcggttttaagaaaagcccagcatcatcaacatatatactagtactaaccacttgcatgacaaattttgtagaaggacaactaatatcacttcccgacacctcatcgttccgacaaccttcggttctcaagaagtgaatcttgcattcttgtatcaccgatccgacaacccccgacgcctcactggtctgatactgcctcctcagcttgccttttattctttcattcttgccttgctgatttttgttctcttttgtgcgcgtcatttcctatatattaaagcaggtgcaaaacggcaacgacgagcctatccacgttgtcaaaaaaacacatcgtccgatcggcaatcatcgcttgatctctcctgtctcgctctacccttccctccgtctcaggatacttcaccctgtctctggatcaatgttcaaaaaagcgtgcttaagcgccggcctaatcgtgattaggcgctaagcgatgccttagcgcggcgcttatgccataggtgttgttttccgcagtgggcgcgcgtaggcgacgcttaatttgcgctctacgcgctaaaacggaaaaacgtgcgtggaagcgggattgggcgcatggaaaagcgcataaaagtttaaaaggcacgcgggaggtggga

SEQ ID NO: 178227 - DNA, 396 bp, Zea Mays
taaacccaatgaggccacccatccgactgcgggtctgaaccatagggcacactattggccgctccgtgcgtgccaatccacgccagcgccacggccggacaccgcagtgtcacgcacatgctcgtgcctataaagaccaccctgtcgtcggtctgttattcccacaagccccttaccaattggcaagtgcgctctcgctagagtttcgccttaaccgggcgtgccaccacctaccattgccacccaagccgagaccactatggcccggccatcgcagccacccctcacccgagcaaacaccactgtcagcttccttgagttgcggtgatgctccacgacctgctccctcactctctgcgccccagcagcagcgtgacattgctcgccggacttcac

SEQ ID NO: 178228 - DNA, 756 bp, Zea Mays
ggctggcgggtggggctaggctggcagcggcggaggggagcgcgggcgcgcgggcgatgggccgcttggggcgcgagggagaaagggaggcgcgggcgcgtgggagagagaggggggtttgggccagaaacggcccagccgatgggggagtgttttccttttcctttttctaatttctatttcctatttctatttcttttatctctttttcttttgaacaaataattagctaaataatcttaggtgctagaaaaaatattctatgtgaggttcttctaacaatcatagtgtatgcaaatgatgagatgtcctatgaggtggagtctagggagcaattaggggggtttaggagattagggttccaaaccttgggttaaattttgggatgttacatgtgagtatatcctccttgagcttttttgaatggcccaatcatatctagcccccagcatgcaaagggccaggttacaggaatagtttgcaaatgttgggtgggcaagtgttgctgctttgataggaactggcatgcttcgcatttctgaaccaactctgccgcatctttctttgttaaaggccagtagaactcggacctgaaactttcactaccaatatccttgatgccgcatgtacaccacattgccctacatggatttcatccagtagctgtcttcctgtagccaaatgaacgcacttcatgaggactcctcctgcacctcttctatacagcagaccccctatgatggtatagtgggtcaa

SEQ ID NO: 178229 - DNA, 753 bp, Zea Mays
ggaagctgtacaccgccgtcgcgtccccgatttcggccctgtgagtctctccgtgcgtcggggattgaaccggggagttccctgctgtggattggcggccggagcccttgaatttcgtcgtcgtggtgcgaactccgccgcgtgtccgccaaactcagtggggcggttcgtccaatgcctgaatcaaggtaagaaaccctcatctagttcgtcttgttggttacatcgtgtagctccgttcaatttgacagaggtcggggaggtagcaggatcggtctgcgccggcgtgatgctcaccgccgtggagatcggagtgccgctagctatgcgctattggtagaagaaaaccctcgtccgctgatctaaccaccaatggctaggattaggtcaagctgtatccctctgcgcgatgcatcgtgaccatagatctagtgatgaccggctctgggtgcatacagttccatgtgggatctagcccgttggatcaagatcgagtgtgcgggtttccatctcaatattttaaatcccgagcgttgttatttgatcgggtggctggggtggcgtaccggttgggggccaacctgatctaatctgagctcttggatttgaatccgacggcccagcaatactcataccccttcgccatggcagaattacgtatgaaacccctcggaagagagaattcaacccgccgtcctagcgctgagtactctatgtcttaggaggttttgcaccaaagcccctgcactcctc

SEQ ID NO: 178230 - DNA, 1102 bp, Zea Mays
taagagactttcccaatgcgacttgttacctggtatggcccaaagaagcgaggacccaatttcgacggagcagccgcggtgacacccactgctgtccgctgttgtaaacggagccatacccagtctccttcttggaattcgacctctcgtcgtgactgatcctgatatgtcttcatcacaatttgtgcttgtaccagccttgccttgatttcagtcagaaattcatccctttcctggagctgctgatctaccgctgccacctttgcgacacctggatggtaagctaataatgctggcggctctcggccataaactacccgaaagggggaacatttgagggcggtgtggtacgaagtgttgtaacaaaattctgcccatggtaaccactgtaaccaagttcttggacggtcgcctgctaggcagcgaagatacatgataatgatccgattgaccacttccgcctggcatcagattgagggtgaaaggcagaactcatgtgtagcttgacccctgctaagcgaaacaactcggtccaaaaagcactagtgaaaaccgtgtcccgatcactgacaatggaacaaggaaaaccatgaagccggtcaatgccatcaaagaaggccttggcgactgaggctgctgtgtatgggtggcctaatggaatgaaatgcgccattttggaaaatcggtccaccactgtgagaattactgatttaccgcccaccttggaaaaaccttccacaaaatccatggagatatcactccaaatgcctgttggaattggtaatggttgcagcagcccgacagggtgcaagtggactgacttgttgcgttgacatactgagcagcccttcacatattctctgattcgttggagggcatgagcattataaaatgtagcccgccaacggtgcaccgtcttctctacaccttcatgcgccccatcatgggcatcggccaagaggagtggccacatagatgatgcatctggtacgaagatcttgcctttaaatagcagcaacccatctacttcagtccattcctctttggctgttcctactgccagctgagcacggatagcctgcacttgggaattagtggccgc

SEQ ID NO: 178231 - DNA, 746 bp, Zea Mays
tgtgactcgacctcagcccaccacccatgaagattggggcatcgtacttgtgcagccgctgccagagcatgaggttaactttcacatttttgatgacattatacatgagtacctagtgggggttcgacatattcaggtcaggagcattcagcgctcccatttgggtcaggcccttgtgcagttcagatttgctttcgatagagacaatctagtggcaatgggtccacagcaagcccttggtttttcttttactgttattaggcataatgaggcctagaatcagcgtgccctgaatttcaaccatgagtgttggctcctcctccttagtttcccattggatttctggactcatgagcatattcaaaatgcggtcgagtcatttggtagggtgctcatgtgggaccctgacccatataatgtgaccaggttgcttgttcgggccagagtgacgtctctccaagaagttccccaattcattgttttttcgtttgttgaaggttttcagggagtttcctagacagtttagtgtgacattgttcagcagtttatgcttggagcccaacctgaagatgaagatcctgtgccaccttacccacatgatggccatcagcttccagtgaagttctttgggatgggtcagcttgtggtcaactttcagtttgatctgaatattccccctcccatgggagggatcaatgaggaagaaaacattgccaataatgaggatgatggttgggatgcctggc

SEQ ID NO: 178232 - DNA, 512 bp, Zea Mays
cagccgtgtgctttctttatttccatataaacactgcacagttgacgtgctgacaagagacgatagtaaacacaccagaataagagaaggaggtggtggccgatcgaacatcatcagctgcttcccggcagtgacagtgagtcattgtcactcacaccggcaaattaagctaacaacgggccgttctggtcatttccgtccatgtacctgcagcagcaaacagcgatagccaaacttcgctcacgtacagcaggccacgagacacgagaggcgcgaatttccagagccagagctagttcgatctacaggggtgcaaagaagaagtagtcgacgacagcgttaggccgcggcgcctcccactcccgcggcgcgcgggaaccggcgctccacgtgcacgagcgcaacgagggacacgccgagaagccacaggaccaaggcgaggatgagcgcgtacgcgtgcgcggcgccggaattgccgggacgattgtcgtcgttcttcgggccggcggcgg

SEQ ID NO: 178233 - DNA, 2716 bp, Zea Mays
tggcacgagcttttagatattgaaggtccatgtaattagtttgcaggtcttcatagaccttttcaacaatacatgcagttttgtcaccttgaggcattagaagaaattcttcgggtatttgtatccatgttggctcatcttcgccttctcgtgatgtagcatgtatctttccttctccaatgtcgagcatccatttgctaaactgagacaattcttctcgatcttcttgagacaatgatgttgacgaaagcctcatattatgggtaagacgtaggatatggacatgagaccaaagagaagagttgattattgctgaacttacaatctgtgaacgattacccccttcaattactggcaaaatttgtcgtaaatctcctccaagaacaacaacctttccaccaaagggtaaattggtagccataggagatgaagatgataagatatcccgtaaagatctgtctaatgcttcaaatgcaaatttatgtgtcatcaaagcttcatcccatattattaaagatgtagtttgaattagttcacacaacattgtgccacgtttgatgtcacatactgttccttcacatggtattttgaaacgagaatgcgctgttcggccacctggtaggagtaaagaagccacacctgaagaagcgacagataacactatgtgtttgcggctgcgtaagaatgttatgatggagttccatagatatgttttgcctgtaccaccgtaaccagagacaaagtagaagcctggtctttttgttagaacagtttctgtaatagttttgaaagcatgtagctgatcattgtttagccttgagataagcatttctgattcggattgcatagcattaatatcatatgtaagttcatcatcaataaggcgaattgtaggcacttgaaaagacgaatttgttctacatggtaagttgaaatcctgaattcgacttcctcttttgctaaataaagtttcaagttcctctatgagctgatttttaagtgtttcatcaggcatctggtactctgggtgattaagcgtttgtctagtgttatattgaatatcatcagctaataatctccaaactttctcaaagaaagacaattcatcacccacttcacagaaaagaagcatcgtgacaaagagttggtgaagctgatttgatgtggcccaagacgcagcctcatcgaaggcgttgtaccattcttggtcatcttctaggagtccatgtgctctacaagcttctttgaatgttggatgtaaaatatgatcgtatgttcgtaatgattcatagctctgagctccttttacaaccattagaagcattctgacataatatctttctcctgcagatggatgcacaaaatgtatgcggcctattttaccatggcgttgcctgtgctcccataatcttttcttttcatcccatctccactcggatgggaagtcagggtaagttagggatctagcgttctcatgtctttgattagcaacaaaccactcagttagcatggttcgacgtaagaattcttgtgataggatttgcgacatgttggcattagcatggtatgtaatgtaattttcattaggtaagtgaaccggcaatctctccacgggaggaaaatgccgatggatttcaaaaccaaaaatcctccaacatgaatcatatggacatataaatctagcatctaaatattccttgacctcattccttgtatttgtctcctcatcaataggagtgtcctgaccatctataatctgtttcaaatacaacttgctgcgatctggaccctttgtaacatatttgaaaaggtacttaatgaatatgcttttgttacaccattctacattgatgtgggcctgatattttttgagtaatgtcatgttgtagggaacaacccatctattgtctagcttaatgttagatttcatgacgaatctatcattatttgatcgtttgtaaactgcaaatccattcatatcaactacagtttcaatgttaaagagcttaggatagtgcttggagcattgatttcttttcatgcaaggcgaattttgattgtaatatccacatggtccatggaccatatgttctgcaagcaaggcatatcctaatggatcagtagccggatctggtatctcagcagttatgtaagagtctataaggttagcacttggctgtgaggtatcagttgacacccagaaaatgatatgtgcatgaggtaatccacgtttctggaattctactgtatataggactgcatcgtgtaaaaaaagagatgaaagtattaggaaagcgcatgaggtattctatgtttctggaattgtactgtatataggactgcatcacgtaaaaaaagagataaaatggttagaaaaacctatagtagttaagttttgacatttgttgtagtaatggtattaacagactcatcactattatgtatggattcgtgttactgataggtctaataagaaaagaacaaactaaacaaagaagcctgtatagtgcaactcatcatgttgacagccatgaaaaatattattcatgcaaatggcaaatggagcaaagagacaaggagcacaaaactttcgataaataagtttgattatgtataatattgcaagggtattagtaggcatggcaatattgtttataggattgcattgtacggaaggttgtatacggggaaagcacgaaaatagtaggaaaactct

SEQ ID NO: 178234 - DNA, 310 bp, Zea Mays
ctaaccacaagtttcagggtgacgacgtactacgaaaagctaaaagaatggtaagtttgatctagctatgtcgatcagcaaatagtacgattgcttatgaatgttttttgtttatacaggaagctacgagtggccaaaagcctagtgacattaaggtctaccaggagggccacaaaggaccagaccctaacaaccctgaccagctctgtagctagacagccacagatcggctggtgagttttggcccaaaagtacaaacgttcaaagtatagaaattcctgcatttgtaaggttgtgaatgatgtatagg

SEQ ID NO: 178235 - DNA, 912 bp, Zea Mays
attaaagccaaaggaataagctgacaaatgttttttgtgtagcacttctaccgtcgctgtcccatgaagatcatggggaataatgtacaaggtctggtactaacacacatggtggatggggtgaaccgagaatgacaacctatctgtcgacggacatggtggatggccgcactgacctggaattgatgcgccaaacaattcgtttttttagaaagttcatatggtaaactattggagggggtaaattaaggttggtgcttattttgttaacttgtctctggtttagcaagtaaattatacatcagagtcctggagattctctaattactaaaaactactggagaggaagataaaaatagaaccctctatttattttgttcatcgatcacttggcataatcatgcattgacttcccaaatgatttttaaggagggtcttggagacgttctgagtgtatgcacatatagagatagattcagtggaatttagctttaaactgctacgtggtgcttgcaaaaaaacaaaagaaaacaaaaatggcatgtcctggagctcgggtacatgaacttttacattcttctttgaaaaaacaaacacaacgtgaataagtgtctgatgtgaaactagacgtactctaatacatgcaggattgtacgtaggacgtggtagaagtttggtcaataatatgctactaccaacgagcagcagcaacccagattaaaggaaatacatatacgtgggtggtgcttgttcatcactttagtaaaaagggtattttcgacagttaaagccatcagacataagttattttcgacagacggtcgtaggcttatgatcgacggtacccatccctctgtcgtaaagggtcaaaaatactcttatttccgaccgtggccgttggacataagctat

SEQ ID NO: 178236 - DNA, 446 bp, Zea Mays
tgctttggttgattttgtcgtgcctcagcttcggcaatttccttctgtttctggattgttacctggcaggtccttgttgtatgtcccttgtcttctccatagaaaagacagaacatttttcttggttgggagttgaatcttcctccaaaactcctggattgttacctggcaggtccttgttgtatgtcccttgtcttctccacagaaaagacagaacatttttcttggttgggagttgaatcttcctccaaaactccttcctcctcttccacctcttggggccggtggtctgaagctgttttgtggttgttgttgttgggttcttgtagactgcgattggctttgttggctctgttgtccctgagtgtgattgtttttgtcttcgttctgatttggattgtgtatggttctgacatgtcttgggttgaaccttccaccgaagcccc

SEQ ID NO: 178237 - DNA, 589 bp, Zea Mays
gtaggcacgagcacagcccacgtaagacgcggcacggcgccggcccgttaaccacatccgcagatatactcgtatagggtgcggctcgtaccgtcgcgtcggcgtcgcgtaaccctagcatccatttttcctctctcagcctctccgtctcctgtgggcgcgtggcggcgataggtgactcagctccggtgtcctcgcctccggtgtcgacggagcggtgaactctggtgtcctcgcctcctgctcctctcctctcttgctccatcctctctgtgaactctctacatctctccctcgaccctcgctaaccctaaccctaaaactcgatcttcgccaagctcgctcctctgcctctgccgtcagccatccggtttgtggatccggtgctccggtgttgcaggtaaggttttcttggtcttgctctcgtctctctcttaatcctagtcctagtcttcttgttcttgatcttgttgcttcgattcgtctaggtgtgcaccgtgtgtgtgtgcgccacacgccgtgaggagccagagaagccgaccgaggcggtggccatgtccacggcctcggccgacgacgagctcagtct

SEQ ID NO: 178238 - DNA, 399 bp, Zea Mays
aggaacggataacgccggggatggataactcgtacgtggcgccatctcccgagtccagccgaagttcttcaccggcggccaccgtgaccagtaaattttgccgcggtggcactcatgccgtgatctccctcactgtgtctcctaccgacgtggtcgacatgcgctcgcgatgcaatccgtggccatcaggtgatcgctggaccgccgcggctataaatagccctatgattccctgcgaggcacgaccatcacacacaccgtgggttgaatcgaagccaaattcgtgatgtctctgccccctcctctcaaattggttgtgcacagtaaaactagaacctcttgcggtcgtgtagccccaagctccgtcctcaattccacccgagcacgccgcgacgccat

SEQ ID NO: 178239 - DNA, 662 bp, Zea Mays
cccccgtgtacggtctcttccctgcactaaatcctacctttttgatgtgagttccaagcaaggatacggtcggagtagagagatatgggggtgagaagtcggctctgtcagagttgtccacaccgagacaaaagccatgccaagtcgtgtcaaatggcttagggttgggttcaaacttttccatggtgttctaggggtctttgggcgccattttgtcaattgggccataaggttttgaggttgggatcaaagtgaacatgtttgatctttgaaagagggtcgattttgaacttgagaaaaacctgaattttcttttatgcctttctctttggtgacctttttggggttcttctgaatcctttttggggtcaccctctttctatgttttgtagggtattaagtgtactacaacttctataattagtccaagtcatgacaatgtgatttacatagactttttgccataatcccctctagggctccatttgcctataagggatttgaattagggtttgggtcattcccttctcttttgtgcatgataaggctaaggcatgacttctaagatgggttacacctacttaggatcttgatccccaagtttggtgtcttttgctcagactaaaccacatgtgatgatgggttcaatagtgtagtcctga

SEQ ID NO: 178240 - DNA, 1058 bp, Zea Mays
gaaaaagagaaagagaccttacctgggctgcagaactcatttcggcccacctaaggaaacacactgcgcggcccagttgtttgctaccacgcgcgcgtccaccctgacgggcggggcccactgctcaaccatacacctccgcgctgtgccttctccgctgccgctgcccaccgggacccttatgttaggtgccttcttccctatccgtgcatggcgctcgcaacagactgcgccaatcgcgcggtcgccaaccaaacccagctaggattgttgaagcggtcactccttgggccataagaaccgtgcgccaagatctaatttcacattcccccgccataccacaacaaccgagttccagagaactagagagcatccgcggaagtcatctgctcgccgttgcggtcgaatccttagggcagagggcattggggctcggctgggtgcttgggactttcgttgaagcacagcgggcgtctctacgaggaatctggtgctcttgggaagccaaatctcgcaaattgctcgccagaatcacttggtccgccaccgggccgcttcgctgtgaccagaccgtccacgtcctccaccaacggtaaacaacccctaacctttttcccctggcaaattcttcattcatcaccaaacacgatgggggaccgagtacagagcgtggggttgctttctcgccggtgatggagccgccgtgttttgaagccacgccgtcgcggagttcttttccgccgctggtgtccggtcgggttagggcagatcgccgctaaccgttggatcccatgtgtgcggcctggattagatagaaaataatacttcgcgcgattgaatgcgggccgttgatcggcgtgtcgacggctgcgattaggtcacagcataacacttcgcgctatctgatctgagccgtaaactttagatctggcggccagaagccaggaataccccttcgcgggtactttttgttaaagagccccgaggaaatcactaatcaacccgccatccagagaaccctattcactgagtctcggtaaacttacgacagaaaccct

SEQ ID NO: 178241 - DNA, 762 bp, Zea Mays
tggtcgagagatggtaaaggtaaaggcaacactaaacagaagcataacaaaggatggagttgaaaacccgcaagcgacgaggaagaggatatgaccaagagaaaataggtaaaatacaactctacaattgagatggaaaagagaaggttttagaggataggtataatataagcttcagggtaagatatagatctgacaagggtaaggatgacgatagtgagaagcataaccaatgagagagttaaggcaagcatcgcgaagtggcgaagtggagaaaacaatcaagggtaagatggctgaggtttcaatagaatggttgaagtaagaattcattatcgagagaagttataaagggataacgaggtcaccaaggatgtgtaaaataaaatgattgcccatggattatcgagaaacaagggtggccaagggcatgtaaactgaaacgtcttaagcagacattggggtatgaagataagcatacatgaaaatataagggtatgcaagactccaaggatacgagcataccaagacaagggaatagaaaaaggcaaaggataacgacttaacaacggaataagaagggatttcagaagacaagaaattcatggacatataaactgaagtgtttaagtgggcagtagaaattcaggtgtaagtatttgaacaagagtattgaagaatctaatggtatgagcatgtcaatactaagggaatcaagatagtcaaaaggtagcgatttactgacgggggagggaagaatcc

SEQ ID NO: 178242 - DNA, 367 bp, Zea Mays
cagggtgatcactataccctactaacggagcaatcggcttaagtcggaaacaccttaagtcggtgcgacatgctcatgcttacacgactcagggtgatcactatactctactaacggagcaatcggcttaagtcggaaacaccttaagtcggtgcgacatgctcacgcttacacgactcagggtgatcactataccctactaacgcagcaattgccttaagtcggaaacaccttaagtcggtgcgatatgctcactcttacacgactcagggtgatcactataccctactaacggagcaatcggcttaagtcgaaaacaccttaagtctgtgcgacatgctcacgcttacgcgactcaggtgatcac

SEQ ID NO: 178243 - DNA, 400 bp, Zea Mays
ttttatataacaaattgttatttggttgatccacgagccaactcacgagccgagctagctcgctcttttctcaagctacaaaaacaggcccggcttgggctcattcgaagcgtcaagacgagccactgcgagctcgagctttttttccaggcctaactgaaatgtatagaggaacatatggacaagtttatttttatttgcaatctaactttggagatggcatgcaccaaattactccttaatgctcatctagaaatgttatttagcctgaatgctatttttactgtagtcattatatttgctttatgctcatctcggcgaatagaagtattcaaaagagatatttaacatccgaagctgtaataaaaataacctcacttctagaatcaagaaatgatag

SEQ ID NO: 178244 - DNA, 775 bp, Zea Mays
ctgggatgtctgcacagctgtatgctgctgcgcaacgtccacagtagcagtgcctggcattgggcggttgacaacctatggcgtggaagaagcagcttcttcctgcaccaggaaatccactaaagtctcggcgcggtgctcaacgatttgcaccatcatgctgagcaagtaaacaagcaaaaacctaaagcttagccccctacctggcgcgccaaatggtagagaggaaatatccggccgggtggtggagtgcaccttccctaaatcctaagatgaggaggggcctaagcgttttgcttgttgcgagatttggggatgaacacaagaacgcgcaagagtttagagtggtacgggccgctagagcgtaataccctactccactatgtgttgtattgctcgtgagcttgagttgtgtcttagatgacttgggtcttttttccgaactgtgttgtaacgttgcatgcctccccttttatagctcaagggggcacgtacaagggtactgagccccgacatgtgggcccagggacaaaatggagggaaataactaacgcctgcaacgttcgggcccaccccgagtgtagtaatgtccgtagtgtttatagcattggcttctcttggctgcttcctcagtaatacgcgagtcgtcatgagtatagtgtatgtgacagcaagccgcctgccaatagattgcacaggcacgccgcctgcgagctggcccagttgctgcctactagaggagtagagagagggcgcattaaatgctgagtcgtca

SEQ ID NO: 178245 - DNA, 515 bp, Zea Mays
aaattttgccaaattgcacgagagaactttccaaacataggttagggttgtaagacagcttttttccaccaaaaagatgctaataagtaggaatataaagaattcaaaactatagatcaccttttaaactaaaaatgacgtttccctgatgtcaagggcattgtattcgcatcagagggtattagagtacaactagtggatgaagacgttattgggctagctaataactttttgtaatactaggtttcctataatcccttctattcaaggcgtacctagattgtgtttatgtccactcaaggaaaacaccacacatcaatttgccacatttttctcaaaataaaataaagacgtcttcatcgactagcccaatgtgccttacaaccttaacctatgtttggactgttctctcactcaatttggctaaattttccatggtcattgttttattttgagaaatgatgtggcatattgatgtgtgttgtttttcttgagtggacataaacaccgtctag

SEQ ID NO: 178246 - DNA, 1234 bp, Zea Mays
gagcaaggaggataatgtacggttcatagcactctgaaatgtagccagtgctccggttaatccaaaggacatggcccggaactcaaactgaccatggtgggtagagaatgctgtcttgtgttgatcctggggtgccattcgaatttgatgaaaaccagcacgcaagtccagtgtagaaaaccatgcagccccatgcaactcgtctaaaaactcatcaataactggaataggaaaacgagtcttgacagcgagagcatttaaatgacggtaatcaacacaaaaatggtagctgtcgtccttctttttcaccaatataactgacgatgagaaatcactccgactatgttgtatgatacccgactgcagcatgtcccgaacttgtcgctcaatctctgacttcaaggcgggagcatagcgataagggcgcatacgaaagggttggcctcctggtattaaaggaatctgatgatcatgatctctctcgggaggtaagccctgaggtactgtgaagaccgactggaacttgttgagcaaagactgaagctcctctggtagagtggacaatattccttgctctttttctgataaatcaatcaattggcaaaactctatgactgaacagtggtctgttgctgtctgcaggccaaacaatttgactgtagacccttggtatgggatggccagccacttttctgcccagtgaaccatcataggactgtaaagttccaaccaatccatgccaactattaagtcataagtttggagaggcaaaatacgtaagttggactggaactcacacgctcccaatgaccaaacagcttggggtatgtgctgcatacactgaatacgatctccattggccacctgaacggacatcatctgtggcaaagaagataccccttgaatatgttgggccacctgagcactaagaaatgaatgtgaactacttgagtccaacaagatcagcagttccatgccctgaatagtgcccataaacttcatagtgcgggacgcggaatcatcctgaattgcagccttggacaataacattgactgaatttccccctctggttcagactgacagtcagcttctaggttttgtggtgccagcagttgccaaagctcttctaccatatggagagaaattgtgtctgcacagcgatgaccacgagtatactgaagcccacacttgtagtagaggccctttgctttgcggtaggcatataatgaggaa

SEQ ID NO: 178247 - DNA, 843 bp, Zea Mays
ctggccatggcgcgcacacagattgtcaccgacgtggtttgtaccggccatggccggcgacggcggctacggcaaactaccggggaggcattagcgactaccagagacctcgggacacctaacaatttggcacgaacaccctgagaacggcttgtccatgtgcacggcggaaaccgagcacgggagtatacattcccgcggattgggagtggtctagttcgatttaacgggtcggtgagcatcacaagcttatggagttgcagaaacaacactcaatttaggcagatccttaccagagcggtttggccacgaacgggctgttcttcacggggcggcggaccgatttaggggaaaatggcgctgcggcgttcacgagtggaattgagggcagagctttgggctatacggctataaggggttctagtcttgctgcgcacaaccaatttgggaggagggggcagaggcagcacgaatttctgcttcggttcaacctacggtgtgcgcgatgctcatacctcaccgcggagcatggctatttatagctgcgccggcccagtggtcacctcgcggccgagaagagcatcactatggcatgtcgaccacgtcggtaaaaggtacagggagggagaactacggcatgcgcgccaccgcggcggaatttcactgagtcacggcagccgccggtgagtaacctcggccgagctcagggaatggtgccacgtacgagctattcttccccgacgttatccactccataccgcactcgaagcaggacggcggcagcgtgaattttggcgcaaagaggtcaccggcggtgagcaagccgcgctggcaacctgatcc

SEQ ID NO: 178248 - DNA, 1098 bp, Zea Mays
tgacgctctggaggtggaagaaggtggttgggctgtggtgaggcccagacactgatggcgcaagagtgttaaaaatcttaggagatccccgacgcggcagcagatggatgtgaaaggacccaacacattcaagatgaagctctagggtaaatgctataactggctctcaccagatcacctagctttttgttgctcgacgcctactcgttgctggcgatgtctacaatctggacatagggctaggacatgcccagggatgtactacaggagcaggcacaattcaactccctccctgcctgaaccagtgaagcattcaatgcagaataccaacaatatcagctccagacaccagcaacagccccagttgcgacacaactctcttcataaggagcaggaacaaatccctcaacctgcactcaacgcctcttcagttcaacacaaaaaatcttacctctgtgcagttcaggagggccaaaccatggaggctcactacccaggagatccaagggcaaggccggcgcgcgcctcctgcgccatttcagcaactggctctttccgtcgtcgcagggatgacctcatcagcaaggcggtggtttgctcattcgatgggaacaaccatgaggttgacatcctttcggcaggagacatgctgagacagaagttcgatcttcgccatggtcagtatcaactagttaagcattacccagagcagttttttattgtcttccctgacgcaagaacaaaacaatgggcacttgatagaagatcggtttcatatcgtgggcgagagtttcatttcggtgactggtccgaggagagctatgctagaaagacaagctgggagtttagagttaaggttcgggttgaagggatccctgtccactgctggggtgaagaggtggcatccacggccatgggcaggtgctgcaccattcactatgtccaggagcgctctagacgtagagagcgtactcgttcttttgacctttgggcttggtgctctaacccctgcgaaatccccaaggaggtgtggctgacggtctctgagcctgaccaggatttgccacctgtcagcactcctctacctcttgctggtgc

SEQ ID NO: 178249 - DNA, 454 bp, Zea Mays
ttcggtttcagtcagctttgttttggtttcaacttgtgctttcgaagccttggcaatttttcctggagtagaacttgaagtttttatcgtctccagcacatctaacacactagccatcctttttctctttggggttgctgccagatctttttgtatcttcggcacctccactcctaccgaagggcttagaatttctgatgtttttgtctcttcaggtcttggttcttcaaatttgttagcctttggcattgtagccggctctttgatcctctgcataagcgcaggtccttcggcttcaatagccgaagaggtctcaccaccaaagtcaggcactgtggccggttcaatgtagcgtggacggtgagtaagaaccttcacctttttcttctttggcgcgggctcgctcgaggcagctgaagcaacatcctttctagaagttccactctttctcttt

SEQ ID NO: 178250 - DNA, 1400 bp, Zea Mays
ttttataatcaccaagaattgattctatgctgaactgaagcaaacaattcagttttcgaaatctgttctgtcagtggacagaatacagcaaccagtttgtaaaattcataactcctaatctgtcaggcctatggttatgaaattttaacacaagcaagataagaaaagcatctacaactttcttataacgataatgaacagattataacattaaattagtcaaacaatgcagtttctgaaatctgtacagaatttgggcagatttagttactgaatttgtgaaaagcataacttctaaacgatcagacttatgggtgtcaaattttaataccagcaagataataaagttatctaccacttttctatagcacatatctacagaaaatacaatttagtttatcaaacatacagcacaacgaaaacaatgcgtgcagcccaaaacaacaactaataaaattcagctcctattcacttaaaaattgtcgcgttctagagacttgaattattttaacaccttaccatttgttaaagttgaaacaaccaaattagaaccaacaagtagacttactaattttatacaagttatttcgcgcgttagaagtatcgtacacaatcagcaaacacattcaccacaataatcaaacctggtataaatgtgtatatcgattgcgcccttcacacactaatttgcattttaacttgggcatcacatgaacactactaatttttacacgcgactgtaaccatacacatttagactacaacaagcaaatcatcgtgattacgagcttaactaacccatcaaacgtttcggctaactacagcaacgacatagcccgctaattaacatacacgtcggcttgcctactattatcactatctaaggcacaacatacaccacaacatttttataaacatacatattcacatgtatattcgcacattgaccaaagcatacgaatcgtaaaccactagtctacagttcgaaaccatcgtgcgcttatttcccaaatcatgaacacataacgtgtatcgacccgactctagatatagaggaagcgatgactacttacggcatgtcatcacctcactatataagccaaaacaatttctactatcgactaagagttctaagtattaaacacattattattttccacgcacaaataaacctcaactaaacaccagtgacaccgatggacttttactaaacttatcatgcgcataaccctgtctcgcatacaaccatattgtggcgtgcactcgagacacttcgataatcgtagcgtaaccactaatatatgaactccgacactcatatcttaataattcatcctccacacactagcattttctaaactactcgtcacatcgataaatataccgcatatataatcatg

SEQ ID NO: 178251 - DNA, 714 bp, Zea Mays
cacagggccctcgcatcagctcgctgcctacctcgctaaccacctccgcacctccgccgcgtcgtccccgcgaatcagtccagccgtgcggccaccagggaccaggttggcgctcccaacggcgtataaaggatcccagaaacctatctctgcctcccgtgtcaccgttaaccatccacctcgcctccaccgctggaattccgtgccgccgtgggggaaaacggcccgccaccgtcgacatcgatctacattgtcgtttggccctctatgtccgggcctggggcatctcgggggtctgatattgctttccgtgtgactaattgggggtgtggttggccggcaaccacttaattcctcgtcggagccaggcgggtacgcggatccgccgtagggatcttacacaaattccccctccgttcttggtgagttatcgatttctcaccctcgacctgttcctttccttagttaatgttgcgccgtcgccaattgcgtgtggattggggtgaattcggcctctggggtcaggaatttgccctggtgccacctgtatcgtggacagtagggttaggccatgtggtgatgggcgcagtcatcccccgtgggtgtaacaccccaggtgttaccaaggccatggcttcatttatgcactaatggctagtgatcatatgtggttaagtggaggagacgataaacctacaaccttggaagcatggg

SEQ ID NO: 178252 - DNA, 660 bp, Zea Mays
tggacggtgaaaggccgactccggcaagcttgtactggtcggaataggaaacggccagccctttcctctgcttgacacccaattcaacccctgacgaccatttcccctcacttaattgcaagactctaacgcctaatcactctgtccacggtgaccgcacaatctggggacaattcaaagtgttccagtcgatctactctggttcagtgcaaatggttgggccgatgagcttcaagagcacacaggaatgctagaacaagagcgaggagaacatgatcggacctgtggagcgctgaccgcgacgagctcacacacgcggtgttctggaccgatttggaggaaatctcaaattggggctctctggtggataatcggaggcacgagtgggtgcgttaagtgcttgactacatggcggagccgatggcgtgctcaatttataggattcatgggcggtggctcgtgaatttggattggcatgctggcggtcggagagaggagatgagtcaccacagtgatctaccgtggcgatcacagagcaatgagctatggcgatcactgggcagtcactacagctcgcgatgacgcgataaatgtcctaaggcgtggcgccaccatggtgaatggcgtacatgccggtgacggccgctcagccacgtcgcc

SEQ ID NO: 178253 - DNA, 776 bp, Zea Mays
caatcctctactggccgaagcccatgtgcccaacagcgccgcacactcccactttccctcgctctctttcacttgtgcaagggacccacacgtcaggccatcatccccacagaacaaccgtatgtttgcaccggtcttcactgtgatgcatgcgcccacatcgcgcgggcggttggacaactccccctcttctctttaggacaccagccctgcccctctctctcttctccatgcccgccttgtgctcgccacactgcctggtcgcacatcgcgttcggccatggacgctgttgcgagctccgtcacgcctacctgctcgtcgacgtgcgttgctggacctgagccacaccatcttgccgcgcgctgcgcccgctgctgcgccaaacacttcgcgtcgtcgctgctcaaagccctaaccggccaagaccttcttcctcgcgcgacagtagggagctggcgctgcccatgtccctgtgcgcgctcgccactgccgctttgcagcagcctcgcctttgtcgcaccatgtgccaggaggctcgctgtcttgtttggggcccaccgtatccgtgctcgtcgtcaaggtcagcgccttccctctctctcctctcatctatctcttgcgcacacacgtctaccagctctcgcgcctcgcctccatgtcgtgcatgttgtcgcgccacgcgctataacccacatcctcactgtcgcaagcgcattgccgcgtcgtgccatcgctcagccccacgcccttgcgcacgctgctcgcacatgtcgtc

SEQ ID NO: 178254 - DNA, 571 bp, Zea Mays
ccagataacgccttggggtagaaagatcttcacagctattgagctaggggcactgttccgtccggccgccgtgtccgcttagccccggtcgctttggatctaccctcgtcagagttagacacctcgcggccttgcgccatgtgcctcggcactttaaccacaccgccgtgactcatgtaacttatccagtgatcgccggtgaggttgccacggttatggacaccaatcgtatgcgcagtgcacctcttcctctctgaccgccaccgcgcaagttcaaattcaccggccaccgctcaaacacgctataaattgagcacaccctcggctccattaggtattcaagcacctaatccagcaactcgtgcctcagattgcccaccagagcgtgccaatttcgaagttcccccaaatcggttttccgccaccgtgaaagggctcccaccgtggccagtgcacttcaggtccgttcatgtccgctgtccccttgtttcagcacccttacttgcccctgatgcatctcgacccaaccaattaggatagaaccccttagatcgtcgggaacacttcatgc

SEQ ID NO: 178255 - DNA, 610 bp, Zea Mays
gttgtcgtgtcacaaaggtggcagtgtcacaaggtgagtcccgaggtaaaactgcgccaaaaccgtgccaaatgaaattggtttgagttcaaacttttccagggcgtgttcaaggtaatttggcacaactttaatgtttggacttgtttgatttgagttctgaaaaatagagaacaagattgatctttgggagggggctaaaattcagattctgaatttctgaatttcccccaagtgcatttgtttaggggctgttttggggattttaaaaagttcaaaaggcaaaacttccttactatgttttgttagttaatcagtgaactaaaactttgtaatttggttttctccaaaattgtatttttctcccaagggtttctcccatttaccctttatgcataaatggttcacttagggttaactagggtttaagagtttttccccttttttgaattcatgaaaagtttaagtagacttcaacttaattctttgttctcattttcaatgttcacccttttattgagattgcatgtgatcatgggttggggctagcttaaggaagaaccctaagtgacactggggtgtcacatccttcccccttaaaggaatctcg

SEQ ID NO: 178256 - DNA, 795 bp, Zea Mays
agttttcgtccaggaagtgtcacgcccaagcattccctcagatcaggcggaagagtgcaatgctttgagccagccagagtcagactctaatggctagagagagcctatcatcaggtatataaagaatgaagaagaactggatgataaggccgcagcagaacgcatcgcaagacagtcggcccactacaccctcataggggacacactgtacagaaggggtgcaacaggagtcctcatgaagtgcatttcctcggttactgggagacaactactagatgagattcacaccggacagtgtggtatacacgcagcatctagaactctggttgggaaagtcttcaggtctggtttctattggccaacgacaaagagtgatgcagccgagttagtccagagatgtgaagcttgccaattcttgtcaaagcaacaacatttaccagcacaacagctgcagaccatacctataacatggccatttgagtgttggggattggacatgattggacccttcaagaaagctcagggaggctatactcacgtgttggtcgccatcgataaattcaccaaatggatagagtacaaacccattgcttctctaacctcagccaaggcagtggaattcatacaagatataatattcaggtttgggataccgaatagcatcattaccgacctgggatccaacttcactagctctgaattctttgatttctgcgaacaacggagcatccagatcaaatatgcatcagtagcacacccaagagctaatggtcaggtggaaagggctaatggaat

SEQ ID NO: 178257 - DNA, 343 bp, Zea Mays
gtcacgagatgggggccttaccgctgcgggggttgttgccaccatccatcaccggagggtgctccctttggcagagtggcagttgcatctcttggagatgagaccgagggtcgatctggagggctcgcagatgtcctcagcctccctccccgacgacgacctccgcaagcgggtagtgggtacggtagggaggctggatgccggcgcccttacccagcctgcgatgcgtcccgaccatgggtatgtttccctggtaagtatccgatccttttcctgcattgcgccgagttgccttcgattcccactgttgggatctttgctcttccccaggggttaagttttt

SEQ ID NO: 178258 - DNA, 717 bp, Zea Mays
gggcgagcttcttcagcttcttgtcatagtccatcttcaaggtttgataggcctcacggatgttggcttcctcgccttctactacgtcgagactctcctggagggatgccttctcttgcttaagctctttgacttactgctctaggctttccactcgggagtttaggtgggtgcagtgggaggagactctcctggagggatgtcttctgtgggatctcctcctgacagagcctggagtcttttcctcgaggtgggggtgtttttgttgctgggtgggaaatatcggaggggggtctcagagatctctcggctatagttttggcacagttgtttaagggcttttcgagcaacgccctagcaagtgtctgggaagcggtgcccgatgaaggtaatttggaagggagggtggtttgggtagttccggctttctcccaagtagaccgccatagagcacttttctattccattttcacggtactccttccagacatattcgggcttcttgcgggtccccatgcgtagcgcgcaactccgaagaaggtgaggaaagccttcctcctctaagcaataggatgtcctaatcacccaggggttttccatctggtagacaaaaagaaaggtctattaatattggggaaaaggggaaagagtgtttcttgggggtaagaggtgttttcttgttaaggcaacttttaaggtcagggttgtggtctacgg

SEQ ID NO: 178259 - DNA, 538 bp, Zea Mays
gctacgggggataccgtaccgtggtattcattcagaaaagaagcaatcaaagactagatagactgtcgtggcccgcttctctctacacgattttgcaatggacaataacggatgtggtggcatgcatgcacatggatgacatgtgggaccatagtgcctaccttcgtcgagtcaaacgggtgaataaaatggaacgttaacagattgggcagggcagcagctagcaccgacggtaattttagcactgtccttgatcggatagcgcctgaaactttacaatttggcatgagtagtggtgattgctgattggatctactgctgtcgtacgctatgggcgctgtgtatgcattcgtattaaattccccgccattgcagccgaatttgaattggtacgtgtatggtgccgattgcagcttctgcagtgcaggctgttgtttggtccgcctgctggctgttgcagaggtgaggtttgcgggcttcctaaaataagctctgctcttgcgcgaagaagaatgctgcctggggtacggtgttgcgg

SEQ ID NO: 178260 - DNA, 453 bp, Zea Mays
gtcccaggggtcccgaaggctgctccacatcagcggtggaggagcaccactatctccttcggggcatccgactgccccgaaaacatggcaggggccggtatactaccgctcatcaccgcccctatcatcaccaacaagcggctgcaccatgatctgattgacggtgggggtgggctcaacgtcatccgccatgctgccttcaaaacagctgtagatcccagggtcccgactgggaccctcctgtccattctctggagtgggcctacaaccggtgtatccccttaggagtatcgcactcccagttacattcgggaccgaggaaaacttctgcacagagaacgtccagttcgatgtcgcggaggttaacctccccttcaatgccatcattggcaggccagccctgtaccggttcatggccattgcccattacgggtatttggtcctcaagatgtc

SEQ ID NO: 178261 - DNA, 488 bp, Zea Mays
gcagagttatgtgttggttacgggatgacaattaggtatcagcagtactaggaatgttgaggttacttagttttgtctggtactggtgttgcagttgctaggcatgtctagccttttgctacttgatataatgccatcattgttctaaggattagtttgaataattttttttcatcataaggctgtcctcaccagtgggtgtaaatggacgtgcaaaacactgtttcggcacggtagatgcactgtagacagagtggggtttgaaatagttggtggtataggctattcactggtgagtggtgaggatagcctacgagtaatggtatatccattctagtgagccatatatctatcaccggcacagcggcacttatttcatgccctctggttttgtaatgcataagattactctgtacatattttttcttatgtctctttaccgcctacttaagattgaattacatctgttttctacacatcgaagattg

SEQ ID NO: 178262 - DNA, 533 bp, Zea Mays
ggcagtgaaagggtacgcttaggtctaaatccagccgtcgagcaatagatggacggtccaggctctttcttcctcactggatcacgccagcgacgaagcccggcaaaccacggtggcgccatggccaccacgcccggatctcgtgacctgcactacaaaccttgacccctacggtgctacgtgtagcgagggttggggcgagtccacagggcaaggtcttaccggtgattaggctccaaggattcctgcccacgacgcacagcggtgcttggcggtattcacgacgctggtgagcaattgaggcgacgccagtggctaatcccacatggcgcaaccccgaagacctacacagacctcccttgaagtgcccctggccctcgactctccccgagcggcctgacggcggcgattgttcgcggcgctaccctcggcggccctctctggtgtttgcgtggcaatgacgaggtggcgtgagatgctggccgaggattaaagtggatgcgaccctcggcatttgtaccccaaagtccgag

SEQ ID NO: 178263 - DNA, 877 bp, Zea Mays
cttaagtcactgccgacttaagccgattgctctgttagtagggtatagtggtcaccctaagttaagtgagcgtgagcatgttgcaccgtcttaagtcactgctgacttaagccgattgctccgttggtagggtatagtggtcaccctaagtcgagtaagcatgcagattgataataaatagttcgagtgcccttgagaatgaagtctttttattgatgatgtgttttctgattacagaatacaatgctgccccgatagcttttgaaatctagctaggggtaaaacttcctgagatgctctatattccatgaattccctattttcgtgccatccatttgagtaagtcgatatgatcctggccgagtgacttctgctaccatgattggaccttcccatagtggcgacaatttgtgtcgtccttcccccgttagaattcggcgaaggaccaagtctcccactgcgaaggatcgatgtcgtatggccttatcatgatagcgccttagggtttgctggtacctagcttactgaattactgtattcaatcgttcttcttccaatatatcaatatcctccagtctagtagcttctgcctcagctatgttttcgaagaccagccttggtgccccaaacctgagatcggcaggtagcactgcctccgaaccatagaccatgaagaagggagtgttttcatgcaaagctcgactaggttgagttcttaggctccaaaccacatacggcaactctctgatccactttcctgtgaacttttcattatcgtcgaagactttcttgccgagtgcttccaatatcattccattagccctttctacctgaccgttggctcttgggtgtgctactgacgcatatttgatctgga

SEQ ID NO: 178264 - DNA, 796 bp, Zea Mays
aatcaatgccgtccatcggatcaaccatcgatgcacccgatttactttcccggactggttctctacttctaatccgagccgttactagagaatctaacggtgctggggaattcttccccaacccaaccctggacacggcggcgccgcccacccgccgcggcgatgaacgccggcgagcaattccacgcgctagggtcgtccaaaatgcgattagctaacgctaaacctactgaacaacaatgcgaacacgtggatggcgttagtacctcgattgaatggcggtagtctcctgctcgcggcgcgcagcggaggacgaggtacggtgaggaattccggcgtggcccgcgacagattccgagtgcttttgccacggatgccaccctaccggccagatgaagcccgcggacaccccaccgaggaccggatcgacggctttgcagggattactcgcggcggccgctcctctcttctctctcgcggttagtaagcttgcacggcggcgatgttcttcggtctctagtgcggcagctatgctagcgaggcgattggaccaggcagcttatatggggtcggcatattgacccacgagcttgcccctgccgggttgctcgggattccgttgcacggcgcgcacatcttgcggaggagacagttccgactcaccgggcccacacgcagtgagacacgcgcgcccattcctggcacctagcggctgatcaacggggcccgcttggcagcgagaccaagtttcttgccaagtgcgcgtgagagcgggatgacaagggtggcccacctg

SEQ ID NO: 178265 - DNA, 765 bp, Zea Mays
cggatcgatactgtaatatatcagtaccataaataatgaagtatacatgtcatgtggagaaccttactatactagcacgtagaaggccgtagcatgatcaacagagagggaaggacaggcttgcacgagcacgggggcggctggggccggggatcggaatctgatacctccgcggcatcctccggctgatcgatcacttcgaacaagcagccgcaacgcaggctggctgcggctctgcctggccggacctccctccaccggatctggacacccgatcgattcatggccatggctcgcccgccgcgccgcgccgcgccgctgtggtgtgccatcgccggacgccagacctccaacacggcaacagctacccaatcataccatacgcacagtcgatcgatcggggggggcacggatccaaccaaccggcggcgagcgtcgggacaaaatgccagccggtcgcaagcatgatcgagaatcgctgcacgtccagtccagtccagatccaacccaccattatcatctcgcacgcagacgcagccgtcgaacccttgcaggtgggtgtgcccgtgtgggggtttgagagaaccgacgcgtaggtacgccctggcgactgggatgggacggggcggcgaggacgaccggacgtcggacgatactgcccctgcccctgctatggcggctggccgggtcgccgtccggcctcagggtatttatcgctccgccaggacgtcgatgaccagctggtgcggatgaaaaaaaaaaaat

SEQ ID NO: 178266 - DNA, 532 bp, Zea Mays
tgtatttctaatgcagctctccgttcattgtttttgctgctgctctgcaatggatagattgacagcacttgtccatgatcgatacacacggtagatttatatttaattgtataatactgtaatcatattttagacctatctatctttattgtacagcaatttctatttaacaaactcaaaagacattacaattgttggctatgagctattatcagctcaggggcattcaggtcgttttacagctataatcaggatagcaaaaaactcagcttattgaggcagcagattctctggacagcaaaattatcagacaagcctgctacccagagaatcgagttcctaaaaagcgactacaaacagggcctaactctatcgttcataagcctattgcttatctttcactaagtagcctgcatgatacattactgttctggttggataaataagatgctctccccgtagtgaaattctaatgctaacaagattaaagtgaagaacttgcatacatgcagcaatacgtgtgcaaccagca

SEQ ID NO: 178267 - DNA, 1129 bp, Zea Mays
ctagttaccgtttgtttttagtcatcatgcactgttttcttctatctagttatcctttgccgagttttttttaccggttgtttttttttgttagacactcggcaatgaacttttttgtcaagtgtccgaaaaaaacactcgacaacttgtttgacactcggtaaagagccagattctgatagtgaaccattgcttgctgagtcgtctcaatccactttcactatcaaaactaagcaaaatgggatgagattgaatgaacatgatggacgactatatatcagtcagttatcatataccaattgctcatcaccttggcaaaatatacagagcggagctttttgcttggctgcgtaactccgtttcacatttaatctatagatagatagatggattgaccagtatggagtgcagcggcgtttggatttcagacacacaaatatcgagtccccacaaacgactccggctgctgaatggctgtgtcactgtgtgacatagctgacacacatcccctaacacggcccagaagcgaacctgacctcggcctgtttatattcttttatacaagcaaaaagcccaatacgttagcccgcccatggtatatctatagtatgttaacttttttatatataagatgatgtgaacctcactgacactgagccatgcatgagtggtaagatgtgtgacttgcaatttgatttctctgcaccgtatatgaattaagacatcagagataacatgaaatatgacagtaagaaatttctacatatgattttttttcaaataagttttctttttccattttatcggccttcatatgttctcaatgatccatttctgcaacgagggaatagaagttattagtgacaccatatatactaatagaaacttctgtaaataatgaaggcatttattgtggttatatatactgtggttattgagtcgtttgaagtggaatacagagtatatatatagacagttgagtggaatacagatagtagtcagaccaatgtacaatatcatagtatatttcataggttacatcttacatgttgatgcaaattcatgatggagaggtcaaatgataagtggcgtcgtgcgcactgagatggtcaagtcatgcacgacaaac

SEQ ID NO: 178268 - DNA, 582 bp, Zea Mays
cgaaggttcacttgggctaactctagggataacccgacttatgagaaattggatcggatcctagtagccacagagtgggaggaaaaatatcctagagccacaatgcttgccctttctagaaatatctctgaccgtacccctttgcttctcagtacgggaataagatctgttcaaacaatacctcctttcaagtttgaattaggatggttcttttgggatggcttttggatatggttaaagatatatggattaacgaggcagggggatcgaatccattggagaaatggcaagctaagattagaaaagtgcgtcagtacttaaggggatgggcgcagcatacctctggtatttttaaaaaggaaaaggagattatttctaagcttgatgaaattgataagcgagctgaatcggttccgttgagtacatcagagttagatcttcgcaatttcctacagagtaggctagctcagcttctccatgaagaggaaataaagtggtaccaaagggcgaaggtcaaggagctccttgagggcgacaataacaccaaatattttcatatggtcaccaatgggaagcatagaa

SEQ ID NO: 178269 - DNA, 336 bp, Zea Mays
cacatgtactacatacttcaattatttatgtgtgtaggatcccaagagaagcacttcatgctgaaccaacaactttccttctaagcatagaagggatgccaggtttggactggaaaaggctacgtaagctccagtgtccagatggctcctacatgtcttcgcctgctcccacagcttatgctctaatgcagactggggatgccaagtgttttgagttccttgataaactgatcgacaagtttaacggaggaggtatggatcgaagagcacataaaatgctgacaagaaactatacttcccgtgttctttttacacatgacatttttaagcttgcat

SEQ ID NO: 178270 - DNA, 1111 bp, Zea Mays
ggcctcaaattccagaaagtgtagggactctagcgcaagaatccgcaagactcaggctactgacacgcggactgcgggtttattttagtaaaggatgagggttcatatgcaaaactgtagtcacgaagaggtatcgcgaagccctggccgcccgatccaaaacggacgcaccagattagatcctggcgagttacacatctgcgctcaaccctagttgttggatccagaattcacggccctgatttaatgactcgaaggggtacgccaggattcgatctaagccgtccatctaatatctacggctcccacactctcagccatctatctaatcgtgaccgttgaagatgagatcaacgatccgccgccctccttcaacccccggctacacactgggcggcgcagccaacccccaaccggcggacctcgccggcgttatccaattcgccacgccagtggatgactcgcgcccataacattgcagacccaaattcgatgccacccaaattgattgagataagttttgccccggattgcgatcgttatagcactgcccaccactgaccgcggccatggattagtgcgtggcggtgcccggccgttcgacctaacggaacctacgtttagcacggatacgcactagggtacacggagatagacacgagtaagggaggaattgctcactggcgtcggaggcggagatgtgcttgcccacgcaccgaagcagacccgcggcgacgatgaagctccgatcagcaatctccaacaccccgtgcaccaatcacgcacggcgaggctacggacaccaacttgggtacctgttggaactccctggcccgccaccgagaccccgccgatggagcaagcacgacaccgcggctgcggatctctctccccccctgctacggcgtacgaatacggcgaacggctcgattcctcccagttagctgggtaccgtggggaggagacgaagggcagggtttgccgcatggttttatagtcatcccaaggttgaacgagacgcccggactccgcgcaaggattgcagccgatcccgacgaaatcggcggtcgttgcaacgacgcggcgaaggagatgacaacccggccccacg

SEQ ID NO: 178271 - DNA, 402 bp, Zea Mays
tggtaagcccactttggtttctattctcaatactgttcacacacccacaaaatttgcttacggcgtcttgtatagcactccaacgatgtagcaacgaactctcagtacgttcagcacgatttcctctgttggtctcgtagaacatatgaattcttttccaaaatgtgcctctagtctgatttgtgccttgtgtagggtctgtactgacattcaaccaggctgcaacaagggctctgtcttcttcctcactaaagttttttcctttctgtttctggtttgacttcgaaaatgtgttgctatcctttatagggactatacacggtaactcagtcggtgtttcagatagttcttcaaaattttcaaatcctccattcaaaagcttggtgtaataagactcatccc

SEQ ID NO: 178272 - DNA, 706 bp, Zea Mays
ctcctctaggtcaccgaggtccgccacgacgaaggtgttcagcagggtgatgctggagatggcggacatgggcgtcaccttcaggtcgtccaacaccgtgtacgtcacgatgccctgcacgaacccttttgccatgctctgcggcgccgccacctggccggagccgctgctaggacccgccgacggcaggtactgcacttccgtcgtcatggagacgcgacattgcaggcacgccttgccgtgctcgtccgtgatgtagttgcggcagttgctgtagctattgccgagacatctgtacatcttatttggacgcaccgacgacagctccgacagacggaggagggagctgcgggtgttcgccgccggcgagacaactgtggggcagaggagcgcgtccttggcggcggcggcctgcaggtaggtggagtcgagcttcttgacgctggcttagagattgccgacgcacccgacatggcatccttcccgaccagcttcaccgccgtggcgacgggcagcgcgaggagggagaagaggaagtccaccacctccttgctcgcctccgcgaacagcacctgctgcgccttcttgttgatgaggagcttcatgctcaacgcggcggtggctgtggtggttgccatctcatcgtagacgtcgggctccgctactttcttgaaaacgggtgaagggtggaggaggattgcttcgc

SEQ ID NO: 178273 - DNA, 670 bp, Zea Mays
aagctttcatcttccaaggcattcaagttcttgattgacaactgacttagattgacttagggtgatcactatgccctactaacggagcaatcagcttaagtaggaaatgccttaagtcggtacgacatgctcacgcttacatgacttagggtgatcactatgccctactaagggagcaatcggcttaagtcggaaacgccttaagtcggtgcgacatgctcacacttacatgacttagggtgatcactataccctactaacggagcaaatggcttaagtcggaaacgccttaagtcggtgcgacatgctcacgcttacatgacttggggtgatcactatgccctactaacgaagcaatcgacttaagtcagaaacgccttaagtcggtgcgacatgctcacacttacatgacttggggtgatcactatgccctactaacggagcaatcggctcaagtcggaaacgccttaagttggtgcgacatgctcacgcttacatgacttagggtgatcactatgccctactaacagagcaatcgccttaagccggaaacaccttaaatctgtgtgacatgctcacgcttacatgacttagggtgatcactatgccctactaacgaagcaattggcttaagtcggaaacgacttaagtcggtgcgacatgctctcgc

SEQ ID NO: 178274 - DNA, 529 bp, Zea Mays
caaggttcaagaatatatgttttggaaatggtggcatttgaactgggacagcgtatggctctatgacagtttgttgggtcatatacaactccatggtaccatttagatgtcgaaaattaaatgcacccggattaagaccaaacactacgttgtgcatcttgtggacatgcttttcatggagcaaattgttgaagtctttgactatctcataccgagttgcaatggcctcgatcttggctccctaatttgatttcagcacaaaagagagtgtggtacgaatattatatatagttatataaatgaaacttaaagagatgttgtcttacattgatgtcagacaaaatgtaatgttgcctgtcacgataatgtggttccatcggaaatttaacttcaactcgagcgacaatactatacttccgttgtagcccataaaaatcttcatagctatagtcgtcgaacaacctgaatctatattaaacatgcgactaaataacgttcataaatttgatagtgaaatcttgtgttaatt

SEQ ID NO: 178275 - DNA, 620 bp, Zea Mays
ttccccgcctagcatcaaatccttgcctgtgtgcctgctgaaagcccgcacgaccaggcacagcaccttgcccatggcggaacccacggccgccaagacctgcgccacggctgcgagcaccaccctgagtgacccacccgtcccccaagtctgcacctgcgcggccaggccccgcaccgagaccagtgcgagacccgccaggccccgctcccctgccaccagcaccaccctgagaactccggccgccgtccatgtccgccgccctcagcacgtcagcgtaggagataggtttcctgcttggtatgtgcggcttacggaacagtgtcgcacgcggcccagtgcgtgaagtgccggttctagcaaacaaagaaaccagaccgggaatgggccgaaagtgtgacctggggccgagaacatagttgcatctagccgcactgtcaggccccgggcgcccgtcacgcagcatgctctgctgccgtgattcccgttccgttaactcggcactgtttgaattcgaatcctgtagccatcttgcgcaaacgtcgtgattctcatgcatgtacccagcccctgactccggcgagctgcccggcgaggtggtaaacctttcagctacacca

SEQ ID NO: 178276 - DNA, 520 bp, Zea Mays
gcgagagcaacggcccaagcgagatcgccggcgccaaccacggcggtgggtgcggcatttctgttgaatccaggtcgaggcggtggggccatgctgtcggtgcaacagagagggcgtagatcaggatgaccggtggggctcgccagttggcgtccaacaccgtgacgcgcgcgaggcatcagctgacgaagcgggcccacgcgacagtgggagaacggtggagacggcgtgcggcggagtgaaaagggaagtgggccgcgcgggagtgttagggcatatgggccgaaatggggtagtccggcccaggtagcattgctattcttttcttttttctgatttatgttttccccttctcatttaaattcaaatctttcaaactcaaatcctttggtagaatctcctcagattgcaagtatcacttgaacactctagtcttacttttgtttatactatttattttgtatatactttcctctttagtgattcttttcctccctctccacatttctttggagttttg

SEQ ID NO: 178277 - DNA, 741 bp, Zea Mays
agggggtcggctagggtttgggggggaagagtgggctcccatccgtcggatcaaggtcaatggcccaaacccgctctcacgtctgtgctcccgaccccagcgtacaagtcaaaaaagttctactgtttcactgaggtatgcctcctaaaactccaaaccccaatagcacaggacacggaagaaaagagaaaaaaataaacttcaacttcttttcagaaaactggggatcacactctacccccttaaaaaggaatttgacctcgaattccgtcgcttctctcggaacgacaaaagaatgattagcgaagaaaaagaaactcacccataacgaaatgttcggggtacttctgccgcatcagctcctaaagttcccaagtagcctcgcactcagactgattagtccacaagaccttaacatacttaattgatctccttctcatgacacgctccgaggactccaagatacgcacaagacgacactctagagtcagatcctgctacacagcaatcggttccaactcgatttgatggtttggatcccgcaaaaacttcctcaacatagagacatgaaatatcgggtgtacatctgccatggaatccggcaattgcaagcgataagccaagctgccaacccggaccaagatagagaacggtccaatgtatctcgggttaagcttcccggagacaccgaaccgaacaactcctttagtaggtgataccctgagaaggacttgatccccc

SEQ ID NO: 178278 - DNA, 779 bp, Zea Mays
cagccgccagcgccaaaagcacacggatagtgggcaatcgagccaccggagaataagtatcaaaataatcatcctctttcttttgagtaaaaacccttagccacaagacgggccttgtacttttcaatagtaccatcgggtctcctcttcctcttaaagatccatttgcagcccacaggcttgcaaccagctgggagatctgatatctcccaagtttcgttcgagatgatagaatccatctcgctacggacagcctctctccagtactctgcatccggagatgcatatgcctctgcgagggagcgtggttcttcatccactagataaattatataatcatctcccagagacttttcagtcctttgtctcttactcctccttaactccaaatctggagtctgatcaaggacacttgagggcagagaatatgtccgagatggaccatctgaggctactacttccttatcccgcataggaaaaatgctctcaaagaatgtcacatcccgagactccattatgacatttacagcgacttcgctcgtctcggaatggaccactagaaatctataagccgcactgttatgtgcataacccaggaagacacagtctacggtcttagggcctagctttctcttcttcggcaacgggacattcacctttgcaaggcagccccaagtccgaagatgagaaagatctggcttctttcctttacatccttcatagggcgtcgcctcacggttgcgaggcggtaccctattcaggacataacacaccatgag

SEQ ID NO: 178279 - DNA, 940 bp, Zea Mays
caaccccgttctagtcagcgaacaacagtagcactaaaaaggaaaacctagtgaacttcactgacctcaagggattatggaacgagcacaacatagttgagactttctccgagggaccttggccacgagcccacgacgaggttagggattcggtggcatggtcaccagacagaggaatggatgcacacacttctgaagcagatcacgctaggtggttaggagagaactcaaactggcaactcagcttcaacacacactccgtactctaaacagagcttgaggcagagagaaaggtccactgaaacaaatctgcagcagctagcttaaaaggtagggcaggggaaaaaggtcaccgagctcactatggctaaatgaagaaggatcaccaagggtgccaggacctcaagcactaggacacctgtccacaaacacaccccgcgccagcccacaattccatgaatctgctttggtttatttagtcaaggcaagtagataaggatgccttgtaataatgcacacaaaagtctaaacttgatatttctctaccttcaactatgcaccacgaccttatctccatccctacacacaagtacaaccagcaagggcacaaagatcttcttcagttttctcaactcagcactgcactaactgaactagccactgctatcccagttgcagacctccccgttgagaccctatcatttcacaaatccctatggcaacaacccaatcctccttaacaagatttactctccaactctagcactactaacttggtatagcaacccaagacttaaaacacacagaaccaaagatgtgatgtgccaaagtagaacaaaagcactaaaattcaaagtttcagctaactgaacagcacaaaaccagtctgacagaggaagtttgggtgcattttactcccaagtttttacagtatcaaaac

SEQ ID NO: 178280 - DNA, 533 bp, Zea Mays
cgttgaggggttcgtgccaccgctctgttggtcggggaaggggaaagttggggagaacgactagtaccattagattagacgtcgatgatggatattagaagatggcaccttttcagctcaatttgatcgaggtcgtagactttgggatggacggttgagttcataagccgcatactggatcagtttggatgaatcgggccattggatcccgatctagcggaccatatgtgacactggttcattaaaacctagatccaatctagactctcaaaattagatcgaacgaccaaggatcacagataccccttcgcgttataaaatctgagcccttgatctcaaatccagcggccacgatcacgtaccccttcatgatctaatatcgaccgttgattaatgatttgacgcccctgcgcgtatgcgcctgtgtctgcgtggcagattttctaaaagaaccctgagaaataggagaaacaacccgcagtccacccatgcagtaaaagcattacaaaagagtcatgcttctttcgaattga

SEQ ID NO: 178281 - DNA, 611 bp, Zea Mays
aaactgcgcaagtgaaggggtacgggcgaaactgagccgcccgatcagaaatctagggctccgattaactcgatacgacgaccaccgtgcttacactgagaccgtcgatccccagatcgacgacggagagcggatcaccctgaaatccgatagatcaataatgcccggtccagatcagattgccaacgtggtgtggccggactcgatctcccgcgctcatccccaaatctacggaccagatctaaaacacgcgaagatttcttcccaggctaatctggaccgcgcgttcatgaatcaacggccgaagccaccttccccaaccagccgacattgggcacggcggcgctcacctccatccacggcggagaccacgccggcgttccctgattcggcgcgcaggtgtaccaaactccgtggaagctctatgaaaacgatgtggagattcaaacaaacacgcagggtgtttccttacctacaatcgcgcagtggaatcagctgcccatggaggagggcgagcccgcggcggaacacagacaacggcgagaaattgacctcaatccaccacctcccacccccgatttctgtcagggacacgacacacaggttcgcgc

SEQ ID NO: 178282 - DNA, 458 bp, Zea Mays
taaatagatgttgcaggatggagcatagaaatgtacatttcagtattagttgaaccccaagaggttggtaaacatctaatacattcctattccattattggtgaacttctgttgctatgtattacataaacaaatctcagaatcgaggtaaaaatttgttgtccaaacttgggaagaaataaaaagacactacagtaaataggttcatcttattctttataatactgttttgttttcttactaggattctacccatattttatattcttaggatttccccttattatatactttgtcatgtaaattatcatggattcacaatgtggaaaacaatcagagggctggaaacgtgcacttgacctcgtgccgtctacgtgttatatatagccaggaagagcccctggcgtggcttacaataaaggagacaaatcatgtgcagggaaggttcttgactttcc

SEQ ID NO: 178283 - DNA, 915 bp, Zea Mays
gggccattcaccgagttggagtaggcaggtactgatgtcttcaactgaggacaattattcttatagtgactggggtctccacagtgccaacaggcattggctggaggttggctgcttgcaacagatggggtgtggagggaactttgaccaggctggctgaaacgtgacggagctgaccctgttggcttgctgaagctcgaccctttgggaggaaatcttggctggtgaggatggtcttgagtttaggtctcagccccttcaagaaacatgccatcttcttggcttccgtgctgacatcatcaggtgcatagtgagctagctctgtgaatttgtggacgtactcactaacagatcttgctccttgagttaactctcgaaattcttcttctttgagctggacgattcccaagggcacatgatgctctcggaaagcggcttcaaattctgcctaggtagcatctctgatggcagcgctgaatgtatcccaccaggatagggccatcccggagagttgatgagcagctaggtgaacacgctggttttcagggcatccgatggcctctaacttcctctttactgtgcacagccagtcatcagcatcgagcgggttgctggatccgacgaatgtgggaggcttgagccttaggaactctcccattttgtcctgaggtcttcctccaattgggcgctggttctcgaggcttctagtgaggacctcaatgagtcgggtttgattggctagaacttgggctaggtctaatggcagctccggaggcgcggggagctaggtctcactcccttctccaccgacttatccttcgatacctaggggagtccttgctccaattcctgaggcggtaggcgtggttttatccgaggccatttgccagaggggagaaaggattactactttgc

SEQ ID NO: 178284 - DNA, 842 bp, Zea Mays
gtcgatgagcaacgctaacaatcaaggatgcttaaacacggcacagaaggggaggagcagacctgaggatggctgaccacggtggagtgtctcacgacggtgacttcgaccgatttgggggaagtaccgaattcgggcgctatggtgggtaatcgggggcaaggagcggtgctcggggttcgtaacaagttaacggagctagctgtgcactcaatttatagtatccgtgagtggtggctctgaatttggaatagggaagctgacggccggagcaaggtgagtcaccagagttcgcataacgtggcattcactaggaaaaaggttatgaccgtcacttggttatcctccacaacccacgacggcatggtagaatagcttaaggcatgtcatgaccgaggtaaacggcggcacgacgatggcggtcgcgcggccacatcgccggtgcaagtgggtacggtgacgccggctcaatccattccccctctgatcttttcacgtccgtagtaatatcatgcctgagctatgcacgaatcgtggcggacagcacgggcgaagttcattgaatctgatcttgttcagctactgtaccatcgtgaacacccatcagtgcgtctgacagagcaagttagagggctttgttctccaatttttatacaacaacccattaatccgtctgtagcaaagtttctctcctataaagcagctttgattttgttatagcaaccttaatcaaacattcactggatcatactcaaaattgctctcaaagttggtcccagttcactgtcagtcgaatttcagcttcagggttgactgacagcctgactttaagtccatttatc

SEQ ID NO: 178285 - DNA, 594 bp, Zea Mays
cctttcagattgcaaggtatgacacaaaatacacaaataaaattcttatccactttcttaactcatcacatttaactgcatcaaaacacaagcaaatcgattataatattattactaacaagcaaacaaattattatggtaatagcatttatgctgaaataccagcaaatcttgccgaagaaaagggagcactcatcgaaacaaatcagatctacgacatcagtcgttttagagttactgcagcaaaaacaacctacaaacccattgatggtgacaagatgatacaatttacgacttacacaattatcaagcctgcaagtaacccaccacctacatttcctttatatatctatcaattaactccatttgatgagattgaatctcagattcagcacaagaccaaattcctaggtaacatcaaaaatagcttcagcaattcaattgaactacattttctcactgcattactacctatattctaactacattttgtttaacagatgttcttggaactataaccgaggtaactgctttgaagacagtacacatacaaggtcagctcaaccccactattattagagacgtaatgataga

SEQ ID NO: 178286 - DNA, 559 bp, Zea Mays
caccttggtacgaatcatgagatctagactaacttagagaaattacatgtgggtaacgattatgtcaaaaccagactctttaaaacctatcgtcgagagtacgagaactttgtacagctggctaaagaaaccattaattccatgaggctaggaagacagttcgtcgctgccgcctcgtctgtactatagaaggtggcatcagtgtgtcagtgtgtgttttcagtatcctgtaatgtctcgtcgtcaaaacaccgggatgcataattaggtcagtattggtcattgttgttgtggcttggttgtgagtgtatccataaacaaatgtgttactcgccttccgtttcaaagagaatgaaagtagtaaaaatcatggacaatcgaattgtgagctcttcaactggcctaatgaatgaatcacattggttacaacttactagaacaactcaaatgcaaatatgcaagagttcgtaaatgttttacaagaaaaccaactgtgtcttattgccttgtccgaggaaaaaaactgtaagagctagtttgggaacctcaatttctcaat

SEQ ID NO: 178287 - DNA, 591 bp, Zea Mays
tgtggatctgtcataccttttggggtgggaggatcggacaatgatgtgaacatgctcaaccactcactgatgtgcttaagggtgaagcaccaaacacaaacttcatggtgaatggccacgagtacaactagaagtactaccttgctgatgacaactacccttggtacccagtgttcatgaagactattccgctcccacagacttcaaagcagtggttgttcgctgcgtgctaggaaggggcacataaggacgtggatagaacatttgcatgctcaaggctccatttcatattcctgcaaccctaggttgctctttctcctaacaggtgcttagtgcgatcatgcgttcatgtatcattctgcatagtatgattactaaaaatgagcgtggaggatcatacaacgtggatgactataagacaatcgagtcctatttgtagcaccgatcgtcaccccacaagcaccgatgggctttgcggccatcctacaacgagaggctgcactccatgcaaacctggtgcatgataaactcaaaaataatttaatagagcatatgagatctgcaccatgataattagattttatttttatg

SEQ ID NO: 178288 - DNA, 1172 bp, Zea Mays
aatcagtccaagtcggcccaactacagcagaaacacgtccacgcgcgcgcgcccgcgcccgctgtggagtttttgcaacagggccctcgcgtttttatctaactgtgaacgggttcaaccactattcctacgggtctctgacgctttacaccgagccccccggatttctaattctttgcacgcccaagtccacgacgacggtagcgcggggagcactccggcgagcacctgtaccggccgactggggccacggctggattctccgagcatcagacaccaaattggatctaccgcgagtactttccccaacccaattgcacgaatcgtgaactactgcggtctggccacggtggccgtgagcatcgcggcaagaccgacgcgttcccggcgattggcgggctcctagctcaattcagtggctcggcaagcatcgaagagtcatcagagtgctcaaacaagggagagtgagggctgaacggacctagaaagggctggccgcggtgagcagtttcttgcggtggcggaaacttgatttggggagaactccaaattcccgagctccggcgaacgactgtggctaattggcggtggctggttagctgacaaccctatggagctggtcacgggctcaatttatagggaggacgggcggtggccacgaattttggacgggacacacggcggtcgggagtgaggaagaacgctggcgcatcgaacacgtgttcaccggcgtggcagtaactccggtggtcgacggggagtttagagggagccacggcgacatgatggtgaggttgggacacgcggtggacaatggcgagggcacgacgacggtgagcagctttattcacggcggtgagcaaggggaggagtattgcggccgaccgaggtggcttccagcttgacgacgatgaggatcttttaccccgagaggttatccacaagtccgatgcatgaatccaaacgccagcgacacgaatcgcggcggagggatccgtcggcggtgaggacagtcgcgctggcggcctgatccgtttggttactgtaccatggggaaatggtattcagacagcctgacagtcacagtttaggaccaattttctctaaagtttctctagtaactcgctccactctctgtagcaaagtttcagagctacaaaccagctacaatt

SEQ ID NO: 178289 - DNA, 1121 bp, Zea Mays
ctcgtatgtagtttttgaatcgtccccagaaaatttcacaaagttcgaaattctaaaacctcgaggatatggcacggtatcaaaaaattcaggatagggcttcctataggacctagtatgccctttaggctcaaaaccaaattccctgagagtctttgccacttgctctctaacaccctcatatctctcaccctcacatgttgtatgtgtgattcccgatgctgatagcagtgctccctgtccccattcttgtaatcatttggaacaaatccttgtgggctcctgttccctataggcggaataggtggtccatatgccatactctgataatatggttgttgtaggttaaagttcattactgaatccccacccctctcattaacagtttggtttacattattatgcgtagctgctccgttacaactaggcgcatatgaaagattttctacacgcttcccctgcaattctccttgaacctgttgaactatagatcgaatctgtctaggcatattattattcatatcttgtctagattcagatctaaacgtgtcaaaagaattacgcactccctcagaaatcatgcgtgttatctctgtgacgtcagtcccatatttgctagctacagcagtatcgatcatgtgagccagttcttcacaagtgacaaacggacttaccttcttgctggaagtgcctgctccgctaccttgtttgaatacgccattcttggtcttccgaaagcaagccaacttttcattctgtttctcctccatctcccgcacaatttcttcctcaagttccttcctgtccgcctctgtaaggtcctccatcgtgaccttgatcacgtttagaggatgaacatcagattcatccggcactgccttctttatggtctgttcttacatggccctgttcttgattggcgaggagggtgccaatcgccaccaatttgtcgctgtaaaaacaatgttaaatcgttccccagcggagtcgccaaatctgttgctaccaaatctgttgccaccagttattagtcgagcaacaaggttgatctcactttcacatagaaactcgaatgcttttctcgtcaaagcaccaaagaaagaactaaaggaatatgtagt

SEQ ID NO: 178290 - DNA, 884 bp, Zea Mays
gcgctactaaggttgacaactactttggtagatgcttgcatcaattttgttgttttagcttcatgctcctcttttacttgctccagctcagcttcaagcgacacaattcgtctgcccttttcgacattagaagtttcgagcttatttttctatttgcacattatctggactttggtccaacagtcaataaaatctttttctaggatcttaaaagattttccttctcattgcaatcaaaccgaagcccagacattttggatctgagtttcattatttctttctgggctgcttcgccctcaccattcctcttgttccttaagaccttgcttaggaatagaacctgcaaagatataaaagagaaaaataagtcagtccatcaaagcaacccgaagctaaaaagatagaaattacctcaagacgagtgtaagccaggcaatcagaaaagtctttagaagacatagtagaaagcatggcctccagcttcgagaaaccaacattatcatccatatactatatactttagtttccatattgtctaggcagcagtataaataatcgtctgacccacccccaaagtcagtagaccccgaagggtatccaagttgttcaacgaaatcgatagcttcagccaactgctttgcgcccatgactttccctacaacatgatggacccgataccttcaaccacccaagtcttggtcaaaagatccttcactaagcggtgtatcatctttgattgccttcttggcctcttcaaattcagcagaccgcttccctttgttctccgctagggcaggcttggaggaacccttatcttcgactgccatgattgtcgaaggtgtcacctgtaatactacaaattgtgtacaagaaatacacggtga

SEQ ID NO: 178291 - DNA, 861 bp, Zea Mays
atgttttacttctgtgataattacatttggagcttctaaacaaacttttaagaccatcagtttttaaggacatgtaaatgactgtgtcattggtgggtagtaccgtagtaatataagatcaggagcgactgcgtctttgacagacaaaggcccagcatgggcagcatcgtcatgagagcgagagcggagaaggagctttgggagatggctggaggctggagctaagagcatgtctctccttatggctccggctccagggttgtagggtccccttagtagcgatgtggtcgtcattatttgtttagtcgtatgaggtatgaccccattttttgtattcttgtttttggccaccgtaagtggttttatcttgtaacggccggcatggaccttaaccactttcttcttaatataatgacgcgcagctttcctgcgcttccgagaaaaataaaggatttaaaaatcattatcaaccatgagagaaacaacattggatgcagtcatgttgataggtaacaacaaatggataaaatgaaacatgtagctttttgaaaaaaaaactaatcatgtagcgccaacttataacataattatatccataggatacatgtagtaattctgttttacttcagattgtttttggaggagaaaactgtaggttttacttcagattgttgaaatgttccatgttcattggccatgattagcatttttaagcatttcctgagtaacagaataatttggtttcaatctctttattctgttggtttgttatacaacttctgtactgtccttgattatctcattttttaagtgcactgcttctttctttattttgtgccctccagttttctcatatgtcca

SEQ ID NO: 178292 - DNA, 618 bp, Zea Mays
ggctgtcaggcgttctgaataaggactccgatggtacagtgctatacaaatatcccaggttcagagaacctcgccgccggtgagccgcgcgcccggattcgtgcccaacgctgtgattcgtgcccagctcaagtggataacggagaggagtaaaaatcttggcgctcggattagctcgggctcgctcaccgttgtgcccgtcgtacccacttagaccacggctggccgggatcgtcctcgccggcgttagccgcttaacgattgtgtgccacgtgtctgggaagtctagcacgccacaatgaatcggtgttgcaagcctgtccattgcctgagaactggccacggtgaaagccacgaattcattgcgccagtaacctcccttctccccagtcgccagcgcttctcctccaaattgagtgccgccgccgttgagtgctataaattgaagcctcagggagctccgcttggtaattacgcgtccaacgcaccagcacttgcttccaattgtccatcagagccgcccaattgcccatttcccccaaatcggtctaaataccaccgcatgagcagctcgccgtggccagcgtgctacaggtccgttcgtgtcctctgctcttg

SEQ ID NO: 178293 - DNA, 875 bp, Zea Mays
tggtgggatactttcagcgctgccgtcagagatgctacctgggcaaaatttgaagccgccttccgagagcatcatgtgcccctagggatcgtccagctcaaggaagaataatttcgggaattaacccaaggagggagacctgttagtgagtacgtccacaagttcacggaattggctcgctatgcgcctgatgatgtcagcacagaagctaagaagatggtccatttcttgaaggaactaagaccataactcaagactatcctcgccagccaagattttctcagcttctcgcacctctcaaacaaggccatacaagtggaaagggctagagaagaagaaaagggtcacctcaagagcaagtttcaagtcctccgagctcagcagcaggacaagcaccagagagtttgatcttttgggtttcctcacaaaggaccaagcttcaataaaccagcagggtctgcttcgtcacgttttagtcagcagggtcaaagttccctccaggccccctatgttgcaagcaaccaacctccagccaatgcttgttggcactgtggagaccccagtcactacaagaataattgccctcagttgaagacattcgtgcctacctactccaactcgatgaatggccccaagagtgccccagcacccgcctccaaggcaccctcctccaacaaccagctaagcaagacccagtatcatggcaggacacgagtaaaccacgtcgacgctcaagaggctcagcaagccccgggagtagtactcgctgatttcctagttgaatttacccccgctgctgtactttttgattcaggagcatcccattcattcatagccactagttttgtggaaaagcatggcattcccactgcatc

SEQ ID NO: 178294 - DNA, 403 bp, Zea Mays
gcatgtggttggttactagaaatgctgtgtggccggtgggggcgacagggaccggcgaggtgggctaaacaagagaatcagtggagtgatttactgttaggtacacgcactgccccggcccctgagcttccggcgccgctttgcgtggatggccggccagcggccacattatcggtttggtttattgagcgcgagtaggtcgtcgtggtacggctgcttctgctttcccctgccgggtgagtgtgctccgagtcatagttcggtactagacgataagcgggttgatttgacacccgatctgaaatccgaactgagtttttttccctctctcttatatagaccaatgccgttgatgcattatcgtcacggtgaaacacctgtaggatcagaggaggagtatgat

SEQ ID NO: 178295 - DNA, 582 bp, Zea Mays
ctaggacctaaagtgttgcaagcaacaactaaacgagagtctacaatactatatctagtgattctatgaacgatgcaatgagttgcctagcgttaggtatttcgacgtcattgggttgcttaacttttttagtacatatatcaacacatttagtcaaaaccatcgcgacctgatctccctaacgattctatgtcttctcgtgttcttctctatcaggagtctctacctctgaggccgaccttccccccatttatagatcaaggggaggtgattacaaataggttctcctagaagggagtgtaacattaggataaaaaggaatggttcacccttggtaaaaccttgttgtgcgtctatatcctttcctgcgtgagatttgtcaagggagcgtgcgatctattctagcgacgaaagtctaggcgtcgtcattactcgttcttgtccgcttcttcctatgtcgaccttctatattggtagcatggctgctggtctccccttgttgtcatgtgggctcgtagaccgctggaggactcaggtttataacctataggtcatgagtggatcttggcctttaacaccctg

SEQ ID NO: 178296 - DNA, 632 bp, Zea Mays
aatatactaatattcattttgagactataaggatagaattccattttgcatatgagattataagcacacatgcatgatgacagcccaacatatttccgacataaatgacctaccatcaatgtatccaaaagcatgcgagcggcttactgaaacgttagaaaaggacagtgtagaagattggacaatttactagcgacataataacatgggctgggctgtctctagggcgtgctagaaaaagcctgtagggatatgcatatgcagggaatcaaccaagtgactgaagaatgttgccagcaatgattgtactagtaagctcctcttttgatatgcctcccttcaggtggtctcagcagattctgatgtaaagatttagatctccatggataaagcagcagaggaggagaaaaaggcaagcgggaatcatcagaaggtgccaactttatggacccaatgggttcattctggatcaaaagctgtccatgacctctaaagacgaggagttttcttaaagttatgactatacagtaacttaacttctatctactacaagaatgttgccctttcagaaataaaagagaatgctatcctacagatggagatgttatagctaaagataaaatctgtcttta

SEQ ID NO: 178297 - DNA, 358 bp, Zea Mays
ggcctttatggacgcttctaatgtagcctaagagcatctccaagaggtctcttaaaatgtcccctaacctagaattaaagggaacatgaaaattcaagcctccaacagggctctcaaaccttccccaacttttcatagccccaaaaaattcctattttgtagctacaaacagggacaattttggttcccccaaactgtgttacgccagcccagcaaatctctcgcaggcccatccgccattcagacgtcgccttaccttctgctagatgttgcccttctgcagttctgctagacgccatcgcccacgacacaatcaaaattttactctaggacttatgttgttcttcgctgccacgtc

SEQ ID NO: 178298 - DNA, 492 bp, Zea Mays
ttgagattcgacccggatttcgggatcccggtagcctccatgggtatttataagggcataggcctcctgttgtccacacggtgggattatcagctacctggtcatggaccatcgtgccaagcgaagcagccgagcgagagggatgtgcggccgtcgcggacgagatcgctgtgtcagcgttggagccttggaacgcgaactaggtggtcatcggtgctccctgcacgagttcgtgacttcatcaagcggtgtgggcgatcggagttcaagagcgtgctcgccggagtctaggaaccatggcggagatgcgctatcgcgtggaccggagccttgcgctgccatcctcgggtgagaatccctctgagcctccacctccgtcccctcgtagttcagcatcgagtattgtattcattagagcacccgtggatcgagaatttgtcgccggacttatggcgccaccgcggtgacgctgtccgttccacaccaatctcg

SEQ ID NO: 178299 - DNA, 831 bp, Zea Mays
tgcggggatgcttgatggttttggtagttccgttacgcacactcagtgcctttaactgttctaccgtctcctccagtttcggctcttcagtcacatttgtcctagcttcgactggcaaagatcgacctggctctatgataggagcggctccctcaattagcttcggcacgtcggccgtttcaatgcgcatgggttggtgcatcaaaactttaacctttttcgacctcgacacactagaagttgctgaggtagcagctttcctcttcttcccctgctttcgcgtgggatagcagtaatctggatacacaaacccgatgacatcaaacaccctattcaatctctttttgccccgagcaccgaaggcagttgtcatagcttcatcttcagccttcgagtatgctccaagcagctcatcgctagttgcctctatcacatctaaccagtcatcattcggctcatcaaactggctcctatatcgaaaagtatacttcaaatagaccaaaccattttggatggagccagtgtcagcctccttcgacatctcccatctgcttgcaagtgaccacactctgtaatcaatatgctcttggactaagtctgttgtaccgatgtaagtacacaatgtattgaaagttgcctgacacgcctgcacaccatttccaagtgcaatgaccggcttcctaatgccgaagtgagaccatatagggcgctgaataacccctgttatatcttccctttcactaagatcaaccttcacataaaaccatacttgcatcagcgcggggtacaaagctgtagcagccaaaattgttgtggtatgctctttcccgg

SEQ ID NO: 178300 - DNA, 581 bp, Zea Mays
ggcgccgaggttggctttcgaaagcatagctgaagcagaagctaccaggctagaggatattgatgtgctggaggaagaatgattgaacacagtaattcagtcggctaggtaccagcagaccttgaggcgctatcatgataaagccgtgtgacaccggtcctttgcagtgggagacttggtccttcgccgaattctaaagggggaaggacgacacaagttgtcaccactatgggaagggccatttattgtatcagaggtcactcagccaggatcataccggctcactcaaatggatggcatggaagtggggaactcatggaacatagagcatcttagaaagttttatccctagcgagacctcaaaaattctcgaagcaacattgtactctataatcgggggacttcatcatcaataaagttttcattttcaaaggcattcagactcttgactttcagctgactttgatttgattggagtcaaaatcagcacgcttactcgacttagggtgaccactataccctattaacggagcaatcgacttaagtcggtgacgacttaagatggtgcgacatgctcacgc

SEQ ID NO: 178301 - DNA, 374 bp, Zea Mays
tttggttttacatgcgcgccatgcacggataattttgctctggttccatcacccctgcgagcgagcgcgtcgttttcaaggacatcgacgtggcgcacaagcaaccgcgagcattgaacgctgggggtggcgttcccctttcggccgcgtatcgtaccgagccacaacttccgcgcagggaggccatccgcggggtcagcaccgaccacgctcttcacgggtcactgcttgtcggcctgcctacattaccagtgttgggcgcttttgccggctctcgctgcattttgcaatcgatacgcatgaacatgacgctggttcggtcgtgccaatgtgcgtgacgcatgtgggtgactgagcatccattgatgggtcag

SEQ ID NO: 178302 - DNA, 363 bp, Zea Mays
ctggactagaaagaaagactacacacatccatgtaacatatgtaccctatatcacaccaagagtattcttaaacagattaaggtgaacctatccaacaaatcgaaacagaaatcatagaaattggatctaccatcgtgtacctcacaaaattattagtagtcaagacatcaaccacaaaaagaaataaagtcatctttgaagagggtctggaagaaatttcaccagatcaacgccatggacctctagatccacatcatgtaccacctcgaggtcatcatgtaccacatcattcacacagctacaaaagctcatataagtacttaaataacaagcttatatgaaattgattattctaactgggc

SEQ ID NO: 178303 - DNA, 1014 bp, Zea Mays
ttaactgcaactatttattggcatctgtgttatacaacctgatcatatttatcttttagcgacgcgacaaactcgcatattcccacatgctacgcgatactgaggtgactttgatacaacaacaaatttagcttcttcgtattttacggaatacataactgtgtgatattgctgctaagacagagattggaacctattctccctttatacatgttaaaaaaaagcttccatcatctgactgtttatatcagcttgatcacaggatcatgaactctgcacgtcaacatgacaaggacagactgccctcgccaccctaagtatgtccttatgcaacaagcagccctaaaaaggagtatacaaattaaaaagataatggacaatgtttttcattcatttttttatgcatacacatacaaacacaaatttgaactccaacttaaaattcatactgatattgtaaaacatgtgcaggatcaggactagccaacttcgcatactctaatctgattctatataatctggtgaccatggcagttatattatatcgtaagttgcaccgaggtatattgttctatacatcttaacaccaatatagtatacataatattcatgatagctgctcttcaacatcactcaaattcacatagaacacaaacaaacaaaaatgcaaaaactactttattctcccttgtaaatatcatacaacaacaccatttacagtattgattaaacattataaacacaattgatgtttccttgtcttcacaggcttgcaaaggtcgtccacgttgctagaacgagtttgcttttgtgtatagaggaccaaactgataaaggccatccaatttcgtatatgtttctaccacccatatcagtaagctctatcttatgtttaatggagactatgtgtcttatcgtgtaagtttgctctacaactaaactgtaacggtgatagtcatcatggtagactcatcttaggtttgtactgtgatgtatactataatatttatctgc

SEQ ID NO: 178304 - DNA, 626 bp, Zea Mays
ctactcactagacttgactgcgggttgatttaatggaaaaccgagggctcttttgtaactgtttcacggctgaaagggtgtccttaattcccagccgcccgatctaaaaccaacgacacagattagatccccaagactctgaatcggtatgcatccctatccacaggatctgaaagcaacggtcctgattctattacggctacacctcatcacgcccacccgatctcacatcaacgcacagatctgagcaccgcagagatgcaacaagttttaatctcagccctacgctagtcattcaatccagcgaacaagtatgctggatttgatctcatccaccggtcatgcatccgacgactattctacccatcaccctcatctccctcatcttccggactgaagccactacaacgacgcccagctccagtacggacgtgccatggccgagacctagctacacattactgagactgaagcgagtaggtctagggcacacttacccgtagttaggacgctgaggtaccccgaacacgggtgggggcggatttgtggcggcagaactgcaccgtcaagaaattcgtgactgcctggttatcattccctcctgattgagctacgaacttcatcaa

SEQ ID NO: 178305 - DNA, 716 bp, Zea Mays
ctggcctttgcctcatggaggacttcgctgacgtagtagaccggcttctggatggttcggacccctgtgattggtcccgagtcctcaacctcctggccttccgtcaacatcgtggtggtcagaccaccaccgtctcctgggggaacatgttgactcccctgggattgttgtgccgccctctcggcgaccagcaccatgctcaccgcctcggaagccgctgtaatgtataagtacaacagctcccctggctccggagctaccagtattggcagggacacaaggtgctgctttacctcttgaaaggcttgttcggcctcttcggtccaagagaatggaccggacttccgcatcagcttgaagaaaggcagcgccctctcaaccagccttaagatgaagcggctaagggcggctagggaccccgcaagcttctggacgtccttgatgcgggctggaggcctcattgcctcaattgcccgaatcttctctaggtttgcttcaatgccccggtgtgaaaccaggaaccccagcaacttccctgcggagacaccaaagacgcacttgtccgggttcagctttgtgtgggttgctcgcagcctatcgaagaccagggataagtcttccactagggtcgaccctctcttagtcttgaccacgatgtcatcaacgtacacctccactctgtccctaatcaggtccccgaaagtcttactcatcgc

SEQ ID NO: 178306 - DNA, 322 bp, Zea Mays
ctcaacagaccctaaaaaggcccaacaaaaaactaccaagatccacaacactagcaactgaaaaacttcatacccaagtagcaaataactgaaaacacttgattctaaaattgaaacaaagaacgtgctctaactaaattcttcaaaccaaacctaagctcagatacaacattcaaagtccaaaccattccctgatcattaaaaccaagtatcattgctaagcagcaatgaacacgacagcagggcggcacagctatctcctgtccacattcaactaagggctagtttggaagtacaaaaaccggaggggataaatattcaa

SEQ ID NO: 178307 - DNA, 595 bp, Zea Mays
gtcaaaattgacatctcccaggaatattgtaatccatgtcgttgtaaaccggtgaaaggggatatacatacattttttcctgtcacttgcttgtagaatggattgttatttgagaatggctgggatcaagtgatgcgcggtgggagtgtcactgagattagctgctagctgttgacgggaggagacagcgtcgttgcttaatgcttgccagtagctgacagcctgacacacacgtgcgtaacacgagctgctactcatgatctatccatttctataacgaaggaaaaaaagtcttataaaactaggaccacatatgcacttagcgttgcacgctgatacttaaggcgattgcgcagttcaattcaatgcaaagtgcagttggcatatggcgacaacctccccggccgcaccaggttcttcttcgcgaagcacctctgttcgactgttcctgctccacctcgcagctagtgttgcaaaacattcacatgtgatcaaacccatcggatgagttactacccaagggtcgcaccccttggaggagtacccctgcagtctgtatataatccaatgttccctgcaataaagacttacaact

SEQ ID NO: 178308 - DNA, 850 bp, Zea Mays
atcttctattctgggcaaggggtacttgttcttgattgtgacttcattcagagctcagtaatcaatgcacatcctcctagtgccatccttcttctccacgaacaggacatggcggcctaaggtgaggtagttggtctgatataacctttctttgacagctcatctatttgcttcttgagctcaaccaattctagtctagataccctataggctctttagatatggggggtgctaggaataagctctatggcaaactcaactttcctctcaggtagcatacctggtaaatctttaggcaatacatccagaaactctgacacaacattgatactcttgagtggatctgcctccttgctatcaatagccatctgatgacaacctcctttccttggctcgggtgagactagcttagtcaccacttcttctcccactggggacaccaatttcactgtcctcttattacaactgataactgcttggtacttatctagccaatttatccctaggataacatctattccctgagtacccatcactatgaggttagcgggaaactctatcccccttatttccacacttacattcaagcaaactctatcggctcaaacattaccaccggctgaatcaatttgaattggtgttgatatggtagttattggaagattatgcgcctctacccatgatgtagtaataaatgaatgtgttgctccagtatcaaataacacttctataagatgggattcgactggaaacatacctactatcatgcctggtgtttcctggacggcttcagcctccaaatggtttagtctcccatggttgtaacgtgtctggatgcgattgcctgctc

SEQ ID NO: 178309 - DNA, 683 bp, Zea Mays
ttttgttcaagaacgtgtgtacgccagtgcctgtggagttccccagagaacgaggacaatcgactcagttcccattctaccctgtcctctgtgtgcgagctcgagcacgcgtcgccgccagagctagaagagttccacggagagcctggacaactccgtagcctctcgacgcattgccaggtccggtaagtcctccgatgtccctttctaccacctgcgttcatgtatcatctattttgttgaattagtagtgcaacagaccactggagtgtttaatttcattgtcaaatgttgtttgtatgtaaagttctcccatacctgaggatcccttgatttgttagtgcaagccatatagaccggtgaatgtaccatcaaactcaaagaactaagtaggtaaacaaactttgagtgaagcatgagtcgaattggtgcatgctctgttagtttgacatgaatttttgttacttatggatgagtgtcggtttgtgtgccaccatgcattggtgtattaaatagagcctagagtttttgaaatctgttacttcgattgattgcagggtggagtgttgatttgtgtgtttttgtagttttggtatgttgtgcatgaatcttttcagctgccattctcctataggaggactagataatcaactgagagctttgttagtctgactcaatgcttg

SEQ ID NO: 178310 - DNA, 551 bp, Zea Mays
tcctaacaattgtgttttgtttcgaaaggattatgcaaaaaataatgagtgcccagtgtgtggttcatcaagatggaaagatggtgaacaaagaaataagagtcctcagaaggtgttgcggcattttcatttgattcctagattgaaggggatgtttgcttcaaaaaaaactctgaggatgcacaatggcacaagttgaagaggaaagaagtggaaaatgagcttagccatccagctgatggtcaggcatggaaagactttgatagaaaacataattggtttggagaagatcctagaaatataaggcttgggcttgccatggacggttttaatccctttggcaaaatgagctcctcttacagtacgtggccagtttttgctatcccttataactttcctccgtgggtatgtatggagcaatggaacttcatgatgtgtctactcatccctggtcgggaatgtacgggaaaagattttgatgtatttctacaaccactagttgatgagttacaacaactttggttgggtgtttctacttttgatgcattgag

SEQ ID NO: 178311 - DNA, 809 bp, Zea Mays
cttgagttccaccaattctggcccaaacactcgataggctcttttagaaatgggggcggtgccagggataagctctatggcaaattcgacttttctctcgggtggcatgcccgttagttcctcgggaaatacatctggaaagttcgacacaaccctgataatctcgagcgggttggccttcttgctattaaccgaaatctggtgacaatcacctttcgctgttttaggcatccttagctcagccactaccttctctccgggcggggacttcaatgttaaggttctcttgtcacagctaacattcgcttcatacttcattaaccaattcatccctaagatgacatctaccccatgggtgtttattactattaggtcgctggggaaccctattccccttatttccacccttacatttgagcatatcttatctgcttgcactttaccaccgaccgaattaaccctcatgggcggcatcaatgactctactgagatgttatgcatttctacccatgttgcagtgacaaatgaatgagttgcaccagtatcaaatagcacttttgctggatgagatttgactgagaacatacctactgccacatctggtgcatcctggatcgcttcggcctccaagtggttcacctttccacggttgtacgcatggccacgattacctgttgcctgttgaggtacacctgccttgctggagcattggggtttgtctgctgctgcgccatcttctttgggcaatgcatcacccagtggccttgctctccacagtggaagcatcctctgcctcctccttgtgctgg

SEQ ID NO: 178312 - DNA, 768 bp, Zea Mays
gacataatctttttcaaacgagagcaaaagtgcaagacaaagtagtaaaggtgatcattgatggagggtgctgccataatcttgtaagtcatgagatggttgaaaagcttggtctaaagttgcagcgacaccctcatccatatcatgtccaatggttgaatgaatcgggagatatcaagattggttataaggtggaagttccattcaagattggagagtatgttgacaatggagtgcgatgttacaccgatgtttgtgtgtcacttgctgttgggaatactttggcaatatgaccgatattctcagcattgtggaagaacaaacaatacacgctagatctgaaagggagaaagtttgtactcaaacctatgacccctcaacaaatcatggctgaacacttacaaaagaaaactgaaattagtgcagcaagtagaggaggagaagagcaaaagaaattcagtgccatccacaatttggtgagtgagtgctacaagccaaattcaagagataaaaagaaagaagtgggagaacatctagttatgctaaccacaaaatctaagctgagagaagtgaggaacaaccaaaaccaagtgctctttgtacttgtgagcaaagatgatttgatttctcctaacgacataacatctcttcctagtgttgtggttgatcttctgcaggactatgaagatgtgtttccacaagaaacaccacctggactacctccaattcgtgggattgagcatcaaattgatctcattccaggggctg

SEQ ID NO: 178313 - DNA, 494 bp, Zea Mays
gcggtagcggttcttgagcggcagtgcctcgagcagtggtggctgggcgacgcgcccgcgcccgcgatgaagctctcggcaatttggagcttgcatagcaggtgctctatgcgagatgtgggtgacggcgaggcgggcactggaccccaaggcaaaggagggcgcggggagggagacggtggagagatgaccgtacatgcagactgcagtcgcttatcttccagttggtttagtgggggcggtggcggtgcctcgagcagtggtggtcggactacgcgctgccacccgtgacagggcccccgacgatgtggatggtgctttgtgtaagacattggcggtggcgaggcgagacatgggtggcggcgaggcggcatgcgaggcgggcactgaaccctaaggcaaaggagcacgcggggagggaggcagatggagggaggaccgtacacgcggagtcgtagaccgaagtcgttttggtcgagcttgatggcctcgcg

SEQ ID NO: 178314 - DNA, 667 bp, Zea Mays
tgagcctgtacgcgctgggggacgccttcgtcttgacgatgaaagggccctcccactttggctctagcttgccccgggcctctgttcgagctgtccggacgagtacgaggtctccttcgttgaattccctcgggatgactgtgtggtcgcgccatgcttttgtttgagcttggtatttgtttagagcctgtagggcgaagacgcggtctccgtcgatgaggtccttcgaagtaggctcgtctacgtcggggatggctgtcgtgactgtccgtggtgacccatgttttatttcttgcagggtcatggcctccgatccatatagaaggtgaaaaggggtgaacccagtcgccctgcactcagtcgtgttcagcgcccagaccgcttcaggtaacaggtcgacccatttgccttttttgtcatcgaggagcattttcttgacggctgtgaaaattttaccattagcgcgctccacgactccgttggattgtgggtggtacactgaggcgaaggcaagcttggtgccaatggagaagcagaaatccttgaagtcttgactgtcaaattgcttgccattgtcaactgtgagctcggatgggactccgaagcggcaaacaatgttttgctagaagaatttctgggcagtcttcgatgttatagtggatacagc

SEQ ID NO: 178315 - DNA, 487 bp, Zea Mays
gatatttcatgtgccactgatcttcatcgtttcactgaactggcctcctttcaccctctctttctcttaattcttgttaagaacagggtgatcttcattaataaaaattgttcaccaaacaacagtcttcaagtttactataggattcatggatcaattctgcataaattctcagatctggtgccctcaattcgactgcatttcactgaagccataacattcttaatccgattttcagtattaccccattctcataacttgtctctgatagctcaacttcatcgcactatttctctgatttttgtacaataccgtagcaagccgactgcatcaaagttactctactacaaaccaattttaactttgttacagacgttttggttaaacaccccttaatttgagctccacatggccccaaagtcggccctatacaattgttcttctgaaacctacagaaccctagtgttgggggtcttcgtcttccgaa

SEQ ID NO: 178316 - DNA, 431 bp, Zea Mays
ggggctggtaacaaatatgcgcaaaagttttgctataccaattaggtgtgaagggctggagggtcaggctggctgtaatatcttgcaatgcagttcgagatcctttctgtgtagctatttggggctgcctatctttgataagaagctgaggaaaagggattttatggtgtgggttaataagattgctgaccggcttcccaactggaaggctcgtttgctcagtttggctggtaggacagcgttagtgaggcatgtgctttcggcaattcctgtttatatccttatggccatgagtgttcccaaatgggtgatcaagtccatcgataaactcaggagggggtttctatggaaaggaaggaagaacgttaacggtggaagctgtcttgttccttgggagatagttgccagacccctaaaatatggcggccttg

SEQ ID NO: 178317 - DNA, 670 bp, Zea Mays
tggacttcagtttaccatcacgggggacagagccagccgtcgctgggctggacggtctagcctcaggcctggactgttcgactatgcgcaggggcacgagttcgaccgtgcgcaggggcacaggttattcccatataggcggtggaggatgtggctagtcattataggagttcagcaacatcccataaagggactgggattaggcatgcctttgctgtcgatgaatcttgtgggtgttctttggtttcgacctcgtgcgatggaaattagtaatggctaatttatcaaacgcatgcgctagcctcctataatcttcttgcataccacctaagatttgttgcatctattcatgtggttcttctatgtaagatcaaagagcttgcatgtcgtcgagcacagcgggtcgaagatttgtcaggttgtattccctccgtcggacgagattctggtttcgatcgaccttgaaatcaaccaaaagtagctcgtcaacttctgcctgcatctttttcttggcgtcttccagcctctgatattcttcaactggcagccaatccgtagtcggtttgatgatatttcttggggagagattggagttatcccttggatcgaccatatggggccgatcttatagatccaaccttagtctccccagtgaagttgccaaaaagtg

SEQ ID NO: 178318 - DNA, 808 bp, Zea Mays
cattacaagttgcggtagccaattggccacacttgcaatgcctccatcaaattatcaatgcatgttggtgtaccggtggagttttctcaagtactaccattgtcgacctattgttggcatggatagtttagaggcccatagtcctatgctggttcattggtctcacgactgttattcagatttgtagtttacatgagttgtataacaaggaatagtctgttcttaacaatcttcctgacgacatgcaaagtgtacttcgtcaatttccttcagtatttgaagtaccacaaggcatgcctcccgaccaagagtgtaatcatcagattcctttaatttctaggactcgactagtccagatgaggccctacagatatgctcctgctttaaagaatgagattgaacaacaagttgatgatatcttgcagacgagaaccattcaacatagctagggatgtcaaattttcgactcgttggtcaaacccgtatccgacccgaagtcggacggacatggattaggatatcacgttccacctgccggttatccgttggatatccgaaatcgatccatagtttcttttttagtctagcccattttacatagcaaagagtaaaccctaaatcaacgaaccccacgtctaacgctcgcaattctccactattggtcgccccttctagccttgttggcttcctgcgctgtgccccgtgccccctttcaagtcccataggtcgtagcacagctggtagctagacgaccactgtccatttcatgctctagtgcccttggccacagcctacatgcccataataa

SEQ ID NO: 178319 - DNA, 641 bp, Zea Mays
gggctatttgcttcggcgtggcatatctacggaggagcggcaggggctcgcacttatggggcgaggagtcccaatccatagccgcacgactggtgagcatgccgcagcgagaaactcggtggggtggttgaagattgagtcgcagacttcgccggccgagcgcgcctcgaggatttcgggcgggagcacatccatgcggtggatccggtcaacgcgggcgagctccgtgccttcggttgcggagcggacgggggatagggacgcgcctgacgaatggaccccaccgagcggtgatcgcagcgagaggggagataagtccccagtgggcccggggcgttagtgacgcacaccaagcagcaggcgggtgagcacaggtgcgcgggtgcgacggaaggcccgcccagggggacccacgcgtcggtgaaatggacaagagcgcggcgcaggttagggcgcgagaggtgggccgaggccagtgacatttggcccatgaggtcgttttcccatttgcttttatttttatttttattttcttttcttttcttcctttccaaatttcaaatttcaattctaatttaaattcaaaattgtggcaggtttatcctcaaattatattgcgcaattaaaagtaccacttttgg

SEQ ID NO: 178320 - DNA, 1205 bp, Zea Mays
agaatcacggaaattctctccctccacggtcaagtagatagccggatgttcgtgctcctagctggaccgaatcccccacagaccaggatgtggctgaggcaggagttctgctagctgaagttggagtgttgaaggagaggggtctgactgcagaggatgtggttgctgactttgtcttcaagaatattcagccattgaaggacagggcatacccggcctatctgtaccgaggcctagctgactccacccgggtcaccaatagaagaattcctgctatggacttggtgagccagctcgaaatgatacttagaggcaaggtatcaaatgttggtgcccctgttgcctactcggcctggaacttgcctccttccaaggcctttacccatttcgtgtcaaatcctcctgctggtgatggcggtttgggccttagagtgcgaccctctgccgaagaagttagtgctttggttgctttgcatgaagaaattcctgatgatgaacggcaggttcactttgaggtgcctttggatcccagtgatgcagagataagtgctatgcttgatatgttagccgaggattcttctgatgctgctcctgctggaacattggcagtggcgcctctcctagaagctagtaaagccttggatattcagaggtctgtcagtgttcgcccaaaacgcccttgccgagccaatcagcctgcttctcctgctgatgggcagaaaaagaagaagagacgtcttcaccgagtgtctagcttggatcgggatgctggtccttcgactcctgctgctgaggaagtgcccgtgcctgaatttactgaaactaatcccaatgggtgtgacccatctgacgctgaccccaatgggtgtgctgtccgtgttgctgatgaaaatgaggaggaagaagaagatgaaatccctctgattcggaagaacagtcggcgctacatagccagtggggaaagtagtggagttccttctcctgctttgtctgccctcattggtctacaagaattatctctggcgaactttgatcaaactcttgaagatatggttccagaggatctgttatcagaactggaggatggtgatgcaatggatgtttgtgctgatgtgcttgacgccgggctggggtcatcctgggcagcgtcccgcgcctcatcgaccttggagcgcggtcttgagggtcaggaagctggcttggat

SEQ ID NO: 178321 - DNA, 464 bp, Zea Mays
tggataatgacatatatattgcaattgccgaactaggtcacttctttcaacagttgtgtgctaggaccctaaagttagatgcattgcacaaaatgaaagatgatatcccaattgttctatgcaagcttgagaaaatatttcctccatcattttttgatgtgatgctacacttgacaatccatttacccgatgaagcaatccttagaggtccagtgcaatatggctggatgtacccagtagaaagacgtttatacactttgaaacatttcatgaggaacatggctcatcctgaaggttcaattgcagaatcatatgttgctaatgaatgcttaaccgcgtgttcgaggtattttgatgatcttgatacacgacacaacagggagggaagaaacagagagcgtgttgatttgaccaagggtgagttgtctgtttttcaacatggtgttcatttacttggagcccct

SEQ ID NO: 178322 - DNA, 638 bp, Zea Mays
cacaaacgtggtgtgctaacctattcggtcaaaagccctcgcttaatttgaaggattcaaccctaattggagcttgttcatggtcacggcggtgaaacaaccgttgtgatcgcgtttcgaacaactaacgacatggacgctaaaattgaagctcggggaagcttcacgggttcaccagaggttatgcacacgcttgaatttggactaagcaagaatagaagagcgggtcgacaaagagggtgtctgcggcgtcgttttacgagacgactatgtgttccggagtgtgggctttggtaaagtccaattggccggctccgagagcaatagaaggccaaagacaagctagaacaggaagcaatttggtaggtactaacccgaggagtgttggccacagaggggtccttcacggcgccacttagaacagggaggaggggatttgtggactgtgtgagttctccggtgagattgagtcgattgcacaagtgctcgtgtgtgtgatgtggtgaagaagtagtgctcgggctcaatttataggcagatggtcgaagatggatgagattcacggagctgtaaacgcgctggcgagctcacctgcgcgggcagagccacggcgagggtccggtgaccgccgattaacc

SEQ ID NO: 178323 - DNA, 529 bp, Zea Mays
gtttactcgtgccctgccatgatactggctcttgttctgctggttgttggaggagggtgccttggaggcggttgctggggcgttcttggggccattcatcgagttggagtaagtaggcccggatgccttcaactgggggcaattattcttgtattgactagggtctctgcagtgccaacaggcattagctggaggttggttgcttgcaatggaggggcctgaaaggagatttgaccttgctgactgagacgtgacagagtgggtccagctggcttgttgaagcttggtctcttgggtggaaacccaaaggatcaaattctctggtgcctgtcctgctgctgagctcggaggacttggaatttcctcttgaggtgacccttttcttcttcccttgccctttccacttgtatggtcttgtttgagaggtgcaagaagctgaggaaatcttggctggcaaggatagtcttgagttctggtcttagcccattcaagaaaaggggccatcttcttggctcctgtgctgacatcg

SEQ ID NO: 178324 - DNA, 303 bp, Zea Mays
gaggtatgcagagaccgctaggtgctttagagggagattttaccctaggcatgtctgaagcatccaaaacataggccaaagtgaagataaatctggacatccttagggacaacaaagccatcaacaggattcatctcaaggactaggagcacaacaacaatcttcgcatgacaactttcgcccaccagccccaagaggagggatagggggcgaagcttcggtggaaggtttaacaataattgggttccattgcttcaactagcccctcacccattcattgggagattcaactaacattcatcc

SEQ ID NO: 178325 - DNA, 406 bp, Zea Mays
gcgataagccgataaatgggtggcttaaatgctaaaattatgcggataaatcccaccagttcttgatggatcggtagttctgaacaagaaaaaaaatgtcacttcatacctacatggctacatatgcaggtctagaacaggtggcacctaatttccggtctgctcacttcaactacttatggttgtttgcgctatagctgtgctgcggctgctgctgcggcagcttcagtccagcactaccaagagcgtccttcattatccaaactgtaaacaatgttatggaagaaagaaaaatgtatatgaagtagttgctttgtaggttgatatcaccccactttgtagaggaacttatgagtgcatcacataaaagataatagatcatctgtacgatactcttaaccttggg

SEQ ID NO: 178326 - DNA, 483 bp, Zea Mays
ctgctccctgtcttggccgggaggtcgacaatggcgctggctgggtgaaggttgaaggaagacaagctcgtcgacgtcgtctttgccctctcaagtcccctcctcttctccccagggccgttccgtccgaccttagggggaagtgttttaactgtctttcctcctcccaccgagctgttgtttgtcgtcggctggtgaggtgcttctgttgccggctgcctgggcaccgtgcttacgtgtgcccgcgccgacgatcaggcgtaccccagccacgacggggcctggtgtggaggcctgtctcccagtcttctgggatggctggctctggagatatttctgctggcagagatgaggctggtggagatgatggcgttggaagattgaagaagcgcacctgtcgtggtcagaggaggagaagatcaggaagccagaggaatagcgaagatcaggaagcagcagtcgaggtgcctgcccagcattgtg

SEQ ID NO: 178327 - DNA, 330 bp, Zea Mays
atttgaactcaaaccaaattcatttggcacggttttggcaccgtttgaccttgggaccaggcaatctgacactggcaccttggtgacgctacaactctctgtccctagcctaaaaccgcgcgacatccatacacaaaagacaaagcattgtcaggggaacaaatccttcacagcgatctcgcccaaattcgtgaagatttgcacccaatcagcgttagaactcgggcagaagcaacggttccacgtgtttgaccgtggctgacacccccggttcacgcccgttcgcgcacccgcgctccccagtgcacgctcgcgcgcgctcgccggtcc

SEQ ID NO: 178328 - DNA, 750 bp, Zea Mays
ggagtccaaaacactatttaaaacagtcactgacactttgcagaaataccctcgcacttctatttcttctccacaaacatccctggccacggcgcgctcgtcgttcatccctgacgctgcctgtatcggccatcgccggcgatgactgctacggctaactagcggagaggcataactggccaaggacgatctaagaacacccatttatttgacctaaaccctactgggaacagtctgtccacgatcatggaggaaaccgagttcgtgagcacgtgttcccgccaaaccatggccgaattgagtaaacgggcgccacagtgagcttcacaagcatgcagagtcatgaaaacaatacgtgaattggacagtgtcttaccagagcgggctggccacgggcgggctgttcttggtggcgcggcggaccgatttgggggaaatcggtgattcaccgactatggtggctaatcgagggtgggagcgggtgcttcggcttcgcaatttagagacgaagagctgtgctcggttgatttgaatggagggggtgaggatgcggtgaatttataggcgcagtgagccacagccatggccatggtgataaccatcgctggccttagctggcgatcaacggcggcgtcaagcgctatcctttcatacgagcttgccacattcccgccacgacagtaacgcggtcaaatcagtgagggcgtggatgaacgaggaggagcggcgccgatgaccggatatggccgg

SEQ ID NO: 178329 - DNA, 341 bp, Zea Mays
gatcacagggtttatagaaatacccaatcacagattgatccttgcctaatcagctcatataccctacctattctggttagaatacattgggaaggtaatcatatgtctagccctgattttagcttaccaaaactgactaacactttccaacctggaagtctctgccacattccatgagaggttgcacatgcactttttggagaggcctggtatgtattgtagcccaaggtagcggcagggaaaagtgcctctggctcccaagaaaggtgagatcacttgatcaaggtctatgtcctcacaacgaattgggtggatggagcttttagcaaagtttacatggg

SEQ ID NO: 178330 - DNA, 734 bp, Zea Mays
tgaccttcataatattaaagtgactgaccccttatttaaacctctgtagcactgtcataagccaaaacctcaaatccataattccataccaattcatgtgccaaagccccttgttccaaaactccttatatcctctcttgtgtatttgtgctttagttcacatttcatatgcttatgattatgtgactaacatgtgctcacctcttatgtcatttcagtgtgactgtgtgcccgctcgcgtgactcctcccttgcttggtttttcttgagagacgtgccccaggtagcaaatcttttctcactctcttctcatctactgctttgttgctctcgcttatctactctcattctcatgcagcgtgtcagtgatcagtggtcagtttctactgtcaggatggcgaggaccaagaatcaccccagcaggaggaagcgatgatcaggatccccatcgcccattcagacaggacagagcaaggaggtcgactttgagtagtagggagggaaaaagaaaaggaagttggatagagctactagagcagcagtagcaacaacaacaattgagagagtagagcagggagagtagatgaggattggattagatcagataaccttccatgtccgccgcgtctcatctcgggcacgctccactccagctaggtttgacccctatgctctagccactactaccacttcacctttgtcacacccggatttaaaggcaaattcaggtgcga

SEQ ID NO: 178331 - DNA, 1064 bp, Zea Mays
cagcaggaaggattgcatcttgagcttgtttttgagccaattcttagccggtgaaagcagtctgtggtcttgggcaatttcaaatttatgaaggaggtcctttgcaagtgccaactgtgaggcaacatgacccactttcttagtactccagctttgcagccttttagaagtctctttaagctttctatccagggtcacaagggggcaatgcaaactacccatagaatcccatgcagactgaacagtatcaagaaacccatcaattttttgccagaatgcttcaaagtggaatcttttttcccaaaggaattatcatggagtcccaagagtaaggggcagtggttagaagcctgagaagcagaactttgaagcagcacatttggaaaaatagcctcccaatcagaagagcaaaaaactctgtccaactttaccaaggcatgctaatttgaccaagtaaatttcctgccatgcaattggatttcctttaatgccagatcattaatagctgccctgaatctagacatcattgccctgttcaaatttgagttatttttatccgaagccttataaataaggttgaagtctccagcaatgacccaaggtccagcacaggcagctctgatttccttaatctcctagaggaaaagaattttatctgcatctgactgaggcccataaacgcaagttaaccaccatggtgtgccatcatttttacagaattgaatgaaacgcagtgattatctattcttgttaaccctatgtgaccaacattcctcctccaagcaaccagaattcctccactagcacccaacgaaggcatgaagacaaagtctgaaaacttaattcccagggtagagagaatatttgtacgagtaatctgctgcatttttgtttcttgacatcaaactacatccacatgaaaggaatcaacaagatctcttacagcatcttgtttaagagaggaattcagacctcttacattctaaaataaaattttaggaggatccatcaacaaccttcagcaaccaactacagacaaagaagacctgggcactaactctcca

SEQ ID NO: 178332 - DNA, 571 bp, Zea Mays
tgcacattttaataatatgccttagttggcttctttatatttatggtcattgcatcagtcttttttgcaggctcgtgctctaccaaatcaataatatgtgacttgaggctccatgcaatccctgacaaaaatcgagctgtaccagcagttgtagctttaatcttctttttctcgaacggggacaccaattttggtacagaaaatttagatttctttgatggttgtggatcccttgatggctgtggagaaggtgtatcccttgctggtggcgtagacagtgggtcaccaagaggatgaggaggagaaggtggtggatccctgaatgacgatgcttgtggcggagatggagcgtcagaaagagaatgaggaacaacatgtaaagtttgaggaggtgatgatggatgtacaatagaaactgcagtttaagggggcggagacggttgggtaggggacggcgtatacagtggtggatcaacaaattcgacatcccttcatggccaatggatgaattcttgatagcttgtctaagtgtctcaatagattcgggcctaggtgtcacacccgggtttta

SEQ ID NO: 178333 - DNA, 321 bp, Zea Mays
catcgctagtgcgggcgtcgccgccgtggtctagcgagctaaggctctcggtcaaagttagggtagcgtacaccgttgattcgggcgcggacggctgcgatggcgcccagcgtaccgattcgggttgggtgatccgcgactgcgggatcggatacggatgggcgagattagatcaagaaataccctttcaccggtggcatttgtgtcgttggatcgcgggtatgcggtcgtgatcggatctggtcttcgtaagttttgcgccgttggatctaatctaggtggctcgtagcaaaggataccccttcggcctggcataatcgc

SEQ ID NO: 178334 - DNA, 636 bp, Zea Mays
aagttgggctgtcagactgccccaagtctgaattcagactgacagtgagattggatgaacttagggctcaattttaagtaagattctgtgacttttgtgggtgcacaatgtaacaaagttagagctggtttatcaggcttcgactttgatgcagagtattggttgagtcatcacataaaatatagagcaaaatccatcccatgcatgctctgtcaggccaactgatgaagcttcgcgatggtacagtaaccggattggatcaccagctcagagacctcgccgccggcgaccacgcgcgtggattcgtgctatcgctgtgattcacgctgaattaaacgctgatagagatcacgaggtgaaagatcttgccgccgatgggttggaatgtactgtgtgcttgatggttcataagtacacaccggtgatgtggccgagcggcaatcaccagcgtgctcaccgttcaccgtgaggacgccacgccttaggaagtttatcgcgtcggtatgagccgtattgaccatccaatgaccgttgtagttcagtcactctgcgattgccatggtagatcgccgccgtgactcattcccctctcggccgctagcgcaattcatccaaaattggaggccaccgctcaag

SEQ ID NO: 178335 - DNA, 851 bp, Zea Mays
cccgcctgatcaccatccgacgacacctattgactcagcgaagcggtacgcagagatctaatcaggacctcgcaccacgcatccaatggtgcgcaatcaccttcttcccaaacccagccgagcggcggcgtacccgctgtgatatggcggcgtcatcgccggtgcgcgcctatcggtccaaaccgggtcttaactctagtgcaataaaccctaaacaaagcggaagtcaccgcagattagtgtaggggtcttcttaccaaggatcgcgtacgcggacgggctgaccatgggtccaggcggcttggtggcgctccgccctctccggcgagcaattaaggggggcacggtcatcgattccgcccacaaatgccacggatggcttcgctctagctcagtgtagacccccgacctctcctacggcttcaggcggcggcgaatggacgggacggcacaacggtgcccccgatcttccttccctccacttttctctctctcacccgatccacaacgaggtcaacagaggcgtgataggtggagagggttaaggcttcggccaattggtacttaaaaccccatggacctatccaggcacacgcaacgagcagcaccgggattcatggcgagcctccaccacgcacggcgcaacagttgaagacgggtaccaactattcgggcccacctgtcagccgaactgagaagtgcaggcgcgcgatagcggtccgctgggaagtgggaccatcatgtcagtgtaaggagggttgggccgcgcggggaactaaggtggactgggactccaggattgggcccaagcgcgtttttcctttttgtcttcctttttatttttatttttc

SEQ ID NO: 178336 - DNA, 434 bp, Zea Mays
cttcagagttgtctgatgaagatgaggaattaggagcaatagaagatggtggctgcacttccaagcttgctcaagataaactacgcattacttctttgttcaagggcatcaaacatagtcattagactacatacatgattatatcactgctgcgacatcaaatccttttttgtattattttcttgtgcatctccctggttttgttacaggataaacatgtctaatgagctctataacatagtttcaggtttagaaagtcataatctgattctgaggtgagcttggacaatatggacataagaatgaactcacatgattttggtcggcgttgaaggcaatgagccaatgacacatcatccaattttaatacgcttgtaatagttgaatcagcttcctctgatctgtgcaacctccaaggcaagaagctgcagtgc

SEQ ID NO: 178337 - DNA, 530 bp, Zea Mays
ggaattttctatggatcccggactgctgacgctattattagagaatccagggtccaatacgtaaagaaaaggactaaactgcaattacttttatactgttgtggagcgcgggtcgatttagtaaaatcgtaggggttctttagctaaacggcaacagcgaagaggtaccgaggacctagagccgtccgatcgcccatcaaccgacgggattagatcccccctaaagtgaacaggaatcacccacaacccttggatgcggcatccacggttccagacgatctcaaaccccatccactcgatcaggcgccaaaggcttggattcaatacgcgaaggggtaaatgttacttttaatcccagccgtccatctcaatcctacggccagggacctgtcttcccccgactggactcaagccgaggcagcgcggaagtgcctagggcggcggcgccatggccgcacaccatgatctggcgtcacgaggctctgctactgttaatccggggtgcaacacaaaggaaaaggcaaagtaaa

SEQ ID NO: 178338 - DNA, 488 bp, Zea Mays
aaaagagctagagtaagagcttagaagagcatagcaacttgattaaagtatgtgggcttcaaccattggctttaggcattcaccggagagcttccaaggtgtggaaattatcaggattgttgtaaaggaacaagaaggtagtgaaagtcttagtttatcacaagtggtgataatcttgagcaaaggaggagtgagttgaaaaagactccgagccaattagatacctccaacgtggagtagggaaatatttgaggcttcgctgaaccacgagataaattatgtgtcttctcacgttcatgcatgatcttgacgtatcctaaatctccttcgcgttctccaagccattcaccttgttgtattcttccctacacaaagaggcaagtaatatcgtggtggcttgagtgttgtggtggatgatttgttctgcctccaccggattgtagtccacatcgttgttatctagtgtctccattcctacctcaactaat

SEQ ID NO: 178339 - DNA, 723 bp, Zea Mays
gtggtgttcaatgagtagtgtgctgaaataacacacctgctgaaagagcggtgtggagtttcctgctggctgccaaagagcagcaggggaaggagccccgtccgggttgacccgcccagggaatctggataacagggattatggcccctaggtgctcactcccctgggttatcctcccctagctgccaaaggagccctgactgtctggtggagcccgtgcgtcagccctctcttctcctccgcaacgaactgcgcggagttcgccaccatcatcaggatttttggcgacctcctccttttcccgaatcgagaccccaggaactaaattggaacccttgcgcccctttcctccactctactaacctcttgcgcggactcgaacacccgaaatcagaccgccgccgccagagccgtatctagggaggtgaaagcaccaccgtcgtccgcgtgctacaccatagtcgtgaccttggagtactacctaggagattcgccttattgtgctgctcgtgcacgaccacttcgagagagcgacaactagccattccttcctcaattgctcgcgggaggagggccgacaccctgtttctgtgccgcgccgtgggtaggggattcgggcatcatgattcgctggtatgtctgcctcgcttaaatcgcctagtcctagtcttcgtgtagcacctgtcggctctcgatttggagtagtcacgctttagcaagcaa

SEQ ID NO: 178340 - DNA, 668 bp, Zea Mays
atttatgacctctcataactgagtgcatgtcagtctatcaaccaacttggggtaaacatgcaggcaggaagatttcgaaggaagtagtgccttaggatggcaggatgtggtctggtttaaaagcatgttagatgccaaatcctattcagttcaccatctccccgctgatcattccaatagggcattagatgcaaacctcacttatcctagtacacttgattaccagccttggtttgagtactgtgagtgtgaagtgtgaaccattcactagagtctacaggttagtcttccatgataattacgtgcacaagatccgatctcaccagcagtttcagtaggataggttagctgatgctcaaggaatccaggtgagtagaaatatcaattccggattacctttgtggtgtggttgaggttgatgtgccggctcattgataattctggaggaatgatctaaactatgagcaatgttggtgagatcagatataaggatgaaaaatgaagtctgatactgcttcagttatactgaacagtcatgtcaactctgttggtgagctgcactgggcatgcaactctggcaccagttttgcactctggcagtgtgaagatatgatgcatgtgtggttcagaaaatatataggccttttttgtgacatttgaaccgttgg

SEQ ID NO: 178341 - DNA, 425 bp, Zea Mays
ccacaaatcaagagacaatttatgtccacacaagacgacacaatttcgactccatcccgggaaaacgagaaccaaatgctgatggagaaatatggagcaaataaacaggaacgatttcctgatgcggacgtccatgtcaggcgcaccgtatccacctatagaattttaagagcattttattggacgagagcactgttgggatcatgaagagaataaaatcataaattcaagcaaatgacgacaaggaacagagagcaagctccatcatcttggttgcagctgacagttacctttcgaatgaaaaaaaaagtacaggatagtgtgttcatccagacaaaccattaatgcctccatgagaaatccagacgcgggatgagaaatccaattacttttgaaaatctttcctacatcatcatgtgtaaaac

SEQ ID NO: 178342 - DNA, 349 bp, Zea Mays
tgccgaccaggactcgaggacaggacgcagccagaacttctgggggaagggatgttaccccaaacccacctccggttcctcccaccttagccgaggcgattgtcgccttggtgaatgacaccgcagacaatacccgcttccttagggaaatggtgggtcaacagcaattccagcagcaggcaggaaggggatatcagcaaggcccccgtgaaactacttatttggatttctcggaaacccgtccacccctattcgtcaaagctgaagatccactagaagctgatgagtggatacgggttattgaacaaaagtttggtcttctccgttgttcagagacgcagaagccgtt

SEQ ID NO: 178343 - DNA, 380 bp, Zea Mays
ggaccgtaacattgaagtctccgtctggagaggaggtagtggctgagctaaggatgcctaaaacagcgaagggagattgtcaccagatttcggttgatagtaaggaggccaacccgcttgaggctatcagggttgtgtcggacttttcagatgtatttcccgaggaattagcgggcatgccacccgagagaaaagtcaaatttgccatagagcttatccctggtaccgcccccatttctaaaagagcctatcgagtgtctggaccagaattggtggaactcaagaagcagatagatgagatgttagagaagggttacatcagaccaagtacctcgccttgggccgctccagtattgtttgtagagaagaaagatggtaca

SEQ ID NO: 178344 - DNA, 651 bp, Zea Mays
cccgcttcagcctccttttcctccgccgagccatgcgggcgccgcgacgacggttgcactgcatgacaaggaacgggaataaagcaaacggagcggtagtgcggtccacttgccaccgcaacgaggaaacggagagctgggaaaggggagcattacgcagcggagaggtgatcagctggatgccatggcgatcgtgctcctctcccgcctcgtcgtgctcctccagttggtggacggacgacgccatgattgggttgggacttgggagttatgactgggacttggccggctgacagtggcaatagcagctgcaggtgttgccgtgctgggctcctttcagctgactcgtctgctctggcatttattacactacagatcgtgctcgatgggccccctctccccactggccactactacaatagctatcatataccaaaggccactagtttctccctacctcaccaataaaacttgaaccccaaaaaaaaaccaagcactccttgtgatacgagaaagaacgacgtccacatacatggaatgaaaggctacagagcgctgagtttatcgatggcaatagcaagtgtctcttttgcttctgaggacatgcataattttttttgtgggaacagtctaaaaggcgccgcctgctcg

SEQ ID NO: 178345 - DNA, 1485 bp, Zea Mays
tttaattagcgcgagctattctaggtgagacgaattattaacgtgcgtagaacgcacgacgacacgtgcgaacagcacgctacaatttattgcgcgacgcacgggcgatggcgagcgacacgagtgcacacgggggggggggtgtcgtgaccccatgaccgccgcacactgcgaacgacgtgaggaaggaagaatgtgtggggaagaagatatcgccgggtaaggtttcctcctggtaggaagtggttttgtatattttttttctgatgtgtcctctctcaattctgtgatccttatttacatagtattgtggtcacggggcccacagacggtgcccagacacaccccactcacaccacgcactacggacacacctgcctactagtgctcctcttcttcctgtggtgcgaccggaacaggaacgggcgcgacaagtccctcccctggagctgatgcttgtccacaagctgacaccgacggataccttgccttgagtacgtaccagtcctcccaggttgccgaagacgctggtagattagtccacttcacaagcacttggggaacagctttagagccctttttcaccaaacgacggtccagaatgctcttaggttgcagcgcctatgtactcagatctagaaattcttgaaagtctgcaaacacaggtgtataattgggtgtgaagggtttaagctggctgacatggaaaacaggatgaatcaaacgtccctctggaagtttcagacgataggcagcagctccaatcttctgaagaacctcgaaagggccaaaaaatttaaacgccagcttgggataggggcgattgacgactgtcgtttgagcatatggctgaagcttcagaagcaccttgtccccaatctgaaaaagatatgtccattctctgcctattagcatgttgagtcatacggttttgagcccgcgccaagtgttctttaagcaaagccaagtgagtatcgcgctctgtaacccaatccacagcagctgaatcttgggtcagatcagcaggaagggaaaatccagaaggagcattatatccatagagggccttaaatggagaacaacccagggatgtgtgaaaacttgtgttgtaccacagctcagccaaagttagccattgtttccattttttgggagagtcgtggacagcacagcggagatacatctcgaggcactggttcacacgctcggattggccgtccgtttggggatggtacgctgtactgcgaagtaagcctgtgccaaataatgtgaagagctctttccagaacgcacttgtgaaaatgcgatctctatctgaaacgatggatttaggaaaaccatgaagtttaatgacttgatccagaacagctctagccacagtgtgtgctgtgaagggatgcttcaatggtatgaaatgggcgtatttagtatatctgtccaccacaaccaaaatagagttgtacccgtcagatgatggcaaaccct

SEQ ID NO: 178346 - DNA, 299 bp, Zea Mays
ggttgaaatgcatcgaagctacaagcgacgaactgcttggaccatattcaaaggcagaagataacgcgttatctgcgaccttcgaaggccggaagaagaagaggttgaatagagttttcgatgctattgggtttatgtaccctgattaccgctacccgctacggggtcagaaaaggaaaggtgtggctcctgtgaaggatgttgcttcggctgtctctagtgagcctgcgccgaagaggaagaaggtgaaggtccttactcaccgaccgcgctttattgaaccagccacagtgcccgag

SEQ ID NO: 178347 - DNA, 565 bp, Zea Mays
gcagtctgtgtcattttagccctaggtgacccgacatacacaagtagaacggagtggaacatcaaataaacaagcagagaaaacgagccataattttcattcctaacttggcacaaactaatgtacatagctcgactaaacaaacacgataagctttaccttgagatagtatggtcgatgatggctgtgaggccggtgtagttggaagtgtgttgccaccatccatttctgcatttatagcattcacttggaaggaaacactgctataaataattgtgctttcggtgaagctaacattccactcgaaagacttctccagtaggtttgtaatttcgtttggaatgaaaccaggtggattagttgatatgagggtgtccacatttttttaatgaggcgctgcgccatccgtccaaagaagataaactcggcggtgtcagtgtcgtcttcagcggtgaggcatatcttgtacgtgcagagagtggtttgattggtagacatcactaaacatggaatctgtagacagtgaaggccttagttcaatttagatctaggttttggccgagac

SEQ ID NO: 178348 - DNA, 1661 bp, Zea Mays
atccaacaaaaatagaagcggtttcttcttggccggtacctgtgaattgcaaggagcttagaggattcctgggcttggcagggtattacaggaaatttgttaagaactttggggtcattgctcgcccactaactgatttattgaaaaaggcagtagtgtttgtgtggacacaagtgcacgacacagctttccaaacactgaaacaggcacttacttcagctcctgtcctagcacttccaaattttgataaaccttttgccattgaaacagatgcttcgagtaaaggcattggggcagtgctactgcaggataatcatcctttagcctatgtgagcaaagccttgggcgtcaaaaatcaaggactctcaacatatgagaaggaatatcttgcaattctgctagcagtagaaaaatggcgccaatatcttcagacctctgaatttgtcatttattccgaccatcgaagtttatcacacctcactgagcagaagttgacaacaccatggcagcaacgtgtgttttctaagctgttgggtcttcaatataaggtggtgtatcggaaggggtctgacaatacagctgcagatgcgttgtctcgacgaccgacgtctgaactctttagtatttcttcagttactcctgactcctgactggtaatgatacaagactccagcttcagattatgtcagccatgcacgacagtccaataggaggccattccgactttcctgtgacatatcgccggatcaaacaactcttttattggtcatccatgaagaattcaataaagggttatgtggcttcttgctctatttgccagcaatctaagtctgatcgcagtaaatatccgggtctgttacaaccgttgccggtaccagaccaagcttgggatgtgataagtatggactttgttgaaggtcttccacgatctgcacatgcaaacaccattttggtcgtagtggacaccttttctaaatatgctcattttatacctttgcttcatccttactcagcattgaaagtggctcaactatttcttgattcggtctataagctccatggccttcctcttgccattgtgtccgatcgtgatcgcatatttaccagtcggttgtggcatgagctgttcagattggctggtacatcattgaagatgagttcctcgtatcatccacagaccgacgggcaaactgagcgggtcaaccagtgtttggaaactttcttacgcagcttcgttcacgcttgcccatccaagtggtcgtcatggttatcagtggcagaatactggtataacaccagttttcattcttcccttgggcgatctccatttgaggtgttgtatggacgttcccctaggaatctaggcctggacatatcagatgcatcaactcagttggatcttcagacttggttgcaacaacgggagttgatggtcaagatgatccggcagaatttgttgagggctcaacaacggatgaaagcacaggccgacaaaggacgtacagaaagagaattcaaagaaggtgacatggtatatctcaagctacaaccctatgtgcagtcatctgtggctcgtcgtgccaatcacaagctcagtttcaagttcttcggaccatatatggtgcttcagcgtgttggcaaagtagcttataagctacagt

SEQ ID NO: 178349 - DNA, 819 bp, Zea Mays
aaacatgtgttacaacaaatagtgtttttaactttgtacacgattgaccttattaataagctaacgtaactagaacgacaccacgaatttaaaacgcaaccgataacacgtattcaatgtaccgtggaattaaactatgcaacgacatttattcagtggatcgagactacacagaggggtagaggatagcatgatcgacatgctgtgacatctagggggtaggcagagggccctaggagtagacgacgatgtctggtgggtagatgggtgggtcgacagacgtcgtcgaaatttcggcggcgtgctgcgcgacggcggttgagaggctgtggttcggtggctgttgcgcgcagggcatgacgggtagcgacttggtaagtagagagagcgaggcgtggtagaggcgagcaggggcgctgctagctacttgtcggagttactggccaccgcaccaggcgagctcgcgggcaaagggacggggagatgggcaggcccaggcgctacaccatggggtgcgttgaaccggacataggtcttgacgagggcggcacgacgcgcagtcgacgggatgactcgacggggagctcgtgacggcgaacggacggggacggatgcagcggggcggcgtccatcgaggagcgggtcatgccgaggtgaagctcgcggcggcgccatggaccaggcgcaacaacagcacacaaccggatggacagggcaagacgtgaggcttaccagggcatcggcttgctgcactgctccagtgcgcggggtgctcaccgaggtccatgcgacgtgggaaggagacggtttggattttgg

SEQ ID NO: 178350 - DNA, 572 bp, Zea Mays
gaggtggtagagctccgcggcgggagtcaccgtcggtgagcttcgggcgagggattggggtgggggaaatagcgttctgagttcacggcgatgtggtgaagctagtaggccaacctaattgctcgctggaccaacagaggggaagggagaagagggggacgacttaccggagaggaagacgacagcggcgcttccgcgaattgggctcgggcgagggaggagagtggtggctgaggccggtgcggggaaggaggtgctcggggtgacctttttataggcgcccgagggaaggggagcggcggagctcggcgggcgccggtgaggtgcatagcaccggcattaatgccgcacagcggcgacgacgagacctcacagcgggggggcggtaccgggcgagtacacggtcaagcggcgaggacgggcggtgccaaattttcctgtgcggcgaggggatgggcgaggggacggcgatggaggggacggcggcgagtcgtacgcgaggaggacgacgaagcggctgaccggtggggccggtctgccagcgggagggagcgcgcgagagagagcggctg

SEQ ID NO: 178351 - DNA, 631 bp, Zea Mays
acatccagcctttaacgtacagggcataccctgcttatttgtacagtggcatcaatgattctacccgggttacgaacaatagaatccccactgaagatctgatgagacgactggatatgatcctaaggggcagagtttcaaacgccgatgctcctgttgcctattctgcctggaacctgccaccgcataggccatttttcgaatttgtgtccaaccctcctgctcgtgatggtagtctgggtcttagagtgtgaccctctctcgaggacattgaggctctgattgccccacttcggagtcttccggatgatgagagatagactcattttgagatgtcagctagcacagacgatgcggagatagatgctgtgcttagtttgctggctggggaatcatctgactcaacccatgccaagccaatggctatcacagctggacaagaacttggtgaagcggtggagactcggaagcctgaaggtgctcgcccgaaacatacacgacgagtgaaccgtccgactgcaccggttgaggaaaagaggaagaagaggcggcttcggcgtctgtcatgcttggaccagggtgcaggtccttctactccgtttcatgatgaggtaccgacagaggcccttcc

SEQ ID NO: 178352 - DNA, 422 bp, Zea Mays
ggggttaggagattagggttccaaacctcgggttgaaattttgggatgttagaaacctaccccacttaaaggaatcttgccctttagattcagatggggctcgagaaaaggtaagggtattccctcctcaaagagtcctcactttcccaggtagcttcctcttctccttctctgctccactgaactttacagagtctcacttctgagttgcgggtctttcggactgctgagtcaagaatctttattggcttttctcggtactgaagatctttctgaatctggattgtctcttcttcgatgtgactttctggtacttgcaggcatttgcggagttgggacacatgaaacacattgtggatatcagacatggattctggtaattcaagacggtatgttgtgggtcccactctgccaatgatggg

SEQ ID NO: 178353 - DNA, 839 bp, Zea Mays
gctataccatggcggcagagagcaggtttgggggaaatgagaaattagtgagctctagtggatgattcaaggcacggtttgcttcactggttgcacaattacatagcggagcaggtggggttggtaatttatagcaggcttgagcggtgaccggtgaatttggattgagacacagcggtcgaagatgacaaaggttactggcgctcgggatcggtggcatttaccgtggcaagctccccggcgatcaccggataggcttaacatgatcgactgcgacgtggtaagatgcccgggcacgtggcgcaaggccgcgaggtggctatctctggcgaacccattcgaagcaaacgtgactagctcgggtacggtggttggagtaaattagtggtcggagcatatccatgacgtgatatttacttaccccaagtgctatccaactaatccgagcatgaatcgccaacggcgagcacgaatctgagcgcacagctcgtcggcagtgatgggatctgaacctgatcctatccggttactgtaccatcaaattgttcttcagtcagcttggcagaccaagtttagcatcaattttctcctgatttttcatggcaacttgttgatcggccagtagcaaagttgttgtctaatgatccagctacaaccttgctatagcaaccacagccaaactctcaatagatcatggttgaattctagttcaaatatggctcaatcacactgtcagtctgattttagacctaagatagtatgacagcccatctttgggtccaattttctcaaaatttttcatagtaccaggacttgatctctatagcaaaattttttcc

SEQ ID NO: 178354 - DNA, 540 bp, Zea Mays
ggccttgacaagtaccctgtagctaaaccgtgtttggggagctcaaacctgaaacttctgatactgaaacagaaagcagctcctgagaaacagatttgttgtctggctcgatacaatcatgggcttcaaccggttcatgcatcagctcccacatctcttccaaaacttgtagctgaacagttggagcacaatgatgtccatggaaccatttctcagcgcacttgtcacacaggccgcgtgcacgcctgtatgccttcatggaggataacttgtcatcagtagaacgtgtccccttgctagctttagaagtgaacttcgctagagctggaggacgaggcaggggcagttgatgctgagcagacgaaggtcctcatgcatacactggcttgcgaacatcggaccgagtaggctccatcacctcttcctgcaattgggcaagagcaccggtagtatcgagtgtggaagggcgatgtaaaagcacattggatttaatagtgttcttcagcacgtcaataaaatgcagagtataaaacatgggat

SEQ ID NO: 178355 - DNA, 602 bp, Zea Mays
ctactacaagtcgcactacacgcgagcgctctctgaggtacttccgaactctttttctaaagtgtccccggattccttgagaaggtcatcaaggctagctagggacatatcctcgacgtcggacaaattctctatcctggcggggggtggtgctggaggggctttcttcttccgctcagtctggcatccttggctcttggtcttcttttggattttcttcgtgggggcgagcttctttagcttcttatcataatccatcttcagggttcggtaggcttcacgagtgttggcctccttgccttctgctatatcgagacactcttggagggatgccttctccttcttaagttccatgacctgttgctctaagctttccacctgggagtttaggtgggtgcagtgggaggaaaggtcgtcgtagtggttatcgagagtgtggagatatctggccatgtagacgatggtggggtcatcctcggtaggatctcttcctgacagggcctgaaatcttttcctccaggtgggggtatttttgttgctaggtgggaagtaacgaagggggtttcaaagacctctctgttgtagttttggcatagctgtcg

SEQ ID NO: 178356 - DNA, 1020 bp, Zea Mays
tacgcgaagtccacagcggaacatgcggctcccactcagggcctagggcccttgctgccaaggtgatacgtcaaggattttattggcccgcgataatctgcaccgcgaatcgagtcatgaggtcgtgtgaagcttgccagaagttttctccccgctcgggcaacccttcacagttcaccaagctgatcgcccacacatggccacttcaacgctgggggctggatattttcgggccactacctacggctcaagggaacctcaagttcaccttcgtcgccgtcgaatacttcaccaagtagatcaaggccagggcagtatccaaaataacgttgaagaccgcccaaaagttcttctggcaaaacatcgtttgccaatacggagtcccgtccgagctcacagtcgacaacgacaaacagtttgacagccaggacttcagggacttctgcttctccatcggcaccaagcccgccttcgcctcggtgtaccacccgcaatccaacggcgtcgtcgagcgcgccaatggcaagattttcactgccatcaagaaaaggcttctcaacgacaagaagggtaaatgggccgactagctacctgaagtagtctgggccctaaacacgaccgaatgccgggcaaccggattcacaccttttcatctattatatggatcggaagccatgacgccgcaggagataaagcatgggtcgccctgaacaagcacatcagtagtccccgacgtaggtgaaccaacgtctaaagacctcatcgacggagacctcgtcttcgcccttcaggccctcaacaaataccaagctcaaaccaaggcctgacgcgacaacacggtcgtcccaagagagttcaacaaaggagacctcgtactcgtccggaccacccagacagagtcacggggcaagctggagccaaaatgggagggtccattcatcgtcaagtcaaaggcatcccccagcgcgtacctgctatcaacgccatccgacgaagacttagagcactcctggaatattg

SEQ ID NO: 178357 - DNA, 290 bp, Zea Mays
cggggcagccgttgcgcgagccgttcgaggaacgggcgtttcgccttcgagtttgaatttcgcagcgggttcgggcaaagcgttgaacgggtcttgcccgggcctttatatatccggaagagggaccggtggtggttctttactctgctgctcgcctcctgctttggtttccgcaactcaagggaatagccagagaaagaaaaccacgcaccttgtccgctccgtcgccacccccttcgcttggcgatggccgaccgggtaaccgtcgttccgccgcgcgacccgtggcc

SEQ ID NO: 178358 - DNA, 387 bp, Zea Mays
aggatcagaaccgtgggatgaataactgacgaaccagattagaatagccataccccttcgtgcaacgcgatctgtgccgttgatccatgatcgggtgaacgggagcagatttagtcacttaaaatctatacccttggtgcgggatccgacggaccacgttgttcatcgtttcaggatgacgatcggcctaatctgggtcgtccaatgaggatccgatggccagatttcttggataccccttcgcaggacgccttttccttataagcccctgatatttattagaatcaacccgccgtccaattgaggggcgccctgtgtctcaagaatatttataccagaccccctgtgttttgatttaattgaagctcgatccagataactcataaa

SEQ ID NO: 178359 - DNA, 693 bp, Zea Mays
aacaacggcagcctagaaatcaagccaatgctagaagacctcatatgcaaagctcaatgcctagacccggagacagcaagacttatggaaaaagctcgcaaagaacaacttccggacctcaggacagatgaacaaggagtcctttggttcaagaaccgtctgtgtgtaccaaaaggggaggaacgagaagtcctgctcgatgaagctcacaactcagcctactccatccacctaggaaccaccaagatgtacctaaacctcaaaaccagatactgttggagagggatgaagaaagagatagcacagtatgtggcccggtgtgacacttgccagcgaacgaaagccgagcaccagaagcctgcaggcctattgcaaccccttccagtgcctgaatggaagtgggaggagataggcatggattttgtaaccggactaccccagacgcaaaaagggaacgactctatctgggtaataatagaccgtcttaccaaggtagcccacttcatcccagtgaaaactacctttggaggagccacccttgcccagatttatcttaaagagatagtcagactccatggcatctcgaggaagatagtgtcagacaggggaacccacttcacctccaaattttggatgagccttcagaaagctatgggcaccaagctagacttcagcatcgcctatcacccccag

SEQ ID NO: 178360 - DNA, 495 bp, Zea Mays
gacctacaaagccatccgtgtagctcccaatcacccctatttcattttgcgctactccaggctggggattcgtcaccggatgttggggtgtgggattccggcgagctgcgcggccgagggtgggcagctccgccgtgtagaggcattggatgtgggacgataaccgctggtcgttgatctccaaacgtgcggcttagattagtctctggcatacactcttgcgggagcaatccggtccataggatggtaaacagatggacccgattaggtcagtgcgttcccccttgatccgttcgatctgagcccttggatcaagatctcacgcgtaagaatagatcgcgccttcattaaattgtggacgtcgatctttgatccaacgggtacgattgtgtactggttcagagtgggaaagatttaatatgggccgtccaaacctaatccgaaggccagaaacgaatgataccctttcgctatgaccactttgcaaaatagacc

SEQ ID NO: 178361 - DNA, 332 bp, Zea Mays
atggagggcacagattaggttgaaatgatcatgaaaccccggccgcacgatctccatcgaatggaccggatcaccccccaccaatcggtacgcttcataaaatcgtagccgcacaatcgagcatccacggtctcgattaccccaaccctggatccaatcgtaaccgtacgcgcccgatccaacggccgcgccatcttcgccttccacccagcccgagccgtgcaaacagcccccacgcacggcggcggggatcaccggagatcacgattccggccctcccgagcgccataccccaatccgcacgatccacgcgaaatttacgacatgccgag

SEQ ID NO: 178362 - DNA, 810 bp, Zea Mays
ttccgagggagaaaacgagcatttcaccgtggccacaacccaccgtggaaataggcccggtgaaaatttccggtccgtttggaacgtgctcacccgggtcagcgctcccccaacccgacctatcaccgggggaaccccttcccggacacttgactccaggcacctttccacgacgcggcgcgacgagacgggaagtcgtctgcgcagccatagtgcagtcgtagccactaccatctatgcgccgccgtccgctccatcaccaccatctatgcatcgccgttcgctctgccgtcgtccatagcgccgccgctgtcttccacggacgatatatggtcttcgccctcctctcgctttcctagggtttcgaaccattcccccaatttgatgttaactcttcttcggctttgatttccaagatccagtacaaggttgttgctgttaggccgctcaggtttgttgaatgccggtgtcgcgctcgtgctacagaaccaaaagatccagtacaaggtttgctgaactcatgctctgtacgatctgctctgtgctctgtacgatctgctctgtgctctatactttctcttgcaactatggattcagtgttggtaatagctagttagttaactgtaaaccagtggggaaagtggcatggggtatctttgttgctgttggtgtctctgagcatatagaattgcggaatagatgtctctgggcatatagatctatcaaatagttgccgaagagggatgagggtgattaattagtgatcaattgtttgtctcgttagtacttgccatggttgttcaatgtttc

SEQ ID NO: 178363 - DNA, 765 bp, Zea Mays
ggttaatcagatacaagaacaagttcttcaggtaccagatcattttcaggatatttctacatagtctcatagcacaaacaggtcaacattcagactgaataagtttcaaaattcagtctgatgaacctttttgttggcaatcacaggtcaacatccactcctcgcattacataagataaaaaaaactacatcaagtagaatagatccatgtatacaatgaacgagtcaaacgattctgcaagcctgcaaattccatgtattcacaacaatatttgcaaaattatgaaaaacaatataaaagcctgctctagaaccttggcagtcaagtactcaaggatggcgacaaattacaatgttgcagtggcaccaacaaggccatgcctgggtcctctgtttcacccaaaaatgaaatgccactagtggtaaagaaggtatgctactcatagtcactatcatcatcttcgacattatggaatgtttgttcatcattatcactcacatattgcatcgcagtttcatcgacttcatcttcaaaataattttcttcctcttcatcttccctttgtcgacgaagctcttcaactacggtggcagcaacagtgtaagaattttcaacagctggtctctcatcgtccaaactaaaattttcacgttgaatttcaaagtcgccacactcatcgtcttggtatgacaacgccactccctttgaaatttcgtcacttgaaatttcatcaacattccacaaatgtctgtgcgtaaattttt

SEQ ID NO: 178364 - DNA, 560 bp, Zea Mays
cttgaccttgccatgcagcagtaagccaagagttccatgtcatggtgctggaatcttggagacagccaacatatcgtgtccgcggcatcggaaacccatgcttcatctgggcagatgactgagtacaaggaggaagacacggtacgggtcccacctcgttggtgcccaaggataggcgggaacgagcggagcacccttgaccctgagccctggaaaaaggagcaagaggaactaggcatcagttgttggaacaatcagcgccgctgaggatgttttattctcgatgaagaccaaagtcagagccccctccacggggacctcaagcctttggccgtcatatcctctgggcgtcagtacctcagcggtacagggtgcccaccaacatcgctaagtactcaatggaattgaaccccaatctttggctaggagactaccgactggcgtgtaaggcgagaggaacgaaccacggtgatttcataatctggaacctccccctgtatttgacggattcggtgtaagcatggctagaaaacctgaagcctagatgtatccggagctag

SEQ ID NO: 178365 - DNA, 591 bp, Zea Mays
cgcagtaagtagtcgactctgtaggagaagctagagaaaaatcttgcatttacttgtcacctttgccttccaaatctgcatccaattgtgcttgttcatggtaccaaagaattggacttgatacgctgaactagccgtgtagcaattggtgttcccaaaattcaatgtgacggtgtcctgttggtcagttaactgaacagaccttacagcaagccaaaggtgaaggaactgacgagcctagtcattagtagtaagatgttgcagacccaccatccacctgttccttgcaagggcattttttactgagtgattcttcctccttgcaagtctgaagcagctagaggctatgtccataggtgttgtaccattaatccacctatccttccagaaatttgttctttcaccatttcctagagtgagaaatgtacatgaccggaagagtgccaattcagcttcggtggcggcatgaggtaaagtggcccatggtttgcatgtgtcagtccatttataccaaagccatcgaagcatgagggctctgttgaagcggggcagatacttaactcccagcccgcctactttctttggtcgaca

SEQ ID NO: 178366 - DNA, 1057 bp, Zea Mays
tctaaatattttagatcttgtcggttcattatcacagctagttcaatctaacaagaatcgagaaagcgaaagctttaacatcaaaagcaacatcatgtaaacatgaatccggtcttcgcacaattccttctcatgacattttcatcagcatgaaaaaatcaccaattctactcaaatcaacaaatgaaaccaagggtagtgaatttgcatatacaatcccaagctgtcaactgaggctaccgatctaagtacgctcggaatgaggctaccgatgccgaaatggaagccgtacgagagtaggaagctcttgtacagtcgtacaggttctccgcagtgtgaaaaataacatagaagaaaatgaggtcaagaatgctacctagcaatgctagccacttgttcacaggtctattgaagccaagttaccttgtcctgacatgacaaatagctctctccacatccatcataagtaagctcttttgacaattaattgtgcttatgtcacattaaatccatggtgaatcagatttcaggacagacctgcgcaggatagcattactcgagcagcccatgccatgctccttccactgattcccctcctggatgaaccggcagagcttcaccttcctgcacaatcaccaagttagatcaaaacctagccaaagcggatcagagctggggaggattaaagatgaaaatgctacatgtagtagagatataccaactcgtcccctcttttgtccgtcacccaccacgcatcatcgccctcgctcgctccgcgatttcgggcaaaagagaaatatgaatagccaagaaaataagtcgatcggtcgaccctgcaataatgtggtgctcagacccatatgatgatatgaatacagacaaaacatctagatttatatcaaagtgcagaagcagacaacaaggtgtacttacttccataatccataattccatacgaagttgtatgtgcactgaaaggaagaaggttgccccccacataccagttccttgctgatgtcagaagtgacaaaggtaatttatgcatgcacatttttgc

SEQ ID NO: 178367 - DNA, 705 bp, Zea Mays
taggtctcctcacccaacaaagcatcatgacaattgcctagaaagatgagatatggactaataggagcacttcaacgcctactatactagtgggagggggagaaagtcagcaaaaaaaaagttggtcagtgtcattccactaaaacatcgattagactttgtgaattccattgcctttttgactttggtccctaaacgaactatctaggttgcatgacatacgccataaaaaggggcccagatggggcaaccgaaggaattccattattgagagcttgagagatagcgtactgcactgtcgactagactactacccttgcaatgaagagggcaccggctgtgtgtcttctggccaccttgttggcattctacttcttggttccctccattgctgtagctctctcaagtgagttatctctctcaatctgcctgcttgattccttcctttgtctcttagctttgctgcgtcggcatgtcatcagtgatctggccacttgtttctgtggtttctaggggtgcaaaagatggccatgcaagaggatggtcagataccatcggttcaaagcagcactctacagccaaaggtaataccacacactgttgactacttgcctttttcgagcaaaggcaaccatcttgattcttgacccatcttcgccgactactgcatattcaccatttagaagaaattaaaggagtctcgcg

SEQ ID NO: 178368 - DNA, 388 bp, Zea Mays
catctattatgtcacatgaggcacgattatggcaagggtataataaggacagacttcatccagaactgtggatcctggttcctctggcgatccaacttgatcttgagttgatgcttatcctcctttgatgtggttggtcttctttggcctttattcttggagttgtcatccgagttaaggacatatggctaaggatatatagttagggtagccagggtacacgaggtaggtaggtttgaacaaagttttacattgcttttaggacaaatggactaagtagcctgtgaggtaggttatgttgtttgttcacggacgagttggtccaaggtattaatttagggtaagatatgtttatagaattagggcctaatttttttttgtcaccaac

SEQ ID NO: 178369 - DNA, 476 bp, Zea Mays
ctttattaaagatcgaaatatactcgaaggagtgatcattcttcatgaaacaattcacgaattacatcgaacaaaacatagcggagtaatcctaaaactagattttgagaaagcatacgacaaagtacgatggtcgttccttttacaaacactccggatgaaaggcttctcgtccaaatggatttcttggattgagactttcatttcgggcgacagtgtagctgtaaatgttaatgatgatgtcggacactactttcaaacaaaaaagggactccgtcaaggggatcctttgtctcccctcctatttaatattatggtggacatgctgaaagttttcattagtcgggcaaaattggacgggcaggttgtgggaatcatccctcatctagttgatggtgggctttcgatcctccagtacgcagatgacactatactcttcatggatcatgatctggacaaagctcgtaatttgaagc

SEQ ID NO: 178370 - DNA, 468 bp, Zea Mays
gcgggcgggtgttactgccatggcgacggcgaacgagcagaaccacagcggcggcatagattttctctccctcactctctctctctcctcacgacgcagatgcacacggcagcggtggatctcagcacggcaggcttcttgacgatcgaaggaataggccgtatatatacacctgagaggattccgcgacgaccgaggaaatcggcaccccacgcggagtttgttgccggaatccgattccatagctggatgcagacttgcagagaccccgcggatttgggttcgtttttactacggtggggaagagggatgacaagagggacccacctggcatggactatagaggaaagcaaggagggagacgagatgggctgccgcggggtgggaaaacacctgggccgaggaggagggagcttggcccaaccgcagggtttaatccttttctatttttcttttttttttaatttt

SEQ ID NO: 178371 - DNA, 455 bp, Zea Mays
agtggaggttgcaaccgaagtcctcgaatcccagatgatcttcgaacccaacaccttcaactcgaagtgatacgaaaatctgtacgcggaaaggaagaaaaatgatctgttattacgtggttcatgacagtggacctactggacatgaggggaaggggtgtcgcgggatcgaggatgaaccctagcaacacgacatcacgcagcggggtgggtaacgatggactccaggttgaccgtaccttacgaagatgcagacgcgatgtttgggacgacgcggaaccttgaggacggagcaagggcgtcggcgtcactgcggcaaccatacggaaataggaaaagggtgaaggaaacgcggcaatgcgaggaagaaggtgcggacggcaagggaggacggatccgtacctgcgtacgccggcggcgatgcgtgtggtgcggaccggcggcggcgctgcgtt

SEQ ID NO: 178372 - DNA, 333 bp, Zea Mays
acaatgaccaattgtgctataatttgtcacctaaatacacgaggatttagtttatatactaatgcatattaggctcgtcccatatttgtcaaatacggaataaatacgggttcaatccggaaaaaaatgggatcccgcaaaaacggacggaataagccctctcccgtttccgtcccgtttccatatttttccgtaaatacggaaacggtcgggtcaaatgtagaaaacggtacgggtcggtacgggattttttccgtccgttttcaaccctagaagggatcgaaggccaggcgtccgtgtcccccctcctcacgcacgtacgtgcaggtccat

SEQ ID NO: 178373 - DNA, 397 bp, Zea Mays
gtgacagtctgaatctatagcatttcagataacgtgccgtcagcaaacacaaacaaaatccggtgataattggaatcgttagcaaattcctacattctaacatggttgatatgggaaagtaagtacataagaaactggcggcagcgtgctctctagcaaattcatggagcccttggccgcgtcctggcacgagcgaagatgatgacggcgctgaagaggatccacggcgcaaagatcccgttggccagcctcgacgaccgcagcggctccggcaccccgttggccgcaaccgccgccatcacagcgagcaccagcaggccggcgacgatcaccgacaccggcttcgtccacgactcctacggcaacgaaaagggaggccgtgggggttggttccgcg

SEQ ID NO: 178374 - DNA, 924 bp, Zea Mays
tcaaatacaacatgacgggaaataataatgcgacgcgtggagagattcagacagcgataccccttgtgagcagaagggtaccctaagaagacacatgcggcagagcggggcgcaagtttatgcggagacgtggcctgtaagttaggataacagagacaaccgaagacgtgcaagtgctcataggaaggaggggtattgtacaaacgggtgtatggaacctcatggtgtatggaggaggaaggtctgcggttaagcaagtatgtggcagctgcgagggcctcaacccaataattgggtggcatggacgcatgaaggagcagggtacgcacagagttgttgagggtacagagaatacgttcagccttgccattctgtggtgaagtgtggggacaaaaaaggtgaaaacgatgtcatgggcagcaaggagttcatccatggcatggttaacaaattctgtcccattatcagcttggaagcatttaatagtgtagctaaactgtgtgcgaacataaggaataaaatcagcaatgtgctgacggacctcagacttgtgcttaaggggaaatgtccagcaaaaatgtgtgaagtcatctagtaaaaccaagtaatatgagcaccagatatactaggaaccggggatgtccagacatcacaatgaactatctcaaaaggggaaacagtgtgggaagtagatgtactaaaaggtagacgggcatgtttgcctagctaacaggcatgacaaagagtgtggtctactttattacatgaaattaaatttttcctcttgagactagataagactgctggaccggggtgacctaggcgacgatgccacactgaggaggaggctatgaggagggcgctggcagtggactgggcggctggtgaaagtgtgtagagatcgcccgagctattgcagcgaag

SEQ ID NO: 178375 - DNA, 491 bp, Zea Mays
agccaatgaactcattcttaagggacttaaactttagatgcccaatcaacttcatctatatgaggggtgatgggttgaggaattaccatctatctatggggactccaaatgtcgtcaagcttagccatttggtaaacgactttcttcctagtgtatgggtcagaggccacatttcccattgagatggaacactaatctcttagagttctcaactttatcgaagtttgatcacgtgatggtcaatggaaggtctcaatagatttgaagaggctagggactcagccaaaatgtagcccgctagatattagcaagctatgcgaagatatcatgaaagaaatgtcaaaggctgaggcttctctatgggtgatctggtactatgcaaaattcaaacaacattagacaagcacacattatcgcccatatgggaagggactttcatcatctctaaagcactacagcatggtgtctatcaactataacaagaagacaat

SEQ ID NO: 178376 - DNA, 358 bp, Zea Mays
taggcctaagagccctccgcgtagccaatgcacacccctagggtgctcctgtcgtcgagcttgccgatgtggccaagttccttggtgaacgcgaggcagccgaagacccgtaggtgagagaccgccggcttgcgcccatgccaagcctcatacggtgtcatcccgttgagtgccttggtgggcgagcgattgaggatgtagaccgctgtcaccaccgcctctccccagacgacaaccgacattcccctctgtttgaggagagctcgagccatccccacaaccgtctggttgcgccgctcgacgacgccgttctgctgcgggctgtacgacgcgtagtggcgttgaacgcccttatctg

SEQ ID NO: 178377 - DNA, 321 bp, Zea Mays
tgtgggaccagaacaatccaagtcagcatcccgaccctcgagatcatgctctaaggtcgacgaggcacgggacgacctcaatccagcatcgggcatggcagcacaagcctctgttgcatcatcatccacaggctccaacaacaagtcctccgggaccatatcctctagagtttgatcaaagttggccaggaacagttcttgcaaaccaataagggcagataatgcaggagaaggaactccactactttcaccactggtgacgaactgccgactattcttccgagttaatggagcctcattttcttcctcctcatcttctac

SEQ ID NO: 178378 - DNA, 923 bp, Zea Mays
gtcgaggtagatgtcgaagccattgcagcgtgtcctgccccaggacaatgggcaaggtatgctagcatgacgtcttctgttgccccagtagctcgagcggtgatggtgtagacgtccaaccagcccctaggtcttgcttgggttcgtatttgtcgacgttggaaactttgaagttaggaggccattggatggcacagagccgggggtgagcgtggatactccgcatgtttcctcctatcgatgatcatgctgccagtcccggggaggggagcgagtctcatgtcacctcgaccgtccccggaccggactgttggtggaggctgccgccaactcgatcctagttacacggtcacgtgcttgtgtaccatgatcctagtcgtattccttccggtgcgttatttcattttcatgtcgacgatcgcatgaagcactgacattgctccgcgcgtctcattggttgttgatggcatgacatggatcgttcgaggatgggcgaggggtagaagatgattggccgcttgagtgagcactcgccgatagcccttcacgtctagggttcgcggaggccaaaggctatctacgctaggaccccaccaacctcgcttggcatgttcagtgcctgggcgaagtcggggtataggttctgggcgaggagcggattctcccgccggagcctagcatcttgttcggcttgctctcgctcgcgtttgtgagcttggcaacaatcgcgacggtgggagttgcgtcgttctcgatgtgttctttcatcagaggtcccccatttccggagcttcatcctgagagacgggctgagtcgggtccagttccccggcctcgtggtgtcgtcgcacgttttgacgcctatttcgtcgtcgtcgtgcgtcgtgctagggatgctcttcccccagcatggtgggttcctc

SEQ ID NO: 178379 - DNA, 335 bp, Zea Mays
acataacctatccaaaccattcagaaacaaaacaaccaaaccagattctgactaatctcatttaactcatagccatctactaaactagttgctctacctacgtgttacttacaaatctatcttaaccatattccccaaccccgatgatatacactaacctcgaaacaatgagaccaagaccagagaagaaaaggtcaacatcgacaaggaaggatataacagtcaaagcgaatcttgagatgaatcaagacttaaacctttcggatgaagtctattccttgccataatctctcttacctcaacctgtctagcttatatctgtggcagagctgccc

SEQ ID NO: 178380 - DNA, 315 bp, Zea Mays
ccccaaaattcaagctataaactggcagggtatcattgtgaaaatccgcaaacaaggctagtaaatcatcctttattacttcccagaaagtctgatagaactccgccggaaaaccatttggaccaggagctttattacgttccatttggaaaacagccttgcgaacctcatccatagtgaatggtgcagttagaatcgtgttttcaatatctgtaacctgggggatatcataagtaattgattcctccattattactgagttgtggtctgtcttcccaaacagggttttatagtaattggtgatatggtgtttga

SEQ ID NO: 178381 - DNA, 727 bp, Zea Mays
cgaaagggtatgcacggatctcggccgtccgattagaaaataagcaccgagattcaaaaatacttaaaatgaatcggtacgccacatgagcccctagatctagatgtaacgggccagagtcgatctgaacctcaaccgtccgatctaatctacggtccggatttaataactcaaggctcgcactgggtcgcacatcgatagatctatggttcaggatctaatgcattgaaatggtacctatgtcctaatctcgtccgtcatcatccaatccaactactggaatactctcttccccagcagagccaagctgaggcgccccaagcccacggcggagctctcgctggcaccccccgcaatcccctcgttccggtgacatagtttgatgctaccaagcgcaaaatgaaattgactgttaggcgaacacgaggaaggtgcctcacctaaaatgaccacgacaaagaagccgaccatgatgcagtccgcccccacgatgaagctcggacgtcgacgaggaattcacacgaataattagttagagctccgcccgatgatggtgttcacgccttctcgatcgatggtgacaccccacgaccacacgcggacactgcaggcgcggccgaagctagcgctcacagcttcccctctctgtagacccgcactctcttgaattacacagtgagggttgcgattacacagtgagggttgcagagatggaagagaaggcgac

SEQ ID NO: 178382 - DNA, 585 bp, Zea Mays
ctgtagccgacctttcctttgtccatctctgcacgcaccaccagaagcaccgtgaagatagtgaaagggaggccgccattggtgactcgaatcctaggagaaatctcggccgcgattgtgacctggggtagagcgtctgggcggcgaggcggacttcacgtcgagccacagacggggatgctcctgtgcgtcatgttgctgtgccccgcgacagtggtatgcatgcagccgctggggaacgcgagagataggagagagaggcaaggaaccacctggagccgccaccggtaaattttctttgtgtattccatcctcgtggtgttgctctggacgtctctggcacatgtgtggtctcgctgcggactcgtgctcgatgtcgggatcatcggagcaagtccttcgtcgcggagccgaggtcggcacggaccgcaacaccaccgccacctattcgaggacttcgtcgtcggctttcttcctccgtcgtagttgacgccttggcatgggcagggctctacgctacactgatgaggtcgcctaccttccccttctgccttccgcgcgccatagcagccgagtgcctcagcc

SEQ ID NO: 178383 - DNA, 689 bp, Zea Mays
aggaggataatagaaaaagaatagaaaccttactgggctcggatcactcctttcagcccacttgaggaagtcgcccgcgcagcccagttatgtctcacgcgcgctggcgccactgaccctgggggcccgcttgtctggcttccgcgctcactcctccagccgagtccgtgctccgctgcaccttgggcccacgtatagtctctcctgccgcactcggtcaccaacgcgtgggccccatcagccagtgcccaacgccatgagatcttgccttcaaccaccgcgcggagctaatgccgcgggaatcggacaccatctacctcgcgtcttcaatcccgggcggatttaaggcagccgcacccccctacccaccttgttgacccaattgcgccacaaccagttgaagccattgccgccgccgcgtccgcacgagggtgaacctgtcgccgccgtggttaagcgtctacgctgccgcgcagcggaagcgtggtggtcgggctgacttacttagtgacgaggagcgcaaccgtgggagattggagctggaggtgcggaggaaaccagtggattgctcatcggagttccgtctgcgtggcggaggcgcttctctccgtagtctgcgtcaccgactccccgttgcatggtaatatctcgcccatgcggtttactttgttctgttcttcgtgttggcg

SEQ ID NO: 178384 - DNA, 522 bp, Zea Mays
cgtgtaaagaacctatagctaccttcaattctgagagcttcgagagaggcgacgggtgccgggagcggcgcccaactcctccccatatcagttgtcttacagttggtattcagagctggatcttccccacgattatttcaccagatcgaagacaggggcgatggcgccgtcgaagactgaggactcaatggcgcagctcctcgccaagattgaggaaggcaacagggagacccacaggcgtatggaaacgatgcaagcttctatggcaaacatggaagcgacggtaaaaggggtgatgaaggaacacggcgagttccagagatggcggccggaagtggagaagaaggtgtgggagatgaatgaagccctaaaagtcatccaagtcgccatcgagaagcaatcgcagaagcaaccagtggacacctcatcggcaccgatcggggatgcgtcggcttccgctcatctgggagtgccgtcgatcgacgcgacgattgggcaacctcgccaccgattcgttgaaaa

SEQ ID NO: 178385 - DNA, 427 bp, Zea Mays
cttgataagcctgataaagcaggaaaagttggaaacgtagtacaatcaattaagtattcgtatctgatatatttgatgaagataggcttggtgcactggttatatctctcactaagtcaccagactagggcttcccttttctttatatgatatatttgatgttgtgactttagatttcatacatcaactgcggcccttggtgttcacggttactcaacaagtttctatcatcttaaaacaaaatgaattcgatgcttgtattgtgtttgctgttataaggcgagtttttacctgtagacagagtggtggagcttctttaagaccaaggagggccatggcccccactagcccttaaacttgtttaagcaatagctcattttactacttaattgttgtgcgcaatgctaatctgcactctcattgcccc

SEQ ID NO: 178386 - DNA, 289 bp, Zea Mays
ggttgatcgtgagggagatgagaccgaagctgctgagactgttccgatttccgaagccatgaagcggtctaggctggtaacatcggaggacgtccctgccgctggagcagagcaagttgatgttgaggagaccgattctgaggatgattatagcagcgcggtgccgagcaaacccagccatctggattttggaaaatccacagtctccgaaggtgacctacctaaaatgttgaatatgggctatttcaatgaagaaaagaaagagttggttcgctttggtggagaggaa

SEQ ID NO: 178387 - DNA, 420 bp, Zea Mays
tcaagagtactaccaaaacaggctacatatgtacaaagaggaactcaaggcaattggtgtgagatttgaattccaggaagcttcagcttatatcggaactcgtctcatgtctattgctgctggcaattcgctgacaagagagaatgtgtacacactgcttcggcttattcggtttctacgagagaagtttctatctccgagtgatctgatcgaaagtgtaaaagagggacgatggatgaagagtactcttggctacaggcgtcctgctgattgtatcatctacgattcagattgggaagtggcatcatgtatcagtaaccaaccattccttgatgtatcattctacggtgcagccatcctcgaatataaagtcgagctggaattacttggtgtcattgtggggttcaaagacaattacca

SEQ ID NO: 178388 - DNA, 953 bp, Zea Mays
gaagattggttctggtttcaggtgtaagtattatcattaaggaaagagtgacggcggtgctacttgtttcaaggagcatttagcacatcgagagaaggatgacaagaattgtccatccattcctcctaaaataaagaaattctttgttggtgagctagacaagacaaaggaaaagaagagacagaggattcggtagaggcaacgcgaagatgaagcaggaaaaacttattatgatgaagaacaaggtgatgattatgatgttgaacttcaggctgcactacaccagtctcgagaggaacatgaattcagaaaacgagctggtgcacggtatgataggggtggtggatcttatgacagatcttcgaaagggtgtgaagagcatgtttgattccaacacagctgcaattgctctctaggagtatgagttctttgggaggaaaagaggatatttctcgagtgacctagcaaggagaatgacaaatgatcacaatatgtttccatccagttgttgggcagtgtttgggtcagagacacagactctacaatgtgttgtgaagcggcttcttgcacagtgtgtttcatcaaatgagcgtgaacgcaattggagtatattcgttttcattcgtacaaagctccgcaacatactaggatacgagaagctacatgaactggtgttcgtgaattacaacatacgtctacgaattcaatgtgcatcatgtatgcctgggcctagtgaatttgatcccgccttagccctcatggatctctcgttacataggcataacagagccattcatgattggatggaaagagggagatccaatgtggatccaacattggatgaggactcatcttacagtgacacacccgttcctatcaagctgtttacatcaattgcccaaaaatatggagacatagaggatatacatggatgggctgatacaacagttggt

SEQ ID NO: 178389 - DNA, 897 bp, Zea Mays
atactaaggcctcgggcctaactcaacccaaaagactagcttgataggtaagggctgcacctgcctttatatgttgtgctgcccatcatcaactcacgatgtggaactaaacctaacagggaaaatccctgcttctggatgtgggtgggtgggtgtgggaggggaggttaactgtttctggtgaaaactgtgcactacaaaaagatccacaaacagacaagaaaagtgaaatgaggacatacatattgcaaggtagtacagcgtcgctgtccccatagaataactcagcatctgaaacagatgcatctacaaggtcggtccttttatgtaggaaatttgatgcagtatcaaaagcaatcacctgaaacataacatatttgcaaacagaaacaaaggttatgaggaatagaaggtgaacggatacaaccccaaacatagaatcagcaagacttttgggaaagcaagtattcttgcttctgttagagaaaaaatcagacaagtcgaagttggagataaaatgcagagtgtaattcagttaatgtgactagacctcaacattagagaaaaaatgttggagcttctccatcatcaacttgtacatagcatcccttttgcatgttaatgcctctatagcactttttgaaaatgtaaatgaattcattgaagactcaattggtgtatcaaaccacgggagaaccccctccatatgaatgatattacgagagggataaacatctccttcagtagcagccagattgcaatactttagaaggttcatgagcacttgaagctgctgcccagtacgcaaaagaggatgacatatctcctttagaaaacatggagcagatacatggtttcttccctgctgacagcagatatgataaaatagccttagac

SEQ ID NO: 178390 - DNA, 352 bp, Zea Mays
accgtgttgatgggggacaaatcgtcctcgagttcgttgagatcggccgacagctcgtggacatcctcaccaagccactcgggcgtcttcggttctctgagctgaagcagaagattggcatggtggagctcaaatctaaggagtaggagcagcaggattaggagaagaattgtgagataatctgctgttctcttttgctgcagcaaggagtagaattgggtcagctttttctgtccatcataggatacatcagccatataggacttgtatatatactagagactatgcattagagaaggcagttcagttgtgccacacattcagagtttcagactttcagtctgtgcgtgtg

SEQ ID NO: 178391 - DNA, 846 bp, Zea Mays
gccacaaaaacagaatttgatgtttggtcgataatgttactaaccttgaattacagagagaataattagtgcttaggacttggttgaatatataggtacaggtaatatgggccacatgggccttaatagataagactaatgaggcagccacataagattgctcagtgcaaatcatgttttacagtaccacatttactgttttatcaagaaatccggaaagaccggtgttatgtcctgacaagtgggcctcaacactcggaggcggacgaatgacacaatgaacgacaaaacgttaggtaggggaactatattgtctcgttgtgtgtgtcctgtccaactacaggacgggtttatagggcaaccgagggttggtggcccaaaatacattcattcccccggttacctactacatacttggaatattacgcgcaacggggtaattacagcgtggtgcccaaatgtctacccactgattgcactgaccggtggggcctccggggcggcccacagtggattgaaggcctggtggggactacttctcctgggccttcgctatcgtggggccttcgcgtcttaggaccccagtaccaagcgtagggtgatccacgtaggggtcttgcgaaccctcatgggtgacgaagtcctcgaccttgctctccgcgtctgggccttcgcctgaccgccatggtggaggtcttcattcgtggggagcccccctgagcccttgccttcgctacctgcttaggtagcggccttgctggcctttcaaccatttttctttggcctcctagtgcgacagtctttggttgagtgtccgacatcttcaccgtgaaaaacacagtatgg

SEQ ID NO: 178392 - DNA, 420 bp, Zea Mays
ctcccggtcgggaagacagccagacgttcgcaccccaagctagaccgagtctcccacagatgaggaggtagctgaggcgggtgtgttgctagctgaagttgcactgctaaaagagaaaggtctaactgctgaagctgtggtcactgactttgttttcaagaacattcagccactgaaagatagggcctacccagcttatctgtatcgagggctagccgactcaactcgggttaccaacaagagaatcccttctgcagacttggtgagccgacttgaaatgattctcaggggcaaggtgtccaatgttggtgctccagtggcgcactcggcctagaacttgcctcctcccaaagccttcacccttttcgtgtcaaatccacctgtgactgatggcaatttgggccttagagtgcgaccctc

SEQ ID NO: 178393 - DNA, 910 bp, Zea Mays
ataactttcgcctcagaactcgaatcgggcccatttttttcaaatcgcacagaattaaattttgcatccgattctttccatcttcgccggattcgctgtttttaaaattcccaaattcggcttggaaatagaacttctcattttccaaacatttattctgattttagggcaaacttgcagaaattccagaggacgtgtcattgcataaaaaatctgaaacttggtgtgttatcttcttatgtgctgctgcaaaatagaaaaatataaaaaaatatttgaaaaaaaaatcgcaaaaaaagaagtgtagcacataaccagaaacgcaagtgttctttgcacctctgtgattattttgccccaagcctgttttcttgctgcacccatatacttgtacctcctttcttgtgccttggtccaactgttctattacattttctaggccagcaactaggacgagtacttggaacacttattcagcattgctatctattactgacttgtgtgccacatatatatttagtcagccttcccagaactccaactttccctcgagcagaacaggtaatcctttgcaataacacccacgctcgttggacagtcacaccggtcaccgtttgccacctgcagtgctggtaagaacgttgtaagagcggggtgagacgcttcataatttgtattccaccaccacactgagagatagttgtagggttcacattgtttgttgcctttttgtctctattttgtgctaacaatgacaggaccaaagaataaaatggacaaggacaatgggcctaagcttaacgacgatgggtgtgtctctcagatggaattgaaggagatgatgcgcgcgatgactgaagcttttaaaaaataccaggactctgcacgacatcctatgagcagcttgatc

SEQ ID NO: 178394 - DNA, 363 bp, Zea Mays
gtggggagctgggtgtttcgcctgagctcgcgcttgcggtggatgcactcataggcaagaccgagggaggaacgacgtctaatttctcgccgtcgaccgctctgtgtcacgattccgccgtgctcgacgatcatgccttgactgctatcggttggtggccgagaaacgtcgcctagcatccctgaccgcactggtggtgtcgcgtccggaagatttggtgatcggagcgaggagaggatttctcaccgttctattcttcaccaccgcgccgcccgcacgcgggcacgaggattcgtgcgccaaccctccggtacgacctctggtatatgtccacccgcaccttcgtttcacataggttcagac

SEQ ID NO: 178395 - DNA, 903 bp, Zea Mays
gccggatatgcacaacaagtgcgcgacaccaacctaagggtgcgaagtctctactattagacaaatccgagcaaaagccgcctaagggtgcagccgaggatgcataaatacacgacatcaccctaatggtgcaaagtctattacgatcccctcaaaggtgcgaagtctgtactatctgacacggttgaacaaaaaccacctaagggcgcagccaggtacgcgtcataagcgtccaacatcgccgtggaaagcgaggtccccatcccattctacgcacaacgattacaagtcaggacaacctcacaaaaagcgcagcatgcgatgtcattgtagtttacatacacacagtgaggggcccgccaaccatattgcacaaacaaaaaaatcacatcttgttgccctccctctctattgcgagccggggagggtagcgttttcactcactaccacaacacgagagtgagggcagcagacatgctacatcggctcagccttctgaataaggcctgcctctcaaaagttaaacaacatcatcttcaactcctcgccctcaaaaagattccaaagatccccctccccaatacacgtcccggatgtcgaggatagcaaatctcgttggccgcctcaatctagccgaagacgggatcgttccatccccatccgtcgacgcctcccacttcgcgatatcacgccaacattgtgcttcgactccaccttccgccagcagcgctcttcggccatcgccccagccaagggagcagacacttcgcgcacttcaggctgcggcaaggactccgccgcggccacattcaacgcaacaaaataatctaaatcttcatcagaagactcctcaatccacaaaaatgggctctcaaaatcacccccatcttacgaccaagactc

SEQ ID NO: 178396 - DNA, 786 bp, Zea Mays
agggtgatggcgggcgttggagagagagtaagggagagggagcgaaccatggcaagtagaactcgacgagggtgtcatggtcctggctgacctccttctgaaaatcgacttttgtcagggacatcacctcgtctttggtggtcggcaagacgaccgctgctaaggcggagaggagcaggaagctgagggttttgtgggagatctgaggggacaccatgatgcgacccacaggtgtcaaggcaagctccgcgttagctgggatctcagagcgaaagaaaactatggagattcatgaacaagaaacatgaaacggtgggagttaggcaaagacctggggaggagggctccaactcttgtaggggcctcgatgccgatggggggttggaaaggtcggccctcacggaggtcgtgggtgttccggcgctggagtcggtccatcacgttcgccgcaccatcgtttgggccggcgtacgtgtgcagcggccacacgcgagcggcggtggtggaggcccccattccacttccttgaaggggaggccgcgcggttgccgcatcgcgctggtggatctagggtgaacacatctgggagccggggtctgggtggtttctgacgtcgatggcgagggaggcgctgaggaaacgaggtgaacggggccacgggcagcggagctggcggagcggttgaggccgtcgtgggggaggaggtcgaggtcgtgggcagcgcgccgtcgctggagtggaggctcccgttgcaatgcctaggcaacatcagggcgccgtaggctg

SEQ ID NO: 178397 - DNA, 662 bp, Zea Mays
attctggtgatctgctatcttaccaatctcgcttgtaatccaagctaatcttaatgcgtcatttttaaatgataagaatacttccatgttatccttaatcttgaatatatcagatgccatcaatagatctcccacttgcagaccatccaaatcttcaagcacagtaatacacttgttgatgctgtaaggatcttccaatttcttctcttcaatggcatcaaatcgatctatttcttctttctttagttttaggtatctttcatgaaatccatcaggagggctagcagatttgttttttttcttctttccacgtcgagaatcaggaagctctgaagttatttgtgtggaactaggtgggacttccttttcatgaacctgagcagatgggtattgtgataagcccaaatttccctcaatttcttcatcaaaagaaaattgcaatcccaattcatctacaccatttaaagtaggagatggtgactgatatgtttctgctacagttgttgcttgtcctccaggagctgatgctttcttcgtcttgtttgcataatgatccataccttgacgagttcttccttcagcataacgacctgcagaatcatatttaggaaaacacatatgactcggatgtatttgcaagcaattagaaacaactcataaaa

SEQ ID NO: 178398 - DNA, 313 bp, Zea Mays
agcggaggtagggggtcacggaggtggagtcaatttggccggtggatgcccggaatggccggtccatggcgggtggcgggctccgcggcggtgagaccaccggcgaggccaacgggtgaaataggcaagggggaaaaggtgtgtcgtgctcgcggtgaagtggcggagctcaagagctacactaatttgactagaacccaacagagaggggaaggggggagctcaccagagatgaagatgacggcgacgctggctcaattgagctcggggaagggggaagagatggccgaggccggggtgaggaattggggag

SEQ ID NO: 178399 - DNA, 561 bp, Zea Mays
ctgagccgacgagcctccgcgcgtagtcgacgacctccgcgcggcggcgctcggaggcctccgtgggcctcacgcgccgcaccacctcgcccgccgcggcccccgccaccgccaagccccgcgagggaaacgccgcgggcgccacttccgccggcgccagcttgcccctccctccggccgccatccccggtgagcgcctgcgccgctacctcgcggcggccatgcggaactggggaaacgaaacggaacgggagtgaggagtggactgtttctcggctctcgtctcgtcgaccgcgtgctgggggttttgccgagccgttacgaggagtgaggtgaggggagtggggagcgcgagtgcgtgcgagggcggcgctttgattttccccaggcgggtgtgggatgggtaggtaggcaggcaggcgagagtggtcgctggctcgctgccccgcgtcggacgcgcgcggccgggggaagagaagaaacaggaaacccgcgggcgtgtgatgaacaaaacaaacgcgtcgccagcgccccacgacgacgaggcggaggcggtggtgg

SEQ ID NO: 178400 - DNA, 624 bp, Zea Mays
tgtacatctactcacggtcctccatcctctagcatatataaccgaagcctatcaatagaaaattttgacagcacctcccctgcacggggaggtttctaaaacctgcaaataaaagtatcaacacgatggctgacatccacgcatatttcaatggtacgatggccgacaatcacatctatatatattcaatccatgagagatagcacaacaacactacataactacatagccacatgcaaaactacatttatattataatgagatgcctctagctagctaactaacatatataaatttgactcaatatcaaaccatatcatttcatataaaccctaaaccgagtatagtttaatataaacatgtaatgcacggggtggtttccaaaacatgcgaccaaccacatataccctaaaccctaaaccacatatacttcaatctatgcactacaaatccacatataaatcaactacatatacaacaagtcattaattcatccacaaaaaatatagatactcgtgtggagtttctcaccgtgtgatccgaggttgaagacaacgatgaggcggcggtgtggattgacagcgtgaggtggcggcggacttggcgaccgagggagtggcagcg

SEQ ID NO: 178401 - DNA, 417 bp, Zea Mays
gccccgtcccgtgccacggtgagttccgtctcgccgtcagctgctcgggacaccctttggtgtgcccttcccctctctgattcgtccagtccacgctcaccggagtgattcttgcacagccggagccccaccgccgtcgccctgtcatatccttgcgcctccgttgttgctccgtgactccagcgcttcccctcaaggtgagcaacctgcccgtacccttaatttggtctttactgctctgttgctcgcgcgattgctcgccggagctgtcccgcaccgccgttagcccacctcgccgtatgcagcgccctttggtgctcccgcgccggcatgagagccatggccgagtacgccagaccgcccttaacgcgcccgagctagcccccaagcctctggagccctgccgtggccagcctc

SEQ ID NO: 178402 - DNA, 764 bp, Zea Mays
ctgacctacgttggcatgtttcagatgcgtgtgccgtgtctggtctgaaaaactgttgtgcaccacaagctctggtccaaagcgccacgtacgtgctttctttctctgtcatctcagttgtgtgccaacgtgaacctatgtacatcagcgttcgtgtcgagctacgcaggggcgcgcggcaacctcctttattttccaactccctttgaccggttttcatcggatcggtagtgccagatgcatgcatgcggaagagggagtgtgtgtgatggcagagagcgaccgaattggacgttcactgaaccaacgtatggaaaataacccatcgatctcatctggctagtgcgttggtctatatgatcaagctctgaaaacagtgacaaagtatgaaaactacattgtcttttgtatgcggatgcattcccatgtcgatgcatgtagcatatatgcaattgcaatgcactaatacagtgcagtgctaatatcttcttgtgtgcaattgcaatgcatgcagtagtcaaaagctagatgccatgagaaccaaccctaaaaggcggtctaaccatctaagacggcaactagctagcgctgcacttggcatgatttcttttttttaactactttaaccagcaggcagcagccagaccacctgataattgtccagtgtttaggtagacagcagttaatcctcacgcactgttcttcgctttgttcgtgtcatcatattgccggcatctttgaacattattgtatcgctagctttc

SEQ ID NO: 178403 - DNA, 425 bp, Zea Mays
tatttgaatgtcatctctggaagattgctacctagaaaataacatacaccctaaaactacctcaagcagactcattatccactcactatctccctctctattttaaatttcactctacaaacagtataacctatagagcaaaacaataatttctatggtcgtttacatagcctgctagagataacctaacagaatttgagttttcaaactagcccgtagaattaaatatctacccttgcaaagttagggaggttaaatgtacgtgtacccatccagggagtaagtatgtgccacgaagtcactctttgagactactattctgtgccaccgcaattatacaggcttcaatcaatcatcacaaatccccatcacggccttcaaagcttgaaaaaaacagttgtgaagaaaggacctctgtgtttagc

SEQ ID NO: 178404 - DNA, 413 bp, Zea Mays
gaaactcaccacgaaattcgaattcaaatttgaaactcaaaaatataagaaagaaaaagaaagtaaaaaaagaaaaaaggaatgaaacccctaactgggcctctgtaaccaattcggcccacccagagaaactttccgcgcggcccagctatcagtaccgcgcatctgagctgacggtcgggtccactcgtcggtcgattctcgcttgggcgtgcaactgagcaatggggccgagttgtcggtcgcttacccgtctgtgttggcaagtctgtccagtggccccatttggtcagccccttcccacacgctagtgccttctctaccgcgcgctctctctgacaacccagggcccacgggtcagtttccttccccctcctctatccgagtcgtgtggcatgtaacggagtccggcc

SEQ ID NO: 178405 - DNA, 877 bp, Zea Mays
gggatgtcgaggtacacaatagactaatagagaaaacattgtattttgtgtgacagttgtaatggacaactctaaatttccatgaaaaacttatctatctgttcaagtagaactgtggagaatcactctcaacagcccacttggcgatgttgctagtagcgttagaactatggaggatcgctctcagcggataagaagtcactaccattactctatggaactgaaaatagtggtgcaacttcctggatgcaatatgaatggcatagatgatcttatgtgccttggaattcctagactttgcatcgtggaggacttcgctgacgtagtaaattggcttctagatggttcggaccctatagtcgagtttggttctctttcctctgcctcaccagactcctaagccatgggcctttcgcccctagcttgccacaattttcactgggtggggcccatataggcgctcctaggagttcctctctgtcctctcgacgaccagcacaatgttaatcacctttggcatcacggctagatatagaaacaaattctcacctagtttgggggctaccagtaccggcaaataagtgagatgctgcttcaccttctggaaggcttgttcagtctctttggtctaagaaaatgggccggacttcctcaacaatttgaagaaagggattccctcttagccagcctcgaaatgaagcggctaagggctgccaacgaccctatcagtttctggatgtctttaaaacaagcgggggcctcatcgccttgatcgcccaaatcttgtctcggttcgcctcgatgccctagtgtgaaaccaggaaaccgaggagcttcccatccgagacaccaaagatgaccttttcaggattcagcc

SEQ ID NO: 178406 - DNA, 422 bp, Zea Mays
aaagtttcctaagacacagagcgctagctgcaggactgcgggttcattctttaaaacaatgggggctcatgtgaaaaacagttcgggcgaaggggtatggatggatcctggccattggattaaaacctacggtcacgattagatccacccgtgcctaaacctgtacgcaacccaggcccttagatccatgatcatcatccgagatccggccacgtctactccccatcccaaacgcccaaccgtggatctacggttcggatagctttacagttaatcgttatcttccccacctaatccgagccgtctaatcctagatgaacagcccacgcctatcctcctcccccgacggctgtgaacggcggtgccagcgtgctaacgcggtggcgccattgccagagtagcgcagccgcgcgattctagtc

SEQ ID NO: 178407 - DNA, 660 bp, Zea Mays
ggaggaggatcccagtatgtcagctacccaattgcgccatttctgagagaacccgcaggcccttaacacatccaggaggtatgcccaattcagggtgtcaaaagctttggagatgtcgagcttggcgaagagagcaggattaccttttttatgcaggttcataatcatcctttgcacgtatagaaaattgtcatgaattgaccggttctggatgaaggcgttctgagcactggagataatttcgttcattcttggagccaacctatttgccatgatttttgttataattttcatgaagctattgattagactgatcggcctaaatctatcaattctgtccgcatctgatagtctgatgtgaatggctagctgcagttgtactttttacgcattacgcatccacatgtattgcgtgcaaactcaatcaggacttactaatgtaatgttcgatcagcaagaccctttttaagtcaagcttgcgaaatacagtgttttttaggagcgaaaaaaaagggtctaaaaacgcatgtaaacttcattggaccatctgcgcttgcgccacttcagtttcgttgtcagtctacggtcttctcttctactgctaccagaaaagggcagacggctttcgtaagctcagggcgtgtctccatcagtaagaag

SEQ ID NO: 178408 - DNA, 600 bp, Zea Mays
ggagcagaccaaccttcagagtgaagtgtgggacagcagcagggtcaactgataggcgggacaggagagactgagcctcggcgtcatgatcatagctcgcctggacgtccaataaccattgaggtaccaccgtggacaatgcttgaaggtcagtaggcacacaacgagataaggcgtcggcaacacgattctcagaaccaggacggtattgaactttgtattgcagaccaagtaacttggtgaaaactttatgtttccacggtgtatggaggcactgctcgttgagttgggttaggcttttgtgatcggtgaggataataaactcatggtgttggagatatggccgccactgctggacagctaggataacagctaagtactccttctcgtaagttgataaccctctcgacttgggaccaagtgccttgctaagaaatgccagtgggtgacctttttgcataagaaccgcaccgactccgagtgcactggcgtcagtctcgacgagaaaagtggtattgaaatccggtaatgcgaggacaggagcagatactagggcctttttcaatgtgttgaaagcaatatcatgctcactggtccaaa

SEQ ID NO: 178409 - DNA, 319 bp, Zea Mays
cacccattgggttcaactctggcagggtcacacccattgggatcagctctggcagggtcacacccattgggatcaactctggcagggtcacacccattgggatcagcatcagcagggccacacccattgggatcagctccagtaaagagttccaccagtacttctttagcagcaggagcagaagggccagcatcctggtccaaacacgacactcgccgaagccgtctctttttctttttcttcccctcggcaggtgcagttggatgactggcctggcggaggcgtttcgggcgagtaccatcaggcttttgagtattca

SEQ ID NO: 178410 - DNA, 681 bp, Zea Mays
gaaggaattgcctcaaacctgaagatgtgtcttgtgcacggtaaaacatcagattactcagaggataactcagaaaagacaaccaagcaccgaaggaatagggacgctggtaacagaagagaatagacttagatagattcaatgacctgtacatggatatctctccagtcggctatataagcctacaaaggtacccctacaaaaactctctcgctcaccattagattgataggtaacttcattttccacctcttgcaaaccacctataacctgcgaacttagagaaatccaatacttagcaccacactggacgtagggtattacacattcacgtggcccaaacctgtataaacttcccgtgttccgacatgcccccactcataccatcacgcagcgatcaacattatcgtcctcccaaaagtactttgggggctaccccatagtgagtagtcgggacaaaacaccgacaacgagcacagaaaggggttgaccacgacactaggtgggtccgcggtggagctatgtcttcgacaagaaatccacatccacccgatgatcaatccacaatgacgcctaatgctatacgaagcgaagaatagtggcaactcggtgcacgactcagagcagattaatggcttcgtgaagctctagtgaagaattgcacaccccctagttggtctt

SEQ ID NO: 178411 - DNA, 446 bp, Zea Mays
gcctacgggcgcgaccggatcaacgaaggcgcacaaccttatcacataaattaatttacggttacatacacacagcgagggcatcatatattacattggctcaaccttcgggatgatacccatctccctatagttgaacaacattatcctcaattcctcaccctcaaaaagatttcgcagctccccctcacctacattcaccccaatcggcgaggacaacaattctcgcttaccagtcccgtccacgcgaagacgaccactctccatctcactacgatgacgcctaccacttcgcgacaatccactcactctccgtttcgccaccgcccttcaccgcctatacccagtactcgcgcccgggagctcctcggaaccctccgcacgcggcgaaggctccgctgcagccacacctaacgctgcaaaataatccaagtcctcgtctgaag

SEQ ID NO: 178412 - DNA, 415 bp, Zea Mays
gagatttttacgtcgtaattttcggactgcattcgtcgtttcgaaacatacgatttacgctaaaaatcgtaatcatttacgttgttttggttcatgttttacgctaaaatctgtccgagtcagaacccgatcacgatgggacgcgcgagatttttacgccgtaattttcgggccacattcgccgtttcgaaacagatctacgatttacgctaaaattcgtaatcatttacgttgttttagctcacggtttacgctggaatccgccgagccagaaccagaaccacatacttcatgattatgctgtcaagtacaagtcattatgcagtcgtatattgcatggctgagcaagcacgtgggtgctaggccgaccgcgtcctggctggggcttccattagtaggggaagcccagggcttc

SEQ ID NO: 178413 - DNA, 879 bp, Zea Mays
caacctgatagttttgtttccttcgctgcctgacactgctgctatggatattgccagcacactttcctgctcatgccccatgacggtctcctcagattccaccaccaagtcagggtcagtaatgcttaacgcccacatctcctccactagatgtaaaggcactgtgttggagcatttgtgaagttggccccatttttctccacatttaaaacacagtcccttggccttcctatattccttgagggctgccattttacttccctcacctttagcaccccaatttgtccctgatctgcgttcttccaacaaaccagatgctcggttacctgacagcagaggtaacgtgttggccttgttcggagatctattgagtgaactgatatctagtctccttagatctcagcgtccagtattactcattacttcctcctgtaacaaagctaaagagcatgcagtgtcaaggtcagctggacgctgtatgattaccaccgccttaagatcatctttgagtccatccacaaaccgagcaataaccatagtggttgttagatgattatcatgagccaacagctggtgcaacaacacatcaaattgttcaatataatccgacactcatccagtttggtatatgtgatagaattgcctaatgagtaaattgtgctgatcgcgaccaaatcgggtaatcaacgctgcgcagagctcaccccagttcatttccctggttcttccttccatcgactgcaaccaaaataaggctggaccctcaaaatgcattgtagccagacgaatccacatttccaccggaacaacatgatactcaaaataggtttcacatctgctcctccacagtttcgggttagatccatcaaacaccagaaa

SEQ ID NO: 178414 - DNA, 549 bp, Zea Mays
tcaagagcttcttcagagcaggactttggttccccttaaatgacatgataggggaagttttaaagaactttgagatataccttcatcaattgacacccaatgctattgttaggctcagtgtttttatatgggctctctgaagccagggtatggacgccaatgtagaagctttttgccgggtacatgaactgcattatcagacgaaggccagggcagatggtcttcataagaactttggctgctacaactttgcatataggaaagatataaaggctccagtgattggctatcacaccaaatggccaaccgggtggacaaatgaatggttttatgtgaaagcaggtgagaagagaagggagaagctgatgactatggtcatgaagcctatgaaactaagctttgggatgaccaggcccttgtgccatatgcaacttggctctccatgccaggtagccgaagttgagtatagggtggtagctaccaaaattagtactagagacctagtacaagaatattttgcaaacaagacatttccaacttccagcggtt

SEQ ID NO: 178415 - DNA, 705 bp, Zea Mays
ggagaaggttggcaggtcacgtacgtggattcaacgatggtggagcgaggaggaggcgaaggagccaacgaagagacaacctacgacagaacggataaggaggctaggtgtaatggagctttgacttgaggcgaaggaggagcaagaagggatagatgtggtggcacgaccattcgaggtgatactcatggacaaatgagctacaatcaatagtgaggtgggtggaggggcaacaaccttgacaactgggtgacagaagatccatcaatgtgtcacactcatgcatcaaggagagattagttggctgaaaggtgctagtttggttttggtaattaagtgacaacttatatggactaatatgtgcttatgttgagatacacatgtgattagtttgtaggtacactagtgcaagcaataggtggcatggtggtgaaatggcttagagttgttgccatgctcaattagcgtgatgatgcatggatcttgttgcatatgagaaatgccatagtgtcgtgaggctaggtgaagaaatcaaaagatatagcttagctatgatggactagttgcgagtgtgaatggcaaatcgaaggctttggaataattgaccatatgtggtagagaagcttgagcaaggacttggtgtaggcaacggtgaagagcattcgaagttatgattaatgaaccaataaggccgtattatgacat

SEQ ID NO: 178416 - DNA, 960 bp, Zea Mays
ggggtatggatgttttctggccgttggatcttactctgaggaccacgattagatctactcaaaaactgaatcacgacgcactgcggggcgttggattagagatctagggttcggattaaaccacggagcggtacgcgaaattactcgtcagatctaaatccaagggtcgggatcttattaacctagatctaatctgcgtcgttgggctcaggatgaacatcccagatttattacgcaccagatctgatcccaatccttcatccacgatccaacgaccgaacttcgtcctcctcacctagtaaggtaaactaatcgcgcccgctcgttccctgatcgacggaggatacgccccacgccatcgacggaacacccagcgcgagaaacagagctcgcccggcggcgtactcgccggcgagcagcagtgccgaaccccgcgcgccccaaaaatcaacgcaggcagtgctacacgaagaaccgacgaaggtaagtaaggtagatgaagtctcaccgctgaccaagacgcagaagcatccaccctcggtacgctgcgaaggaaggcaaatcccggtcgtcgatggggagttccgcttgccccgagcgcccaattgtgtcgcagaagcttttggtgaccaccggcgaaccttctggccagtgatccgcgcttcaattgctgtcagcggtagagaacggccacggcggcgactggaacgcggtcacaccaatccaagcaatggatgcgttctgtgttttcgtgcgggcaacagtaggaaaggggagggagccgcagggcgtccgggttttatccccaggatgaattgaacccgtcagcaacggcgcagcgggagagggggaaagagcacgccgcggatctcgcgaattcgttgctgtgcgcgaccgactcggcagggaagaccttgctgacctgagggacccgcgtggaagtgagcgcggtgagcgaga

SEQ ID NO: 178417 - DNA, 549 bp, Zea Mays
ggtgttgtagccaattgggtataataaatccgtccagttttcttgaaattcttgcccgttgaagtattagccgcgttcccctttccttggttggagttcctagagttatgttggaaattggttttattttgcttcgggtatgggcagtccttgatgaagtgtctagactttcaacaattgatgcaaacagtggaagagctggggagagcagggaaacaagtaccaggggcactcgactgattggtaggagcgggggcagtagtgggacgaataaagacaggatgcttgaatgtatatgaaggtgggcgaggcgaagaacgattttgattaaaaggtcggatcaccaatctagttctcttctcaggcccttgatttgacctttcacctccaaacccctttgattttccatgtcctgatgttttagcttccactgctagtgttgtactgacagccctactgtaggtaaggtccaagcaggttgccattttccgctgaagcctgtcattgagtcccctcataaaacaattctttttcttcagatctgtattc

SEQ ID NO: 178418 - DNA, 579 bp, Zea Mays
atgggggttacggtcggtgtgggcatcggttgggggcagggatcacggtcagggaggacgggggcaggaggctgaggcatggtagcgtgtgtggattggtggagcgcgggtgaggatggaagggacgcacatgtggattggtggagcatggatggggatggaagggtgcggggaggagtatggaaggggaaagcaaggatggaagggaggtaggggaggaggatgaaggtcgagtttgccgacggggatcacggtcgggggcgaggtagggcaagggggtcacggagtcagaggcgtgtgcgaaggaggcagaacaatgcaccatgtggacgcctacattcattctttagagtagtagagattataattcataaaaaagatcttgcaatataaatgtatatgattagcacatcatatatcatggaagtttaaaaaatatatttaagttgagtagttgaaacattgaagtgcattaaataatgacatactaataatccacagttgaagtattgaaatgtatcagataatgacatacaataattcataggacgaggtttatgcattggaatcttctcatga

SEQ ID NO: 178419 - DNA, 462 bp, Zea Mays
ccggccagcttgttaaggggttgatcactagcattttccttcctgttgagaccatcttcgttgttcctatcagaacctttatcctcacttttactatcagcatcatcatcaaagaaagaatcatcatcaaccgccattgggaccgctgtccctgcgccattttccacccacaggtgtacctcgtagaagaccttggctacttcgacatccaccgcaaagggaattgcctgtggatcgatcacactgacctgcatcctacatatgccatgatgtctgtaaaacgccatatcaacatcggatgcaacccccagggtcgagccaacaccccaaatgtgaggcaccgtacaaaattcaaccggcaacccattaaactgaatccaagtatcaaccaacttagctttgacacgacctccagacgagcataccttaaactcaagagtcgccttctgcgttttagccctg

SEQ ID NO: 178420 - DNA, 988 bp, Zea Mays
ggcctaagtacaacaacaattttgacccttgataacacatcatgagctagcagatggttgtaacattgtttggaggcgatgatagtgcgatggtgaagtctttcatcatatccctagaaggcccaacattgacttggtacacaaggctatcatcattacccatcgactcctggagggcccttcgcaaaaagttcctgttcaatttccaaggctacatgccagatattgatgccctcacagaactatccctctacaagcaataagaaaaggagagcattcacgattactataacaaattcctactactaaagtctcagttaccctcgatcgaacttagcagccttcgcgctaggcacgtctacagtcactacactagggaccctcccaacaacttctaggagctctaccaactctttgagaaatacagaagattagaagagttgcattatcgaaagttggaaacacagtggaagacgaaggagactccgcaaaccagcaaccaaccttgggccaagagccaacaacaacagaaccaccaatagtaagtccacaatataactaattatcaatagcatggaaaaggcccccctcgcacacaagaaaatccctagcaaccataaaggagatcaaggtctagcagaggtgacgactgtggcaagggctctggccaagagcaaaagctatattgcatcatccatggcaaagacatcgggcactaaattaaatattgccctgtcacaagggataccaaggagataatgtcaaggtcgatcccagatcaactagcaaaggctatagcacatacctatcaaccacaaggcccacctactaccaaaatgttcaaccccctacccgcattatcccttaactaacacccaaagctacaccatgaagaaagactgcaaccccctccaccaccacaaaacatacccccacccactagctccctccaccaccacctaagggcgacgacaatttcctccaacca

SEQ ID NO: 178421 - DNA, 563 bp, Zea Mays
caagaggagggatgtctgcgtacctggtaagcgctgcccttcacgcctgcgatctggggaaacgatctggatctaggggaagacatgaggttttgcgacgactagagtggtatttatagaaaagagagaatgtggaaggcagttgtaaaatttgtcgcaggttgcgtcctggccgagccaaagcgacgatcgcgcgatgagttgcacgatacagtaaacgacgaagaccgagttaagcagaggtaggcgatggtagatgaaataaaggggtaacagttgtgcgagcaacaaacgttcacgaggaggaaatgcggtttgacgacctcgcgaaaatgacacaaaccatagaacgagttcgacgaaaggaacacacatatatataatcgagttttccaagattttgtagttttcgcaaatactgaattttaggtatttaattactattagaaaaactaaaattcatattttagtacttgaagaaacgttttgaaggttcccgaaaaaaaatccgaaaacatggtcaagataactcgatacagttcgaaaaacttttcactcataaa

SEQ ID NO: 178422 - DNA, 1321 bp, Zea Mays
aaagcattatgcctaaaaaggaaaagaaatcgatggacgagggtaaaactttcctttatcactagatacatgtgatctacgtggtgaacaccaaagatcgggtttacaagggtggcccctactaggctagaccacatatggtgctagagaccgggtttacataggcgaaccttaccggaccagaccacaaataaatgcatatcttatcacaaaggaagagttcattcatgctactttgtaagtaggagataaagggctaacctaaaccacctgggttccgttgcgcgtcggattccaagggtaagaaacgtctcgttctatcttagcgatgcccaaggacaaagctcgacgaagaccattggctgctaccccgaacaccatggagcttacgaccgatgagtcgggtcttggtgcttgtgttgaaccccttcggagcacgtagaatgtccctctgagggtctcccacaaccgatagactgcttttgctagggcaaggttgatgtaggtgtagccgctgttgccctcccttttgctttgtcgggatgctactaccctttaggctcgaagggtaaacaacaacctatgcaggcttaatgatagccggaggtggggcatgctgaaccaacggtgactaccctgaacgccatgggtcccgggctactggtcgacacagcgaccctaaacaccattagatagtgtcacgactgacgagtcgagccttggcaatgtagagcatagcagtaggttgacatagtggactgtgctgatcttggagctgctctaccattaaaacactatcagtgcgagtggtgggccccagaggggaccatcatgaccggcatctgccactagcgagatcatggacaaagcttggttgaatgtggtggctcagctgcgagccaacgtaggtattggcctcgcctttgtaaggcccccaggcatgtggcagtgctcatcgtggtcggtagcccacctccatcaagttgaggttgacgaaggcgtagcccttagtggcttgtttgctaagctccaccggtatggatggagactaagcacaccacatggttaggtcggtggccagcgagggccccttcgtgcaccagtgggccaaggcatagactagtgcagtggaccacatgggccctggtacaacccctaccaatagatctctggaaggagtccatgttaacaaaggcatagcccttgttgtcatggcttcctgtaacccattggtaggtagaagaagtcatcccctagggtcggggagataactccatggaacactgtggccgaccgatggagccatgcatgcctgtgtttg

SEQ ID NO: 178423 - DNA, 464 bp, Zea Mays
tcacggtatctggtattggtatgagatcaaatagcagcaaccgcggcaatgatgtcactgcaataatgatgccagattagcatcttcctaatgattgcatgagctgtgcgttaccatcagttagggcagaaattttatttgcaaaacaatggtttcctagctaagatcactcgagcaatacgctggaatcctgtcgataatgcatgtttgcttggttagtgcagatatgtgatggctgacacttcttcctttggctatcattaaaaaataagccaaagattataatgtgataggcattacacaagcttccatgccaccacgacattacttggtgcattagaatgctgatactaatattgtatgaggacaaagctgccatccacttagaaacctaacctggtccgataagcaaaaaaaggtagcacagtattgagttgatgcaccaacacttgcaggcatgaccg

SEQ ID NO: 178424 - DNA, 548 bp, Zea Mays
tcttctccacaaatagcactggggctgcccaaggcgaggtactcggtctgatgtagcctttctctgacaactcatcaatctgcttcttgagttccaccaattttggtccggacactcgataggctctcttggaaataggggcggtgcctcatataagctctatggtgaattcaaccttcctttcaggtgtcatgcatggcaactcctcgagaaacacatctgggaattctgatactacattgatagcctctgatggtttaatctcctcaatacgggtggtggcttggtgacggcttccttctcttggtccagacaagaccaactctactaacacttcttcttctgatagggacactaacttcaccattctcttgtcacagctaagactgacttggtacttggttatccaattcatccctaggatgacatctatagttttatcctggttacccataactattagatcagcggggaactctatcccccttatttgaactcttgcactagggcaaaatctatccgtttgggttcttccaccaactgaacta

SEQ ID NO: 178425 - DNA, 684 bp, Zea Mays
tgacaatgcatcagatgccgcattgcgatccctttccatgtggtggaactccaatcctttgaacttgtcttccaacttatgcacgactacacagtatttgcccattgagtcggtcgagcagtcccaatctttgtttatttgactttatgactaccagcgagtcgccatacatcatcagcttcttgatgccgagtgatactgcgatgttcagcccgtggaccagtgcttcgtactctgctgcattattggatgccggaaacaaaagctagagtgcatacttaagttgttcacctccgggagcaataaagagaatccctgcacccgctccttgtagcttcagcgagccatcgaagtacattctccatacttcagcaaattttgggctttccgggacctggtgctcagtccattctgatatgaagtcaaccagtgcctgagtctttatcgtcgtgcggggccgaaactctatgtcgtgagctcccagctcgcatgcccacttggctatccttccaatagcttctttgttgtgaagaatatcacctatcaaaaatcatgtgactactatgactttgtggtcatcaaagtagtgccggagcttgcgagcggttagaagtaccgcatacaacagcttttggacttgaggataccttatctttgagggcccaaggacttcgctgatgaaat

SEQ ID NO: 178426 - DNA, 464 bp, Zea Mays
ctatctagactgcaatatgtacccaaagatattactccagttcctgttaaagtggctaatgagcagactatcttttgtaccaaaatggtggagaatttgaattggtggattcagggtcactcttttgtcaaagatgtgtacattctgccagttagtgcttatgacatgattttggggatggattggctggaatccttcagccccatgacttgtagttggacacaaaaatgggtatcattctgttatgaagggcagatggttacattacaagggctggatgctcctacttgcactgaattgcatcaaatatctgttgcccaaatggataagttgcataaagggaatgaaatttgggttgttgctatgttgcagacacaagatcacaattccattgtcttgaatgattatgtgcctgaacctgttagagctgtgctcacagagtttgctactgtcttccagactcc

SEQ ID NO: 178427 - DNA, 583 bp, Zea Mays
cccacgtaaacaaactggtaccaaatcctgaccctcggattgccgatcaaccgttgtgatttaaaacacgacaagggggtacgctacttttaatcctcatcgtgcatccactgatccaacgactatggtttattcacctagatcgttatactctcatgttaatctactcccttcattctccgatcaacgaccgacgatgcttcttccccaccacgccccccagttgtggcgacgcgcgtacgggcgtggtggcgccatgcccggatcccctctggaacacgatcctagtgcaaagctcgactccctgatgatgcaaaaccaaattgaatatggtacgaagctattctgaaggttcctaccatgaatcatgccctcaggcaccctggccacgacgcagcacggtttcgcggtggaggatggccattgacgacgaattctcggtctccccgacgtccccaccgcccgcagagatcacatcagcaagcagtgccaccatatgtatccatggggccaccaaccgaggttcatcaggcgacgaggtaggaccccccacgacggcggccaaatatccctctttctactc

SEQ ID NO: 178428 - DNA, 434 bp, Zea Mays
gggcgcggcgggagcttctggtgcgcgcgggcaggaccaagaggcgggactcggcaattttctgtaccacgcaggggcgatttcggtcggggccggcgcatcgccatcgaaccgcgagactaccgtcgctccatccgggggcaacctgttcgtgtctgggcgctggtatgttcctagctgagtagatcgacgttatcttcacgttaggcgaattcgatccgtgcttcgtcgtggctgtatgcgcggcgttcgtcggggctgtgcgctaatggagttgcgacgccgcgtagtcgtcgaggtgaagaagaaggttcgtggccgttggatcagtggggaggctgcggtgtttgtgcctcgggccgttgatgttaggaggagcggccaggattaacttaaggaaacaccatgccctaatttctatccggaccattgga

SEQ ID NO: 178429 - DNA, 759 bp, Zea Mays
tgcgaagccgggggcagtaggcatgtttcttcttaggtcgggccaaattttgcatggtaagggtgtctttatttgttgaaaggggcatggcttagggtctccaagctacaagtgtggacacttccctctggagtgaggggctcttagtggtgggattgatgagtgttgccttcctgcttgttgattacggagggggcgatttttgctgggggtggcggaatttcgttagtgaaggcaaccttggctttcttggtgttagcaatgaggattgccttcatgactttgacctggatgggaggagttgtccctagtgtttggtttcctgagagccaccatagggttggtcttcgaagcacaaactatgggcgccaaatgttgagtccggagaagcaggcctaagtactcgagagcggctaagagcgatcgtgcacgacaaaacaggaagttggtaggatttagctatcttgtaaagcatcccttgtccatagttcgaatgggtgtatttatagggtaaccaaggggttagggcctaaaatacgtgcatgcccttggttacctactacatttatggaatatactatacaatggggtaattacagaacaacaactgtctaggtctaattgtacatagcactgagctcgtcgtagagactgacaagcagaccactttgcttgtggggaggggttcactggtcttcaaccaacctgaatggctcttaggttttgagctaccgaggacttttccttggtgtctttggt

SEQ ID NO: 178430 - DNA, 433 bp, Zea Mays
atgtcatggtttataattcggccctttgtgcgagagctgtttgtttgggctctggtcgaaaacgagagtgatccagtttgaagttttctctcccacaacggcccgacacgaatcctggtctactgacctccggatccgatctcaatgagatggtgcagcactggcggcggaggaggcgaagaggcgacgacaccagtgatgacgtggtggcgtagggcagcgtcgacgaccaccctacccgtcgccttctcaccggtaagcaccgccctctcttccccaaacgcgtctgcccttgcgatgctttccttctcactcaccttgacaaacgccaagggcctgaccgccttgcatacgccgcaggccgtgcgatcgaggtatttttttattcatacccttagttttactaccttcttcatttttacccttatatttt

SEQ ID NO: 178431 - DNA, 540 bp, Zea Mays
agcctgcacgctccaccactctacaacgggcgtcctagtatttggaactgtgatccaagggatccgggcatacggcttggctttccagactaaatcctgcaggtcctgttgcatgaatcaaaggatggcagatatcagacgatgggtcctatgggtgtgctactaacacttcctagtcgaagttgtgtacaggtccaggtcccagtcgagactacctcctaggggccaggtcaccaactctttcttaggtatactggtatccagcctcgacatgtcgagcctacatcccaggggggccaagtaccagggaggagttggtaacgccacacacagcaaggacaaatagcatatagataagtgctaatactgcttaataaatagtactcaaaagtatcttacaaaaccaaaaaaatattacaaagccgcttcccagcgggacccttaccttctctctacagatctagctactcatcatcagcaggatcccactggaagcgttcggccaccagttctatggcatcttgtacgccctcccgggtg

SEQ ID NO: 178432 - DNA, 648 bp, Zea Mays
ggaaagcagtggatctccctcgacaggttagaattgatggtcaatgccaatatatcattttctgcgtgaaattatgttgtattgagatttgatttaaacattgagttgtgattatgcagatgtaaatgtttacgttattcattgtatacattatttcagcagaggcttaatgtgagatgcaatccccaagatgttatagtaagcattcagattttaaatgacagacaacgtcaagctattgcatggagggggttctctagtatacttgatatgagagttgacgcgcttggcagtagatctcatttagcttggctgatggaaaagcttgaccataatgatatgacaattcgagccgccccagggaaggagctaaaaattacaaaggagacggtgcaccttattttggggttaccaaatgctaggggaggaaaggcattaagcattgatgaagctgttgctgcaaacaatttaagggctgaacttggtttatccaaagaagaatttggtgttgcagctcttcaagatcgtttgaggaaagggtttgacgatgatctaagcataagatccttcttcctgatattgttcaataggttgttgttccctactgcaagttggggaataactaaccatgaggttcttttaactgag

SEQ ID NO: 178433 - DNA, 761 bp, Zea Mays
cgcggggaacgccctgccgtcgtcgttcgggtgcccttgaaagaaccgagggtgttcgcccagtcgtgttgaacgtcttcacgggctcgtggtggtcggtgatccctgtggcggcggaaacctccttccctagcgtaagccacttaggaataactcatcgatttcgccacaatggtcgctcggtcaccactcgatcgtctcgaatttggggtcggggagtggcatgcttgcggggcaccgttgccgaggcgcttgcgccgctaggatcgcggccaaaggaggaagaaatgttgctgctcatctgatcataaagcgacgaccaggattatatggtagatgaccaatcggtggaattgtttctgagccgtcgatcgcgctgcgaagtgcccaaattaaatcgggcgagggctcgatgtgggtcgttcgatgaacatccaacggatctgatataaacttacctcttcgccgcggcagaattgcgtaagaacccctccgtttttacgttatcaacccgtagtcctatacagagcggtctgagtctgagtacttttacgtcgaagtccctgtgttttttgttaattttgcgcgcagtccagacctataggaaaacagagaaatttatttagaaaaaggtttttagtgcaaaattaattccaagaacttgttgagtatggagcgcaggtacctcaagtcggggacaaagactatgactcggacgaggccgcccaaattaggcactttaactcccaagccacgtctat

SEQ ID NO: 178434 - DNA, 277 bp, Zea Mays
ccaggtcccggatagcctagaagttgttgaagtgtggagaatgtactttgatggctcactgaagctgcaaggagcaggtgcagggattctctttatcgctcccggaggtgaacaactcaagtacgcactccagctgttatttccagcatcaaataatgcagcagagtatgaagcactggtccatgggctgagcatcgcggtatcactcggcatcaagaagctgatggtatatggcgacttgctagtggtcataagccagataaacaaagattgggac

SEQ ID NO: 178435 - DNA, 796 bp, Zea Mays
acactctctagcatctttagttttcatagctgaaaacacgaggtgagatggcactagagggctttccctcatcactttgagtcttgacttctgggatatagcagctattgcctcttgcaagctaggaagagtggattgatgaaacatgaaggcacgtcttccctcaaactttgagtttaggcccatcaggaattgaagcacatgtcttttttccacccatttctttgcccagacaacacaatctgagtgtcgtagctgaataggatcataatggtaggcatcagcccacaaacatagcaattcctagacatactccactacagatcgctcacattatttaatattacgaaggcggtcttcattctccaccatcaacataatatttccagctcctgagtacatttcttcaagcactctccatattttagcgacacttataattgtatcaacagtgctagcaattgtcggaatcatataactcaacacccacgctgccaccaaagagtttatagcatctcaatccttccattcagcacttggcttgtctttgggctcaacaacagttcctcaacaacagttccatcaacatagccctcgagcctttttgccttcaacaatcgcatgcctctcctagaccaagccaaataattcttttccccctccaattttatctcatttggcataactctaggttctgaaccgattctatataagcaatattttctttacttgtagaagaagcttcatcctttttgctgacaataattcaaccaacttaccatgaacttgctcaatc

SEQ ID NO: 178436 - DNA, 490 bp, Zea Mays
ctatcctgctctgtccacgtgaaccgcggacgatgaagaaatggtacgtgttcccggcaatccttggcggtccggctcaagggatcggggagcatcaccatcacgtaaggatgctagaacaggaacaagtagggaatgagcagacctggggaaggctggccacggtagggtgtggttctcggtggcggagagggatttggggcgaattcaaaattcgcgagctctggcgaaggactgctagcgattagcggtggctgggtggaggatgaccttgcggagctagcgggggcttcaatttatagggctcttcggtggtgaccgtgaatttgggcgttgatgtgcggcggtcggaagtgaggaagaacgctggtgcagtgaacacgtgttcaccatcgtggcagtaactccgatggtcgacggggagtttagagggagtcacagcgatgcggtggcgcggttaggacacgcggcacaaggccaaaaggtggcg

SEQ ID NO: 178437 - DNA, 711 bp, Zea Mays
aggaccctgactgtttgaataactaattaagaatcctacgcactatttacatgtgtctctgacacttacaccgaggcccctccctttttgtttcttcgcaaggttaggtccccgaccacggacggcggagaagtggctccggtgagcttgtaccggccggaaaatgtaacgactaggcccctcctttgctcaacacctaattccaccctcggcgacactaatccctctaccaattgcactaaaccggcccgaagcacgcctgctcacgacgacggcgaaaaccgagaagaaactatggtgttcagggcaatctagtgcggtctaattcaatcgaatgggtctgtgagctacaggggacatgtgggaggctagaacattacacagaaaggtatgaactaacccgtagacatctggccacggcgagctctctcacagcggtgttctgaccgatttgggggaaatgagaaattgaggggttctggtggatgatccgatgcaagggctggtgcattggatgcgtaaatacctagcggagctcacgggggcagcaatttatagagttctacggcggtggcgtccaatttgaaggaagggtggtggcggccggaaagaggggaagtcacaggcgcaagtgctatcgtggcttttaccggggcactgtcttaggtgatgaacaagctatctagagcggtctattgcgatgtggtaagg

SEQ ID NO: 178438 - DNA, 730 bp, Zea Mays
agctagccaatttaggtaaaaactattagcagctccagtggatccaaatcagggcctcactatatatgttagattatttacggtggaactatatgaaatcacgcctggcagttcgttgctcgcattcacggttatttgttttgtccagaattccagtgcatgcaggcgcagcggcgtatggcaaaagaagagcaaggccatacaatatagtacgatgaaccttgtgcttgtgtgccaacaattataagaacctagataaagacaccatataattacgatgaccgtccacgtacaacgcattcgagcccagcatattgcatatacgacctgctttactataaatgacgctacaaccaacttcaaagaaaaatcttcgatttgttgttcttaaaaattgcataaacgcacgcacacaaatagcttctgaaaagaaattgagtgagctgaggggcccgtcttccacaacctctcttctccatcaaccgcgagaatccgcatcttcctttaattgacaggagccatgaccttccattagctaattataagctagggtttgtgagagctagctactcaccttaaatacggcggcaccatcaccatcacatcacaacgaccagcacgcagcagcagccacacaaaactagcatgctagtcacagagacagtaagaggttagtgctagctactcccctagcttagctatagcttgctcttgccgcggcgtgcttgct

SEQ ID NO: 178439 - DNA, 398 bp, Zea Mays
tgtgtgttgagtgagaattgagatgggcagggattactccaaatccctttgttttggacggggacttggtttgttttctccaacaattccagcccgccctgattgtctgtctaaggccatggttgtacacttgtgctgttggagacttggtttgttttactagccctggcaggaaacacagactgagaccctgtacaaggaaatataaaaaactataggttttcttgtgttatctcgccgatttcaaagctagattgtgtagcaaatagcagatcatagcctaacacacgatcacacatgtacgagttgagggctgaggccctagaattctagggactctgtgcggttggcccattcacgctgggtcatgtaggggcctaactctaaggccgttttca

SEQ ID NO: 178440 - DNA, 963 bp, Zea Mays
gtgggtgggtaaaagatctagcggggggtggatttggtcgtgggtaggaacttatcagctgcacttgatggccgtgcgacgtggccgagcggccggtgtcatcgtggtacaccggtgacctcaattgcgccacgttgtgaccctttcaccacgtagtgataaccgtggcacgcccgaaattaccatcttggagcccttgcaccggctggcgccacgacgagctcgccaatgaaatatcccaccgccgccatgttcgatttcggccaaaattggcgtgacgtgtagccaatccctttaaattgagtactcccctcgctccgcctctctgttaagccttcattccacccccaggtcggcgttttcgtgcaccatagcctccagtcttcggacttcccccaaattggtcatccacgccgccgtgagacgccgcaccatggccagcaacccacaggtccgcttgtgtctttctcacccgtgtttctacaccctcttgcgtaggtaatgctatcggctcaactgaatgagctctatcatgtcaaagcatggtgaacgtgaaggtattgtctgggaacaccgtcacggacatggcttccgtagaccgatcgttctaggtagtctttgtccaagtttacccgtgcatagtatccctagctggccactgatccttccctagtcacttgattaaacactaacgacccttatagcctaggacgagctcgccggagcattttgcgtcgcggttctcgcaaacatacctggttaagtgacggactaaccaaattaagtatagagagggattcagttagcgtctgtgattgaccccatacgcttggcgtcgtcagagcgggtccctaccggcgagtgcgctcggttccggtcaggtgttcgaccggtgcatggccacagactcgaattgtgaagaaaaagaagtatggggtgttttgcgcgaatatcagagagaca

SEQ ID NO: 178441 - DNA, 435 bp, Zea Mays
caggggccgctcacataaaatttcccaggcacagcgctccactctctggacagcgggttgatatcctttaaccctagggtctctttagcaaaaggtgcaggccgaaggggtatcggagagctctggtcgccagatcaacaacggacggctacgattagaacttatctattatgaaacgttatgcgatggcgtccctcggatcagagactgacgatccagattttaagtagccgaggctctgccggatccgcccgatcgtgatccaagggccaccacagatccgcgcgacattacatccccgattgaatccacaccgcacaacagcgaatccacggttcactctagttcgaccctccatctaatcacggccgtccgaggaacatctaacggtccgagcttgcctccccaagctagctactgacgcggcggcgccgc

SEQ ID NO: 178442 - DNA, 907 bp, Zea Mays
atataaccaattgtccccttaacaccgatcgaactaattgaacctgcccaaattgactgaggattggcgtagagacgtgtaatgccaaaatctgacaagagagcattcatatcgtcatcgagaaggatgttgctcggcttcaagtcacaatggacagtgggccttccacagtcatggtgtaagtaatccaatgcatcagctacattgacgacaactgcaattctttgagttaagcttagacgctttggaactgtctcgtcacctttgggatgtatccatttatccaggttcccattaggcatgagctcataaattaaagccttgaaagaattgcctgtcatatctatacttgagcatgcagttacgatggaaacaagatttcgatgatgaatacttcttagcgcttcacactctgccaagaagcttgtctccgctccttgcatctcaaggtcaaaaaccttgacagccacttcaatcttaatttccatcaatttcccactgtaaaccgatccatagcttcctcttccaatcaagttggattctgagaaaccgcctgttgcttgggctagatcattgtaagtaactttcacaaaatgctcaccaaaagaaagttgcggtagatgtgctcttcttgaagtcttcttcttaaagaataaaacgtagacaagcagtaggaggcatgtgaacccagatattgggaacaatagtttagccaaatagcatacaattgttgctcttctagagtcaaaatggcatgaaggcgtatccaaacccatggctcctccacacaaccctggattgccatcgagtgaaacaagtgtaagattatcaactataccagctttcggtatctccccatggaaattattgtaagatacatcagttttattaaaactttagatcattt

SEQ ID NO: 178443 - DNA, 497 bp, Zea Mays
cggcaacaccctcgagggctgggcaaacgctagcaccatccttgaggaccgagctatctgtggcagccacctctaaggctgaaggaccttcaacaacttccatgagaacggagcaatccagatgagcctctcgactcttaagaccgcgctccaaggtcgacgaggcacgagatgctgctcgggataactctaacccggcatcaggcacatcagcgcaaacttccaacattccaccatctgccggctctaacaacagatcttctgggaccatgtcttcgagagtctgatcaaagtttgccagagacaattcttgcagaccaacgagagcagacaaagctagagaaggaacaccactactctccccgctggctatgtagcgccggctgttctttcgaatcaagggaatttcctcctcctcttcctcatcttcatcaataatgcggatggtacacccattgggatcagctttggccggattacacccattgggatcaaca

SEQ ID NO: 178444 - DNA, 437 bp, Zea Mays
gctgaactgcatcgagcacattttggagggaggttaacgccggagctacatgggagggtagttgatcacacaaggaggcagccatccccctctcaaggatatcagctaccgtgagagagttgtcaatgacatgctcaaagatggtggggtatagagtggcaaaatcatcgctcgcgtaccatgcatcaagctagaaggttgtgttgcgatcgtcacccacaacgcaggtcatgatagcccagtagaggaggagcaccttcttgaaactattccagtgatcactgcggagagggggttgccatgcaagtgtagtcacgtacccaaattgcccatgatgatgtcgtcgaagtgtagagtctatggagcatcttcaggagtaggcatgtgttctgagtcacaatatttttgacccttggtccacctgtgtgatgctgact

SEQ ID NO: 178445 - DNA, 371 bp, Zea Mays
cggtaataatttcttttactaaaccattctgttggaaccttacccacctcacccatgattgttttctccatctcgccatttcgtgagtcttgtcttagctccatcctttactatgctctttgttattatcacctttacccttgacacttctatatattgcattgatgttcatctcatacctgccctttaaaattgcccctcttccttctcataccttctttctcttggtcgtatcctcttctttggctcacgagtttgtaacctcatcctttgttatgcttttgtttcttattgcctttacccttctcatttctcaatcttaccttggcgatcacgctatgttcgttatctaaaacctccaatctcccacc

SEQ ID NO: 178446 - DNA, 1233 bp, Zea Mays
ggtgggggtaggggatcatggtggaggggccaatttggccggagggtgcctagggtggccggtccacggtgcggtggcgggcgctcgcggcggtgaggtcgctggcgaggccaacggtgcaataggcgaggggaaagggtgggtcgtgctcgcggcgaagtggcggaggtccacaactacactaatttgacttgaactcaacagagggggcagagcggagctcaccggagaggggagggacgacgacgacgagcttgattgagtccgagggaggaaggtggagtggctaaggcctagcgtggtggagtcaggagctcggggcggcccttttataggcacccgagaaggggaagggggtgaggtggcgcacaccggtgacacttgccgcggcggcgaaaatggcgcacagttgcgacgggatgactcgggcagaggggagtgacgggatagctcgaggcaggcgcaagggacagggtcgcaaggcgccaaggctcgctggggaggagtaatggcgaggcgacgaggcggggctccagccggcggtgatcgcgtcgatcgcagatcacgggcgaggggatggaactgactggtggggcccgcctgctagagagggtcggtcgcgagggaggggagcacgggctgacgagtggggctgagccgacagcgggagagagatgagagaggggggaggcagctgacgggtggggccggggtgtcagtggcgggcgcaggcgcgcagtgattggccgcttgggccataggagggagaggggtgcgggtgcgcgagagagaggagggcaggtctgggccagaagcggcccaaccgagggggggtttcccttttctttttttttcttttctatttcttatttctatcttctattttctatttctttatctccttttcttttgaacaaataaatagctaaaaaatcttgggtgttagaaaaaataataatctgtgtgaggtgcttctaataatcaagtgtatgcatatgatgagatgacctatgggggagaatttaggggagataaaaggggggggggttaggagattagggttccaaacctcgggttgaattttgggatgatacaaacctaccccacttaaaggaatctcgccctcgagattcagacgggactcgagaaaaggtaagggtattccctcctcaaagagtcctctttttcccaggtagcctcctcttctctttctctgctccactgaactttaca

SEQ ID NO: 178447 - DNA, 827 bp, Zea Mays
ctcttccgtgcgggtttggcgaccaaagctcggtagatttctcgccggacttcgtgggttggcggcggaccgtgtgtggtcgtggtcggagccgtccactgccagtcgcaggtatgtgacacctttatggtattcgtcgtctccgccgcatcggttaggccttggaattcgtaggagataaccaccgtgccgctaattgtgttctgcgccgtgccccagccatggtcaccgccgcggtggccctgggttctgccgctgggcgatgtcgggcggaggagaaacaaccctgtgcgtagatctgttggcaaacgaccatgattagaagttaggggcttgcctcggcgactgtctgatcttcaacggatggatgggattagaacatggtagcgtttcgagtgaatcgatctagcgcgttgatctgaaaggaagtggtctagagtcaaccgggtagttttaaatcttggccgccgatcgttgatccgagggcctgcgttgcttactggtgtagggttatgaacgaatgaatctacggcgttggtggacgatccaacggccggtaatgtgtgcgggttcataagtaatcagatctaatctgggcacttgaaagatgatccgatgggccagatcacaccataccccttcaccgagcccaattagcatataagcccctcaacttcattataatcaacccaccgtccactacggggttagtctgagtctagagaattttatacgcaagcccctatcttctctggtatttcgcgcgcagtctagaggacagtgaaaactcggaaattaattttggaaatcgattttaatacaaaatt

SEQ ID NO: 178448 - DNA, 661 bp, Zea Mays
aaagaactgtgacgccaaatttgttgcaaagttttcttccccaggctgagctggggggatagctgccagatggatcttggggaggaggatatgaagaagatggacctggatccccttggtggggaggcgggacatactgctctctatcatcaaaaaattcttcctcttctccttcttcatcttctgctgacatgaatggaaccccatagcttgctggtgccattcattaatctctggcggaggaggatggaggggcacatcaggcgagcggggagcaaaaggcatacccatggaagaggcctgacgatggaggttgtcgtcagtctcccgctgttgcctcgccagctcatgaacatcagaagagatgttcctgcacatagaaaagaaagctgcgattccatgagccaatcgagctcccatcctgcgaccacgacctcgaccacgaccacgaccacgtggtgtgggagatccgtgaccaggagagggacgtgaggtaccagcagcagcttgcccacgagagctggcaggggctttcctcaatcgccttgctggattgtttgggtcaatccagaagggggtataggagagatgtcttgtccctttttcaaatcgaaattatgccaccacttcaatcatcttcatgatgaagggggcatgaaga

SEQ ID NO: 178449 - DNA, 626 bp, Zea Mays
ccaagcggcagacatgaaatcggggctagcctgaccatttcccctaacttaattgcgctattgatcaactatggagctctggccacggtggccgtgagtatggcgactatacggtcgtgttcccggcgaccagagggctcttagttcaattcgatgggttggcgagtatcaccgacgtatgtgaatgcttaaacaagggagcagaggggaggagctaaccggaattgggctgacgacggtgaagcttgtttcacggtggcggaaagagatttgggggaaaacgcgaattcgagctcacgggtggatgattgtggccgattagcggtggctagttagctgacgatctcacggagctagtcacgggctcaatttatagggaggacgggcggtggtggtcaattcggccgagccgtgttggcggccggagctgaggaagaaggcgctggccgtgtgagtacgtgtccacagtcgtggcgagctcgccggcaacgatttgacggcagtaagaagccacggcgacgcgatgggaagtttaagccacgcggcgcaaggctaggaggcggcggtcaccggtgttcttatcgatctccgccgcggtgacgcatgtacggcggccggacttgttt

SEQ ID NO: 178450 - DNA, 370 bp, Zea Mays
ggagacgcgatgttgccccgacgtgagctaccgtggatcgccgtgtacgacgagagtcgagacgtggacacacgaaggtggagttcttttttccatattatccgctacaggataatataagggttccagcctatagctgacacacggcccacacggcccatcaacaattacgaacgctcacttcaaacacaatttctcttatcgccaacttcgcttctcccgctcctacaaccaaacgcgatgtcacgcctcacctggagctactacagatgcttcagtacgcatgtagactaaaagaaaaatagttctgaaacgccaatcctctttacatcagccttggacaaactggatgcatatttgttatgctaca

SEQ ID NO: 178451 - DNA, 511 bp, Zea Mays
gaaaatcagggttaaattggttaagttatgaattataaaagtttatgggtctatcctaacaagatttggactgcagttgaaattacatggtgctcaggggctctcttgcaagaatcagggacctatttattgttttctataaccacatgtggaggacgggtttattccatgcaaatctaggggctcatatgggaaaggccacgttcgaaggggaatggccgagctctggtagctcgatcaattactaatggcccatattagatgaacccccttgtcaaaattgtaggtttattagagccctccgatctactactgacaaccacgattttaaaatgtcggcgatcacatcttacgcgaccgtggccgaaacgacggtccagattaacacagagaatgggtatgcgatggggcgaaatcagtcgctcactaaggatccaacggtccacagtgcgaccaaccacacctcctctctccccgatgaacaataggcggcgatgccgatgcttctcac

SEQ ID NO: 178452 - DNA, 422 bp, Zea Mays
attacttgaaaggtcaggaaaaggcacccaaaagctggttttttactgtaaagggacactgttgccgcaaactgggtctttacccatattttcaggaacgcgcagctagggcgcaatttccttttttgcgagaaccagagtttgagcactggtcggtagcctcacaagtcacaactggacaacttagcaccatgctacaagcatgtcctttccatagtgcataagtcacatgtatcacagtgatagccaggtcaaatagaagcaaacaatttacagagataaagccatattattgctaaggtcacatgaaatttgcactgtgtgccattgaatttgtgttaggtccagtaaatcataaaatcgtaagacagaattaaaaagcaaaggaaggagataataaagttggaagcactctcaaaaaa

SEQ ID NO: 178453 - DNA, 325 bp, Zea Mays
caggaaagggtcgcactctaaggcccaaaccgctatcactagcaggaggatttgacacgaaactggtaaaggcctgagaaggaggcagattccaggccgagtatgcaacaggagcgccgatgttcgacaccatgcctctgagtatcatctcgagccggctcaccaagtccacagcaggaattcttctgttagttacccgggttgaatcagccaagcctcgatacagataggccggacacactctgtctttcagcggctgaatattcttaaaaacaaagtcagcgaccacagcttctgcagtcagacccatttctttcaacaatcc

SEQ ID NO: 178454 - DNA, 546 bp, Zea Mays
atggatgcagctatggcaacctagaaagacacttctactttgaaggaacactttccatatgcgccagcttggggtcaagtggcatccaaagagagggggaatgttaaccatgctatgagagatgaggtggagcgcaggccaaccaagaggacactggcacaacgaagaagcatcaggagaaggtagctgatcaggcgcgtccatgtcggaagaggtgaggcaacacatcagtaattggacccaaatgggttgtgtaattggcttgttgggctagggctgtgcaatagcttatatgcattcgctagtactgtaaaaggtatcgatgaattaatccaaaacaacaacacgaccgcaggttgtcgtaatctccttcctctatcttcctctccacgcgcgagacctccctaactccccacccatgtgctaagattgtcggcaacgcttgctgctggcctccccgtcccctagcactattcacattttagctccaacaatcacacactacacgctgcaacggctgcccctatgtgtgctgcagtggcaggg

SEQ ID NO: 178455 - DNA, 652 bp, Zea Mays
actgtccgcagccttcgaggtcagggaaaaaagagactgaacagagtttttgatgccatcggcttcgtctaccccgattaccgctacccgctgcggggacaggggaaaaagaggaaaactgctgcttcggccaccccagttgagcctgtgccgaagggcaaaaaggtgaaggttcttacccaccggccgtgttacattgaaccggccgtggtacctgagtttggcgagggggcctcttcagctgctgaaacgagagtaattgttcctcctgtgcagaggactgaagagccggctataatgccgaagttaccttcagttgagctagtggagtcgaaggctgataaggataaggctgaagggtcaaaaattaaagaaataacaaaaatgccagagattttgagcccttcaatagaggtaacagtgccgaaggcacaaaagggttctaccgcactcctaagaggagaaggatggcaaatgtgctagatgttgtgctagaaacagcaaaaaccttgagtcctgctcctacaagaaaaattgccgaagcttccaaggcgcaacccgaagctgaaacgaagcaggcagaagtcgaagctgcaaaaattcaagctaaaactgaagctgggccttcagtgcccaccgagatggagtgtgc

SEQ ID NO: 178456 - DNA, 302 bp, Zea Mays
cttagcaacaatttccttcagcttccctcctctacctctaccttcctttgatgttattgggtcacttacattggttgtatccacacctgaagaatacattttcatatacacttcgaacaactcatgccgaaactatttgtcccctttcctcgccaaatatctcttcaacggttatcttggtatacaaagatagcttgcatcttggatcaagacaaccaacaataaaaattagtaaattcaagttctccttctcctttgccttccccctccccttctccatctccatgtcatgttcactgcta

SEQ ID NO: 178457 - DNA, 417 bp, Zea Mays
cagcagtggatttactcttctttttcttatcatacggggacactacttttggtatagaaactttagatggtcgtggagatggctgtggagaaggtggatccctgaagggcgatgtatgtggcggagacggtgggccaccatgaggatgaggagaaggagggtcagaaagaggatgaggagcagcatgtgaagtttgaggaggtgatgatggatgtacaataggaacaacaatttgagatggcggagacggttgggcctgcgacgaatttgaccaatcaagcaattcgacatcccttcgaggccaaaggataaaattcttgatagcttgtccaagtgtctcgataccttcaggcccagggatgtctagcatgtcgtcctcgtatccttggacgactgtcgtcacttctaccctgcaat

SEQ ID NO: 178458 - DNA, 357 bp, Zea Mays
ttagagatatattttgggtctagcaataatacaacataaatcctccactttctaaatgatgaaatccttcacttgccaaaactaaattagcatttagggtccgtagtagaaacataagtatgaagctaaattcatgctagacttgaaggtcatggcttcattattagggaaacaacctggtatgttatgcaagcattaattgaaaatattgtctttagtgtttagcactagcatcccattttaattgaggcttttcaattacttatgttaactcatatgtggaagtgtcttgaaggagtaattcacaaccagaatttgaacgcatgaaactatctgtgtttccgttttcagctggta

SEQ ID NO: 178459 - DNA, 1142 bp, Zea Mays
agtaggcagacaaatccgtaatgctgccggtgccgatgtgaagtccagtggagagggtacccttgacataccgcaggacccgcttgagcagggccagatgaggcttgtgtggatcatgcatgaatagacacacctgctgaacggcataggcgagatccagccgagtcagcgtgagatactgtagagctccagcgagactgtagtattgggtggcatcggccaccggggcgccatccgtagcgaacagcttggcttgagtgtcaacaggagtcgccgtagggtgacactcagccatgccggcgcgttggagaaggtccgcagcatactgacgctgggagagaaagaggtcgtccttgcaacgcgtgacagagatcccaaggaagtggtgaaggtccccgagatctgtcatggcgaactcggagtgaagaagctcggtgaggcgacgaagaagctgggtcgtcgaggctgtcaggatgatgtcgtcgacgtagagtagtaggtaggcgatgtcagtgccctttttgtagacaaaaagggacgtgtccgaagctgacgcagtgaagccggatcactgtacgaagctggagaagcgctggtgccaagcccgaggcgcctgcttgagtccgtacaaggacttttgcaggaggcacacatgatcgagggcggccgagtcgacgaagccgggcggctgctcacagtagacggtctcgttcaggtggccatggagaaaggcgttcttcacgtccagccgatggatcggctaggagcgagaagcagcgatgctgaggatgactcggatggtaggtggattgacaaccgggctaaatgtctcgtcgtagttgatgccgtgccgctgggagaacccacgaacgacccacctggctttatggcgagctagggagccgtcagcacgatacttgtgcttgaagacccactttccggagatgacattggcatgaggcgggcgaggaacgagacgccaggtgccattgtcaacaagggccttgtactcgtcagtcatcgccgcgtgccaattggcatcggcgagcgcaacgcgggtggagcctggcagtggcgacgccaagctggaggccaccgcggtgaatccataccactgtatggggggcagcagggagcctgta

SEQ ID NO: 178460 - DNA, 1047 bp, Zea Mays
gcccaactggtggccgcaggggaagcacgccgacatgtggaccccgttggtcggcctcacctcgcgcacactggtctctggcagattcgcggcagccagtcactgacaggtgaaccccaaccacagtcgtcttcttcaacgaccccctccgtgatctccgagtctatccaaacccatcgtgggcggctgaaaccttgcgtgggttgttgggattttggtgtccggggaaaatctcaacaaactccatcccttccgcggttgttgcgttccctccccaggtatttaagccgaccgtgcccaggcccctttcccatggatacccgacgcaccgagccccgccatcacaagaggaggagagagaaaatattaccgccgtcgttgaccttcgcctgcgctaaggattggaggctagaagcaagtcacgggttcgctggcggttgtgcggcctaacgcatgttccaattgagctcgtggttgaccgggggatggccaatcgatcatcgggatccatggtgttgcttcggtccgcacttctccacggccgggtgctgctgcacctacaacttcggtgagaagttccccatggtgattgtcttaatccctaattcgtgtagagcacttcggacgtgagtttgacgctcggttgtgcgggtagtgtagcctctgcaatggtgcgccgccgccgtgccctgttcctggctgcgagttcgaccggagatagaagaagccctctgcgtcgtgtatctcgtgatggatggctgtaactggatccatggttgggacatcctcggtcgttgatgcgtgtatgggcgaaccggatcagtgctcgcttaccgcttcggcgggatttaatctggggcgttggtgctcgatcggacgactggcgtcgcttaccggttcgcgatggggcccggatataatctgagccctcaaatgtagatccaacggctgtgattgaagcgtaccccttcgcggaacaaaattgcacaagagcccctgaagttttaaaatatcaacccgctgtccattacagctatacactgtgtc

SEQ ID NO: 178461 - DNA, 537 bp, Zea Mays
caaaagcctttcggttcaactaattttctcaggtctcatcagtaagtaacacaatttttatttgtattaagagtttcgtttttttttgttttgagagaaatatttacctttcttatgagacccaattaccatctatgtttcatgataaattggtgtcacaacagtgaagcttcgcgtgttcatcgttgctgtcctgattgtgatcaacttgggcacctgcatggcaaaggttggatcttacggcacaactgtgtcagcgtcaccgaggcaaatccgagtacttaccgccgcaactgatggaagaaatggacctcccagcaatgatcaccagtgcccgctcgggacctaccccaattgttaagcaatggatgtatcaaaacactgaggaacagctcaaatacgttcacgaaaattacacccgtctgtgctgttaggggagcatgaatatcatgaacatggatagctgtattgccatcccacacagtacttgtttttattcttgtgtacacgtcactctcttatatatacttaagaaag

SEQ ID NO: 178462 - DNA, 938 bp, Zea Mays
ggagaatacaggtgtgccccagtggaagcagctgctggcttcctttgggccaattgcgtaaccttggcatttgggaatagagataagcgaagcagcagcatgaatgtatgctccatcaggtgctgttttgatcttcccgtgttatggtctcccctgatgcctctatggagcggatccacaagtccatatagtgtgtactttgactgtatactgaatattcttgcaaaagaaagccttggtttctttgaaaagcaataaattatagcacaaatgaatcaacatattctagtgaaaatcatttgtctggctttgtgctgagagctttaacgatgaagtgggaaatcttttcgatatttggatatgtaaaataggatcatattatacccaaattgtgggacgttattctcaagtaaatgtgatttccaacttgtttgctgtttgtagtggtgatttgtgattctcatcattccttctcgttctgttctgtttttttgttctttgttttgtttgctgtgttgctttgcttttgcctaggtgcataattgtctacttcattccatgctacggtttccattaaagtttcattggaaattttcttattgtgaatgcttcatttgcaggtcataattatggttcctcctcaatggctactaggtgcagtagggattcatatgatgacagtgttaacaactgcacacaagttactgcttcgaaggtacagaaatgttttgctatgccatctagcatttcttatgtcttggaagcaccattgaatcatcgataattcaccttctctaatgcattttctattacgcctgttcaggatgtttcttctagggaagcttcaaatgtcttcacatggttaggagcatgttattgcccacaacgtctgaagcagattgtttttcacatttaacccttctcgatctctgcatggt

SEQ ID NO: 178463 - DNA, 724 bp, Zea Mays
aactcgtgcatggccatggccatggccgaaaagggggctgggactgggatttgtattgtaatcatcacagcggcgagcactcggcgccatgcgtccacgccgcgctgccgttgcctccatggcagttgccccccatgcacatgcaccagcggcgtcgcacgcgccagcttactaggtagtagtagggcgtggacgcgagcattagcggaattatgttattcctgtaatgatcaccggcctctgctagccttcgttacttgcattggtcctgcctgctgaccgtatccaagtgcttttctccttttccaaccccatctcaccaaacggccaccataccaaatactccatgctacagggtcatggcccatcgcaacggtacggtgttccagccattcgtcggtagtagtcgcgcctgaacctcaaacttcaggtgcagcctgctgtttacctgttgttacagttcatggcgtcgcaattggactgccgtgtttacgtgcaaagccagcgccctccttccttgactgcaacatactgtacacgcttaaagtcctaggctctacaaccatctggcttggcagggcagcaaagccaaaggatctgcagcaatttcaggcacaagaactgtacacaggtagactggtctgcagcaatttctcacacgccaccttgataacaagcctgtctcaacttttctggatgctcaagtgactctgacagcgcccca

SEQ ID NO: 178464 - DNA, 563 bp, Zea Mays
cattcaggggagattggagtcatggcccatctctgatgatgaacccaccgtgctgggggaagaacctcaccaacgcgatgctcaacgatggagaaataggcgttgtaacgtgcagcgacatcacgaagctggagaacgggacccggcacaacccgtctctagggatgaagcctcagagatgggggagaccctcgacgaaagagacatcgacgaaagattctaggctctagcgggagaatccgctccttgcccgaaacttgtaccacgattttgctcgagccttgaatatgccaagctaagttggaggagtcctggcgcagatagccgatggcctcccgcgaaccccaggtgcgaagggctatcggtaggtgcttactcaggcggccaatcatcttctacctctcgcccacccaccaaacgacctgcgtcatgccatcaacaaccgacgagacgcacagagcaacatcagcgcttcacgcgatcattgacatgagaatgaaataaggcgctaggaggaatacgaccaagatcaaggtgtaccggcacatagccacgcaacccag

SEQ ID NO: 178465 - DNA, 499 bp, Zea Mays
gtgggacttctctcgctcggttccacggtggtcgtcatgaagaggttcgacgcaggcgaagccgttaagaccattcgcagattcaaagtcacgcacttcccggtcgttccgcccatcatggcggcgctggtgcacaccaccaagccagcggcaatgccgttggaatgcttggtgcaagtgtcaaccggtgcagcgccgtccagccgcaggctcatcgacgacttcgtcaaggctttccctcacgtcgatctcattcaggttcctgcctaccccacttacagtcacttcattcgttcttccctaccttgcccaagttagttatgcttatgcttgatgtggacgactctgctatgccactacagtacggaacaaaaccgcgcacaaatctggaaatcagtttgaatcagtttcatttaggagaaaaaaatccattctacactgctctgaagtctggatagtcttttaataggaacaaaagcgttgagttttacctagttac

SEQ ID NO: 178466 - DNA, 416 bp, Zea Mays
gctgtggccaccactctggggtgctggcatgcacagccctggagtagagcaacaagactatcagggaggggttaacattggtgggaacataggctacacaagacaagatgatcacctgagctcaaggacagcaaagattacaggagcagcacttaaataagggaacaaggccagggcaaggttcactgaacctatccagtccatggtggggagaagtctcagggagccagcactacatggcacacccacgtggatgcccaacacaaccccatgccacacataagctcagcacaaatatccccctttgtcccaaactgaagagagtgaacaaaggggataagaactctactgctcatagcccccacagccgtccaaattggatattttcagtagagttgagacctttagtacctgag

SEQ ID NO: 178467 - DNA, 677 bp, Zea Mays
gggtactgaaaaaagagggcagggagcacgaacgaacctggagtacgctgaccatggtgagccaacaccgttcggtgttcttgagtgatttgggggaaatcccaaaattgggggagttctagtggatgattcgaggcacgggttgcttcactggttgcacaactacttagcggagcaggcggggtcggcaatttataggctcccacagcggtggccggtgaatttgagagagacgcgcggcggcgggagaagaaggttactggcgcggtgattcgtggcctattaccgtggcaagctccctggcgaccaccggacgagctaaggtgagtcacggcggtgaggttaatgtgccaaggcacgtggcgcaaggccgcgaagaggccatctccggcaaacctatccaaatccatcgtggtctgctcgagtacggtggccagagtaaaatagtggctggagtgtatccatggcgtgatatttccttacccccggtgccatccaattgatccgatcgtgaatcaccacgacaatagcacgaatccacgcgcggctcgtcggcggcgaggggatcaaaacctgatccaatctgttattgtaccatgggattgttcttcagtcagcctgacagaccaagtttagggcgaatttcctcccaattcttcatggcaacaagaccaatg

SEQ ID NO: 178468 - DNA, 602 bp, Zea Mays
ggtggacaagtttcagtggaccacagaggcacaggaagctctagaggcactgaaaaagttcctgactacaccaccagttctcaagccaccacaccgagccacgccgaatcagccagcagaagatatgttgttatacatctcctgcacgactcacgtggtgagcaccacgttagtagtcgagtgggtggaggaaggacatacatacccagtgcaggatccggtctacttcatcaatgaagttcttgggccctcaaaaataaagtatccccaagtccagaaactgctatacgcggtacttctaaccgctcgcaagctctgtcactactttgacgaccacaaagtcatagtagtcacaagatttcaataggggacattctccacaacaaataagctattggaaggatagccaagtgggcgtgtgagctgggagctcacgacatagagttccgacctcgcacggcaataaagactcaagcactggttgactttgtatcagagttgactgagcaccaggtcccagacaacccggagactaccgaagtatggagaatgtactttgatggctcgctgaagttgcaaggagcaggtgcagggattctctt

SEQ ID NO: 178469 - DNA, 379 bp, Zea Mays
gtttcctggagtggtccggagctatgtagccgcttagcctggtcccgtaccctaagcctgcacctccaccactctgcaatgggtaccctagtatttagagctgtgatcctataggtccgggcatagggcttggttttccaggttaaatcctgcaggtcctgttgcatgaatcaaaggatggcagataccagacgatgggtcctatgggtgtgctactaacacttcctagccgaagctgtgtacaggtccaggtcctagtcgaggctacctcctgggggctgggtcaccaactctttcttaggtatactggtatccagcctcgacacgtcgagcctacatcccggggggccaagtacaagggatgagttgataacgccac

SEQ ID NO: 178470 - DNA, 777 bp, Zea Mays
ttaggccaggaccaacgcccagtattttgcaagtaagcctcctcattcccttgaaaagttattgcagaaaatggacgagtacataaggactaataataatttccatcaaaggagggaagagttccacagatacaccaaagtcgccagggaattcagaggaagaattcatccaagacatgtctgaaacatcaataacccatcatggggtgaggaaagaatgacccagtcacaaggtcattcaggacaacagacaagctctcagcagcaatcttcgcaaaacacattccgaccacctgctctgagaggaaggggaggctgaagctttattggcagatttggtgcgcctccaaggaagccattctatttgttttgtggtgaggacaagggccacactacaagaacatgccatcacaccattaacaaacagaaaaagcttgctttatcatctactcaaccttcatagctaaaagaggtgttcagtacatcctcatactgttcaccctacatcccacaatacgttcaaactcagtcataggagccaaggccaagcctgtcttcggtctcaaatgcctcaagcaacccagtgatgagtacatggtcaccagctgcctccttcgtcctaggaccgcctccctatgataaagtccccgctaatcaacccaaattcataaggcaagacctacaacaaagggatagaaggagggatccaaaacatgtactattaacagcatggtcccagagacgaagcatatatactgagtaccctaaggggctagg

SEQ ID NO: 178471 - DNA, 715 bp, Zea Mays
ggtgttacatcctccccccataaaagaatctcgtcccgagattaaaagtcctagggtaagtaatggaaaaggaaacacgacacatctttatttccttattttgggacaaggcaggggtggtctggggctcattcctttattacatcaatagtacatactttgcaaattacctgaggctaaaaagcctaggaaattcttttctaaaaagtcctgagtttcccatgtagcctcatcttctgaatgctggttccactgtatcttgtaaaacttgagagttttcttcgggtaattctatccttttgagccaagacttgaacaggatgctcggaatatgtcaagtctggttctaaggcgacatctgttagttcaatggttcgatcgggaacccgaagacacttcttcaattgagacacgtggaacacattatgtactgcagacaaggtttcgggtaactgaattcggtatgctactggtccacattgttcaaggataggaaagggaccaatatactggggtgcaagcttcccttttaccccgaaacgtgatacacccttcattggtgaaactttcaagtagacataatctccaactagaaagtacaagggtatccggcatttgtctgcgtaactcttctgtcgggcttgggcttccttcagattgtgaattatttgttgaactttctcttctgtctcctttaccatatcaggcctaaata

SEQ ID NO: 178472 - DNA, 276 bp, Zea Mays
gctgccaccaccacactgaaggcaatgtttcttcttgcttatttgaatatgaatgatttttgtttggtcgcttggagccttgaatgatctggttcttgatattgggtgagctgagaaaagcacaaaggtggcatgctgcaatactgttgtagtgttgtgtcacatctgtttagtttaagtgcattctcggtatcaactaccaacttgaaatacccttcaactttatttttccccttttcttgactctcaaaaacattttcttgcaatagacaccag

SEQ ID NO: 178473 - DNA, 521 bp, Zea Mays
gttcgtcggagaccttttgacgtcatacccaaggcccagacgtagtttggtgatgacccgtcttgtcatgctaacgtgggctcgtttctttggatcggtcttctcttattagtaaggttgcttagcagatacttggtcgtttgccccacctcgcaaagttacccggcagggacttggtcgtctgctccgtctcgcgaggttgatgtgccgaggattggtcgtctgccccgcctcgcaaagctactcgacagggacttggtcaaccgcgccgcctcgctaggtttctcgaccgggacttggtcgccctctccacctcgcgaggttgctcggctaggacttggtcgtcctcctggccttgcaaggttgctcggcagggacttggtcattctctccgcctcgcaaggttgctcggcagggacttggtcgccctgtccgcctcgcaagattgttcgacaaggacttctcgggctttgtttagacaccccattcctgggttcccaacactacacatactggaagat

SEQ ID NO: 178474 - DNA, 993 bp, Zea Mays
caaccgcaccgtcgccgagagtaccagcagcttcttctccgtgttcagggacgccgtcagacggacgctcgccgaggccgcccgacggcatcgtcaccagagtagtagtggcgccggagggaagaagccgcagctagtggcgttcaccacgttctcaccgtcgcacttcgaggggcactggaacgagggcgcgccgtgcaagaagaaggccgacagggagctaggatacaccgagacggagatgaggaagatcgtcgtggaggcggtggaggaagccgcctcgacgatgtcctcgtccaatgatagtgcccagccgctgcggttcgcggcgctggacgtcacggcgctggccaacatgcggccggacggccacccgggcccgtacatgcgcaagaacccgttcgccgccgccggcaataacacgggagaccaccgcccggtgcagcacgactgcttgcactggtgcatgccagggccggtcgacacgttcaatcagatactgctccagaccatcctcctccgcgcgcgctagctgaaaccacctcttgcatgcatgccttcgtcgtcgtcgtccatgatctgcatcagaaacggataagtttctgatgcatgcatgtcgttgactgtacatatatacaagcagtatatataagtttcttaaacatttacttcaagttttgtttgcaaggttaaccatgcataaatgtaaactacgtacgtacttctaataaattcttgaaaaacatatccgatccttggacattttcgaccaataatatatttagttcttgcattattgctctggctgacacagtcatggcactagcgtagactgaaaccccatctgcctgatcgttgcatcttgccgtgtgcagtgactgtacaacgctaggcatgcaggtgatgatactgccgatcgcctcgcctggtagaggggaagaagtgagcgctggacacaccccaatattaatgctcccatggatcataatcgtc

SEQ ID NO: 178475 - DNA, 932 bp, Zea Mays
ggataagcacaacccagtaaagatctcggcatctgatccactcgagctcggttgcggctaggcatgccgtacttccccccagctcgtcggtcgctcggataaccctcaccgccgtcgtgctgtcgccgttgcgcaccacgtgccttagcgctggctttcgtcacggtgaatcatgcggtgcatgtccggtgatcaccggagcacctgccacggtaaaaggccactgtgtcatgcgccagagcccttttccccaacggtcgccgcgcgtcttccttcaaattcgtggctaccacccactagttctataaattgaagcctcagcatgttccgctaggtaattgtgcgtccagtaaaccaactcttagctccgatcattccccacagctccctaatttgggattacccccaaatcggtcgaagaacgccgcaaaaccaagctcgccgtggccaaccacttccaggttcattcatgccctctactaccttgtttcagcattagtatgcttccctaatgctcatccatccacccaaataagctaaaccgccaccaatcaccgggaacgcaattgattacccgtggtgcccgctgtcaccgtggacagagcagggtagatcgtcgttcgtgaaattggttgaggggaagggtacggtaggcatctaatttggtccctgtcgctttggagctccagccatggcgttggccggccagaattggctcgccagggtgcggcgagggctgttcctcgtcgtggaccttggtctgcgaaggaatagaagtttaagggccttagtgcaaactgtcagtgactcataagcatagtaaccgaacccaacttccattagccaaaaccccgaggacctcggcgcaaagtctccctcgcgggcgcgcgcgcgtttccctctggtattgggctggctgggctgaaaccggc

SEQ ID NO: 178476 - DNA, 465 bp, Zea Mays
gtcgatttctggaagcagtccaacgacctgcaagactgaaagacttggtcgacggtttccggtggcgacctcctaagctaccagtagtagtttcagttgcctgtctgcccctgacgttctccgcttcttaattatctgaggcggtagtgacaatggagttggacctaattaaaccatgcttcgtggcacctgtgcttggattcttcttcggctgtattgtacgtgggggggatgcctggatactcgtaccaaatattggtggcaagcgaacgtaggaaacgagtcaacaagggagtgaaaactgcggagcacgaacttccagccgtgtcaccaccgcacgcgagcctgttgccgccgcgactaccaagaaaccaacaactcgtacttcacagcaaactagcagctacgtacaagtgagcttactttacatcacgcacgtaagacatctggccaacaaacaaacta

SEQ ID NO: 178477 - DNA, 627 bp, Zea Mays
cttttctatagcacatatctacagaaaatacaatttagttcatcaaacatacaacacagggaaatcactgcgtgcagtccaaaacagcaactaataatttcagctcctatttactttaagaattggcgcgttctagagacttgaaccattctaacactttgacatttgttagagttaaaataaccaagtgagaaccaacaagtcaacttaccaatttttatccgagttcttttgtacgctagaatcaccacacacaattaacaaacacctccaccacaataatcggacccggtacatatacgtgtatcggtgcgcccttcacacaccaatttgcattttaacttagacctcacatgaaacactactactttttatccgcgatcataaccatacacatttagaccacaacgagcaattcaccgtgattacgagcttaaccaagtcatctaacaattcggctaactagagtaacgacatagccgctaaataacatacacgtcggcttgcctattatcatcgcaatccgagacacaacatacactacaacatttttataaacacacagattcacgagtatattcgcacatcgaccaatttatacgaatcgtaaaccactaatctccacat

SEQ ID NO: 178478 - DNA, 307 bp, Zea Mays
ccgtcgccgacatctcttctccctgccatcgtcgcctgtcctttgccgcgctcccctggtcgcaccgaaccacgtcgccgacctgctctctgctcgcgagtcgcgccatctgtccacgccaccggatcccgtcggttcccaccgcccaaccttccctggccagattcgaccgccctctccatccccttctcggacctcagccgtcgggagccgcctggtcgcgggcctcatccaccgccaccgtcacaggcccgcctgaccccagcctccgtcttcactccccagccttgtcaccggcctcctcccc

SEQ ID NO: 178479 - DNA, 653 bp, Zea Mays
aaatataggtggtatatagctctccaactttgctgcagagtttgggttgtgttaccataggaatctgggagaaaatcaagctccaacttggtctgtcagacaagctttttactgaatctggcgcactgttcatcgtcttcagaaatatcgcgccgtggataagggtcagcccctcgccggcgataagaacaccaacgcagcgtggatggtcgtcggtggccgcggtaaatatcctcggcatcgtggcagaaggtcactgaggtggcaggctccggttaaacggcgacccccgtgccatcaccggaatccgccgcgcggaaagcttgccagcacatctgaaatccgcacttcttctccaactccggtcgacggcctataaattgagctcggactccgcttcttctccacattacgcacctcagtgcttaagcaattgactcaattccgctagagaacttgcgcagccccaaattccctcctcctccattcttgctccgccgcaagggactccaccgtggtcagcgcgcttcgggttagtgtttatcaaattgcttcttgttctagttttcctttgatctcctattgctctccatgccaatcaattgaaattccgccgaagcccatcaccggaatgcacccttgctctgtaaaac

SEQ ID NO: 178480 - DNA, 615 bp, Zea Mays
atctttttagacaaacgcattaacatcaacaagttccattcatttatgccaagacctccaagctgcagtggaatgtagggaacacaggataaaactagtttggaacagagggcttagaatagctgttcatgaaagcaaagtgacactgttctagaatagctgttctagattgtaggtttggttgagtgtcgcttcctgtcttcagtgagggatacatttggtgggtatgctctcatgtgtgtggcgtactggtgtgtgttgttcccagggtttctaaaccccctttctcttaatataacgatacacagctttccagtgtgttcggaaaaaaaaacagtgaagcgaacatacttctaggctgatgctaagtagaagtatattttgcagacagcaaggcatggaagaaatgctaacatgttcaaaccagctattccattccggtacatagaaaaacaagcaataggcagattactagcacaaacctattccttagcattaaaatgtagtgatataaaaaaagggttagaaattctcggaggaccatacgaagaatacatgttgccactgcaaatcaaaatggataagagtgtactactacactcagcttaatctata

SEQ ID NO: 178481 - DNA, 451 bp, Zea Mays
catccacatgtcactcgacacgaagctcatcctcggcgctatcggcaagctgttcgacgacttcgacgctcgttgggagcgccgtcttcccaagttattgaccacacaggaggcctctccggtcatctccgttctgaccccgactgtggctgttggggccgcagtcatcgccgacaactggggcgggggcttcaacggaggcgagtactcattcgagcagtactgcgcggcgccatccatcgtcgccgacaattggggcggattcttcggtggcgaggacgcgactaccaacgtggagttcgccatcgatcctccaggcgaccccgagagattcgtcctccccaacgcctccaccaacgagcccagcatcgaccccgcgctggaccgcaccaactccggagtggcggacgactccatcaatgcgctcgtcacctccaccgaccccaacgcg

SEQ ID NO: 178482 - DNA, 758 bp, Zea Mays
agctctcttggaaataggggcagtgcctgggataagctctatggcaaattcaaccttcctttcaggtggcatgcctggtaactcttcagggaatacatcagggaatttcgacacaattctaattgcctcaatcggattggactctttgtcatctactgataaatggtgacatgctccttctagttcaggcaagtacaacttaattactacttcctttccggatggggacaccaacttaactgttctcttgtcacaactgacagtggcttgatttctgtgtagtcaattcatccctaggatgacatctaacccttaagttcccattactactaggctagcggggaagtctatcccctttatttcaatccttagattaaggcaaattctatcggactgaacttttcccctaactgaattaactcttaaaggtgggatcattggttctatggggatgttatgtgattctacccaagatgtagaaacaaaagaatgtgtggcaccagtatcaaataatacttttgctagataggattcgactagaaacatacctactaccacgtcctgagcatcctggattgcttcggcctccagttggttcacctttccacgattgtaggcctgaccacggcctcctggtgcttgctgtggtgctccttgtcttgctggggcattgactgctggcggctgctgagctgctttctttggacagttcttcgcccagtgattttgttctccatagtagaagcatgcacgacctc

SEQ ID NO: 178483 - DNA, 460 bp, Zea Mays
gcaactagcaactctcggtgtggaggtggacgaggccacggtgatggggatgttttggcggagtgtgccgggaaggttcgagcagattgcggtggcgattcaggcgctgctcgacgtatcgacgttgaccagcgtcggtccatcaaaactgtaagctctacctcatagaagaagcttggggagcaacatggaagcagcgggaggagacaacatacaaggcggctcaagccaccgcagtggtacaggtggtcatgggagaggacgcgaaggtgattcgaatgtgtcttattcatccgttgcaggaggaggaaccgggaagatcgtcaaggaccacccaatgcaggaatttggcattggatccgtggttgaaattgagggctacagaatggccatgtttgagtgcaagaatcgggaacgcctttctttcaccggggtctatttagggggtgtttgtttggga

SEQ ID NO: 178484 - DNA, 636 bp, Zea Mays
cacagctccccctaacccacactcgccccagccggcgaggacaacaattcccgcttgccagccccgtccacacgaaggcgaccaccttccacctcaccacgatgacgcctatcacctcgcggcaactcactcaccctccgtttcgccaccgcccttcgccgcctatgcccaacactcgcacccgtaagatcctcaccacccattacacgcggtgaagcctccaccgcagccacatccaatgccgcaaagtaatccaaatcctcatccgaagactcctctgtccacacaatcgaactcccagaatcatcagactcaaaacacttagacacagaatcatcaaaatcgtcttcagcaaccacggtcgaagccgccacaaaattatcattgacagtagagattgcgtgcgcaggcccaaaatcctgaacctgccagcaaccaaggttcagtaacacagacaaaatttacaaactccccaaactcctactcagccacctgcgaaggcccggctgcggccatggggtcttcggtcaccggctcagccaccaccttcaggggatcttcggccgtcggcgcaggggctggcaaagggccttcaccggccacggtaggcacgggtgcagacgaggagccttcact

SEQ ID NO: 178485 - DNA, 952 bp, Zea Mays
tctggctaaaagatggctgctccatcccaatgtctgtctcctttgtgatcaagaggatgagaatattcagcacctgttagggggggttgtgttttctccaggcaactttggttttatattttccaggctataaagatgccaaagctggcacccaacattgctgaaactttctttcctaagtggtggaggaaggtggtcaagttagtaccaaaagaaaggaggcaaaggttgaattcccttatcattttaacaacctgggagatatggaagcacatgaattcttgtgtctttgagaattcagagcctaacacactcactttgatcacaagaattgttgaagaatgtcggctttggaggtgagctagggcctccaaactgcaagacttcctggtctgggcacgagctacgaatgtgtaggtcttgatggcctacccctctgtggtttttgtattcaaatggtttaggtgtcactgttgtaacaaccaaagctttcaattgcctagtccctagctgtaggggtaaaggtcttgtggttttggttgttttcggtcgtttgatgtatgtggtactttctctctttctttttaatgaaatgacatgcagatctcctgcgttgttcgagaaaaaaagtatggtagaaattaggggagcaactccacaaactctacacacataaagttatgcacgaatccttacttgcaataagatgaaatgtgaatgaagaacaaacaaaggttcagtcaccacaaatgtgccctacttttctgttgaggaggccacaaagaatcgagtcttttctaaacctaatccgcccttgccaaccacaaaggtcaagactcagacccttactcaagtacaacatggcgagctgcccatcgctcatgcgctggcagagcggaagtgtggtggcagtactatcactgacgccggcgacgcagggcgcaggggccag

SEQ ID NO: 178486 - DNA, 452 bp, Zea Mays
tatgtcgccggtggggtatcatagtgttgctgcgatgaatgtgggaactgtgtatattgtgcaactctcggttctgcgtatgcatacccggatggtccgtgcgtaagggctagacggtctgcgaccgggtcgaacggtccgagggtatatccagactgcccgaccgtatatggtgctgcctgggaagtttcgtacctggaccgtccgtcgtaaggggccagatggtccgcgatcgggtcgaatggtccatggttgtacctggacgatccggtcatgtatggcgtgacttgggtggtctgcgcgtggactcgtgtagagtcagatggtccggcgaaatatgtcggtcagtccatgacatatctggatggtccggcgtaaggtaccagacggtccgcgacagggatgaattgtccggggttgtacccggatgatccggccatgtatgacgcgac

SEQ ID NO: 178487 - DNA, 664 bp, Zea Mays
gtcttaatgagtgtttcccctcaactaatttcaccaatggtgctctaacacgccctgtccacggtgacagcgggcactacgggcaatcgagcgcgttcccggcgatctaaggggtcctagtccaattggcagggtcgaggagcatcaggagaacccaaggatgtcgaaacaagataacagggggcaagaacagacctgggattcgctgaccacggtgagggctcaaggcacggtgttcttggttgatttgggggaaatcccaaattggagagctctggtggacgatcagaggtgagagctggttaactggatgcacaattacatagcggagcaggcgggggcggcaatttataggttccaacagcggtggcgtccaatttcatgaagatgcgctggtggccggagatgaaaggggttactggcgctcgggattagtggcatttaccttggcaacctcatcggcgatgaccagacatgctagagcgagtcactatgatgaagtactgcgtctaggcacgtgtcatctgagcggcagacggctaactccggtgaacttatccatagcggccgtggcacgctcgtgtacggtggccggagtagaatagtggccggagtttatctcccgcgcgatatttcttaccgaggagcgcttatctgagttcgg

SEQ ID NO: 178488 - DNA, 396 bp, Zea Mays
ccgcgacagagcagccccgtccgttcgtttcacgtgtaatggagatttactgcgtccgttaatccctccccattactctccatggaagaaaccgacaaccattcatgaccgccatgaagcacaccggcgacctctgctctccctccctctctctataaaaccccaaccgagccctctccttctgcctgcccaagctcgctccctcttctcgggttctctctccctcgctgttcgcaaccgttcgtcgttcgccggagcttcctcggacagaccgtccgctcggccacatccgaccccagcgaccccgcgcctttgctgattcgctggaccgtccaagccccttgccggtgtccaccaccgcgctcgctcataggaccacgacgcaccgtgcctcgc

SEQ ID NO: 178489 - DNA, 475 bp, Zea Mays
catgatcttcctgtcttttgagaccctttcctcttctgttgttaagtcactgtctttcaacaatttcttggctcttggtatttgtatgctcatcttcttgaaatcttgcatactctcatcttttttatgcttatcttcatacccccaatgtctgtttaagacatttcagtttacatgcccttggccacccttgtttctcgacgatccataagtaatcattctattttacacatctttggtgacctctttgtccctttataacttctctcgataatgaattcttacttcaaccattctattgaaacctcacctatcttacccttgattgttttccccacttcgtcactttgtgaggcttgccttaactctatccttggttatgcttttcacgattatcatctttacccttgtcacctctatatattaccttgatgcttatattatacctatcctaaaaaaccccttttctcctccg

SEQ ID NO: 178490 - DNA, 584 bp, Zea Mays
ccgaaggtggaaattgatgatgatgttgaagcctgctagaaggcctttaacactatgtgtgccttcattggcacaagggatctgattcaagagcatatagctttcagggtatggccacttgtggaaagttgggatatgcagaagaaaaccaccaccgactccagtgagggtggcctgacccgattgaagtatacctatagatttagggagaagtttgatgagccaaacgatgactggctgaggtgcattgaagctactagtgatgagctgcttgggggatattccaaggccgaagataatgctttgtccgcagctttcgggggtcgtagcaagaaaagattgaacagggtatttgatgctatcggtttcgtataccttgactaccattacccgctacgagggcaagggaagaaaagaaaagccaccgcttcggccaccattgttgtgtcggctgagccgaaaagtaagaaaataaaggttctaacccaccggtcgcgatatattgaaccagccatagtgcctcaacttggcgaaggggcctcttcaactgccgaagcaagacaagctgctccattgcatagagc

SEQ ID NO: 178491 - DNA, 842 bp, Zea Mays
ttcaaactctctgtgacacaattcactgttcaaacatcgttctcacgtcgtttgacctctgtttctacaaaactcttagtttttgtgtcataactctctatgtatgtatttattcgcatttcatatacttatgactatgtgactaatatgtgctcacctgttatgtcatttcagtgattccgcctgcacgcctgagctactcctgtcttgcttggttactctctctcgagacattcccaggtagttatttccctctaatcagccttacctactgctctactgctctcgcttaccttttctcattatcttgcagcttgtcagtatccagttcaggatggtgcggacgaagaatgtcacaccatcaggggggaggagatgaccaggaccctcctcgccctttcaggcaggacaaggggaagactgtctaccttgagcagcaagggggcaagaagaagagatggttggacagagccacccgtgcagcgattgccattgtagcagcatcagatcaagtagagcaggtaggtcagttgaggatttcctctgataagatcgccttccgagtcagtcgcctctcgtctcagactcactcatccgctgctcgatccactccttcagacccagtcaccactccacctccctctttgccagctcctgccgctctcgagccttctgccacatccgctgtgaccacctcctccaccactccagcttccactgctcctgctcccgctttcgctccaccaattcctccacctcgctttcaagagcgtgacaagaccaaggtgcgaccactcgctgttgatcctcgacttcttgaccttcagcgggccacagctgcc

SEQ ID NO: 178492 - DNA, 749 bp, Zea Mays
ccacctagaggatggaatggggcgtgaggtgttgaagctgaaccccaaactcctcccacagcagcaagaagaaatcagaaattagcaatgcgagccccgtgaagacatagaaggtgaacaatacaaactcgtcgagacgcatgttgccaatgggaagagagcccgctcaaatcccccaggcaagcctcgatgtggtccgtccaagcaaatggcgccacatctagatctccctaggtctgtaagtggcgaagacggtcaagctaacctttgcggtggttgcagcgtgtgcgaggagcaatattgcacgaagacgaaggggcgcaggagcatgggagagggggcgaatgcgaaaaggtacctactatctgcgatggaaggcctaattaacgttggctcacccacacgccaccgaagcgtcgggcagaacaccaagaggcgcagacactaagtgctaacgacccagaccatgacatggggggccaggcacaccaatcatatgtagtgggtggcaggtaaagatgtgaaaagcgagatctgaaccgtcaaacgcgtgaaacgggggcaaaacgcacctctttgggaaccaccactatggtaaaagcccttttttacccctaccacagtggtgtcgaacgttatgcgcatagccgggcataccacctgcgtgggggccataggccagtaagccacagagacgtgtgtgacagcaggtgaattgatagatgggacgacataggacaaggttcccg

SEQ ID NO: 178493 - DNA, 818 bp, Zea Mays
aagctctctcactaaataagctacctgatctgaattcttttgctgatttctgaagatcctgttgtttctttctaaccataagctccaccaaaagtagatcagaagcccatcgaattttttcctagattgcctattacagagatctcttagattcctccaccaatcatacaacgactccgatgtctggtttcctcccaggaaaaaacagttccccatatcaaaattttgttccacacctctctactgaaagggcaatctttgcataaatgggttaccgtctctagtgctgagttacaaagacagcaaactgggttgcactgccaatgtcttttctgaaggttgtcagcagtcagcactttattatgcaaaagagtccatgcaaaaaaacggcacttaggttcagtttttgctttccaaatggggtcaattttcattgtacaataatttgctgcaaattggatcttataagcgttgcttgcactgtactcaccatcttctgtccatctccaagaaatggagtcttctagatcgttgagctcgtgtgtactattgatggcctgccaaaggccgagcaattccttgaattcttctgcaccatcgtagggagagcataactggatccaacggttgtttctcagggcctggaaagtcgaaatgttcttcctttttgctttgttgaaaagacttggtgcaatgttttttggtgcttgaccatggatccaactagatttccaaaatacagcagttttcccattacccaccttcacacaagtggaagcgttgaaaagatcttcatctgattcatcacatggcagctg

SEQ ID NO: 178494 - DNA, 312 bp, Zea Mays
gctcttcattctttggcaccactatgcggttattaaaccatacaatgccttgttcatcttctttgaagcatttggcttttccagcccttaacttctcacgaatgtgtttcataccctcattatccttttgggcatcaattatcctttgcaagagaactgactcaagcttaagctgattcaaagttccttgttggaccattcccgggtttaacttctctatctcatgacataaagtgttgccagaggtcttcattgtaagacaatgacatgaaaccttacggcttagcacatctgccacaacattggctttac

SEQ ID NO: 178495 - DNA, 564 bp, Zea Mays
ggggctttgggctcgaattgaaaaaaggtacaacgaacagaggggccagtacccttgtagactgaacagagcacttagcagcagatgggacaagattagagcagatgtgagtaagttctctggctactacgcaagagttttaagagagaaccaaagtggcttaactgatgacgataaggtaaggcaaatcatatagagtttaaatcatgttaattatttagtagtgtatacttgtgattacatttgtctaattcatctaatatttctgcagacttcaaaggcggcaaccttgtttgcacacgaggaacagaaaccattccattatatgcattgctggcatcaactgaagggtgaaccgaaatgggagagtatctgtcaaggacattccttccgaggcttaaatgcaaaatctattggatcttcaggtaatccatctgttgaggcacatgaaactgatagtggttctgctggtttgacaggaaaacggccgagaggtcgtgattacagtaaatctgagagaaagaaaggtgcatcttcctcttctacagaatacttaagccgttt

SEQ ID NO: 178496 - DNA, 463 bp, Zea Mays
tcatttctagccactcttggcaaggctctttgaattgtttctcaaatttgaagcgataaggcaatcgaacaagttcattcttcttccttgttcccttcagtttcgccatactccattcactcaacgttggagataccctgttggctagatattcttgcactagatctctagtgctgatctgttcagccaccaccctgaattctgctacagcttgttggcatggtgaccccgatgtcatgtggcacaggggcctagtcagtccgaagcttaaactcagtgggctcatgaccatcgtcttcaacttctccctcttcttctcatcagccttgatatagaaccactcacttttccagccggttggccacttggtacgatagctgagcaccggagccttcgtatccttgcgatacgcgaagttataacaaccgaaattttcatgtaacccgtcttctctggccttcgt

SEQ ID NO: 178497 - DNA, 1658 bp, Zea Mays
caattttttctgtctttatattgcccaaaccctaaatctttaaccctaagaaaaattaagggcaaaccatattaaaatcataaagatagtactatttatccaaacattaataaatgtctagagacaaaattttttgcccaaaccataaatccttaaccctaagcactaaacactaaacccttaactcgaaactccaaaacccagaccctaaacctaatgtatcgaaggataactcctatggcttttgaccattatgctctccactaaagacccaagattgtgatttctatccaacctatagtaaaatttaaccaaaaaagtagaaaaatctagaaatcaaaaacatttaggccgaaccatagtaggattgaagagatagtacaatttatgcagaccataatcttgggtctttagtagatcataatggtcaaaaagccataggagttatccttcgatacatagggtttagggtttggtgtttagagtttcgagttaagggtttggggttcagtgtttagttgttagggttaaggatttagggtttgggcaaatttttctgtctttatacattaattaatgtttggataaatagtactatctctacaattttactatggtttgcccttaattttttatgatctttcgattttactattacttggtttacattttaatatgggttggatacaaatcacattcttgggtttttagtggagaccatttaatggtaaaaaatccataggggtaagcattcggtacatagggtttagggtttgatgtttaggttttggggattacggtttagggttttgggtttggggtcctgtgtttagtgtttggggttgagggttatggttaagtgttttgggtttgggaaaattttatctttctctagacatttactatggcctagataaaattgtactatctcttcaatcctactacggttttgcctaaaattttcgttttctagattttgctactcttttggttaaattttgctataggttggacacaaatcacaatcttggttctttagtggagatcataatggtcaaacagccatatgagttatccttcgatacatagggtttagggtttagagtttcgagttaagaggtttgggtttcagtgtttagtgtttagggttcaggatttggggtttgggcaaactttttctgtctctagacatttattaaggtttggataaattgtactatctctataatttaccatggtttgcacttaattttttatgatctttgtattttactattacttggtttacattttaatattggatggacacaaatcgcattcttgggtttttggtggaaaccatttaatggtaaaaaatccataggtgtaagcattcgatacgcagggtttaggttatgatgattagggtttggtgttagggtttagggttaagtgtttggggtttggggtttattgtttagggttgagggttatggttaagtgtttagaggttgggcaaattttatctatctctagccatatgatatggcctggataaattgcaatatctcttcaattctacaatggttcagcctaaaaattttcgatttcttgattttgctactcttttggttaaattttactataggttggacataaatcacaatcttgggtctttt

SEQ ID NO: 178498 - DNA, 837 bp, Zea Mays
cggagagattacatgcttacgaccgagatagatcgagatggtgacagtaattacgatcccgacgacaggttaaaagtgcagcacatacgacacggcgcggccgacgactgcgtcagtcccaactgccaaccaacggtgccgtgacggttcatccgagccgtcgagaaggtcagggagtcttcggtcgtgctcccaatctctagttaacaccctccttgaccctctttccgctttgttctaatcgatctatgacgaccaagaaacaagcggcatagtcacacgtactattgaatattgattgattgattgatagtacaaaatgtttttagatgactcgcggactccgacagtctagtcgacacgatgacattatacacctatatactgacggaaagaaattcaggacagttggcaagtctttgttgctgaatccgtcttcgatgacctgtgcgcgcggcttcaaactttgacggtgaaaattaggtgctcaagtgagggtgacagcagggtctggctggtcatgtactcgatccagtatgtaccatctggtggcaatataaaagctttgacggtggaagaaaaaaactacatgatcgctgagtggccaaggttaatataaaagcttaataaggaaaagaaggtactaattatacatagatttcttgtgataatctaatggggcttagattaaaggaagagatccatattactcccttcacatatggacaatatccatatgcctaaagattttttagttcgttttacctctccaactatttgaattggttcaatctatcccttaataaaatgtcttttttatttctttgtgacaagcta

SEQ ID NO: 178499 - DNA, 923 bp, Zea Mays
ctcctcgtctgtttcaaataatcccaaagaaatatgtgaaaaagagaactgtccaagaggttttatcaaataggagttggatttcagatattaaaggtgcactcattgttggtgctctaatagattatcttcatttatgggaagttcactcagagtttgaactgcaacctggaagggaagataaacatatattcagtgttgcatctgatggcatatactcagcaaagagtgcttataagggtctcttccttcctgggatcaagtacctttggtcactatagaagggtgtggaaaacttgggccccatcaaagtgcaagttcttcatctggcttgtggcccaaaacagatgttggacagctgacaggttagccaagagaggcctgaaccacccaaacagatgtcctttttgtgaccaggaagctgaaacaataaatcatctgctggtgtcatgtgttttgcacgtctcttctggtacaagctgctgagaaagtatggaatacattccctagctcctcagccagggattattcactttctggattggtgggaagatgcttcggatgcagtaaatgggctcatcaaggagtggatttatcctaattatcttaggtgcctggatgctctggaatcaccgtaatagatgtgttttttaccacttgacacccagcctaactctgctccttaggcttgctaatgatgaagggagaaagtgggaaattgctggggccaaggggatatctcaccttgttgccccgctgccagattcttgatggctgctgtgagagcgaccttctaggggtgattttttccttatggattatttcttgtatgcttgttactggcccccgtaatggggttcttttgtatctgggcatttctaaggccctttcaaccttttcttcttaatatacaaagatgtgca

SEQ ID NO: 178500 - DNA, 662 bp, Zea Mays
gcaatcgcatcatagcagaaatagagaaagagagagaaagttgggaaggcgggcgactgcgttgagctgtagtcgcgccgcgcccagaacctcggattcgtcctcaccggtcgctgcggtgctttgactggacatagggaagctagcccgaccaccaatttgatgaacggccggtcggagctcgaggaatttctcaccggaatgggaagagcgccgctgtccgcattccaccgcgaccaaggagctcttgctacgaattctggtaagtcgctaccctatatggttcgccttgtcgtcctcatcatgtagcaccgttgtatgtggggtttggccgttggtatggctggagggggcctcgccggtgatgctccatcaggcaggcgtggtggcgccgccgcttgcagactaacgtggggaagaaagggctggcgaccgtcagatcttcaatgaatggataggattagaacgttgtaacgtttcgagtgaatcgatctggcgcgttgatctctgcgcgtatggtctagattagatccctggataatggttcgatagcgggatctggaatgttggcacggtatcggatggaggaggattgatcagggcggggtcgcttctcatccatggatgttagatccaacggccaaggtctctgcgtacccctt

SEQ ID NO: 178501 - DNA, 579 bp, Zea Mays
ttgattgaataaaaccgcaggggcccttatgcatatttccccagccaaaggggtatcaagcgactgcagccatccgatcaaccaacagcggccatgattagttcaaacttataagcggactggtattcgcgggtggccgccagatcatgatccaacggaccggatccgaactggtgaaggggtatttagacgcctaatctcaaccgtccgttaactatccaatggcccgaggcctctcttcttcccttatttctctctctcccccaccggtgccagcctgacgacaggcacggcggcgccatcgccgaccccgcccaaaccattggcccgagcaccaatccatgacccggacagtgctacacgaactatggagcaaggtgaattaaataaggtgattctcaccgacgattgggacgcgcagaatcactgccacggagatgcgtaacactacagtggagaaaggattcctatgagaaatctcacggtcacctgtgctccacgactctcccagcgctctcccagcaagttccgagtcgatccccgagagctcgtcgccggcggaaatccttcttctctttc

SEQ ID NO: 178502 - DNA, 499 bp, Zea Mays
gccggccaatatatttcgcttgctccgaggccgggactgccgctggaaagtgactaccatcaattgcgcctatgcaatccttgaagtgtggccaaaacctcgcctctcgcaaacgaggatgagtctcaatgaaatttgggtcttttggcttgattatgtcagatgacatcttatacagtgcattaaggacttcactatacttgcgactaattgtttccaaggagtgaccaaacttattccgtatctgcctaaaagattgtggacccccacatgcccacaagaatatgccaagagcttccatagtactgacaccccgactaggaagcagaccataattttctaccaacgtgtcatgcaatcgtctaaaaatagttcggcgcatgcgaaacatgtcgaagcagtcgttactaatctccaacgttctctgaacccattgaataccagattccaccaatgttcttctaggaacctgactgaaatgcctgccccaaatgtctac

SEQ ID NO: 178503 - DNA, 531 bp, Zea Mays
cagaggaagggcacacatatctagtacaacatctggtctacttcatcagtgaagttctaggaccctctaaaaagaagtatcctcaagttcaaaaactattgtacgtagttcttctaactgctcgtaagctccatcactactttgacaaccacaaagtcatagtagtcaccgagtttccaatagggggtattcttcacaacaaagaagccattggaagaatagctaagtgggcccgcgagctgggagctcacgactttgagtttcgacctcacactgcaataaagactcaagcactagtggacttcgtatcagaatggaccgagcaacaagtaccagacaacccggaggctgtggaagtgtggcgaatgtatttcgatggctcgctaaagctacagggagcaggcgcaggaatcctcttcattgcccctggaggtgaacaactcaaatatgctcttcagttatcattcccagcatcaaataatgcagcagaatacgaggctctgatccatggattgaacattgccgtatcac

SEQ ID NO: 178504 - DNA, 362 bp, Zea Mays
tagttagtagtatagagtagtgaagtgtaatgtagtagtagggaggtcatcaactcataatgagttgatttgtaaattctgtagcttcccttttatgaagaatgattttcgtctcctcctgtgttaattactttgtctcccggtcagttgacgattccatggatgttggtgtctcggaggtagtggccgagtcattcgggatcaccttgtcgctttttggggtaacggccgagttattattgtcaacattggcgcttctgaagtagtgtccgaatgatggcagggccacatcggtgtttttagaattaacaaccgagtggttactggcgatatcagcgttatagaggtaaccagcgagtgac

SEQ ID NO: 178505 - DNA, 949 bp, Zea Mays
tatactattgtatgcgaggctatcccaaggtcatccttcggcatggcggcgaggccagtttcgagcttcggaaatcgcatactcttggctatctcccggcaaacggatatctctttgttgtctaggagacagtacatgaaatcatcttcgtccgtgccattgaacactaaggccaccattggatattttagtttccgggcgtagtgtttggcttctaagagttcttcttcgaataatcttttccccgaagcatgtcgaataatgtaatcaacatcttcggatggggctttgggagcaggagatttagctttttctgtcacatcttgccccactgccatgccggtatccggagtttgttgctcagccttatcctcaggcacgatatgctttgtctcaatgggcgctgaaggcccagcttcggcttcggcctgggctatgacaacttcggcaactttcttcatagggacatgaatcaaggcttttgtggtctccatgacagtgtctagcacgctggccattctccttctcttaggagttgtggcgggagcctttgtcaccttcggcaattctgcctctgccggtgggctcagaatttttggcatcatcactatttttccaattctggctctctggccgcatcatctttgactttggctggcccgactataggcaccttcggcactacaatagatccttcaacgctccgagcggcgacaatagcttgttttgcttcggcagtggaggaggtcccttcaccaaattcaggcactacggccgtttcaatatatcgaggccggtgggtcaaaacctttattttcttgcccttcagcacaacaatggtggccaaagtggcagttttcctcttttttccttgccttctcaaggggtagtagtaatcaggatatatgaagccaattgcatcaaaaaccctgttcaatcttttcttgcc

SEQ ID NO: 178506 - DNA, 603 bp, Zea Mays
ggcgttgcagttcatttgtctagatactgtgcgtacttgattggatctgtcccagaactacttccgtaccatgaagccgatatagcagagttggcactgaaggtggtgggagaacccacggaacaagaagacgacgctcggaatatcttccataaaggcatcgagctcggtaagcagctggagaggatggcggatggggatcgctggaaggcgctgcaagatttctgggccaagacaaccatccatgccgctaagtcgcactacaccaccaagcaacacatgcaacaccttgaaagtggcggggagttcctcacgcacatctgggctctgcttgctcatgcaggcattctctaccttaatcctgtgaacaatgaagatcaggaggaccaggctaatctaggctctggaccctcagctgctgcatgatagattcaagtcaatggcggagctatttttgtcggttttcccccacaagtttatgttccagatgctgttgttccatttcgttttcagtctttctagtgtctgtcaaaataagctttgctatctgcatgcatgtatctgcttgctcaggcaggcattctctaccttaatcctgtgaac

SEQ ID NO: 178507 - DNA, 593 bp, Zea Mays
gtccggagggaccatacaactctggagaagaagacactctctagctgtaacaccaaaactccagagtagctccgagcctagaaactaccatccgcacctcaagtcagatgaggtccagtgtcgccacatatccggaccagtgcggccagggcttggaaccccttgggtgcggtaagggcccacggatagggagggtctgggaatgcgtgtcatcgcttattcccgagcctaccccttctccaggcagaggtccggtgccgacgcatggccagacatacctaagataaacctctgacacaaggcccgccatcattgggtaaagatgggacacatacttacccatgccaatagcgggaagcatatcccctgcattacatgtgtgtgctgcgccaggtctgcaacatgcggattttaccgttacttgcatgttacaaaggcaagagcattgacccaatgcgccatttgggcgcccttcattatgacttccattgttcttcatgcgttactgaggcatgaagagacgggcagtggagacaagacgagacaacaccgcccacacctacgcatgacagtgtatcatactatgtcgtaac

SEQ ID NO: 178508 - DNA, 406 bp, Zea Mays
gggacatggaggagggtgacgatgtggagcaaagggaggagaaggagcacaacacgcgtgagagggaagcgaggcatggcaacaacacgcggacgagagcgatggtggcgaaggcatcaacgagaacctagtggaggatgcgagaggggaagacgtctcctcatatgaggaagctggtgtgggcgagggggcagcatgtggggctatgggatggagtgatggcagcggcacagggacatgagtgttggtggcggaggcatcgatggctgctgacggaggatctggatggggaggtcatggggaggcgatgcagtgagtgaaaaaatggtggccgactgtggcctcgcgaggataggagagggtagggatggaggttttcacgagaaagtcggagaatggacggttg

SEQ ID NO: 178509 - DNA, 409 bp, Zea Mays
tcatgatcatgagtgtgtggaggcataggaggcggaaccacaaagtcatcatcatcatcatcagggactgctgtgccttgagtctcgaacaggtgaaaagcggtatcctcggcctgagtgtcaaccactagagcaggtgctggcataggatcctctggagccggacggtaggacccaaagaggaggcgagaggcctcaagagtgccctaaaactgtggtggctgaatcagttgagcgaaaatgtggcaaagatagtgagcatacggtagttgttgcgggcacgcagaccatccagtacggtgtcctcgatctcacaaatgaggaaatccacaacatcaaactcagagtgagagaccagggcaccaaggagccaaagctggatatgagtggcagcctccctgtaacccat

SEQ ID NO: 178510 - DNA, 788 bp, Zea Mays
accgtggatcgcgcatgagggagagagagtgcggcgcgggcgggctcggtccgtcgtgtgttgcgtggccacgccgtcgattgagctcggagggttgccggggaggaccgtcttgactgcccgagcgtggggagggcaccatcttccactgcggggcatcgactccgtgtgaattgctcgccggagcaatactcggccgcggatttgcagctcgccgtggaccgttcccaccactacacccttgccggtaagactacctccttgtcacccgccttgcccttctcaatgtgtagcaccgttctaatcgggggtttgggtgttgcgcaatgagatggccgtctccggccatggccgtcgccgtggggcaaggctccgttgctcggcgcggtgggtaaggtgccgatgcacgaccgtcgttggatcgatcaccggcggataggattagaaccgtggttagcgcttcggttcattaaattcggggcgttcagaactgatcgggtggataggatttagtcaaacgtgtggacgtttcgtgtgccatggatctctgatccaagggcctggatgggataccggttcacaatctaatccgaactgcattctggtgatcggacggttgggagttcacgataccctttcgtgatggcggttttgttaaaaagttcctgaccaaagtgcaaatcaacccgcggtccgctgcagagaattctgagtcttaggaaaacttacatcgagacccttgaacttctctgtattagtgcgcccagtccagagagccagaaaaatca

SEQ ID NO: 178511 - DNA, 434 bp, Zea Mays
attttctccagtacatctagtacgttgaccatccttttcctcttggggtcgttgtaagatccttttgcgccttcggcactgtcacctctgccgaagggcttataacttctaatatttttgttttttcgacctctgtctcttcaatattaatggcctttggctcacctgatttggctggtgatgccttcggcattgcagccggcttttcagttttctgcgtaatcgcaggttctttggcttaagtagccgaagaggtttcaccgccaaattcgggcactgtggccggttcaatgaagcgcggtcggtgagtaaggaccttcacctttttcctctttggtgcgggctcgcttggagcagctgaagcatcacctttcccagaagttgcactttttctcttttgccctttcgacgggtagcggtagtcaggatacata

SEQ ID NO: 178512 - DNA, 789 bp, Zea Mays
cccgactcgtcggtcacaagctccatggtgttcgaggtagcagccaacggcctccgtcaagctttgtcttcagctatcgctaaggcagaatgggccactccttacccatggaatccgacgcggaacgaaacccaggctgtttaggtcagccctgtatctcctacttacaaagtagcatgagaatgaactcttcctttgtgttagaatatgcatttatctatggtccggtccggttaggcccacctatgtaaacccggtctccgacaccttctgtggtccagcccgataggggccacccttgtaaacccggcctctggtgttcatcacgtagatcacatgtatccagtaataaacaaaagattaactctcttccatcgatttcttttcctgtttgggcataatgtttttcctctgtccctttcacggatccaaacttctgttgtaatcatgaaaatcgggttatgtacccaaccttgcacctgttttgtggccccacgtgatgacagaaaaggaacagatcgctaggaactcagcctaaaaaggaacagatcgctaggaactcagcctaagggaaacagttcacgttctcagggttagtccggagctaggtagtcgcttagcttgtttccataccgtaagcctacaccttccaccgccctagaacagttgtccaagcaccatcggctaggtaacttgggttccagacctagtccagattcaaggataggccctgaaaataggcttagcaaggttcggatatatgattcgaagtattgagaacaacaaaat

SEQ ID NO: 178513 - DNA, 554 bp, Zea Mays
ctgacttaagtcgattgctccgttagtagggcatagtggtcaccctgagttaagtaagaatgcaagtcaatcgtaaacaatctgagtatctttgaaacctcttttttattgatgacatattcccactttacagagtacatcgtcgtcccggcagtttttgaaatacagatagggataaaactttctgaggtgttctatgttccaggagttcccgacttctgtgccatccatctgagtgagacgatacgatccgggccgagtgacttctgctaccatgaagggtccttcccataagggtgataacttgtgccgtccctcccccgttagaattcggtggaggatgagatctcctactgagaaggatcgttgtcgcacagccttgtcgtgatagcgtcttagagtccgctggtaccgtgctgattggattaccgcatttagccattcttcttcaagtacatcaatgtcctccagcctggtggcctcagcttctgctatgttttcgaagatcaaccttggcgccccaaacttgagatcagcgggtagcaccgcctccg

SEQ ID NO: 178514 - DNA, 765 bp, Zea Mays
caacatacaaacaacatgacagcaaaataattgaccacttacaggttggtggatacactgaaatgaccactacacgatgacgaatatcaaaagcagacaagagtattcatgtcgtatcctatgatcgataacttaaagcaattttgttggtgtacatgataacgacggatcagttgagcatattaggcgattcggaggacacagtaaaccctagttctccaagttggccatgaacaaataaatcgatctatgtaaacaacttaagtacatgtaaaccctagggtgaatcgaaattaggtttttttgggacactgattgaatcggagatgtagaacatggagcaggggacacgtaccttggaccttcaagctctaatgacgcagatcgggtgagcgtagatctctcggcgaatcgacgaactcccgttgacctcctcccagcagacgcagcaccggcggacagagacgaccggcagcggcgccttcgcacggatcggcggggtggccgctccacgaagcaagccggcggatccgcggccacaacgacctctgatgctcgccgcccggaccaatagaaaggattcggtgccgtgcgcggaaccacggctaccttctccggcggcgttgcggtcgcggttgaatcgcctggagctcgctccacggagtattccgatcgcgcgcgcttgtctgggaagctaccggccgagggggaggcgagcgcggtagcattcccatccatttagcgggagagagaaggaaacaggag

SEQ ID NO: 178515 - DNA, 414 bp, Zea Mays
gccgactcataatgagttggcttcgagtttgtgttaattctcccattacaaatgaaggattaagttactccacttaaccaccgttgcttgctttttattcgtgtgcttgaaagtttgtcggcattttagaggtaatgctcgagtgacgattgcaatccttacttttccgagttatgatatggcactttagaggtaatgcccgacttaaggagccaacttatactcgtgccaacgtgccttcttgagtcccgaaccctaaatctcactttttcctccgcctcttttccgttttctgaattcttgagcctgctcgttccgcctgagagattgcaatggctcccaaatggaagagacagagcgtcgtcgttccaattattccacctattgatcccaacagccagctttccattcgct

SEQ ID NO: 178516 - DNA, 1163 bp, Zea Mays
gagcatataatgtcgagtgtctcagggcacgagtggccctaaagacttaatttgttgggtgcctcgttgtgtaaggagccccggggttagacaggcatgcatcctagggcgcgaggggttgtggtgcttacttatgtacgccacgccatgtggcctcacaggctaagctagtgatacccttgtataagtcgtagtcagtgtcgaagtcttccatttaggggtcgtggtgcttacttatgtacgccacgccatgtggcctcacaggctaagctagtgatacccttgtataagtcgtagtcagtgtcgaagtcttccatttcttgagatcaggagaggtcccgagagcggtgacttccatcatggaccttgaagcagtcttctggacagggattattgagcgcgtcatggtagcagtcgagggtatgttctttctgtggggaaagatacgctgttcttgtgtgttacatgcaaggggagtgggtgatggtgagttaaaaatagtgagcacacggtgatgctaataagttatttccctgctatttttcctgcaatgttttttggtggtagattatcgttacaatctccttatttccctgctatttttcctgtgattttcagcacgatgacacatcttggtggtaatgcatccaccgccagcatagacaatgatgtgctggacagaagcagaaacttttacgagagaagaagggaaggcaagaagatggtagcggtagctattgtaacccagtaagtaagcaaaaagaaaagcctggctggcctgcattccctccctgacgcttctgaaaaccagagatgaaaggctgcagttatgttctgtcgtctgtttgagttcgtcattagcctgttgttctggaattcataattagtgtgtggttcatgtttgcatgattgtaaccctagaacagcacagcatctgcaggcgtgaaccacaaacttattacgagctccaggatagcacagcttaaattcagttattctaatcatgtctgcagatgctgtacatttcctttcctgcatagcgtagtcatgttaacatgttaaaccgaacaaatttgctccttcaacaaaaaaagagagcagaacaaatttcatgacaccataacatagctttcagcagaaccaagatgtaccgtaccatgcct

SEQ ID NO: 178517 - DNA, 596 bp, Zea Mays
gaaaagtgggaaaataagcaacagacgatcagaagatgtgtgaagacaccaacgaggcaagcggtctatttatagaggctggaagcaaccgctcatttcctaccacggtcatcgaagagtcgcaagtatttaataagcaattcaaatcgtctggaagcaagtcaggcagcagacgctgcttcgcgtaacacgacaccatttggactaaggtcaactgcttggacgatatgattacaccccgcggtcacgtcaaattactactcaaggacagtttgctaaatgctcggcgtaccaaaatgtccctcggtcacacccattgggggggacgtccaagaattttcaatagattttcccaagcagtcacatccgtacagtatacgcaatgaatgtatcaagacagaagaaagatatcgatggagatcagaggaaagccaaatatagctgctgaagtacaagtctaatcaacagaagcatgaagcgcaaagcgaaatgaagaccagccaagagccatctactagacgtccaatctgtcgccgatcaaataaatttcaaacctaacaagacatgggaagatcacgctgctggtttctaaagca

SEQ ID NO: 178518 - DNA, 351 bp, Zea Mays
gggagtatggttaagatagatatggatgagatagactacacaatgtaggtcaaaactttggttgatgtgaggtggggatagacagattatgcaatccatcatgactgtattggttgggttagatttcatgcacgtggctaagtaggtctaaggtgctaagttaagttatcgtctggttagtagggtctaatctcttcttatcagtatcactagtttgattaagtagaccacattagattagtttagtagatggctatgagttaaatgagattagtcagaatctggtttgattgttttgcttctaaatggttttggataggttaggtaacccattatgtagttcaagttgtt

SEQ ID NO: 178519 - DNA, 820 bp, Zea Mays
gttttcacttactaccgcacgacaagtgagggcatcacacacactacatcgactcagccttcgggataatgcctgccttccgataattaaacaacatcattttcaattcctcaccctcaaacaaattctgcagatccccctcaccaatactcgtcccaaacgacgaggacaacaaatcgcgttggccaccccgatctacccgaagacaagttcgctccagccccatccgatggcgcctaccacttcgcgacatctcgccaacgctatgcttcgccaccacttttcatcgacggcgttcgaccctcgccctagctgtgggatcaaacgcttcgcccacctttagccgcggcgaagactccgctgcggccacatctaacgtggcaaaataatccaaatcttcatctgaagactcttcagtacaggaaaacaggctctccaactcaccaccattagatgaaaaagacccagattcagaaccagacaaactatcattagtaggcactgcgttcgcggccgccacaaaattagtaccatcagtaggggttgcttgcgcaggcccagacattggaacctgcgcaacaaccgatttttagtatcacaaaaacaaaaccctacatccaacgcccctaactctatcccgccacctgcgaagggctggccaacgctgcagggtcttcggcagctggcgcggccgccaccgaagtgtcttcaggcaacacggcggcgaccacagggtcatcttcgctagcaccagttggcggtgccggctgctcctcaatcactgccctcgcaccctccgctagaggcatcgtgctcccca

SEQ ID NO: 178520 - DNA, 611 bp, Zea Mays
gcacaacggctgccagttctaagtcatcgagattcgtgcgaagatggcatcgagattcgtgccctagacatgtcaaatccgggatttcctctcggagttcagcagtgagacaaaccaaacttcatccctccatatcttttgatccagtcagcaaaacccataagcctccacacacaaacgacaaaggaatgtcaggggaagagatctcttaatgggatcatggccataatcgtgaagatttggagctaatccgcgcttgaacttgacctctctctgcgctgcctcatgctcgacgtcgtgcccaggcgccagagcgtgcactggcactcgcccgcgcacaccctaagcgcatgccagaggcaccccttggccatgctcacccgcgcctttaagaccacccccagacatgcctcacctcactctgcactcaccttcgttggccagacaccacccttagctccagcgagctctgcgccacccgctcgagccacccgagcgccggccaccgcgaccagccatttcccgagaccctcagcctcaatcgagcctttggacagcttccccgaggagccatgaagcttctccaagcaacaatcgaagccctgcctcac

SEQ ID NO: 178521 - DNA, 743 bp, Zea Mays
ggaatagaagtggacccatccaaagtagaagcagtatccaaatggaagcagccatccaacgttagtgaagttcgaagctttttgggaatggcaggatattaccgtcgttttatcaaaggattatctagcatagcaagacctatgaccgagctcctcaagaaatacaataaatttgtatggaccccaaagtgtgagtaaagcttccagatcataaagaagaaactcacgaccgcgccggtattgacgctacctgatatacaccaaaatttcgtcatcttctgtgatgcttcaaggcaaggtttgggatatgtgcttatgcagaatgagaaagtcatcgcctatgcatcacgcctactcaagccacatgagtagaattatccaacacatgatttggaattagcagccatagtgcacgccctagaaatatggaggcactacctaattggaaacaaatgtcatatcttcacagatcacaagagcctaaagtacattttcacttagccagacctcaatctccgtcagtgaagatggctataattgattaaggattatgacattgagatccactaccaccccgggaaggccaacgtggtagcagacgccctcagccgaaaacctttcggggagaaagcaaccaacttcttggaagactggaagaaagaatcagctcaactaaatgcttgtttgggagacaatggcagcctagaaattaagccaatgctagaagacctcatacgaaaggc

SEQ ID NO: 178522 - DNA, 1577 bp, Zea Mays
acaccgaaccgaacaactcctttagtgggtgataccctgagaaggacttggtcacccactgcaaattccaaatcccgcctcctcacatcagcataactcttctgacagctctgagcggccaaaatattctaacgaatttcccgaaccttttcagaagtctgttgtacccaatcaggaccaaccagggatctctctcccaaggtctcccagcacagaggggagacacatcgcctgccatacaaagcctcaaatggtgccatcttgatgctaacctggtagctgttgttataagcaaactctgccaatgcaagatgatctttccatctacccttccaagacagaacacaagcgcgcaacatatcttccaaggtttggatcgttcgctctgactgaccatcagtctgaggatgaaaagcgacactaagagaaatcttggtgcccaatgcactgtgaagactctcccagaatttggatacaaatttggagcctcgatcagaaacaatggacttaggtaccccatgaagcctgattacttccttcatatacaaggggaccaaatctgaagctgaatttgtggtcttcatgggaataaaatgcacagacttagtcaagcgatccactaccacccaaatagcatctctgtcccgaggagaacgaggtaaacccaccacaaaatccatggtgatatgctcccatttccactccggaatttccaatagcttcagtaaacctgcaggccgcttatgctcggccttcacgcactgacatacttcacatgcggccacatacttagaaacatcaaccttcatccgcttccaccagaagttttgcttcagatctcagtacatcttggtttcgccagggtgaatggtgtaaggcgttttatgagcttctctcaatatatccatcttcacctctgatttctgaggcacacaaaggcgacccctgaaacgaaccaaatcattctcatcgatggagaactctcagggtttaccatcgccaaccctctttcgagcttcctgcaataaatgatcctactgctgagccgcacgcactttctccatgagggaagattgaataagcatacaagtctcctcactagcggtgccaacatagcacaagacgatccccaaacagtccagatcagcaatcaactacaaggccacttttggaaccccggacctgctaaggccatcagccaccacatttgccttctcgggtgataatgaatagacaaatcataatctttaatcaattcgagccatcgacgctgcctcaaatttagctccttttgagtaaaaatatacttgagacttttatgatcggtgtaaatgtcacaagcctcgtcataaagataatgcctccatgactttagagcaaaaaccaccgcggccaattcaagatcatgagttgggtaattcccctcatgctttcttaactgccttgagccataagcaatcactctgccttcctgcatcaacacacagccaagaccaatacgcgaagcatccgtataaactgtgaaatgcttacagctcttaggcaaagctaggataggggcatccaccaactttctc

SEQ ID NO: 178523 - DNA, 614 bp, Zea Mays
cttgagtcgttgtaccgacgggcgccatgacgaactcgtctagttgaatatctcaccaccaccgtgatcgccttcgtctcaaattggcgaagcacgtagccggctcctttaaattgagcactaccctcgctctgcatctctgttacgcgctcataccaccctcagttagtctctctcgtgcaccgtagcccctagtcaccagatttcccccaaatcgggtcactcacgccgccgtgagacatcctgccatgatcaaccgttcctaggtctgttcatacctctctatgccttgttttagcattcttgaatgttaacgaagctcgtcgtctcaaccgattgaacactaccgcgacagggcatcgagaacatcacctcgccgtcacagaacactttcgagagagcactcacatcgacccactctcccatgcccgctccgtccaaattcacacgtgtacccgacctctggtaagtcagtgaaactcaccctagcttcagtttaaatgctatcgcattttgttgctcggaacacgcttatcggagctctagcgccaccctagccatgagcaaacatcaattaggataagactagtccaattgggtgagggcatatgctc

SEQ ID NO: 178524 - DNA, 462 bp, Zea Mays
caatcggctagacgatgggctggcagcgatggcaggcgagccgcaggctagcgacgatgtcctaacggctaacagtgacggttgggtgggcggctgggcagtaggccaacagtgatgagctgactgttggatggcggttgggcattgggcacaataatgctaggacgcgctaagcaggagggttggatgctatggacgtgtggttgatgcctttctcattctgtgttttagtcgacataggtcgtggcctaggatgatgggctagaccttgtgggttagtcgatggtatgatgtggtagacctgatgtttatctaatttggtctcatatacctaatattttttattttatagtatataccaaggttattatggcgtcgcctagacgacgcctaggcatccaggcggctgtagattctgggcgtcgagctcgccgcgccttgggtgcgtatggcgtcgccgcg

SEQ ID NO: 178525 - DNA, 769 bp, Zea Mays
gttgaagatttgaagaagaagcttgcggaaatgaatgaaaaaattgaagttgcaaatgcgaagcacaaaataagcgaaattgaaagattatgggtacaaaataatgtcgaagagctccacaaatccaaagagagatgctacgagatatccttggaatgcgcaaaaactctgaagaacagttttacaaaggtaggagcctgttcttccgagcaaaaattcatccgcggcgaccccgatggtgtcgtctagtggatcagcggagaggtcgaagcctttgacgaaatcttaagtgatcgaggagacttctgtgcattcgctggtgcacgaggggtcgcggcgaccttagaaaaagccagttgtgagcatgttaagaatctcatgacgctcaagaagaagccaagcgagctgaagaagctgctgagcacgcaaggcttataggtacgtttactgggattcagcttcggagtttgtttttagcttcggaattaaccaacatattctttattgcagctgaactttcaccatcactggagctgtataatcccgaagctgacccggccatgaaggaacattagacatgataagaatcgctaatgaagctactgacgaagccatcgacagactgctaaatgaagttactaaaaaagtactgaaggaagtttaaatttttgtatgcttgaaagtgtaatgcttgtgtatggctgttgtcttttgtaagaaacaaacatcaagtatttgtatgtatattaatgtaatatatttctttgtg

SEQ ID NO: 178526 - DNA, 472 bp, Zea Mays
aatttctgcgcctttgctggtgccagagggttgcaacaattttggaaaattttggctgcgaacacgttaaagttgcaacccagacggagactgtcttcactatggagaacatgaaggatccttcggctgaggcaactttgatgggcgggaaattttactccaacatttggaagaaaggcgtccgagaactagccgacgaagctataaagaagaatgagaaagaaactcatgaagtgcgagaagaagccaagcgagccgaagaggctgccgagcacacaaggcgcataggtattttaactgtgtcatagctttagtttttttctgatttcggattaacaacttattacttttactgtagctgaactttcaccaccacctaagccctatgatcccgaagctgatccagcaatgaaggtggcactagaaactataagaattgctgaagaagctgttgacgaagctgtcaacaaac

SEQ ID NO: 178527 - DNA, 760 bp, Zea Mays
ggagtaggtggacgggtcggggtgatagccgccagtgctgtcgaggaggacgaggaccccaggccggagatcgatgcagcctgagcacccagagtgatctccagagcaaggtcgtcacgaacctggaggaaggtagggaaggggcgctggcgcatgatcaacgaccggaggtgggtgtagcgatcgctaaggccgcggaggacgttgaggatgagcatgcggccatccacggggcagcctagatcaccaaggaagtccgccatggtcttcatcttgctgcagtactcactgacgctgaggtccccgtggacgaaggtgcggaaggccgcgtcgagtcggagagcccgggcctcggcgttgcccaggaactggccctcgatggctagccaaacagcccgagcgtgaggaaggttccggaggaggctgtggaggtcgacggagatcgtccccacgatctaggtgagcacgatgttgtcgaggcggacccacgcggcagtcggcgccacgccggtagggtcgcagaggacgtggtcatccagggcgtagcggcgaagggtaaggaggagtaagtcccgccagcgtgcgtaggacagcgactctggctccaggacgacaggaaccatgaggcgaatgttctagacactcccagcctgaaggtggagctgagccacgagcgggtcagtcgggtcatgccagagcatcgtggggatggtgcggggcccggtcccgacggtcggtgcggtcgggacaccgtacacgc

SEQ ID NO: 178528 - DNA, 535 bp, Zea Mays
gatctatcaaaatattatttgagattgtagctagaaaggttggctcgacaaagcaaatgatgcaatcattcataaaattgttaccaatacgattacgaagtattgtcttcacaattttcattgctgaaaaacacctctccgcggatgcagtggcaactggtagaacaagaactaactttaaaagtcgatagaccaaaccgaaagcaaggtgcttctttgtatcaaccatcagcttagcaagttcggttaaggtgttcaggttggaaaatctgtcatcagcttgtacattatcaatgtagatctcaagatcatgagcaggatcctttagttcttctgaagtaaagtcatctggataaagcttagctaattccactaggctctccaacttaaaatcaccataagaattcttgggactaaaagcagccatgtaagtaataagaggaatttgtttcactgaaacgatcattaaactcaataagtagcaaatcaataacagggttcaaacagtcccatctatagtgctgataatttgtgc

SEQ ID NO: 178529 - DNA, 542 bp, Zea Mays
cccctctctaggtgcactcaaccatgctattgatggtacaggtttcggatccctcccttctatccctttgttgtaggtcttgccttaggaatttgggttgattagcgggacttgatcatagggaggtggtcctaggacaaaggaggcagctggtgaccatgcactcatcaccgggttgcttgaggaattcgaggctgaaggcagacttggcctttgctcttgtggctaagtttgaacgtattgtggggtgtacggtgaacagtatgaagatgtactaaacacctcttacatctgtgaaggttgagcagttgacgaagcaagctcttttgcttgttaatggtgtgatggcatgtccttgtagtgtggcatttgtcctcaccacaaaataaatagaatggcttccttagaggcgcaccaaatatgccacttaatctttgtcctccccttcctctcggagtaggtggatggaaagtgctttgcaaagactgctgctgagagcttgcctgctgtcctatgtttgattgagatcaattgtgtaaggt

SEQ ID NO: 178530 - DNA, 682 bp, Zea Mays
agtctcagtaatgaaaacgtagatagatggataaatatgttaatacttaaatatcacaatttatgcgttcttatttatacaaaggtccttagcctatgactgttttggattaatgagctaaggtaatgtagaaagctatatatttcagcacataaggtatgtattgtgattagatgcatgattaaaatattggaaacgataaatttctgcaatgttgtaaactcacctacgtcttatttggggaatccattgtgatattgcacttcttttttggtggctcaaagtcatcatcatcatccacattaggcataggaatctttttagcatcggcagcaacacccctctttctatgctgcggaggatcaccatcacaccgcgtatttgtagggtctccaatgtcagtcgagcgcggaatgtcaacactaaaacattcttgacttgactcaatgattaaacgcttcggattggttgggggtcgatcaaccttccgcataattgaagcagcagcctgcaaaggaacaatgtaaaacatctgtgctttattgagttacatcaacatatacaccaatgattatacgaactaattgtacactcaacacagtcatacatattataattcatcaattgtgttatatgaccctaacaacataaatggtaagtgaacaaaacatcaaaaaaatcg

SEQ ID NO: 178531 - DNA, 1037 bp, Zea Mays
tatctctatacataggtagaggctagtgcctcttttagagactggcagactggtatgtcgaatatcaattccaaagaaactagatcgtagtaaaaattgctaagctctaaacatgctgggcagcaggcaggaaacctagaccacccagcatgtaactgcacataagcatcaaaaaattggaaatgctgaaacgtccatgtaggaagccacatcaatgtgatcgctagctacatgctccttaagcgtggaactttttcttattgctgggcattagaaaatatagtgtaggtaaaaggagaatgatgtgcataggtgtacagactaaccgctgatcgaaaaggcaaactgttgagtatctcgtccacgctgcgccacaattcgtctcgtccacgctgcgccacaattcacccaggcagcaagcacccagagcactgaaaaaacagctaaaaaagaattagctaaccagcaaggacatatgtacacagataagcacgcaaatatacatatgtatgcagattccttgctgcattggccatattttgttgtcactttaccaaccgataattgtagtatgtgtgtatgtatgtatgatattactatggaaaaaatacgaatctagattagatatggataaccgaaatgttttgtcaggcctaaaacagaaatcaagcggtaagtactaatttggcaccatctaagtctagcctctaattatgtctcagaagcagcccagccatccacattattaaaaaataccaaaaaatcaatgcaaacaatggatgatacgaatgtagaagaccacgatgtcgcaggaagcatcctataagatcatgtcttcagtctgtttatcctcttccaaactttctcattgtaacacagagaccagacaattatcagacacttgagtaccactgagctattgaaaataaatgttactactggaaaacaaatcttgaccagagcaccaaaatccaaatggtacactaaacgttagaggagcacaccatcaagacccaagtacaaaaacattagttaac

SEQ ID NO: 178532 - DNA, 280 bp, Zea Mays
aaactatccgagtcatatacaattctgctaatttggctcccgtgtaattagttctcactggtatgaaatgagccacttttgtcaatctgtccacaattacccaaatagagtcatatcctgctggagtgcggggtagtccaataatgaaatccataccaatatcttcccatttctactcgggtatcttcaatgggtgcaatagtccagctggtctttgatgttcggccttgactctttgacacacatcacacttagccacatgtgcagcaacatctctttt

SEQ ID NO: 178533 - DNA, 394 bp, Zea Mays
gttaccaacagaaggattcctgctgtggatctggtaagccagcttgagatgattcttagaggcaaggtgtcaaatatcggtgctcctgttgcatactcagcctggaatctgcctccttccaaggctttcttcagttttgtgtcaaatcctcctgctggtgacagtggcttgggccttagaatgcgaccttctcccgaagaggttgaggctttggttgtttcgcttggtgaaatccccgatgacgagaggcaggttcattttgagatgcctttgaatccgagcgacgcagaaataagtgccatgctggacatgttggctgaggattcctctgattcggtccctgctgaagcactagctatagcacccatcccagagtctggaacaactttggata

SEQ ID NO: 178534 - DNA, 577 bp, Zea Mays
ctcgccggttggggcgagtgtaggtgagggggagttgcgaaatctttttgagggtgaggagctgaggataatgttgttcaactacagggagatgggtatcatcccgaagattgagccaatgtaaagtgtgatgccctcgttgtatgtatgtaaccgtaatttatatgaagctgcgtgccttcgttgatccggtcgtgcccgtaggtgacttgtgcgcggggaaccttttggaaaatacttcgattttgcgtacttgttatgctagtccggctgcacccgtaggcgaattttgcacggggagtcttttggagaagactttgattttgcgcacttattgtgctagtccggctgcacccgtaggcgacttttgcacggagagtctggttgcacccttgggcgacttttgcacagggagtcttttggagaagacttcgattttatgcactaattgtgctattccggctgcacccataggcgacttttgcgcggagagtcttttggagaagacttcgattttatgcactgattgtgctattctggctgcacctgtaggcgacttttgcgcggagagtctttt

SEQ ID NO: 178535 - DNA, 612 bp, Zea Mays
cagagaccatgtcccccgcggacttcgcgtgccggcaaaatagaacgaccgacgatgtcgcgtccgccgcgactaaatcgctcacactccggggtcctctccatacctgggttgtttaagagtgcggtcaccttcctttgcacgtgaccgagtcgcctcttgctagaagttccattggcatagacagagcagagtgtgagagggggatcagagggaagaaggtgccgccgccgcagtttccgcacgccgccgtgggctgggcctttgaccgcgccaatcaaggtgagacctccgccatgttttcatcctcctctgtacgttgtatagcgcctagacccgggacaaatcatgggcttattgcacggggatttctcaccggagtacgccgcacggcggagtccgctgcgagctgggggcagtctgctactcgccgggaaacctggtatgggagcgtagagcgtcttctctgttgtctattctatgtaaagccgggctcgggagagagttaggttgccggggaacggagtgggccattcccggtcatggcgccgccgtgggcgggattgctctgccgaggcgtgcggtcgccgccgagtccatagtactaaggga

SEQ ID NO: 178536 - DNA, 427 bp, Zea Mays
gcagcgaggcggtcagtgatctcccttagaatcttcgattgttcctcgataatgagcttcagatttggctccatgacgctatattgcttggcacgacacatgtagtggacaaacgcccaccccgagaccggtgtattcgataccaattgtcaacaacctacttgtattgctcagatgtaacagagttaatagagtattggagaggagaatgagaataccagaactagaggaagagaaggcttggggaagaagatgctcacacaattatctgatgttcgatcccccgatcactcgatgcttacagcttttaacctctccacatgccacggccacacacagcccacacgacggcccacatacgacccaacatgttataatgcactctacacagtccacactcggccactgcattcgaactcgcctcctg

SEQ ID NO: 178537 - DNA, 673 bp, Zea Mays
ggcttttcagccttatcaacctttgtttcaaccagcttgactataagcaccttcggcattacagtcggctcttcagtgccctgcgtagtcggggtagtttcttttatttcggtagcagaagaggtccctgcgccaaactcaggcaccacgaccggttcaatgtaatgcagtcggtgggtaagaaccttcaccgttttgccctttggcacaagctcaactggggtggttgaagcagcagttttcctctttttcccttgtccccgcagcgggtagcggtaatcggggtatacgaagccgatggcgtcaaaaactctgttcagtcatttctttcctcgatctccgaaggctacgaacaaagcattatcttccgccttggaatatgctccaagcagttcatcacttgtagcttcgatacacttcagccgaaatatagaaatagaaatccaaaaggaattgaaaaggaaaataaaaataagaagagaattggaatcattgggccattttcccttcctcggcccaacacctttcccccacccatgtgggttgcgttcctcggccgactcctctcttctccatgcctggcccaaactaggggaccggcgccgacatgtggggcccactgggcaaccgcacatccacgctcactctctggcccctgacaagccgaacccgc

SEQ ID NO: 178538 - DNA, 331 bp, Zea Mays
cagacactcgataggccctttttgaaatgggggcggtaccagggataagctctatggcaaattcaacctttctctcgggtggcatgcccgttagctcctcgggaaacacatccggaaagtctgacacaaccttgatagcctcgagcgagttaggctccttactaccaactgaaatctggtgacagactccctcttctgatttaggcatccatagctcggccactacctcctctcctgacggggacttcaatgttacggtcctcttgtcacaactaacattcgcctcatacttcattaaccaattcatccctaaaataatgtctatcccagg

SEQ ID NO: 178539 - DNA, 498 bp, Zea Mays
cccaaacttcagtgtctctacttgctcgctattgaggggtcgcttgagagtagagatacatgtctacttgcctcctgcagcggagtacatgagcttgccgaccacccaagacttggtgctggacgccgagcgtgtcaacgactccaccttccggtgttacgtgtattgcctccacttctttgcgcttgaggtctgccctgtcctactcattgacgaagaacccgacaaccgttgtattcgcctcctctcctgcaaggtatctttcgacatacaaaacttcatgcttcaacaatggcggcagttgtttatttctgcgagtagctattagtgtctcgttgatacaactatttagttttgcttgcagctagagggatcactgctcatggaggcgcataatgagaaattcttaggtaaggttcgttcttgatattagtgttgttacggttcttggattagatacttgcgtgattactagttcttacctgttaatcattgcct

SEQ ID NO: 178540 - DNA, 576 bp, Zea Mays
ccagttgcggtggcggtcttatccccggcgagatctttctgaactccggtgaacaggacgcctgtcagaccgatttcgaacgacaattacttcaaattttatgtgagttcatgccaacaagtttgcatcaaagttgtaccaggactaatggtctttcattttggtataacaaccatactgaaaatcttcacagatcaaccagatcaggacgttcaaattggtgcaagaacactgaaactttaacctgataagatgcagtgaatgaacatctgtcaggccgactgacagcgccacattaaccccatatatctctcattttttgtgtagcactagtgtttgattacttaagcaaacttgttctccatacataactctacagatttgttgtactgacttagagcaaaaacttcatgaatcctgagatgtaaggccccaaagtcagccttcttcaatgaatttcagacttagccatacatgagcactagaatggcctttttgcaattaggcccaaatcttaaggtttgtcttgcaagtcttcaaatatgtgaaccatatgacttaaggtaccccaattcc

SEQ ID NO: 178541 - DNA, 490 bp, Zea Mays
cggtgcttgaatcttgctccgagagggaccccgtcggaaaggagagatcctataagatgcctagagcgcgcggatcgggccggacggtccggcgctcagtttggtgctcaactgaaacactagtgtaacatagatgactttgtttttttagctgagctttctaacaaacaatttgcagtctcaagattagactacaacgacaataccccactgacatcaccaaacaagaaccacccccaaacacaatacatctaccggcttcttgtgccggagataataacaagagtttagcacaccacaaccgtttgcacgctggcatgtctcgaactcagaggcccagacccatggcgacggcaacgctgagacccaaagcaaccgagttccccaccaggctgcatccatgcttgagcgccccactgtcgtacgggctgttgtccaccagcggctggttgccgaatccgaacgtctgccccacatcctgcacggtctg

SEQ ID NO: 178542 - DNA, 431 bp, Zea Mays
gttcactacggaggtagacgacgagtctagcgccctggtgagatgagcgcgagcgagggcttcctctctccccaccacaggcgacccgggcacgactttatattgcccatggagtccgcggatcggaaggattcaaccgaatccgaaactatcgctcgccatgatcccgacgaaggcggtgacccgcgcggcggacaccttaaagcaaggaggggaggggaggtccgcgacttgcgcgtgacggagcaggccccaacggccgagtggcagcttcgggtggcgaaggatccgcgtagagggggtagcgggccacggaaggctgcccaagttgttacgggaccgaaggaatcgcagccacgagcaccgagcatggcggcctccccagtcgcacgccgaggatttcgcggccgcggcgagcttttcggctggtg

SEQ ID NO: 178543 - DNA, 370 bp, Zea Mays
accgtgggcgggtaaagatcttggcgcctggatcaacttgggtccggtcgcggctaggctcaccgtatccccttgctcaccgatcgattgggatagatctcaccgccgttggccgattaccgccgtgcgccacgtgctaaagcactttaccacgttgcagtagctcggcttgcgatatttgctcatcgccggtgagttcgccacgacggaagacactaatcacgcgcgccagtaactttctatttccccggccgccgcacgtcttcgtccaaatccccggccaccgcttagcgatcctataaattgatggccaggtctgttgcgccatgttatcatgaagccaacgcacccacgcttgcctcgaatcacc

SEQ ID NO: 178544 - DNA, 668 bp, Zea Mays
gtaacacttcttatttgttttgtattgttcattgcaggtacaaaatgttaggaatcaagagaagctaaaataccccccatatccactaagtacagtggagcttcagaaacgtgcttctaggtactttagaatgagttcagagcacacaatgaaggtctaagaatatcttgtcttatagttttaatttcccttccagttccactatctaataatggacatacctcagtagcttcgttgtttgcttgttttttctttggtggtctcttccctttcaacaccaggtggctgaagaactttatcaagctggattcattagttatccgaggacagaaactgataacttctccccaaacactgacctgcatgttagtattggattttacttgtttgacttgtttcaaattctttctttttgttttcttgatgattttgcttacagttaacagtttcttgtttacacctataactttgcttgacaattgacatcgttaaacaatacaccaatactagtttctttgaaaagtgataaggaatatgttctcatacagttggtccacagcacacgcaagtttttttttttgacttttttcagtcgcagcaacatgtttctcctagtcgctcccatcacattaagacaatggattattagtcattcattgataaaatcc

SEQ ID NO: 178545 - DNA, 747 bp, Zea Mays
ttcatgccagtcagattcgtgagttgtttggattcaacgagtcatcgactcatcttcacatcatgtgctatggcacctctgaccctcctcatcgccctcacggtggagttgctcctggtacagctcacatcgcggctttgttctgaccgcccttctcagatgggtcgcgatgttctccgacagacttcaccacatcggccaggtttctatatcagctcatgagacggacgcttctgccatggatgggttacagggaggctgccactcatattcagctttggctccttagtgccctagtttctcactcagagtttgatgtcgtggattttctcatttgtgagatcgaggacaccatactggatggtctccgtgctcgtcgacagctgccttatgctcactatctgtgtcacatctttgctcagctgatttggcccccatagttccagggtactcttgaggcctctcacctcctctttgggtcctaccgtccagctccagacgatcctgtgccgacacctgctccagcgattgatactcaggctgaggataccacctttcaccagttcgagactcagggcgcaacagtccctgatgatgatgatggtgatgactttggggttccacttccgcttacgcctcctatgcctccacgcactcatgatcatgaggctgggagttccagtggtgttgcccctgctgcccctcctgccattgaccctgctcttgcggcgatcctctagactctta

SEQ ID NO: 178546 - DNA, 866 bp, Zea Mays
gttggattgttgaaggagaggggtctgactgcagaggctgtcgttgccgattttgttttcaagaatattcagccactaaaagacagagcatacccagcttatatgtatcgaggcctcgctgattcaacccgggttaccaacagaaggattcctgttgtggatttggtgagccggctcgagatgatactcagaggtaaggtgtcgaatatcggtgctcctgttgcatactcagcctggaatctacctctttccaaggcctttatcagttttgtgtcaaatcctcctgctggtgatagcggtttgggccttagagtgcgaccttctcccgaagaggttgatgctttggttgcctcacttggtgaaatccctgacgacgagaaacaagttcatttcgaggtacctttgaatccaagtgacgcagagataagtgccatgctggacatgttggctgaagattcctctgatgcagcccctgctgaaacactggctgtagcacccatcccagagtctggcaaagctttagatactcagaggtctaatagtgttcgcccgaagcgtcctcgccgagccaatcatccaacttctcctgctgaagggaagaaaaagaaaaagagacgtctttgccgagtgtcatgcttgaatcaggatgccgatccctctgctcctgctgctgagaaagtgccagtgccggtttttgctgaagctgatcccaatgggtgtgacccgactgatgctgaccccaatggatgtaacctcgatgatgctgaacccaatgggtgtaccatccgcattattgatgaagatgaggaagaggaggatgaaatccctctaattcggaagaacagccggcgctacatagccagcgg

SEQ ID NO: 178547 - DNA, 626 bp, Zea Mays
cccctctcttcctccccagttaaagccaccaccaaatcacgctcttgtttgcatcgctggccgaatcttgcggtgaccggagctcggggagggtccgtcgcatgggcatctcgccgggagcactgctctgggcttggttgacggtcgcggggcgcataactactgccgccttccctgggatcgtagcccactctaatttctcccacgctccaaccctttcgaccgtcgccgccataggaaaccatgtgccgccgccattacagctgggaaaactgccaccgccgcgggacctcgcctaggtcgtcggtccagcctcggcaaccggtttgagacggagagaagggcacgtagaaggtatacgtgggcaacagcgggcacgaaatcgggcggccagatgccaattcgtcaccggtggttgaaatccgccatgaatctatccttcggcgcggtcagggacctcaacaccactattccggtgaaattcccctccctattaaattgccttcgtctctaggtcatgctacgcctatcgaatttgagtttggagccctggagcatagcattgccttcctccggtggggtcgccgccgtggccaacgcgggggccgtcgcggcgttgggggaag

SEQ ID NO: 178548 - DNA, 798 bp, Zea Mays
tggcggtgtagctgttgacctcgccattcttcgaccaccgggcgtgccgagttgattactcttggaataggaagttgccgcgacctcgggccgtggaagaaccattggagtcgtcaagaatccgcaacagtggtgcgtcgctgccataccctctgcacgccgttgtggacagttcatccgcggtcaccaaactgaggtgagaaccatcgccaagcttacatttgcctctacgattgcagtgcacctagaatggtaggaaatagcgctgttatgggtgggcaattgctcgccgtcgtgcgccgccaccgcggtgccgctctgcatcgtgggtagattccgtgtaaattggaaccaccgaagtgatgtctctacgttattcggtagacgctctgctccccgtatcttgagccaggggtagaaatcatggctctgggccgcgattgggcgttccccagtggtgctccaccgtggggaggaggtctgtgccgccgtcgggcacatcgtgaggagaagacgcggctagcgccttcgatcccgatcgtacggctcgaatgaatggggaatacccccttcgggtgagctacgtgggtcgttagatttccttcgaatggctagatttggtggctccgcattccttcatggctcctgatctgggccgtggatcttagatccgaaggcctacggcgcgtaccgatttataccctggtgatctaatcccgtgcgtctgttgttgatcggacggctcaaaatgcacgataccctttcgcgctggcacttttgttaaagaacccctctgtt

SEQ ID NO: 178549 - DNA, 556 bp, Zea Mays
gaataggtttatataggtcaatatgagtgaagtgtgtgcttggtttgaatttaggcgaagaaatagggatttgggcactcggctcggaaacgatcgctcaaaacgggaattttggtgaaatttaagcctgggatctcggattggcgtgaaatttggcaagaatgttgctggaagtgttgtggaggtgcctgaaaaatttgggttcaattggagcaagtttggctggtttgggcatttcaccgagcacgtggtgtgcggggatttagggttttggtgaaacggtattttgaggtgggaaaaccctcccgaaggagctaggaacctgcaaggatgcttaaggcacacaggggaacacatttcacaaagggaaatcaccagaattcacaggatttagagttgttgcacaaagggaagaggtgggaggctctgctcaccagaacagagaagaactgagggagtgagagagcaagagttgctcaccgaggagaggagaggaggggagcccaaggtcaccagagcaccgccggagagggtggccgccagaggagatcgccgg

SEQ ID NO: 178550 - DNA, 1738 bp, Zea Mays
tgacgtcatacctagaatatttcttgaccctataagcaaagtcgttggctacttgtctcaactcggcactcatagatggatctctttggccctgctagtattcgcaagttaaaagattctaaattgagctcataggggagatgaagaatcaaatgctgcattggattgaagaagccgagtggaaatatcttctcaagcttacacggtaacacgggtgccaatctttccaagtctgcaaccacggtccgagataactcttttgcacaaagctagtgaaagaaatagctcaactctaaaagcgctagccagacatgctcagggacatagcctcgaaccatcgcaggaagaatctgttcaatccatatgtggaagtcatgactcttcatccctaagactcgtagagtagataagttcaccccctactcaggttagctgcatacacataagggaacatcaacatcttgatccactgaagtacttccttcctctaggccctgcttaggacggaatcgaccttaggccttctccatgtatttccaccactaagcggcttcatctcttggtttggtctatcacataatgctgccagatccactcttgcctttatgttatactttgacttatcaggaatgtccataattggtgcccaaagtgcctcgacaacattcttttcagtgtgcatcacgacaatgttgtgtggaaggagtaggtcgtcacaataggggagccgagtcaagcccgacttatgtttccacatatgctgctcaccatatcccacaaaaccaccttctgtattggccacaagcccatctatctgttgacgaatttcggaactagtcatcgttgcaggtggtcggtctatcactacgacacctttcgtaaagttcttgatgtctaggcaaaatggatggtcatgagggagaaattgccgatgtttatcgaatgacgaatatttgccaccctttttcaaccaaatgaacctaagagcttccttgcaaactgggcatgagaacttaccgtgaacacaccagacgcagaatagcccatatgccagtaagtcatgcatggagtactagtaccagacatgcattttgaagtttgtctttgtagatcggtcatacgtccataccccttcctcccaagcacgtaccaattcatcaatcaaaggctccatgtacacgcccattttattcgctgggtgttctggaattatcaacgacacgaatatattctgcctttgaaagcacacaccagggggagattgattgggataacaaacacgggccaacatgtgtacggggtagcgctcattccatagggattgaacccatctgtggccagcgcaacacgtacattacaagcctcttcggctttctcacggtgaatggcatcaaggtgtttacatgcttcaccatcagatgtgtgcaccatcttgtcaggattgtatcattttctatttttgtgccatgtcatctgtttcatggatacctcggtcatgtatagacgctggatcctcgatatgaacggaaggtggcgtaggattatcaaggggatgtcgagctgtctcttctgtccatcactagagtctacctccatgaacctagacgatttacactttggacagtactttgcctccgcgtattctttcttaaatagcatgcagcccttcgaacaagcatgtatctgctcatacgtcatcttgagtgcacgaaggagtttttgtgcctcgtaccacggc

SEQ ID NO: 178551 - DNA, 861 bp, Zea Mays
taaactcttcaacaacagttgcaacccgctctgcaatattagagccactatgcgaaacatcaataagcctcgttccaatgacccttttctccaacaaccaatcaacattgacaaaatgggcaacaacactaatgtaatcttccttcgcattaccagaccatatatcagatgtgagtgcaacagatgacacactagattgcaatagatcaatcaacacagtacgacattgcttgaaaaacttaacaaaatctctagttgttgtctgtctacacacagaacggaacctatgattatgagagcgtcttatgtaacgttcaaaagcaggatgaccacgaaaacccaaaggaagatctaaagtagcaatcaaacgacatagttcagtatgagcagtggcaacattgtaatcccatgaacgcaaaaacccatcaccattaaactgaagtaaagattgtggcctacttgcacgctcagctttagatgcacaagcaatacaatgtcgatgcaaatgacctgtaccaccctcagcagttaactgtgatttgcagtagtgacattttgctgcattcctgactttcttaccagtaacttgtttgtagagttgctcgaagtcattccacacatcagaggtggttttcctacctcgcttgttacctgtgcccgagctgctgcctacaacagttgggcttgcactcggcgttggcgtgaatgaagaactgccacaggcgccacctccatttccttgcgccattgctgacaccgaggaagctcgcgggctcgcgaccgaacaggaggtggactgtccgtccgcgccgtggctgactagccgagaaggaaatggaacgtggccgactaaccgaaaat

SEQ ID NO: 178552 - DNA, 322 bp, Zea Mays
ggcgaggtatggcccacgccataccttagcctagcccattagcatcactaggtcgaagacctttggtctttcttcgcgtctgacatctgtcttgcttctttgttgcgccgtcgctcgcaaacagacacagttgctcgcttctctgtcacctgtctggcttcttggttgcgccgatgctcgcacaggcaggtgcaattgctcgcttccctgtcgtcggctatcggttgtcgctcgctcgttttgcctccgcacctctaaggatagccgctcacgtcttctaatctttgtgctcgcctcgaccctgttctacgctcacctttat

SEQ ID NO: 178553 - DNA, 589 bp, Zea Mays
aacgaatctgaagaaacatttgcatgatccagatcgtgatccattattattaccctagccagagtgccagacatatcacatatgcatgaaagacggaattaaaatgggtgtgtgaattatttcaattttaaatcctgcacatccaaccattcttttacaattcatggacagccatgcatgtcgtagatagacccctacctgatgccttgatgagtttccatctaggtcgtttgaactgtttcaatttcacttgcacttgagttttatacggatgtgtaaagacctctatttcaatttaacttggtgattccgtgcatgcgagaagaaattatctagaacatgcagcacacctggtggatcctagtgcataggaatctcattgctagttttgctttaatcctctctcatctttatttgcacaaagatatgtgctttcctaaagtttatacctttgagcaacctcctctctagctagctatgcctgggataaccctatagctttcaagaatgtgaaagccatgcatgcttttgccccaatagcaaatgcactcttctttattttcagcctaccatgcacctaagaatcacg

SEQ ID NO: 178554 - DNA, 978 bp, Zea Mays
gccgtcggacattatctatctccgacggttttagccttatgtccgacggcttcggccgtcggacgttgtactgtagtgtatagagggagtagtgctcatgtaggcaactggataattactgtacatgaaattcaagaacgaactcgtgtatatagagggaagtagtacatcctagaatctgaacgcaacaaagtgttaagtgtagtgatgctctccggctttgtccacaccagtcatcatattccggtcttctcgaatgtggacgtaaaggcagcgcgctgcgttgtagctaggagtactccaatgattgtatcctcctctgaacctgcaacagcttggaatgtgacaggcagagaccatgacacattggtaacggcactggtaatcatgcagcgtttatcactgctactacgatactgatgactgaaaacaccacgctactaataacatatccccaatgcttcttgtggtgttgctgttgtcacctcatgcatgtgtcacacaaagctacggtcaaaggcatgcagcatgcagttccagccgaccaagctggtgggcgataagcccatttttagagccttccaaggccctcccaaattgtcaggttacgagccacaccccacacagatgctgcaggcatgcatgcatatgcttggcaaccacacatggccttgtactcttgcggtctgtgactcctccggcctttggcctctccgatcccgggcattgactgcatgattggggggaacggagaatcctctccacgtctctccattgctgctgcacgtatctatttgctcatggcaccaccatgtcctttccattcggcttagaaaattcctgtgatgatttgatctcccttcttgtccaacgacgacaacaactcgtagtgctccggcctcgatctgcgccggagtgccatgatcacaagctgccgagcaggcccctaccactggccgtgcgcgtccctactggtcg

SEQ ID NO: 178555 - DNA, 348 bp, Zea Mays
ggtcacgtactcacgtacgcgctcgcttttttcaccctttccccccttttcagcacggccgccggccgccgtcacaagcgagtaggacgtagagggtggtacgatgaagatgcatggatggacgatggtgtcgcggtggggatgatgggatccggacggacggacggtgtaggagtagagtagtaggtagtaggtacctgccgttcgtgtgcttcctcggatcctctgcaaatctccccgttcccgtcgtgtgacgcctcaggcgtgcattgctagggggcaataagcgagtttctattccagggaggccgtccatcgacagggtgtaaaattcacacgaaccaccaa

SEQ ID NO: 178556 - DNA, 1065 bp, Zea Mays
cggggaggtcctggcgaacccgtcgatggtcggatagcggttggaggtggtcggagtcgctctggccacgcacgggggtggaagagctcatcggcggcgaggagtccggccaacatagggcggtttagatcgattggatggctcgaggaggttcactggacgtcgtgaaagctgtgcgcgcaaggaatttgacagcggtgcaacggtttacctgatccacgtgctccgccggcgagggtgatctgacgcttccagtgaggttgtgcttagtccgggggcttaggaaacgtcacggaactcttgtgaggctagccgagcggttggcgttggcgaggagggctagggtgagtaggccgcggtggccggagttcgggtggctcaagggggcggcgctgcgctcgccgaagctgggaacttggtcgggacagtgaagcggggtacggagtggagtgttgcgtaccctggagggctttataggcgtgggtgggcgtaggcgagcggtcggtctgacaagcgcttggggcatgcgcggaggagaggcagtgcacgctcagcctcattggcatgacgtcgagcacgtggcagaattgagtgtggtcattttcaatcgcccgttggctctagatcttcgcgattttgggcaagatcctgttgtaagatttcttctcctgactaccctctgtcgtttgtgtgtggaggtcgatgtgtttcttgggttgtgtctgatagccccaatccgagagtaaaggcgcgccaaatcatgtcaaatggatttggtttgatcccatgtttctcctgggtgttctaatggtattttggtgccattttgtcaattgggccaagtggttttgagttagggatcagggtgaatgtgctcaagtttggtgagggggctgaatttcaggaatctgaaattctgatttctatagaaagcccccacttgagtggcttgtttggagatttggcaaaacccttttaggcaaacccacatactattttctgtaggttattaagtgtatcacaacttttataatgggcccaagtcatgataatgtgatcttcttg

SEQ ID NO: 178557 - DNA, 951 bp, Zea Mays
cgacccaattgccgctaatcccgccgcgtcagaggactttttccccgcgtgaatcgaattccgctgaccaaatcggctgtggtcgagatctccgcgcgtgcccgatttctgctgaccgagctcaacaaccccgcagttcccggacgccgttgcgggtcatgtgcgccttattgaggctataagccaaatgtcgtgcatccttcctttccctgctccttccctcctcccttccatagccgtagcggagaggcagagtgaaatccggtccgccgcctgcgaatcccgtcaccgtgggctgtctgacctcggtgaagggccggggtgggtcgttggcacttgggggtgccatccgtggccgcaatctaagcgagaggctgcggtgccacaacaattcctcgccgtcaacccgcgctctgccgcggatccgccttcgccgtggccgagcttctgcactccattccctcggtaagaaatccatccctcgtgttcgtcccgcctcccgcatggtaaatctcgatttaatttgatgcttagcgcccggggaacactgattgacgacctcaccggcgctcggcagggtgagaaacggcggcgccgccgtctcggttggtcgaggggagaagatttggtcgcgcccgttgatcatcgcgtggacggctacgattagaaataggataccccttcggccggggccaatctggcccgttgatctcgggttagacggtcacgattacctggcgagtgttttaaatccgagccgttggatatggatctgagcgctcgtgattcataccagttcgtagggttgtgcgatctaatctgggccgcacatgtgtaatcggacggccagaaaccctggataccccttcgcgggtatcttttgcaaaagagaccctctgttttataataatcaacccgccatcctctggcgctgtgtcccgtgtctctgga

SEQ ID NO: 178558 - DNA, 652 bp, Zea Mays
gttgtggggttgttttatgggctatctggaagacgagaaacaattcttgttttgataacaaagtcctttctgatcccactaatgtgatttacctctgttacttttggatggactattgggctgtgctgcagaccaagacaacaagaaagaggctgctggaaggaagccaccgggttcgaaggacgacaattgacttcttggatcgggcgagaggctgggctctggtatccaggaggattttggcatgatcaaagcttggagttaccaaaaagcttgtgtcggtttatgtagttcgctgtagctagctcagttctaggccttttgatagtctggcattttctattccggcgcatgtgtggcgtggtcaggttttaatcttgttcagtcttcgactttaaagctgatgtttttgtctgtgtgatgggcggctcctcagctagctccttggatgtttccatcggtaactctgtttgtttctatttcgtaatgaaatagaggggtttccccttccatcaaaaacatataatctagatacatagattacgataatccaacaacgtgttattatgtgtttgtataattcataagctaaattatataaccgtagaaagaaacaaacaaagctaacttagggctaacttagaatgatgtg

SEQ ID NO: 178559 - DNA, 372 bp, Zea Mays
caatgtggtagcagatgccttgagtcggaagttgcattgcaattgtgttatgatggattctcggattaacaccttgtgtgatgagttgggcaagatgcagattgaagtgattccttctggtgctttgtctcacctttccgttgagccagctttgcaagaccagatcatcatggcccagcttagtgacaagggtgtgcaaattatcaaggagattctccatcagaagaccgagaagtataaatgttttcgccaagatggaaagggtatattatggtttgaaagcagattggtggttcctaaaaacaaggatctcaagaagaaaatcttggatgaggcccatctctccaaattctctatgcatctagaaagcac

SEQ ID NO: 178560 - DNA, 639 bp, Zea Mays
ttgattcttaaatactacgggggctcttatgcaaagtgctatggccgaaggggtatggaatactactggccgctcgatccaaaaccgagggcccagattagatcttatctaaagtgaagtggaacgatactatagccgtttgatcagcgatcaacggtgcagatttaaaactgtcctgatccaccctgacccgcacgattcatgatcaacggcccgatcgctttcgtaaatcgaaggggggtacgcgattctaatctcgaccgtcaacacagggatcaacggttcaggttcaatccccgaagagatacactcaagttctaatcgggaccgtcggctgggatccaacggtggaggttcatctacccccctccgaccgtgcccaacgacggcgagccggtccccagcggcggcgccatggtcggcctaacctagatctcggcacctcgcaccaagctctaatttgaagagtgctacacgatgctctaagctatatgaacgcgatgaaccaagacatacccctcgatgtatcgcagaaggtcctggccacggtggagggcggaaccgcggcgcattttctgcgacggtgaggaatcccgaggtccccagtcgcaattcccgcttgctgaagccacgtacacc

SEQ ID NO: 178561 - DNA, 590 bp, Zea Mays
tccatgtctttccaccacttggcggcttcatctcttggtttggtctatcacataacgctgccagatccactcttgcctttacgttatcctttgacttattaggaatgtccataattgttgcccacagtgcctcgacaacattcttttcaatgtgcatcacgtcaatgttgtgtggaaggagcaggtcgtcataatagggtagccgagtcaagctagacttatgtgtccacatatgcttctcaccatatcccacaaaaccaccttctatattggccacaagcccatctatctgttgacgaatttcggcaccagtcatcgttgcaggtgggcggtctatcactacgacacctttcgtaaagttcttgatgtctaggcggaatggatggtcaggagggagaaattgtcgatgtttatcgaaggaagaatatttgccaccctttttcaaccaaatgaacctgagagcttccttgcaaactgagcatgggaacttaccgtgaacacaccaggcgcagaatagcccatacatcggtaagtcatgcatggagtactggtaccaaacatgcattctgaagtttgtcttcgtaccttgg

SEQ ID NO: 178562 - DNA, 910 bp, Zea Mays
ggccgtgatacagaggtgacggacggacgagacaacaagccggagagtcgggaagggcggaggggtcgtcgtctaccagtacggtggcagatgacagttgtgcgacattgagggcgccgacgtcacgatgcagatgattggggatggagtggtcgagaggttgggggaggaggcgggtggcgcgacaaagcagcagaagccgctagacacatatggtgtaagctagggggcaagggcagggtgggggcatggacggcggcggtgaggtcgcacgctcctcgaagacgcgaggagtcacccgttacctttgcctttctttgtctcaaatttcaatcgatagacttccttgtttcacatcctcctttatagccagcgggattcacacaaaaaactcacccctacactaatttcctattacaactcgggacgactggtcccctatgggcaagatctacaaacatgctcacccttccctcgccccggtaccacgtctctagtaggttccacctctagatgcatcgactagtcatacaaatatagaaccttgccctaccctcataccatttatgcggcgcccctatcattggatccactggcaagattcatagttgtgctaatccctatgccatgtcatcggtggagagatttgaagatacacttacccccgcaccaacctgctaccacgtttgaggtgtctcttgccaccgaatccaacgacgaaattcacatataaactaatccccaacgcaccctcctgtcacatatctaatggatcccacaactagatccatcgatgccatcagttcacttgacaaccaatcagatttagtcccctacctctacctcacccaactatatttctctacctctagcagcttgtggtcaccattgcccaaacaccctgcccacc

SEQ ID NO: 178563 - DNA, 692 bp, Zea Mays
tccttttctaccccagtttctttctcctctgactgaccgtgcattgcaggctgaatcggttggtcatgggctcatggcgatgcgtctgaccaagtctccctccctgcgcacaacaccaggaaaagaacgggaacccggccggcgtgccgagacagggtctcgtgtgatcgtgtcacaggtgtcgatcgaagccagcaagagtcaagcgagaaacttgttaattccctggacctgcagctgcaaccgaccttgaactccgtttggccacccatgccgtgtgatcagctcacatgcccacaaacacaggatcgcggaaacggagccagcggcgctgaaactatctcccgccttgtaaacgactagtatgtaaagaactgttttgcactgctgtttacaaattaaagtttgaaatagggagtagtataaggactttgatggagaaactctctcatttgatcacggatcgagagcagtcctcagcttgtgcaggtgcagccatccatcagtgtgtgtttgccggtcaagagcagcagagtcacggccactgcgatgtatttctcctgttggaccatctgatgtgtgtacaactgttgagtcggtaacgagagagagagagggatggagcagttgtcatctagcctgatgtgaatcctaggggtctgtaatgaagttgttagtagtccgtttttccg

SEQ ID NO: 178564 - DNA, 638 bp, Zea Mays
caacggtatagcccgctaaataacatacacgtcggcttgcctattattatcactatctaaggcacaacatacaccacaacatttttataaacatacatattcacatgtatattcatacatcgaccaaatcatacgaactgtaaaccactaatctttaactcgaaaccatcatgcgcttacttcccaaatcatgaacacataacgcgtattgacccgactcaagatatagaagaagcgatgactactttggcatgtcaccacatctctaattaagccaaaacaatttctacttatatcgaccgaacattcgtgtcgagcacaccttatattaccttgtctcgcatacaaccatgttgtggcgtgcactcgagacactaccgattaacttaacgcaattacctctacaatgcacttcgatatacacgttcgacatcacagtgcttcgacagaccccacacttccaatctacttgtcgcatccaaacacaccacattcccactgcattctcatgaccaattttagcacaattatttacgacaacatttatcgactagacaatgaaacactaaccgatcattcgcacatctcatcttaaaaacactaatcacatgtcacataatttatatcttcgatccact

SEQ ID NO: 178565 - DNA, 1234 bp, Zea Mays
aggttactcatgccctgcacggttattggaacgttttctggaccaccatgcatttctgaaacaaaatccataatgcaatgttgtggaatcctgctttcttgcatcgcactaaggaactccatataatcacgatcatgagttttgttgcattgcaattgccctttttctgtatctttcttctagaattcatgattatgctcatagtttaccagatcaattcggacggaaataacattctctttagcatcatcgtagatttttttaagtttcatcccagccttgtaccgtgttcgttttgaacatgtgttacgtatccttggatttccagctaccctttcaacattctttccttccattgaacaattcaaccatttacaattcttccgctccctatatttcttcaacggaaatccagcctcgtatgcatattgactataaaaattatacgcctcgtccacgttactaaatgtcataccgactttaggtatcaatcttatatcaatattgttcggttgtgcacagaaatttaacatttatgatttaatatcgactaaatctaacgtaatataggtacagaattacaaaaagtaggtacaaaactaatagtatcataattgagagaacttacatgactttgaagaatatgaggtgtgtcctgttcatgcgccccaatatgtctcatggggatgtgcttatctgctcctaccacgtctgccgattttgtgttctcatcaatatgtccaggtgccctcaatgccacggggggggggagtaacagacacaccttctgtgtaatcggtgatcgcagacactacaggatgcatgtccattgaagtagatgtacctgttgacctatgcacagacgctacagattgcatgtcatcgccagcaccggtgctagacattccctcgccgttaatcaccgcccggtgctgtcccttccgccgccgttaatcgccgccaataacacagatacgaacatggatctactacagctgtaaattaaaattgatttccttctactaatgctcctcaaaccgtatctgtccctttattttcacgattgtgcagcacgtctttccttatctcaaaccggtcaagttttatatattgcatggtttatgctatcatgttacacatctttatgcagtcctaaatggtgtgcacatggtaatattcgttccccgtgattcgtgatacaaaagattccttctatgcatgatttatgcatatt

SEQ ID NO: 178566 - DNA, 607 bp, Zea Mays
caagagttatcagaaactgaaaaagaagagctaaagaaatatgttgtatcctgtgggtacaaactaggggctctgctatttggcggagtcaatgaagggaaactaagatgccttcggaatcgaaccgaggccaaggtcgttaggactttctcgaagaatgttggtctgccgaagattgaggcagacctctgcagataccagtgacaacatatcgccggtagcttgttctacgctaatttcaaggtaaaactctcaactttttattgttttttgaattaagatgttttctgacgaaggttgttttgccagagtatactgctaagtaaagtgctgaggatgcaacaagatcttgaagacgagaaaaacgaagctacaatcaaagatctagaaaataaagtcgaaagtcacaaagctgctttggaaaaaaaggactttgtcattcaagatcatgaaaataaagttaaagattacgaagctgccttggagaagaaggacttcgtcattcactctatggagggtttgctgactgaagctcaagccgaaattgacagattaaacagcgaattactcataaaatccaaaaaatctgagcaagaaaagaaaaatc

SEQ ID NO: 178567 - DNA, 620 bp, Zea Mays
aaaccaagggcgggaacccggcaagggcgctccgcggcggccccatttcttcggtagtcgtctgggtgtcattgtgtcgggagctgacgcaccgcctgggcactccatcgcgcagaccactccgtgggcggctcggcctacgctactgacgtcggtaaggttctagccttggtgttcgtcgtcgttcctgtactgcgtaggtcctggtcgtgctctagtcggtaggctagaacccgcctgatcgctgtgcgctggacccgactggcagactaccgtagcgcgagctcggggaagaagaagatgctattgccgttgatcttataacgaacagcctagggtggatagagctaagaaaggttgagaaccatagatttttaatagtgtggcggtgattagatcctgggctggaaaaatcgccgccgtggatcttctaatggacggtcgtgattatatcaactaataccccttcgacactttagatctgggccattgattgtcgatctgacggtccgggggtgataccacttatatgcacgtgcgggcggtggtggggatcttgtgtggatcggatcccgtgtgcctcaccttgtgcaccggggtgtggcatgatttcagccagt

SEQ ID NO: 178568 - DNA, 1017 bp, Zea Mays
tcttggaagcacacttgaacgattgtcaagagtcccacacatggatgtgtggtcaattaggagccctgtcaccaagttgttagtcttcccttaagaggggtcgctcatagtatgcccctcactcagtttcgccgatgtctagcacccaacgatctaaccattttggtcttttgggatggcttgtgggggtgtgaattcaactttgggatgtggaggtcgtgtggccacttccctgtaacacatgaatgaaataatagggttattgaaagagttgtggtttgttagtcgtacctataatgatttatggacacattcgtggatgttgtgtgtgcgacgcgggagttgaggcagttggtatccatgagtcgacatgtagcatggggggacaagaagacattacaagatctgcccgtttctaggaagcaagccaatggacatttaatgtagcgaggagtgctaattatctggtgagagtgctcccttagagctaaagcaccataatgcatgaggaaggtggcatgagttggtggggctcgatacacgagtcgttgccactatggggccatgtgtcatgtgatcctttaggaaacaagctatgatgcaattaatacaaggtgagtggaggggtgctgggtacctagtaaaggtgggcccttagagccaaattggcacattacgatttggatgttggtgcatgcttataaaaggttgtcttgcacctacttgtgtttaccttaccattcttgccttgtcctcctgatgccattctttccttcttctccttgtttctaccttgcttgtgtacataagcaccctaccagcaaaactgatgaatagagcactaatgttcatcatcactcttggtaattcccatgctacatggccatcgacgactgtgtgcatgcactagtgaccaaggaattattgcaagattcatcgacgtagagggtgaagacggaggtggatgaagtcaagcctcatgcatgaaaggttgtggtgatgctctagcacttcgag

SEQ ID NO: 178569 - DNA, 734 bp, Zea Mays
cgggaagatctaaccgtccgatccatacccgatgcaccagattagatcgtcgtgatatataacgtgtaacccgccccgatcatccgatcacgcatcaatagcagagaggcggccacactctgaccggactagaaccgcacatcaccgaatcaacgtctccgatcaaatctcgtgaaggggtatgcggcacaacatctctaccgtcggttatcgatccaacgacttcgtgctatcgctctcccccgacgtggcctgacgatggcgccaccaacccaggcggtggcgagttcgctggtgcgagtgaatccggtgcccgagccacaatcccgagcccccgcaacttccacacgatgcccaaacccaccagaacgcactggtctaacaattaccgggattcgcacaacaccggcgcacacccgcggcgagtagcggctgtcgccggtgagccgttgctacctttgatccagcgcgtgttttcaagcgtaatttaatatctgcatgtggatcatataacagggtttggtaggggagtccttaccgggtttgaccacgctgatggcgacaccacggcggattgcggctccgtgcaggtgtcctactactgcgagcaatcgccgatcacccaactccgatcctgcacgacactgtggctcacacaaacggtgaagactccacggcttcccttccggtcgcccaccggaaacgaggagccacacacagctgaccgctggcgg

SEQ ID NO: 178570 - DNA, 685 bp, Zea Mays
gtaacttataacattccaagctaaaataagaagaaataaataaaaacccctaggataatgtagtttaccagttcatcatagacaaatggtagggacattcaggacaacattattgaacaagcaatattggtgccttggtgggatgggaccacaacctgcatcatagattcccggactgaaggagggcagccttttatcagggttccttttagttagttcttgcttttgttagtttcagtttacttgggtgattggtgttgtacctagacttaagattaacattgttctgatctctaaaaaaagattactattgctctgttcaatggttctactgattagcaatgacatcaagaaggcaaggaaacgaacttttttacctgtgaaaatccaggattaggtggtgtcttgttagagcacctccaagagaaaatgtaaaacaacccccaaaagattttataagatcaaaaacactttttagccatccaactgaatcttcaacttttccccaaaacattcgcatcccgaatccacagctccctctctcgcaaatattctccctctctcgcaaatattcgcgtcaaccaaatctccccaatcagacacttcacgcgcagagaaagttgtttcgcgccaagattttgcccgtgtgaatgtcttgttgatttctgatgccctcgctcgtcca

SEQ ID NO: 178571 - DNA, 305 bp, Zea Mays
cgccgcgggttctccagcgcttcgaattcgcagttgactggcgccgacatttggcgccgaaaccaatactttccccgtaatcctagccagtgtgtgtcaaatgcctttgtttgcgttcttgggacaccgtttcggccgacaagtccactctctctggctggaactggaattgaacaacgcggtaacttgttccaagacttctcctcacttgttcccaggacaggaacgacgctaataaccgtgccgttgctcgtttcttgcgttcatatactcggtttctcatgcgtccaaaacccacttgtact

SEQ ID NO: 178572 - DNA, 287 bp, Zea Mays
tcggatatggacagtctttgataaaatgaccagacttcccacagttgaagcagccagttgaggaactagggagggcggggaaacgagcaccaggggcactcgactgatttgtagaagtgggggcagtggtaggatgaatgaaaacaggctgtttgaacggataggagggtggacgaggcgaagaatgattctgattgaaaggtcggattaccaaccttgttcgcttctcaggtccctgattggacctgtcacctccaaatccctttgattttccatggcatgtattc

SEQ ID NO: 178573 - DNA, 637 bp, Zea Mays
aatgcccaccacctttaagcccagttaaacaggttcataaccatttcagaaattttgtgttaattgtatgtgctattaatatatttcatttgatttggtaactctgcactctaaagtatatatgcttcaacaaacgcagtacttcaacacacctagggattctctaagaagtcacaattgtcataaatagcaaacaacctaccatcctcacatgttttctgctgaattcattggtgacccaccactctcacctaaaagacggtggcctctaagaacgtcgacgaactcccatccatggtggcatccatcctcacatgttttctgctaaattcattggtgacccaccactctcacctaaaagatggtgccctctaagaacgctgatgaactcccatccatggcggcatccatcggccggtgaggttcaaactagtggagtgagaaggaacaaaggaagagggaaggggcttaagaacccatgggatctcttctcctcgacttatgtcatggtgaggacaacaggggataatgtttggaggcgacgtcacaccatggcagtgatggtgacggtctgtccttaatcgacgctaagcgcacgaattgagtggagtttttttgtcgtgtcttgttattatcc

SEQ ID NO: 178574 - DNA, 391 bp, Zea Mays
gccaaccttcagcctatcgccgtcagatttgattgatatttctagtgaagcccgaagtatcgaaaatagattcatcactcaaatttgggctaaaggcggacgtgagttggctggagacgaagctcggaatcttcttaaatcagtaagaaacgtttacctgttgtctgccttgatttttattatcacttttaccttataccatcatttgtctgcaggatggtggtgccgaaggttgatagtccgcagcacattccgaaggttgctggcccgaagctttcttttatgccttcctgtatagagcttagggaatatttgtattaatcttgcaaaaaattgtaatcgaaagttgaactcagtactgtgtatatttatccatactattgggggcctt

SEQ ID NO: 178575 - DNA, 282 bp, Zea Mays
cagctacttccatgggaccaggacaattcaagtcagcatcccgaccctcgagatcatgctctaaggtcgatgaggcacgtgatgacctcaacccagcatcgggcacggcagcacaagcctctgttgcgtcatcatccacaggttctgataacaagtcctctgggaccatatcctctagagtttgatcaaagttagccagggacagatcttgcagaccgatgagggcggacaatgcaggagaaggaactccactacttccaccgctggcgatgaactgccgac

SEQ ID NO: 178576 - DNA, 463 bp, Zea Mays
aaaggtttcaccttgcagcatgtggatcgagccaagaatgaggaggccgacgcattggccaaggcagccaccagaggcgaggccctaccctccgacgtattctaccatgtcatcggcacgccagctgtccgcagcccagaggggctccaaataaccaatgactgcgagggccaccgcatagtcaacctcatcatgaccaaagacttgcgggcaccaataaccctgttcctgtaggggtactatcatccaaccgatatcaatgaagccaagcacctcaaacatcgaagccgggactttgcactaatcgaaggccagctttacaagaagggggtcagtcaacccatgcttaaatgtgtcaccgagaccgaaggcgtccaaattctgtgcgaagtccacaacgggacttgtgactctcacgcagggcctagggccctagccgcaaaggtgatccgtcaaggtttct

SEQ ID NO: 178577 - DNA, 473 bp, Zea Mays
cagggcaggcggtctgcatgaaaattttggttgctacaattttgcatattgcaaggatacgaaggctccagttcttagctaccgcaccaaatgtccaactggctggaaaggtgaatggttttatatcaaggccgatgagaagaagagggggaaactgatgacgatggtcatgtgcccgctgactttaagcttcggaatgaccagacccctgtgcaacatgcagctagggtcagcatgccagctggccaaggtagaattcagggtagtggctgaacagatcagcaccagggacttggtgcaggaatacctagccaaccggacgtacccaatgtccagagattgggtgatgccgaagatgaagggaacaaagaaaaaatatgaactttttcaattaccttatcgcttcaaatttgaaaaacagttcaagcaaccttgccaagaatggctggaaatgattgaaactatgtgtaatg

SEQ ID NO: 178578 - DNA, 653 bp, Zea Mays
atttatttcgcgaagtgtcgagtcttgtgtctgtttaaaaatttatggattaagagaacatgaatttggaatctcgatccactcttacgatttttatcccgaacaaattaattggaactcgacgatagaattgatgcaaaaatttaatcggaccgagacaactagaaccaaaatgagtattcgtaattaatatgtttcattgtctatagccgtggaacaattaggcattcgatttttataaattggattgcgcacgttaccaaagagaatcagatgcaagggtaataatcggattaattctccaatatgttatacatgatagagggattcaagtgttcgaatttgtataactgtggaaatttgtctgatccaaaaacatcaaaattgatattgttctgattggtctgtttgcatctcgctcggattcaaatcccagattttttcaattatttgggtattcttttggttagaaaatagaagagaaaaatctgaatttcttatcctcttcctggctgccacctcttcccccacgtggtcttccttctggaattctcccagtcgatctcattctcctctcttggtgtctctctcacgcgagcagttccttgcagcagcactggcccgccctccactcctagccacgccgttctctg

SEQ ID NO: 178579 - DNA, 752 bp, Zea Mays
cggtgtgaattagtgctctgtacatggaatcaactgagaattttccattctcttttggattccagtgaaattcgtctggcccttccgttaattggaccgagtccaacctccctagaagtgtgttccaagccatcaacctgggacctattaagtctcatctatatgaaacatttggaggtgatgtttccaataccatggctatagtttcatttttgtgtccaactatgttgtacaaagcaggatactgttctcggagagtggtatttccaagccaattatcctcccataacgtgatttctgagccgtccttaatagtaaaagatccaaagcgaaagaaatccttctttgtctccattagacctgaccagaagtgtgagtcctctcgcttccaataaacctaggataaagctttcgagcctatgtattttcttcgcaggaggttatgccatatcccatcctcagtaagaagcttgaatagccatttaccgagtagagcaaaacttttgaccaacagatcctgaacacctagcccaccttgatcttttggacgacagacaatgttccaccttgtcaaccagtatttcttcttctcgctatctccttgccaaaagaaatgtgaatgaaaataatctaatctattcaacaccccttttgacacctggaagaaagatatcatgtagagtcccacattactaagtaccgaatttacaagaaccaatattccaccaatagacaacaattttcctttccaa

SEQ ID NO: 178580 - DNA, 632 bp, Zea Mays
gctgttcccacctcttccactcggtagcattcaaacggaaagcacagagagtatcagtgaccatgctaagttacggtgctcaccaaaatcttcttgaatgaactacagttgggtcagacgacgttggccctgtccatgggggtgttcaccgtctgtcaaggcggcgttccaggcagctctgtgcggtacaaatcaatcagacaggcgcgtaagcttcaccacaggtgaaggatactagaacttgagaaaagagacacggagggatattaaatgcaactggccacggtgaggggaaaagatgtccgtcgtggtcactgacctcagtacccaccgcgagttcaaggtttctcagtgggatcagagggatgtgggaggttgagaacttaaactagatgtgtgggattggtgtgatgcggtgagatgatcagggaatcaactgtgatataggaagtgcagttttgcgccctatttcttcatgaccagcaactaaagagggatggagtttctgggttaaatgggcacctcaccgggtaataccagtttacatgttcaacccttccattgcatggtcaccacgtaggatagaggcacaggagagtagcagctgtggccaaatctccactggacaacaa

SEQ ID NO: 178581 - DNA, 389 bp, Zea Mays
ggaaaaactaattgtacgatctctaggctgcttaactcgtggtgtcaatctattggacgtggaggatttaaatttcaatgtgtcagtgtgttggtgcatccttgcagacactagccgttctacccctgacgaggaattgaggaccacgttagctttcgttgtgtcttcacgccgactgtggagacctaatctttgtcctttgttccgggaacacgtgagagattcgtgcccgtccgtatatttgttttgatccaatttgttgtttagctcagttcagcaggtcggtcaataatttatgcttcccttctttgaaaggttgaattaaagcattctgttccatcgttggttccatcttttcatttgaaagagaaataaaaaggtaagggcta

SEQ ID NO: 178582 - DNA, 509 bp, Zea Mays
caacagcgaagagtgacgcaaccgagttagtccagaggtgcgaagcctgccagtacctgtcaaaacagcagcatctaccagcacagcaactgcaaacgatacccataacttggtcgttcgcgtgctggggactggatatgattggacctttcaagaaagctcagggaggatacactcatgtgctggtggctatcgacaaattcactaaatggatagagttcaaacccattgcttccttaacttcagccaaggcgatggagttcatacaagacataatattcagatttggaataccgaatagtatcataactgacttgggatccaacttcacaagttcagagttctttgatttctgtgagcggaaaagcattcagatcaaatacgcttcggtggcacacccaagagccaacgggcaggttgaaagagctaacgggatgatattggaggccctcaggaaaaaagtcttcgataaaaatgaaaagtttgcagggaaatggataagggagttg

SEQ ID NO: 178583 - DNA, 619 bp, Zea Mays
aggcgctctatcttgtcctctagttgtttcctatcggaacgtagctgtgaggtcacaacgttcaccagcgccccggacgccacttgatcggtgaaaatagcagcctgtcattgtacatacctcgattaaaaaactcacatagcgcagcttccgcgcgacagttgcctccacaccctcagccgcaaatgcgctggcgacctctccgcctccgtcagcagcagcgtagaattgtgcccatgggtcaagtgaaggcgccattgcggccttcgcctgagctctctcttcaactggcttcgccgacgttaccaccatttgcccatacctagcccctgcagctgaaaagcagatcaatagaagaacccataccatcacaaaaacttacaacaataaacaaactcaccgccaggcgagaaccccgtctgagcgcagtggcggagctctataaaattaacgtcccgggccactttaaggttattttaaacaacctctaatatattgtgcggctaaatataccgctaaaacaaaatataccacaaacatagactaagatagtatttacttcaattcagcatctaaaaatacaataaacttggtaaaaaaattaaaaatacctaattag

SEQ ID NO: 178584 - DNA, 981 bp, Zea Mays
caatttctgggaaacacagggttctcggtgcaagtttacggagacacagagcatagtactctgaggactgcgggttgttttctaagttttacgaggtctctttaacaaaatatacccgcgaaggggtatcaaggatttctggcagccagatcagagtccaacggttgtgattaaaatctatcccttgaacacccgcgctcatccctgaccatcggatccgcgatccgcggcccagatccaatcgcgcacacaactcctctgaaccacccgatatactctaacggtcctgatttaatgcaccgaagcggtacaccgcttctaatcctagccgtccctatccaaatcaacggcgcacgcggatctgccacactcaaaacgctcgccggcggcgagaacccaccaaattcccccccacggcggcgccattaccgcccggtccgatcacatgcaatcgagccctaaacttcgattcgatgggtatatacgtggaggaggacatggtaaactcggggtaggcatcgttacctcaattagcgcggcgcagaaccccacccatggagcgcggcggagtccagagcttcggcgagaaatcgccgtccacctggtggttatctccctctgtggaggtagcagacagcaccacggaggcgcggcgaagctccccgcccaggcgcgccaatcccggcgcggcgtctacgttgattcgatagcggcggcgaagacgctcgtccgcaacctcactgcgtactctacggccgagacgaggggagctagggaggaaaggagggcaaggagagggtcaaggggcttgggtccgcatttgaagccggcgcgaggtgggttcgggcgtcaacggacccggtcgactcgcgcagagtttgttgcgcgcgcgatttcagcggaagggaagaacctgacagcgcggtcccgcgtgtcatcgatggagcgaaggaggcggccgtgtgagcgagtagcgggcga

SEQ ID NO: 178585 - DNA, 443 bp, Zea Mays
agctaccaggccagtttgaagatgtcaccatttgaggctctgtatggcaggaagtgcagcactccactgtattgggatcaaactggagaaagacagttctttgggcctgaacttattcaagaggcagaagaacaagttcgaatgataagagaaaatttgagaattgcacaatccaggaaaaagagctatgctgataataggagaagactactggagtttaaggagggtgatcacgtgtatctgaaggtgtcaccaatccggggtatgaggagatttaaagttaaaggaaagttgtcccctcgcttcattggacccttcttgattttaaagcgagtgggtgaagttgcatatcaactggagttacccgatcatctatcagatgtacatgatgtattccatgtgtcccagctaaagaagtgcctcagggtacctgaggagcaact

SEQ ID NO: 178586 - DNA, 589 bp, Zea Mays
tttctgttccgcgctgattttgttgggaaggaaacaagatgccctcgtttttttgttcggatcggtaagagatgccaccgttcgatgccatcttttgtatgcacttcaggatttagtgtttcattctgtctatgcttttttttcctttcgagttctgtgcccgacggggacattaagcagttacagtaagcactaaccaataaatctgtcacggaacctgttagagacgtggggctaaaaagtgatttgatttttttttacctttttcatggttccagtgacatgtggagtcatgcaattgctccgtcagcgtgttctcccacctgtgaagctttgagcaatcgtactggcgtctttcactccctcactcttcttggctttgtttgattggagatagccagataggttgatgcgcatcatgatcttatttatgttcatttcttatttatgctggcacttgtgtttgctgttcttgctcatgttcatttcttatttatgctggcaataaatactggacacgagcttagcagtatatgttgcttagcacgtggctaatatttcccaaagtttgcctctccccattagaagc

SEQ ID NO: 178587 - DNA, 658 bp, Zea Mays
gttactagatgataaacaatattaaaatgaattcaatgcaactggaatgaattaaaaaggagctaagattaattttctatgagttatataagttctggaattattttggcaatagaaatccattttctaaattatttttcctattttctcaaagctctggactgagcacactatttcaataaagcccagggtctaactcataaagtctaggacctatctgatactgtctttgtgtcctagtggatggcgggttagttttaggaaaccccagggtctcttttgcataatggcatggctgaaggggtatcctataatcagagccgttggattccccatcagtggcccatattagattacgtattataacaaaatggtaagcaacgtggatcgcaggatcatggatcagtggtcctaagccctccatgccctgatcgagcgtcgatcgcacatctaccgatcaacggtcaagatcttaaatagcggaagggtatgggatcgtcaatcgtggatgcccgtggatggatcaacggctcgaaacgaatcggtcacgatctaatctcatccgatggaaaccgatccaacggcacaagtgcctccttccttccccaaccagcagcgtggtggcgcacaggcccttctacggcggcacgctcgccgg

SEQ ID NO: 178588 - DNA, 284 bp, Zea Mays
gggagatagactttccagttgaggggatcataactttgcaggaggcaatgaacgagttggtcctttggcatcgacgcaacatcaagttgggtgatgagccaatcttaagccgtctatcgtgtcataagtcaccaacgccgaattcaacaccaatgcaacagaaagatagttcgatcattccataccccatggtgcaggaaaatatgacaccgacctccacaaaaatcgttgaaacaatcatatcacctcttgcgaaggaactcgacgagggggacatagacaaa

SEQ ID NO: 178589 - DNA, 632 bp, Zea Mays
ctgggatgatcggcccagattagaagcgcgcgctacactccctcaattcactccgaccgctggatccaatattaacggtcatcatatcacctaagtgcgatccaatctgatccgccactctacgatctaacggtccaaatgatcccagagtaacacgtgctcggatcaaatcaaaatagtcggatcgcgatccaacggttcagatctaattaaccccaatcgttttccagctctaatcgcatccgtcacccggggatccaacggaccgagggccatctcctaccagacactcgtcaacgagaccgaggcctcacggcggcggccaacactggcgcggtggcgccatagcccccaaaccccaaacggaggacccgggaggccaaaccttagtattctaacgcgcagaacagagaggaaagggtagcgaacgtaatggtggatgccataccgaggattaagctcccaggagtcccaaatttatacccgagcacgcgggagagaccgacctcggttccccagccgacccgcacggatttcgcagaggctgttgcggaggatggttacggcaaggggatggagctgacgacgaagtcgtgcaaatcctggaggatccggtcagcgcaatccggttc

SEQ ID NO: 178590 - DNA, 711 bp, Zea Mays
ctgtaatcgctcaaggaaagaagagaattacttgacggcaggcaggcgaagattttaaatgctgtgcaaatgcaaatctaggctaggaacaataacaaatttgtttaattaattagtcggtgcaggggagaatctgacaggccaccaaccttggactgcatgcatcccagaaccagcaccagccgtttccgttccttccctcccttcctccttgcgcgtgaaaattggacggacagcagtggaggtgacactgagagcgacggatacggccgagaaattattgtagggggtggcgcacatcacgtcctttccggcgcgatctctctatctctctcacacttttctctctttatcatcagaaacaggctcgacctaaaaacacgccatgattccccgctaatgccgctgccgttgctctgttgggtggtgatgactggttgttgttgagcctccgtttcgaccagaaccagaaacgggagccgtggttgcacaacctgtgctctctgcagcgcgcaattagatattcagacatggatgaatggaagatggcaggcagcacaagcaaagcaagcgagtacccgtgcaaattgcaaccgatggcatctatatctagctccctttgttgttaaagcgaataggaaaacaggcatggcatattggcatatactctactatataaaattgcacaacacaagtgtccatggtaactaa

SEQ ID NO: 178591 - DNA, 736 bp, Zea Mays
tcaaattcagggtgttacatcgtatgtgaatagggagtataagcaaccaaagcagtaaagagcaaaaattaaaaagaacatatcctgcataatctctagaagcttcgtccgccatcagcctgccaccaccaagccaaacatcataatagaatttcgttcctagttctatagcttcagctaaaggagtatttatatcatctgccgcaacattgaaatatggttgaataactagcttcgcatgcttgcaacatgccttctcaatcaaggagactgtccctcatgtgcccatgcaggcacagaaatcccctcgaccagttagcacttcgtcaaacgcttcaacctcaccttcaatccaatttataaccccagcggcaccaccgaaaaaaattcctcttcgctagagaaggctccaatattagtaaacatgttcttcagcttctcgcagcatctaaaggcaatcaaaaaactttcttccttcgacttccgaagctcttcaaaaatcttttgaactctgttcttttctgttttggcaatctcacgcttctccttttcaacatccaaatcttcactcttttcatcaaccttttctttcaatttggacattttggcctctagcctcattacttatcgtcttttcttcagataaccttttcaaattagcacggtcctcaaccatttcgttaacctcgatggtttcggatcgaagatttccaaaagcaatctgagtgttgtcgtc

SEQ ID NO: 178592 - DNA, 1408 bp, Zea Mays
ctttgggccaccaccgttctatatcatcagaagacggtttgcatgtctaaatcactgccatcttggcccctccagctctgacgaattatcatccgtttggccgcttcatttctctccccgcttcggtgctgcctgctggccgaccgccgaagcgacaaccgaggccaccgatcagttgactcccgtctcctcgtcgcagggtctcctcacacgagcacacgaacatcgagccctccccgcaggagcataagacgcttcgcttggtaaggaaaccctaccctacttggacgagcttctctcaacgactcaacctttctttcctggatggattagcagttcagtttactgtgaaatttgcatgtacgtggagtagagggaagcccgaacccggtttattttcgaaatttgctaggggttcagttgaattaaacctcctgaatcctgagcccatgtttgttccgctcctttctggcaaactctctgaaagtcgggttgtgctgtgcgattctggttcgttccatgttgggccaaacaatggctgcagtactttattaccattttaaatccgggtaaatgcagtatgagaacagttcctacttcttacttcagatgttgtggttgaacagatacatttttaagaaatcgatcttctttttttcttatcctagcctcctaggcaagagaacactggttaccatgatagacagtgtgcagtgtgctgtacgtggtgttgctttagtagatgtattaggagaaaacaacctgctagcagagcacccaggctcaagcgaccccgggtagttggcctctcaattatagcctataggcgcgaataaactcattcatacagaagactcaaacaggttttagccaatggggcacagctagagtattatacagggacaactggttacgcagacagtgcactgtgcatggtgttgcttcctggatggacaaggagaaaacgacacttgtgggttgcttgcccgcgactggagtgcaactctaacaagtaatcttcagacaatatgatacataaggatgctgctatcttcttctcatcggtttgatttgacttcacttctactcacacatcattgctctgatccaaatgctggttcctatccttgcagttttctaaaacattgctggggttgcagcatgtgtacttgggcatagagggattgttacatcgagctagtgctttggtctctgctgtagcagagcgcaatgggcatccgggcttgttcggtttgctggttgttctatgtgctggttcttgtctgttccttgtgtcagatactttatgttggatcagtggcggctcaaactgctcagttgactgtggatgcttcacctcagaatgctcagataatccctggcaatatgtttggcatcttctttgagg

SEQ ID NO: 178593 - DNA, 457 bp, Zea Mays
gttggagagctctacagtgtccgcccgtcgctacttcacgcagtcgcgatatgttcggggagctgttggactcagacttagcgtcggttgtgaacccacaactgctcgctcttccacgcccgcccttgctcttcctcattggtcgagtaagtccacaacactagggtctcagtctctcatatgtcattttatgtctagatgagtttaaggacctaattttgagggtcattgtatgagttgtaaggatatgctaagcctagggagtggtgaataagcctatcaaaaataacacttaagaacttattagcaacatgagcaacactattgattgacacccagtgttgttgtggcctgatactgatgactcgtgaggggaactgacacgcacataaaaatgcctaagctcaatttaaatttcaccaacgcaacaggaagcggcaagcaacccagcgctcgc

SEQ ID NO: 178594 - DNA, 400 bp, Zea Mays
caggacgaaagggtaacttctgttgtgagccaaccgatcaaattttagtggctcagattagatcggcgtgattgcgaaccggtacgccataggggccctcggatctagatccaatagcccgggttttacacgactgagttctaatctcgtccgctcattcggacccaacggcacagatccacccacagaaccggtgcccatacattcaaatccgagccatccctccgagatccaatggcaccgggcacatctcctttcccagctactcagccgacccaaactacggcagcgctcattgttcggccactatgccccgccggagcacggtactgagccaacctagtggcctagaactaagcgaatccgctacatgatttgacgacgacatgatgagcaggtt

SEQ ID NO: 178595 - DNA, 561 bp, Zea Mays
gtagcttcctggacgcaacaagcacagcatagagaagcttgtgcttctcaaggtacctggtcttcgcctcatggaggacctcgctgacatagtagaccggcttatgtatggtccagacccctacgggtggtcccgagccttcaaggtccgtggtggtcggacctctaccttcgcctaggggaacttcctgactcccctggggaagtcgcgccgtcctttcgacgaccagcaccatgctcactgcctctgcaaccgctgcaatgtacaggtacaatggctcacctggctccggagctaccagtatcgatagggacacaaggtgctgcttcaactcttggaaggcttgctctgcctcctcggtccaagagaatgggccggacttccgcaagagcttgaagaagggtagcgccctctcatccagccgtgagatgaagcagctaagggtggccaaggaccctgtaagcttctggacgtccttgatccgggccggaggcctcattgcctcaattgcccggatcttctctaggtttgcttcaatactcggtgcgaaaccaggaatcc

SEQ ID NO: 178596 - DNA, 717 bp, Zea Mays
gcgaggtgttcttcgcggtggcggagacttgatttgggggaagtttgaaattccagagctcggttgaacgattacgggtgggagtgggtgctaaggcttcacgatgacatagtgcagctaccccgaccatcaatttatagagggcatcgacgatggccgggaatttgaagaaggacgcgcggcggtcggaggagaggaagggcactggcgcacgtgaatccgtgtccatcgtcgtggcaagctcaccggcgatgatctaacggctgtaaagagtcacggtgacgcgacagaggtgctcggatacgtggcgtaaggctgagcgacggtgatcaccggcgtttttatccaattctgccgcggtgaacgcatgtacggtggccggaatattttatcggccgaagtttatccacggcggggacccttgcttgatcccaagtgttatccactcagtccgcacgaatcacggcgagcaacgatcaacggcgacgagctaccggcgacgagcaggggggtgggatcttctttagttcatctattactgtaccatggcaatcgccattcagtcgattgacagaacatcttggagcatgatttactctcaattttcaatgacaactcattaaactttctgcagcaacattgtagagctataaactagctacaagtttgtcatagcaaccatggttcaattcttaataaatcaagcttgaattcacg

SEQ ID NO: 178597 - DNA, 475 bp, Zea Mays
ccaatgggtgtgctccatctgctgctgatcccaatgggtgtgctccatctgctgctgatcccaatgggtgtgctccatctactgctggtcccagtgggggtattgtttgtgttgttggtgaaaacgatagggaggaagaagatgaggtccctctgactcagaagaacagtcggcagtatgtcgccagtggtgaaagtagtggagttccttctcctgctttgtctgctctcattggtctgcaagaattgtccctggcgaattttgatcagactcttgaagatatggttccagaggatttgttatcagagccagcggatgatggtgtgatggaggtttgtgctgatgtgctcgatgctgggttgaggtcatcccgcgcctcatcgaccttagagcgcggtcttgagggtcaggagactgacttggatcatcttgatcctatggaagtaactgaggggccttcagccttagaggcggc

SEQ ID NO: 178598 - DNA, 992 bp, Zea Mays
aattcagattaacagtgggatgacatgaacttagggcttaattttaagcaagatccagtgacttcttgtgggagcacattgtagcaaagttatagctggttagtagctctaaaactttgctgtagaatttggtatgtgttgtcatacaggtttgggagaaaatcaagctcaaaaacggtctgtcaggctgactgaactccattcgccatggtacagtaagccccaaactgaagaagatcacgattcatccccctgctcgtcgtcggtgaattttcgccgggattgttgatggatcggcacgattcgtgcaccgtgggcagcagataagctcgggcaggtaaatatctggcgcccggattgagttgagcctcgtggtggctaagcccgccgtacttcctccccagctcatcgatcgaacggataacctcgccgccgtcgagctgttgccgttgcgcgccacgtgcttaagcactagtcctcatcgtggtgactcacggggtgcttgtccagtgatcgccggaccagcgcggctataaatagcccatgatccgcggcaaggtatgaacatcacgcacaccgtaagttgatccgaagcaaaaattcgcgctgcctctgtcccctcctcccaaattggttgtgcgcagtaaaactagaaccccttatggctgtatagccccaagccccgccctcaattccactcgtgaacgtcgcggcgccattttcccccaaatcggtccgccacaccgtggagaacaacccgcccgtggccagcttgttctggtaagtcgttgtccaatccacatgttgttttcatgcctttgcatgcttgcgaagcctacggtggtgcccgtttgcttgattccgctatggtcgtgtgggaacacaagctcgtagacacggtgtccgccatgcacgtgagcagatcattcttcaagtattcaagctaaattcgcacacgttcctaggccgccttaggtcagtgatgcctcccc

SEQ ID NO: 178599 - DNA, 1072 bp, Zea Mays
gccaagataagaaaggtaagtgtaagaccatgtagatcggggctagtcggctgtcctcatgtgtgggtcaccatggatgttgtataaggaccgatagaattacttaccgcaacttagaaaggatagtggtagcttgtttttacctttcaattatcattgttgcatcatggggatgtgctggaatgatcttttctgcaggtatactaaccttgatacgagtagtttgtgtagttatgcaataatgagtgaaggggtatgccaccgcttacgacgttaacgtgaataggtcatgaggccgtaagttacgtgcatgcattatggcataaccatcatcttgctcatttattgcatcgttcctctttttgaagcttggttaggggttttgtctgcgctagtaactaattagaaatttcttttcctatttctccccctatataaccttgtaacagatggcccaccgcaagctcaccgcccgtaagtctatgggaggacgtgttcctcgtcaccagctcgttgtgagtgtttctcgctgtcataacacttttctttcggagtacggtttactcaccctgctgtgacgcgttcttttcgctttgagttacccagagggagatgaaccacgttacttctgggaagggaggccgcgctctggaggagaaggtatttgggtgacaattgtggttgagcctcgggcagataatccagtgatgtgtggctggcactttggatcttcaggtcgcacacccagagaaggggcaggcagagcagcttacaagatacttcaagacttgctagaccgtttccctgggagattgctaccgccatgcctggagtctttcctaggggtgatattttcaaccctaagtgggaccagctagagggtaaagctttgacaggaggtgacagcgagcagcagcacaatgacaccatagcttccagtgctatgtttgtagtgatgcagttgtacatcaatacagagcgcagtttggggatggtcaacagttctctcgccatggctcagagccagttgtaccaggctcaggaggcgcatgttgcagagttagcccaagta

SEQ ID NO: 178600 - DNA, 624 bp, Zea Mays
gtgcggtaggcgcaagatttatactggttcgagcagaatgtccatactttcaaaattcctagtatgggttacaagcgggcgagggagggaggagaggctcccaagtctcttttttcgaggtggtagtggagctttagaagctaccaggtgtagtcctagctaagtcttggctcggcggcggggctccagcctcctaatcctcatcggcgctcttcctcctgttcgccctcatgggagcgtcgtctaaaggcgtctggggtcgtccggttgtcttctgaggtgtctgaaagaactccctcccaccctgttgactggaggccaacccctcccttttataggttgggagaggggtcggctagcgatggcttctttgaggagtcgtaaggcaaagttaattccaacgttctacccggggtaaagccacacgtactcgtggggtcaggattgtctatttcgtatttaccatggcggatgacgtgaggctgcgatggtcccagacgccatcattttggctatgccgactcctgacctccgtagcctggggctcggcgcggcccatcgtgaggtctgcatactcaggcctaggccatagaccatgagtgcgctgtagactgaggggcgcac

SEQ ID NO: 178601 - DNA, 294 bp, Zea Mays
ctgaggtggtcgccttcgctggcgagccgctcggagctagctatcatgcgtccctactggtgtgggggtagttcatacctttagagtagagatggagctagggccccgcttgaaaagcagatgtaatacttatgctttttgcaaggtacttttgagtactatttatcaagcagtattagcacttatctgtgtaccgcctactcttgctgtgtattgtgatgttatgatgttgactcctctctggtactcggccccccgcctagaatgcaggcttgatgtgtcgaggttggatac

SEQ ID NO: 178602 - DNA, 956 bp, Zea Mays
ggactggtggtggactggtggttgcacgggcgctcgggtacatagggcagtagatgagagcgtgatgagcgttggggccaacagggcgacgctgagtcgaggggcgtgtggggcgggcccagtgtgtcagcgtggggtggaagccgtgtgtagggcggacccagtgtgtcagcgtggggtgaagccgtggtagcaccaagtgtccaccttccgttcttaataatagtagggatagagagagaaaatggcaagggggggggggaacggaaaaaggagagtgcagactggaatctcttggatctggatgcaatgtgggatcaagacaaagtgtgacccatgctagtggccaactggaggaagtgctgggagcatgcagcattgtctggtatgagaacagtattataattatctggacacatgcctacggaaggctgattctcgatctgctgttttcctcagactgctctagagtaccagagcacgtagccttgctccaagggtaccctaatgtggatgaatgacggtcgaacactgactctgggctgtacgcgtttggtggttatgtgctcaggcaacactgggtggaaacctctgaatataatctgagtggtccaggatgctcatttgggccttctgcagttttttcagtacctagtgccatttagatcgtgttctaatgtttttgtctgaaataccagaacctgttcatgcgttttggaccgtgagttcttttttatcatcagaaaacaacttcccgttcttcaggcatggtttcccagacctgctggcaaagctctcggtttactttgcaacatggtatgatgtttctgtggtgggaggccaaagtttccccatgctacagaatttacatgggctccgttgtatagtcatgtacgatccactaacgacggtcgttccttttagtggccctgaggtctctgagcaccatgtgaacg

SEQ ID NO: 178603 - DNA, 640 bp, Zea Mays
gcagtgccatatgggacatatatagcgatacaggggcgcatccaaggggtgggacttggccccacctcaatttttttaccccttatatctaggtttaggtaaacaccaaaataaacaaacttttatataataaacatggacaaattaaatgaaaactaggttttgatctatttttctctccatgcttaactactcagtccactctccacctgagccatccgattctcttctctagtgcaagcccactcgtggctcactcgtttcctcggtcatcgattgaccgattagtcggtgacctaactcgcccgctgcagcgccaccttacctcctcattactcgccagctcgtcgccttgtcgggatcctgcatacaacgttgatactttgcctcctagtctgcaccaacagatgagcaagcagttggtggcaccgtggcatcatctgtccctcgctaaataactagggtcccaccgcgccgtcgcaacacggcaatggctacgcttgtcaccaccgccatctatcgcttccttgcctcctaccctcagtcctcccacttgttgccgcctcaccgacgccatctcacgacagatttgacgactcgccacaacgacgcgccgatgtggctgctccgctccagtgcc

SEQ ID NO: 178604 - DNA, 601 bp, Zea Mays
gcccatcgcatcgtcaacctcattatgactgaagattggcgggccccaataacattgtttctgcaaggatactaccactcgagtgacgtcaaatgaggccaagtgcctcaagcaccgaagcagggacttcgtactagtcggggaccagctatacaagaaggggatcagtcaacccatgcttaaatgtgtcaccgaaaccaaaggcattcagatcctacgcgaagtccacagcggaacttgcggctcccactcaaggcccagggcccttgctgccaaggtgatccgtcaaggattttactggcccactataatctacgccgtgaattgagtcacgaggtcatgcgaagcttgccagaagttttctccccgctcgggcaacccttcgtagttcaccaagctgattgtccacacatggccacttcaacgctgggggctggatattgtcgggccactacctacggctcaagggaacctcaagttcaccttcgtcgccgtcgaatacttcagcaagtggatcgaggccagggcagtatccacgataacgtcgaagactgcccagaagttcttctggcaaaacattgtttgccggttcggagtcccg

SEQ ID NO: 178605 - DNA, 742 bp, Zea Mays
gggggatggcagggaagtcctctcattggagtgctcgagtcgcagaagtcctccgatggaaaagtcggaggacacttcctcttgtcgcccctgttcttcaacctgctcttgcatccttcttttccgccattggagtttttggaagtggagaaaaggatagcaggaaagaggaagtaagggcgagtgaagaagtccacaacacacggttggcctatttaaagaaacggaagggggccttttcatattccgttcatacaatgaatagtcgctagcctttaagagccatttaaatttccaagaaattgaacgcttctttcacccgttggtctaacacagcactagtgatcagttaatcaaccgctcagacacattattacgcccgccacctcaagcgactattttgtggacaagacgacatgcacacccattgacgcacccattgggtgcacttatcagattttctagaaaacgcaatctatgaaatatccacaatataacgacaatcctacaaaatgacaaacttaagattggtagaagttgatcgatcaaacttgagccaactggacctctatcagttgaattcagtcggtagctttagcaggccctcgccaaacgtgccctgactgatgttcaatcgaccaggctttagtcggcttagcctcagtcggccaaactgccctcaagccaaagtcgatcgactagatatcgttagaccagaaacatggtttactcataaccaggg

SEQ ID NO: 178606 - DNA, 481 bp, Zea Mays
gtctacggctgcttggcgttcggtaagaacccctccattgaattcgccatactctccgctctgcgtagcctgcgtttaaatcgaagttgggcatcggggtcgtctctcggcatgctccggccatggcgccacctctcagcttgggggcgccgccgccttacgctctggtgaggggagagatgagagtgggatgggggaatatgtgcgggccgttggatgttgagtgtgcggctatgattgaatcctgagcgtaccccttcggctaaagtcgatctcggccattaggtgttgatccaacggctctggcgtgggcgggattattgatctaatctggtcctttgaaaacagatccaacggcctggattgggtaccggttcgatttagttaacttctaatctgggccactggttttggatcggacggaccacagtgcctcgtaccccttcagcgcgactgttttacaaaagagaccctacgcttg

SEQ ID NO: 178607 - DNA, 397 bp, Zea Mays
caatcgtttgcgatgaacacctctaggactgcaagctccttcatcctcgctgaagacgctaccagctgcagcgctcaccgattcagtacaggcagattcagacaactcgcccgctagaatattaagaacaacattcacttcagcctcatcgatagtcgtttgcatctggagatgggtctgtcgctcttcttcagggagattccggtacatagcaataaaggcctcaatatcttttgaagagggtcgcactctatggccgagactgttgtcttgaacatgcggattggatatggactctgaaaagggcctgtgcgagggaagattccagaaagaatacgaaagaggagaaccagcattcgaaacattgcccctcagcatcgaatcaacttgactcaac

SEQ ID NO: 178608 - DNA, 404 bp, Zea Mays
gtgacttcgtgtttgtcgaatgccgaagaccgtcgacgcggtctttttcgacgttgtatttttttgcgagggattttttgcgtgtatattacatggctccgcctcattaaaaacctcaccccccgggaggaaaagagtgcgggccggaatgaaaactgtcttgcaaattacaagggcaagcgggccctgaggagtcaaacaaaaaacttgcgaagattgtcaatgtttcaagaatgttctaagtcttcgtcggatggcgttgtgagcctgtacgcgctgggggacgccttcgtcttgacgatgaaagggccctccccattttggctctagcttgccctgggactctgtccgagctgtccggacgagtacgaggtctccttcgctgaattccctcgggatgactg

SEQ ID NO: 178609 - DNA, 737 bp, Zea Mays
cgacgggtcgggtgatgacgtggcgatgtttccgcgcaggtgcaccggggtcgtggtggcgtcgcgcgtgggtattgaccacgtttatacttaggtattttgactgcaacagttacataaatcgtcacagcgatgtggtctggtcggtgtggtgttgtggtttgtgatttatgcttgtataattcgatgttaacaactgcatatcaatcgggctcgcagtgtttacgatcatatacacaacaaattatgatccatatggacacgatgtacaaccaacgttttatatcacgtacttggcgtggttcttgattaatgctttttgtaaaccgtttacgacactttgcgcagttctttatgcttaatatgaacacgacgtaaacaaactgtccaactgatcgtgcactgactagtggaccccacagtcccgcgccgctccccgcgggccgaccgagccaatatggtcaacgtccgagacccacccgaccacaatcaattaactcctctcgggtccaccgaaaccctaaaaaaatcagctcctccccgtcgccgtcacccgctcctacgatcgccattgacgatcgcccccaccgcttccacccgacgtaattgtcgtgcttcatcgattggccgctgccgttctcccctggtttgtttcatctctccttctttcgagttccccacattcttttgcatagtttagtcgccaatcgccatcaggttcgccatgccccttctac

SEQ ID NO: 178610 - DNA, 821 bp, Zea Mays
ccaaggtatcatggctaaggtgaagaagagagttgtcgggtacccaggaaaggggtgcccaaggcaagggcgagaaacctctctctagcccatgaatcgatcaagtccccgctgagcaagtctgcaaggcagtgcaaacaatcatgtccacactgagctagtctgggaggcgaggcggccgacttgctcagcgaagcaaacgaccaaacctccatcgagtaagtctccgaggcagggtgaacgaccaagtccccaccgagcaagtctacgaggcgaggcgaccgaataaggccccacctagcaagtctatgaggcaggtcaaacgaccaaatccacaccgagcggatccgcaaaaaaggaacctggggcaacgctgtcgacccacgatggtcgcgctaagacacaatgtcaccaaacatgaccagaacgtacctacagtgccaaaaggcgttagatagacacgatggaacacctccgtatgcacccatgaatatgccctcactaactcacagcgccagtcaactctagtcacggaagcctcaacatcggagtccctacagtgacccatacaccagaaaggacaagataatactccatatcgagtgtatacctacatgtgcttgatagtgatgcgaggggtatgacggaaaatgaagctataccagacacaaccttgaaccttactgtaaaccaactttgtgtgacccaccaggtaccacaatgacggcaccaagcaggatacagggactcgcatactgaacaaacaagatggaatgccatactatgagtatgatagtgcacgaccctacggacgaagttag

SEQ ID NO: 178611 - DNA, 711 bp, Zea Mays
gctggggacaactgtgtttcaaatttattaaaatcaggctacaatggttgattctaaagatctcgacggcgttccccaggcaacgacatccttagaccgacttttgagagtttatcggctgacgaccaccaataatttgaagactataagaagaagcaaagatttgaagactataagaaggtggagaggtggtacctcacacactttaggattgatcgtcaccagaaggtcgtccaggtgagggaagtagagcgcgcttcctgacagcattgctgcaaccccccactgtgagtaaaaccgtgccaacccatgacatcctatctcttaagaattattgtgatgacacattcaaactcccgagggagtctgatgataagtttgccacacatgtaaaagttcatatgtctaatttttcatcacataaattggggactgaaacaactgcgtcaaacacattgatgacaaatgtgctttctcagtcccaactatattatggtatgccgatgaattcatatccagagcaaccgttgaaaccatatcctctgtacggtaggtcggctctgagcacgaccagacagtttaagcacgatcttggaccatccggccctcctgcggaccatccaacactttatgccagacagtccggaaccatatcgagaccaccgtatgtctcgcaagtgatgcccgacaaaaccagaccatacaaatata

SEQ ID NO: 178612 - DNA, 517 bp, Zea Mays
gaagatgtgcaaggctggggtctgctaggcccaggccaaagagggttgggctaggggctgtcgtggaaggggcggttagggctagggtgtcggtggtcggaccgactagggcgccaattacagggccgaccaggcccctaatcgcgggagggtagacatgacgaaggtggcatagagggtcaggggcactgggagcgatcccctagcaaccagccctagcagccgcgacgttagaggtggtcaacgagtagggtagcatccttacgacgacatgagacagaggtggtatgtcggctagaggaaggaggtgcggtcggcgcatgcatgaccaccatgacctagcaatgagagtggggtggagaggagggaggaggtctgtaagattatggggaggctaaactagcgcaaaacaaaaatttcacccctataaaaccaagatctactgctgttataggtcacaagattaccactagacgtgcaggactgcgaaaatcgtctcgatgtagatgaacacgtc

SEQ ID NO: 178613 - DNA, 624 bp, Zea Mays
tgagaccattcaagcctgataggatctctttcagcagcaactcctagccgatagggtagataaatgcgtgtacttctagcatatcctttaggagattggtgcttatctttctccacttcacatggcaccacctataccactttagactgttgttgtgctagccattcagtctagtgggattcagatttagaactttggaatggctatctcccctctctgacatgtcactttggatttcacagctcagtctgccgtggttgggagtgagtcgacgggagtgcctccaatgtgtttagctattactacttcctaagtggtagtctccattcctcagcctcagcaaccattgttcttcctttgttgatgatagtatttgcttcaatggttcctccagtgctagatctagtgcatgatctagtttttgcttttacctcagatacggcttcaatgtctgttctagctctagctcctccagcttcgacaaatcatggatccaactccgacgtcgacctctcggtcttcaaggtcactatccacacgtctgtcgacccgcttgtagccccttctccttaggatccttagttttatgatgttcctcctagtgtttgacgccaaaggagggag

SEQ ID NO: 178614 - DNA, 674 bp, Zea Mays
gcgggatctactggtggactatctccggtaagttggttttccgtttacgcggtgccttcgggatatgttggggcgttgcgggagtgtgggcgaaagcggccagggattagtgcgccaccgaagggcagcggtgtagtgcgttggctaggcagggccggtcagtacgccggatggccggcaggagagagaaagagactcggggaggacgcgctgccgtagtgcttgggcggccggaggttgaggacgactgtggcacgttaatttagtgatatacggttcagattaggtaccacgtaccgtttcggattgaacgagcgtgagtccttggatgttgatcggacgaatctgatcgactgagcccgtttaaaatcttggccgctggtttggaatccatcggctgcgaccctgtactggttcaggtgaagagtgatctaatccgcgccattggatcttgatccaacggcccagatacaaccataccccttcgcgggtatatttttctaaagagaccctggaaaacctttttatcaacccgcggtctacggggactattctctgtgtctttggatgtttaccccgagccccctgagttctctagaaatagtggcccagtccatagctctttaaattcagttatttaattatagaaattactttttaatacaaaataattg

SEQ ID NO: 178615 - DNA, 908 bp, Zea Mays
acccgatattacaacacacaagagattcacaggaaacaatagtactgcaagtctgcaacgtcatactactttgagtttaacagtacacgtaatacttaactcacagtttacaacatcatactgcagtttgaaattgcaacctcaaagtattctcaagtctcaacgagccaacgaggacggtggatagcaacctgcacctgccaacctcatatagagtcagacacagttacacttacacacacacgtccacactccacaccactacaccagtccttggccgatgggagcctaggcggtggtccgatactctgaatcttcaaatctccgatgaatcgtggtcgtcagtggctgggctcggccatggcagcgtggcccgtgctgccgtgcctgtggtggtgggcgcgcctaggccctgggcggcgccacggtggacgcctggccggtggtggactaggtggtgctggtgccgtggcggtcggcgaccagcgctcggttggattggtactttggtagagtggatccaagcatccagcgaagcctccagggaggtagggactagggttgcgatgaatcagtgagagccagatattgggcttgggctattgggtattgggtctattagctaccgtggtccatggtaccacacctaccagagtactggttggtatggggacgtttgggtatagtttctagttcgggtaccggtcacctagaccctaattagtgttcgagttttttgggtacggattattcgggtttgggtttgggttttcggggttcgggttttgggtttcgagttttctgcccaggcctacctccattcagcactcaagtatctcaagagcacaccaacacttcgacacactgcaacaacgcattctagtggttttagtgagattcgagtgcct

SEQ ID NO: 178616 - DNA, 866 bp, Zea Mays
tgaaccgagaacagatacgcaacacgaagattgaatttctgcttcttgaagcagtcataggcttccactccttgccatagcttctttaactcttcaatcagtggttgaagcatcacattaaggcgtacgctaggatgctcaggcccaggtataacaagacataggaacataaactcatatttcatgcaaagagcaggtggaaggttgtacggtatggcaatgacaggccaacatgaatacgacgcaacggtcatattgaaaggtgtgaaaccattagttgccaagccgatacgaacgtttcttgcatcgctggcaaaatctggatcaaagttgtcaagagccttccatgcatcaccatctgatgggtgcaccattaacccatcttgtctgtgagtaaaatctttatgccacctcatgtgcatagaggtcttcctcgagagaaacaaacgtttcactctaggagtaagaggcatgtaccgaagctgtttatgtgcaacctttgtcaccaccttctccccttctttatttacaagctccacgtacctcgacttcccacattttaagcatttctgctctctgtcatgttccttccaaaaaatcatacagttgtcctggcaaacatcaatcttctcatactccataccaagaccttcaagcaatttcttggactggtacatgtctttgggcatcttgtgacccgtaggaagaacctcgctaatcaaatccacaagctccttgtaacaattaattgagaatgcaaacttggacttaattgacatcagccgggtcacgaattcgaggacggtcacgtcagtgtgcccatgaagaggctcttctgacgctttgaggaggtcgaagaacttctg

SEQ ID NO: 178617 - DNA, 424 bp, Zea Mays
cttgattcaccctttggaaaggtcaatggtgaggatgagagcaagatgatctctcctccgacgcttgagcccccaccctgcaaagaaggcccgtcatcggaatgatagaggagcaagaaggggcaagttcccaaaaaccacccacctgtcccgcggagagcgactcttggagcaaccttgatgagggcactccagtgctggatgcttgccgtgatccatggttggccaagaggatctcgaagggctttgggccacgttacactcccgacaaggtgtcgtttttgggaagcaaagaagcgacgactgaggtcaagtggggtaagttcaaaaggaccttctacctatagcgcccgactaaatactaaaagcaggcttcgcgagtctctcgtaaatcgccaacgacggaaaggacataacataacat

SEQ ID NO: 178618 - DNA, 851 bp, Zea Mays
agtttaccaagctcatagcccacacctggccactttagcgattggggctagacattgtcaaaccactgcctacggcacaagggaacctaaaattcaacttcatcgccgtcgaatattttacgaaatggatcgagggcagagcagtctccataataacagcaaagaccacgcagaaattcttctggcaaaacatcgtctgctagttcggagtcccatctgagctaacagtcgacatcggcaagcagtttgacaaccaagatttctgagaattctgtagttccattggcagcaaggcagtgttcgcctctatctaccacccacagtccaacggtgtcgtcgaacgcgccaacgtcaagatctttagcgctatcaagaaaaggctcctcgacgacaaaaagggcaaatgggcagaccaacaacccgaagtcatatgggcgctgaacacaacagaatgccgagcaaccgggttcacacccttccgcctgatgtacggatccgaggcaatgacaccacaagagttaaagcacagatccccatgaacaaaccaattagccatccctgacgtcgacgaatcaacttccaaagatcttatcgatagagaccatgtcctcgccttgcaggccctgaacatgtatcaagctcagactaaggcatggcatgacaacaatgtcatcccaagagaattcaacgaaggggacttagtactcacaaggaccatcagaatagagtcccggggcaagctagagccaaagtgggaagggccatacatagtcaagacaaaagcatcgcaaaacgcttacaggctagccacatcatttggcgaagacttagagcattcatggaatatagat

SEQ ID NO: 178619 - DNA, 307 bp, Zea Mays
gtgggtttatttcgaaatacttgagggtctattatgcaatatgcacgcggccgaaggggtttgaggaattctaagccatccaatctctcgtgcacggctaggattagattcaccttcacaccgaaccggtatgcaccagtggccgcaagatccaaaagctatggtctcgatttaattatggccagattccaccacacccgctcgatcgaggatccatggccaggagtcgatcgaagcaaaggggtacgtggcttctaacctcggccacacaagtcacgtcaaacggcgacgggttcgtcatcgtcac

SEQ ID NO: 178620 - DNA, 341 bp, Zea Mays
ggtgatcgccggagataccgccacggtagaagccacctagcgcttgcgctagtgccttcttcttcctctagccgccgcgcgtctcgcccgattcaccagccaccgccgttgagccctataaattgaagcctccaccagccccacaaggtcatcagctacccagtctccgagaatcgttagcaatcgttcgccagagctcgcgaattttgaattcgccccaaatcagttctctgccaccccgaaatccacctcaccgcggccagccccattccggtcagttcatcctcccctctccctcgtttaagctttctcatatgtctacgatgcttgccgacccacgc

SEQ ID NO: 178621 - DNA, 458 bp, Zea Mays
gcggtttgcggcggtgagaaccggccgctggtgaacccgacgacagttcctcgctagtggtccggttctggattgacggaatggtggcaaagcacgggcgggggtagggggtcacggaggtggagtcaatttggccggtggacgcttgggatggccggtccacggtgggtggcgggctccacggcggtgggatcgccagcgaggccaacaggtgtaataggagaggggaaaaaggtgtgtcgtgctcgtggtgaagtggcggagctcaagagctacactaatttgactagaacccaacagagagaggagagcggagctcaccgaagatgagagggacgacggcgtcgagctcgattgggtccgagggaggaagatggagtggctaaggcctggtgcggtgaagtaggggctcagggccgtccttttataggcggccggggaggggtgggaaggggagg

SEQ ID NO: 178622 - DNA, 490 bp, Zea Mays
ggacccccctgtctcgaaacgccgacaagttgttttccattattgttgttggggaccagcgcaaagtagctagagataaagaagaaagtatttacaatatgctcgtggcaaggttgagcgcggtgtggtatctttggtaagaagttttgtgcagatgatgagggactgttagaggtgaactagaggtgcgtcttgtgagcaactattgccttctgatgtgaggaaaggactggaaaaggaagaagttggccaaaaatccctgaatagtgggaagccctgccacagaagtcggtaatggtaatggtagcgccgcgatatcgaacccaaccgatggccgtgatgtaatgtcacgtaattgtcaggtgagcctattcgggacagcaaggtggcaacgcctaggggaaaacgcatggggtaggaaatgcaatcgcggaatcatccagaatcgaatcgaaaaggggagagaagctgacctgtgcctgggcggtct

SEQ ID NO: 178623 - DNA, 862 bp, Zea Mays
ccatcctttgatgctatccttcagggggatatcttggtattcaactttcctacccccaccaaagttcaaggctagccccaccaactacttgatgatgtcccccaccatccccggcttacagtggtaaagatacatccacagtccaaagtgtgggttaattccaaaataggcttcacagagatgcacaaagatggagatttggagaacagaattgggcttcaagtgagttagattaagagagtagaaatcaagtggccacagaaaaagggggaaatgggcaatcccaggccccggatcaagaaagggacggaaaccacggactcatgggtatcctctataggcacggtaatcccttgccaaatacgctaggaactcaactccttcgagggaagagcaccaattttgacatggtggagcaaatcaaatttagagacaacagaagcatagttatcgcaaaaggggagctggtcattggatcaatagggggatgacgtccatagcgcccctttcttctttgtcctgggtgccatgagacctcatgaaagcgtggaatcgagcatggatccgccaaggcacgagaattttggagtggagagttgcggtgaaagaacatacgtgtccactacaaacctgccacaagtgctagtgcgagggaaacaaattttcagatccaagggaataaatgctaagacagatgagctaagtcgaacgaactaagtcaggcagaaaacacacttctatgcagaattagtcgggacacaataaaccaaacaaaacaaggaactcagtagcagcaatcaaattccaaatgcagaatgagacaaaaggaaactcaatattccagataagtaaaactagcaag

SEQ ID NO: 178624 - DNA, 488 bp, Zea Mays
gtggataacgccgggaaggaataacctgcacgtggcgccatctcccaagcccagccggggacttcaccggcggccaccgtggctcggtaacttttgccgcggtgtcgctcatgccgcgatctgcctcactgtgcctcctaccgacgtggtatgcatgtgcttgtgatgctatccgtggccgaagaccatctgtcgggtcgccgtggctataaatagcacggtggtccacggcgacgtgagatcatcccacaccgtgagttgcattggagccaaattcgcgccacctctgtccccttctctcaaattaagtgtgcgcagtagaactagagttctttgtgaagccatagcacccgctcccacccttaatcatccacccgagctcttgaatttcaaatttcccccaaatttgtctctgccaccgcgaagaacagctccaccgtggccaatccgttctggtaaggcaccgtccaaatcaagcgttgttttca

SEQ ID NO: 178625 - DNA, 311 bp, Zea Mays
tcaacaaacaagtgatggttatgctcatagattctgggagttctactagctttatcagtgagcacatggtgaagcagttgggtctgactgtggtgccttgccagcctgtgcaggtgaaggttgctagtggggagaagctgatgagtgctactttggttcaaaatctggaatggtggtctaatggacatttctatcatacagatatgagggtgttacctttgggagcttttgatgctattctagggtttgattggcttaagcagcacagcccaattgagtgtgactgggagcataagaagttgcagtttgtg

SEQ ID NO: 178626 - DNA, 485 bp, Zea Mays
cggacacactgatcaggctatattgagttatggcattagctgaatattgactgcgccctggcaacacgatgcagtatttgtgccgttcgaacttggctgcgtcatgtgattgctatgtcgcactctcacttaatcggaccactcccgttgagtcgaaccgccatcactgagtcgcgtatttttcgcatgccctgtaggcactgtctgtcgtgatcattgagccacaattgcgcctgttgcgcacgttgtgtggatttatcgtgtaccccgattaccgagccataattgtgtatgttgcgcttattacgaaggcttgttgtgttgtcgtatctctgatggtcgcacacgcgttgacgccagatacactagagcttgtactcgcgtggattgtggtgggttgttcaagcccctgaagtcacatcataacgcaaccttcgtaaataattttgtttagctctatttttttatttgattgtgttgtgtgg

SEQ ID NO: 178627 - DNA, 777 bp, Zea Mays
aagaactgctacacttgggccgaattaacctctgccggcccacctcctttcctgttgtcgcgcctgcacgtttgggcactctcactgacccttgggacccacgggtcagtcccacagcccctttcttgggcgcgcgcggtgaccctgtcgagtgggcccggccatcagtctctcaaaacgcgctcgtcgactcacctcactgcgccgttgggcccgtgtgtcagccgctcctcgcgtaggctaggccatcacggactccttccctgcagcgaacgccgcacatcaccgcacggactcggtctctgttcatcatctcccccaaattcgcatcgagctcaacagaccgcgcgcttccttcggaactgctccaattcccccccccccctactccccattaaatagcgccgtgttgagatccgccaccgccatcgattcgtgctgcgttcattggctcgggtcgtgcccttggagtcctgtggagcaagggagaacctcgccgcgggcttgcagatatcgaggaagctcaggggaccgctcggagccgatcaattgctcgccaaatccgccacggagccgccggtcaccatgggcgggggtctacgccgcatgagcaccggtatggaagctctcaccaggatcaccattttcccctctatgcgatccagtcgtcggtaggatagggggcacactgggtggggaacgagtgtagctccggcggcactgccgtcgtgcggggaccgcggctcgccatggcgctcgcctagggatgaagaagct

SEQ ID NO: 178628 - DNA, 459 bp, Zea Mays
ttgttgtctacgcttcgcttggatcgatcggatttggagctttggggcagtagagcggggaccatacatcaccggcgatggtgccgccgtggtacctctgcatagtcgcccttgagtcgttaggtaggcagggccccgtggccgtagatctgaacacgagcagctgtgattggggcctggtggccagttcaggcgggtgaatgtggttcgcccgatctgcatcgatggtgtggggttgattggctggttgctctgatctcggccgttgatcaccaatccacttgcccgcgtcccataccgcttcagtgaaacctagatctcatcctgaccgcaaaatcataatcgtgtggtgcagattctaagttaccccttcggcctcgtccgttttgcaaatgagaccctgtagttttattgaatgaacccacagtcctcggctgttgtacactaattgcggtcagg

SEQ ID NO: 178629 - DNA, 722 bp, Zea Mays
aagaaccaccaaatatgatatcattcacatatatttgaactaacaaaggatcattttcatgcttgaggagaaaaagagttctatccataagtctatttaaaaaccctttgctagcaagaaaattttcaaacgctcataccgaaatctaggggcttgtttcaaaccatacaaagcttttaaacaggctcatttttcacagcaggggtggcagtcttaggtggagtaagcttgataagtttggggtgactgaagatttctctaatggtttcaggccactgcactcaccaaccttaccaaaattagcgacactcccatccttagcagcaaagcctaaccctagtctgctagttcccctcttgaactggctaaccatcatgcccaattagggatcactgcatgatacccagctcaagatagattgaactcatgtgttttcttccttgatccttgtcttgtcgtgcctgcaggactcgagagcagactgcaaaccctcacaaagtgcacaatgcgtaggtgtagatgcactcactgagctagccttctcaagcgaccctatcctactatttctcttcgctagcttagtctgcaagttaggacatgtagtacacgcacctaataagctagccctagatcccaactcgtcgtgctcatctcgtagggtggcatacttggtctgcaatgcagtgatgttcaacatgtgtaggtgcacccatcacacctag

SEQ ID NO: 178630 - DNA, 614 bp, Zea Mays
ggcccggatcgctagtgccgagccattgcccccgcgcgtccccttttctctctctgcgccgtgggcctgccctgtcagttccgccccctccgcgctcgccgtggaccagcgcgtgcgcactcgcgcacgtcgccggatttctcgcccacgacgcccacccacgcacccagctcccttcttagagccccgccggtggcccacgcacacccctcgcctcatttcgctcagcttcatgctctctcgcgctctactctcatcgccagacgccgctagagacccgcgttcccggccatctagctcaccggagaccgctccaagcctccctgagctccgccccgaggtgagacacccgtccccgtgcccaactttccctattgcgccctgtgttcagccaatttcaccttcgacgttgctcggtcgcggtggtccgccgtgctcgcgctgtggccagccgatttagcctggtctagttcaccggagtaggtcccagtgtcacccctgcatctgcttaagttagccaaggccttaccgcgccttaagtcccctccctgtggccggaatggctcaccagagttactccggcccacccgaggctttctcaccgccgttctccc

SEQ ID NO: 178631 - DNA, 501 bp, Zea Mays
cgaagcttgactttcgcattcaaacgaagctccagtttagtgtctgcttcgtcagaagaagagcttcggaagaaaggttattaatttccaagcaattttcaagaaattcaaaatcaaatggctagagtgcgttctactgctagagctgagcgcgaaggagacgaagccgaagctgcagaaactgttcctatctcggaagcaatgaggcgatctgggttggtgacatcggaagacacccctgctgccgaagcagaacaagcagatattgaagagactgattctgaaggtgatcacggtattgcagtaccaagcaagcctagccacctggactttggaaagtcaaccatctctaaggctgattttcctaagatggtgaagttgggctactttagcgaagatgagaaaaggctaattcactttggtggagaagagactaccccgaagccacagaaagatgaaatagtgattttcaagagtttcctcaaagctggtttgagattt

SEQ ID NO: 178632 - DNA, 403 bp, Zea Mays
tcacagaaaccaaacgacgttaacaacgccgtcaggttgctcgggcagacgacgaattatgacggaaaagtgccttcctctatgaccacaactgatcgtcatagaatgaattcacttccatgacaacgcgtatttcgtcacagaatgtatacacatcgatgacgaaaatgggtagtccatcacaacacaacaaatgtgacgcgacccctatgaccaaatcgaactcatcacaaattcaccacaaatctttatctgtgacgatatatacacatgccgtgacgcaatacgaacgtcatcgatgataagatctctactagtgaggggcccgggtcaacaagtcatacggttcgtgagccgcacttcgggtgcagaaggaacgaaccaccgcacgcgcctgtagagc

SEQ ID NO: 178633 - DNA, 488 bp, Zea Mays
gcctcagccaggcccatgggatacgcccaaagactgcgttcttcatgagccttgttgtgctcatcactggctagaccctcctcatccccgaggctgcatcagcgtgtgatagggtttctcatttgtagctgtcactgtcgaggtttccctctcccgcatcctctcgccctcgtgctctccctcaagatcttgcaccctcccctcccctcgctgttgaggcttgctccttccagggatcgtcatgagtaaggaggtttgacactctcttgacctctccccctagacacgagctctttgtctagatctaagaatcttgagtactatctattcccctgagctcttcatctagatctaagaatcttgagtactaatggtagttgtggttgtgtacatcatggtttctggtttttatgtagtattgtgcaatgatgttcgcatatttgaccctctcccggtggaagtaccgtttgatgtacttaggaccttgg

SEQ ID NO: 178634 - DNA, 664 bp, Zea Mays
cacgccgtgttgctggtaagcactggcgaagttcgcaacgaaccgcacacagagctcttcccaggagtagattgaccctggggcaaggttcatgagccaagtccgggttggtccggacaaggcaacatgaaaatatgtcgccatcacagcggtgtttccacctgctgccgtgatggcggtgacgtacacctgcaggaactccgacgggtttgacgttccgtcgtacttttccggcaggtgcagccgaaacttgggcagccacgacgccgcgcgaagatgatccgcgatggtggcgtagcccacgccggccatggggacacccacttgggaccgggtgcccattggtgtctgcggtgctgccgcaacgaagtcttgatcgaggttgcggccctcgatgttttggcggcgctcgcgcgccctctccaacgagacccgggcgtcctctcccacacgcctgcagtcgagttctacccgaaggtcgttagtctgtgcgcccctcactgagggtgagcgcacagatgccgacgcctcatgttggcgccgggatgaccgtggcctcgacctggtcgaggtagaatatgccatgccgagcagtcggtcgacgtcgtcccgccattgcttcatggcccctggtgaggctgtggagcttggagggtgtcgcagc

SEQ ID NO: 178635 - DNA, 274 bp, Zea Mays
ccaccgctagccggtgggcctgccaccgcgggcaggaagttgtagcctcgttgccctggacatcgacccagtgataagcgctcacgattgaatctcaaataccccatcatcatcgaaaatcatagccgttgatctcgaacctattggcgagatcagatcgcggaatcctttaatctcgagcgttgattttagatccgaccgctgtgatagaataccggttcaggtgagataagtctctgatccctgtcgtcggatttggatcccatggctagca

SEQ ID NO: 178636 - DNA, 787 bp, Zea Mays
gagtcagcgcccgtaccagcagcagtatcttcagaacagccagcagggaggtaaccagtatcagaggcaaaacaaccaggcacctcgcgttctgccccagcagcgaatcagaacaaccaagcagccccagcacaaggaggaggcagaggatgcttccactgtggagagcaaggccactaggcgatgcattgcccaaagaagatggcgcagtagcagacaaaccctaatgccccagcaaggtaaggtgtacctcaacaagcagcaggtaatcgtggccatgcgtacaaccgtggaaaggtgaaccacttggaggccgaagcgatccaggatgcaccagatgtggcagtaggtatgttctcagtcgaatctcatccagcgaaagtgctatttgatactagtgcaactcattcatttgtcactgcaacatgggtagaaatgcataacatctccatatagtcattgatgctgcccatgagggttaactcggtcggtggtaaagtgcaagcagataagatatgctcaaatgtaagggtggaaataagggggatagggttccccagtgacctaatagtaatagacacccctagggtagatgtcatcctagggatgaattggttaatgaagtatgaagtgagtgttagctgtgacaagaggaccgtaacattgaagtccccgcccggagagaaggtagtggctgagctaagaatgcctaaaacagcgaaaggtgactgtcaccagatttcggttgatagcaaggaggccaacccgctcgagactctctgggttg

SEQ ID NO: 178637 - DNA, 572 bp, Zea Mays
caaaattttcgtatgtgtctgatcagagcggcgccagccacagcgcatagacgctcagccatccaatcaggctgcatgcaaacatgctttcccaatcaggctgcatgcaaacatgctttcctggttgctgctatgacccattcaagttttcaattagaaattcatcgagtcatgtaaaaactagcagtgaatttgactgtaaaatacaggcgcccgagaagttgtgcagcccggagtcctactagactacttttaccggcatgtcagacctacccgtgtcattgtcgccatatggagccaaacagaacagaaattatcctcacactatggccatcataaactaaaccaagtgaagcctgttttaccgtcgattgaccatttgccttccgtgagcacaaaaaaggaacacaaaaccaccgagtttgaaagcatcaaaatgatagtggatcggcgacggtttcttgaggcgtacgtgggcgctcggcgctcaaacgccgtcacgtccacgccgtctgacgtgtttctgtcttgagctagctgctcagcaactttgacatggaaaccaaacctcc

SEQ ID NO: 178638 - DNA, 788 bp, Zea Mays
atctatctcggtttagcacaattggttgggtcgataagttatcataacacacagggatgctagaacaaggacaaggacaacatgatcggacctgatttgtgctggccatggcgaggtgttcttgcggcttgtttgaaccgatttgggggaacagagaaattcgcgggctctggtgagtaattgaaggcacgagtgggtggattggatgcttgaatacctaatgaagctgagggtgtgctcaatttataggctccgggggcggtggcttatgaatcggggatggcgcggtggtggccggagagaagagggtgtactggcgcagtgattagtggcttgtaccgtggcgagctcaccgacaatcaccgaatatgcttaacgcgacctactgcgacgtggtaatacgcccaggtacgtggcaaacggccggcaggcagccaacgccggcgagcttatctgtacaggccgcaaatcatgggggcacgacggctggccactagagttatccctaggtgaagatcttttgtcttggagtattatccggtcattggggagcgtgaatcataatggcgacgacgattcacggcgaggattcaccggcggtgaggttcactgaacctgactcgaccagggcactgtaccatgggaatcaccatcagagtgcatgacagcccatgtttagggttagatttctcttaaatttctatggcaacttgtccaaagttctgtaacaaagttgtagatcaaagattcagctataattttgccacagtagctatagccaaattcct

SEQ ID NO: 178639 - DNA, 481 bp, Zea Mays
tgttgtgccatctctgggcagcctcacataaatcactaaaaattagatggcaccaatcaatttgagggaatcgctccatttcttctgtaagtagaacctcattgaaagaaatagaccagctagctgtcgggaatagcagccggttgaagagaatgagaaaaaaacatctgatagaaagatcatcatcctggcctagcctcaatctgtcttggagctttgaaataacaaactcatccttgctaatattcaatgaggactgaagtgttgccgcagcgttcgcttcatcaatattaaggggctttccaccacccaaatttggaagacccaatatctgatggacaatctgcttggtgattttgagttctttgtctggaccaatacgaagagtcatgtctctgggatctagcttctgcatgagccaacagagaagtgttcgacatccaattgcatcaattgtcatgtcaagaatactagaaaatcc

SEQ ID NO: 178640 - DNA, 453 bp, Zea Mays
ctcaatcgctcggcatttacctctaaaagtgccgatgatgccctcagtcgctcggctgttatttctaaaacaccgacgttgtcctcagtcgctcgccatttacctctaaagtgccgatgatgccctcagtcgctctgcgtttatctctaaagcgccgacgatgccctcagtcgctcggctgtcatttctaaaacactgatgttgtcctcagtcgctcggcatttacctctaaagtgccgatgatgccctcagtcgctcggcgtctatctctaaagcgccgacgttgtcacccgtcgctcggcggctatctctaaaaaacgctggcaatgtcacaagacactcggctgtcaactctaagagcgcagacgtggtcatcagtcgttccgacgctgacatagtttcgtcatcactcggactctatttcaaatgcgtaaagtatcgacaacaatagct

SEQ ID NO: 178641 - DNA, 676 bp, Zea Mays
tgaggaattggaggtgactcagtcgatccacgctcccctagaagctatgccctggttcccagcaatctgaagaacccctccaatcaccaaccgagcagccagcgttagcgtaccgaggttttcccctgtggcaaccccgctttcttttctctttgtgcatggtgacagagcttggtgatttgttgacgcgaggcggtgctaggtttctgggagaggcgagcacgagcggatatatatgcgccataggggagaatctggatagaggtggtgagcaaccgatggtgaaggcgaaggactgcggcggcggcaatcttcttctctctccctctctttctgtctctcaaccgcggtggatctcggtgagctggggagcgcgagggcgcagagttttatacactgacccgaggaggtaacgagcaacaaccggcgacatttatgtagttggatcttcggtcgttccgagctaatgccgcgcaatggggaggaaggagtctgacgtgagatccgtgaggttgaggattgtgctaacaactagggcccacccaacagagacacgaagtgtgaaacgcgggcgcagagtgcggatggatgaccggccgagcggctaagggtgtgggtccacatgtcggcgcagtggggaggattggctgggctggcaacgcaagtgagatgggcc

SEQ ID NO: 178642 - DNA, 924 bp, Zea Mays
ggcgtatagcaatggcagcgatcccaggatcgcacagtcgtttaggtcttaacgtgggccccgtttcatcctggtgcgttgcgttagagaacctagactgccaggcctgaggagatgaacttggctcagccaaagaaaatgtctcagttgcatcaccgtaattgaaagtctttggacctttgccgagaaaaccggcctagcacaagagagcgtgcttagagggatcacctcgtcaccttccttccatgagcggcttgttagcttgtttaaatttctccccagtgacaaaactggatctgagatcagcctcgtcatcttcgatctgctgacaaccttcgactgtctcgcccgctgccatcacctggccgagagtaccaccagtgtgatctgggcttttggcagcggaccgcaccatggcttcacccccacaccagtcgatgtatctacaccggacgaacaacatacctttgaacgcgactccggcgatccatgccgtctcatctgaagataggtctcccattcgtcagccgtgtacccagctatggtcaacgactctcgaagaacatcgagttcatttgcctttactaacatcggtggcaaggtctatggtgaagttatgtgtctcccaaagatatgcacttagctctctgcatcctccctaacgtggtcctgtgccctagcaaatcgatcctccttccggattgccgatcttctcaccttcgccacccggaagagcttcgtccattggaagcgaacgagcgacactccggtctgtatcatgggagtggccccatcacgcaactctttgcccatgaaaaaatacattgatttggtttgattgttggtgcctgcaattggacatacccattcatatatataggggaaggtctagattcttacttagctgttctctaacagaatcca

SEQ ID NO: 178643 - DNA, 292 bp, Zea Mays
cccgagccgtctcaatcgacgttagcgccattcccgccatcatggcgagctcgtcggtgctcgccgtcccctccatccctctccctcccccgggcgcctataaaagggcccgcccgagccccgtcttcaccacaccagctccggccatctcctccgctttcccccgagccaatcgagctagcgccgccgtgcttcccccatcgctccggtgagctcctttccccctttctagtgatcctctgtccaattaaaccgtgatcgaagcttcgccacactctcacggtcacaaggc

SEQ ID NO: 178644 - DNA, 405 bp, Zea Mays
cgatcatggcatgtgcttgcgggtgcggggacacggacaccacccgccgtgggctatgctgctgcagcgccagggtccccgggcgcgcgtcgttgatcacaggatgcacattgaggtccccattcagtgatagacctgtataatcctctagcacaaacccctggaaggaccacaagaaacataaagtaattggacaagtaggccaaatatcgagaacctcaactgtcccgaatcactaatttctggggtgactattgggtcatgcagattacaattctcagaatagagcaaacaaccctaatacataatccctctagaaaccaacatcagaagtccaaaactactaaataaagtaacacgctcgtaccttgccagctagctcaaggagttcctttgcggtcccac

SEQ ID NO: 178645 - DNA, 603 bp, Zea Mays
gtcaccttcgacatagtcgacatggtctatctttacaatgccataatggggcgaggatccatcaataagtttgaggcagcaataaacggactctacctatgcatgaaaataccaggccctcaaggtgtaattacaatatatggagatcaacaggcagccaggaacatagaaagagactttgtcccaggccagcgcaatgtgcattgtctaacgacagaatgcaaagacaccaacagtcctcacacaaccaaaaacaaaaaacttaatgcacaactgcagagtaacgagggaaccaagacagtccccctcgaccccgcaacccccaagcaaatagtcttaatcagcaaagacatccggtcaagcaaagaagcaagacttctctcctgccttaaccgcaacaaggatgtcttggcatggtctgctttagacctagtcggggttagccgcacagtcattgagcacagtctgggcattgactcctctgtgtgcccaaggaaacatcgaatgagaaaaatgtccgatgaaaagacagaagctgcgaaagctgaagtgcaccgtttattagaagcgaaatttatcgagccaattgcctaccccatctgg

SEQ ID NO: 178646 - DNA, 873 bp, Zea Mays
gatctctgatcgaaggttgttgagagctacagagcagctctcgtcttcagcgttcttttgcgccctcagcgcgttgctaaggattaagccctgcaagaaataataaaggattagtgtgagaataaaagacttcattcccaagttcataaacttcaaagttcacttctataccttcagactgttgtatgcgaggctatccacgaggttagccttcgtcatggcgcaaaggctagcttcgagcttcggaaatcccatacttctggccatctcctggtagacggataactctttgttgtccgggaggcagtataggaaatcatctccgtccgtcccgttaaacactaaggcccccttcaggtactctagctcctgggcatagtgtttggcttcaaaaacttcttcttcggacaatcttttccccgaagcatgtcgaataatatagtcgacatttttagacggtcttcgggagcaggggaactgattttttcggtcacatccatctccacagctatgccgatatctggaaattcctcggccatttgcttagttgcggcaagcttcgtctcagcaggcatcgaaggcctagttttggtttcgatgtgagttgtagcagcttcgacaactttcttcataggagtaggagtcaacactcttgttgtctctacaacgacgtctagtacacttgccattcttctccttttgggagtggcggcggaagcttctatgatcttcggtagttctgtttttttctaaaggacttagaattttaggcagcactattgttttctctatttctggtcttttggccacctcatctttagctttggctgcctcggctataggcaccttcggcactacagtcgattcttcagc

SEQ ID NO: 178647 - DNA, 358 bp, Zea Mays
ggaacatggacaagtgtaggaaggagtacatggaggagtaggccatgctaatgagatatgacagtggttggtcaaatcaaaacgatggtttactaagtcaagcggacgttggaggacatggtgtcggttgattgaggactaatggtgacacccgttaaggctatccgcagcggttccctctaaatttatctccctatatcgttttttgcgtcacattgttaatatttcatcttctacttttcttcctcccgcggtcgtttccccctaaattcacctatttaccccaccacaaacataaaatatcatttccatatattttcatcattcattgccatttttctcaactaacaaacaatag

SEQ ID NO: 178648 - DNA, 441 bp, Zea Mays
gtgggataccttcaacgtcaccatcagagatgctacctgggcggagtttgaaacggctttccgggagcaccatgtgccccaagggctcgttcagctcaaggaagacgaattccgggaactgactcaagacagaagatctatcagtgaatatgttcacaagttcacggagttagcccgctacgcgccagatgacgtcagtaccgaagtcaagaagatggcccgcttcctgaagggactcaggccagaactcaagaccattctggctagccaagacttcctcagtttctctcacctctccaacaaggccatgcaagtggaaagggcaaaggaggaggaaaaagggcatctcaaaaggaaattccaagtcctccgagctcagcagcaagaccggcaccagaaaactcgatcctttggatttccacccaagggaccaagcttcag

SEQ ID NO: 178649 - DNA, 476 bp, Zea Mays
gcaaggtcagacagtggtaggtggcacagttgaccatgattctggaccagtatttgacaagactcctattgggagtgtttctgcaccaggcctcttcttatctgaattagaatgtgctcgcgctcttcgggcatacttgtgttctaggttcattgaattagacaggtacatacttttcaaattgtttgacttggcataatgtttaattcttattaattctgattgaacaacatcgtggcaatggtattgatactattaagttttattcaatctttgtacccaaagatttagccttgaatagaagcgaaaggaaagtagctatacacatgactgaactttgagttgtagcttctataggagttcaactataggtctcttgttgttaaagagaaaaaaaactagttcaaagcctagtgatttaaagcctgcaatgatctatttctagacgcataccagggtactgaatcaaagcttgt

SEQ ID NO: 178650 - DNA, 400 bp, Zea Mays
gggcgttctcctaactcaggttgtttctccgatttctcgggcgcggactcgtggggctggccggattcctctcatcagccattacaagcctgggactgagccttccccttcactcgtggctctcactggtggctggggtcctcttccacgggtcttcttccaccattcatagtaacagactccaacagaagaagccactcacgcgtgtgcctgcgatctggtggatagggttgtgagattcctgatcccgcctttgcccgtataacgtagccgcaaaaccccccaaccctcatctcaggcgctgccaaaccaccatcaattgagaaagcatcgacgagaatagggaagaagtacaggaatcgccgcgggtccgtgcggtggcatggttgggagctctgcg

SEQ ID NO: 178651 - DNA, 1065 bp, Zea Mays
cgctgacggtgggccccgtggtcagcgaataacacaatttggcgcctctgccgtgtggggcctgtttgctagctctttcccccagcttcgtgcaaccaagtccgttgccctcgcatggaggttgcgagatctacgcgtctgctccgagttttgtggggtgggatcacccgtgccgacttgggatataaagcttcccgtcccgtgtccttggattccttgaatcaagccatacccgattacccgaacgacgtaagcctagccaccgccgtcgcgagagaaatagaggagagaaagagagtgccgccgccgtggtcattttgatgctcttgcgattggtcgcggtgcggagtcgtgtggcgtttgcggtctcctccagggcttgtggatgtcggatatggcattcgcgggcgcggtcgatcgatcgatgcggtggaattggtcgccggatatggcactcctccgcgttgccgcacgtcgctgcggtcgggcgtccctgtgtggcgattgacagtaagggcttctccatgtaattcgcattggtgtgcacgtagtgtaatcacgtccgattgggggattgggggcatcttgccggccgtgctccgtcgcggaattcacatgtgccgccgtggagctcgggtgctggcgagggaagggggaagtgcactggtcgtccattccgtgattaatggatgggattgaatcggccaggagagctattcggcgatggaatcctgggctttggtttgttgatctgtggctgggattactgcgggtgcacccacttggcggggttcgattctggccgtcgatcgcatgatctgcgtgtaggattagattctgggttcataaaatcctggtcgtcggctccggatcgtgtggctggcgctgcgtaccgattcacagtcgcaccgatctaatcctcatcgtcgactgttgatccaacgaccgagattcacacgtaccccttcgcagaaccccttttacataagagccctcgagtttcagtaaaattaacccgccgtcctattctagtataaagtaattacggttgggccctggtttctt

SEQ ID NO: 178652 - DNA, 312 bp, Zea Mays
cgattcttggtggcggggtggatgatgaccttgcggagctggtggagggctcaatttataggaagtaagagcggcggccgggaattttaatggtgacgcacggcggtcggaggggcagggaactactggcgcgcatgaacttgcgtctaccgtcgtggcgatggcaccggtgatcaacggagagcaagggtgagtcacggtgatgcggtagatggacagagacacgcggcgggcaacggcgaaggtttgacgacggtgagaaccttatccacgggcggtgagcaaggggggagggattatggctggccggag

SEQ ID NO: 178653 - DNA, 1221 bp, Zea Mays
cgaactctgacaaaatggctgcagtttcagaaatacacgttgtcccacttgaaacaccctttcagatcttcctttgtcagcttgttttttcattcgatcttgagccctttgaagatgtaacttggcctgttggagcataagctgtctggttgccagatatgtttgcagatcagcactttgacattgttcaatggttgacagtcctaactgggatggagtgtggccatacaaaacctcaaacagtgactgacccagtgcagtgtgaaaacatgtattataccaaaactctgcaagggatagccaattggaccactgtttagggcagccatggacaaagcatcgaagataagcttccacacattggttgacccgttcagtttggccatcggattgggggtgatatgcactgctgagacataattttgtgcccaccaacttaaacaattcctgccacaagttactggtgaatattggatccctgtcagaaatgatagacaatggtaggccatggagtttgtagacctctgataggaatagcttggccacagatagagcagtaaaaggatgggacatggctaagaaatgagcatattttgaaaatttatctactaccaccaatatgcagttgaatcgacgggatgtaggtaatccagaaataaaatccaagctaataacttgccaagcctgatccggtatgggtaatggcaatagcagaccgaggtatctgtttctgtcggccttggcctttttgcaaatctcacatgactgcacgaactccttgatctgtcctttcatgccaacccagtaaaacagcttcttgatgcgatgatatgttaccggaaacccagaatggcctcctatagggctgtcatggagggcagtcatcacctttaattgaacttggttactgcaacccagccaaatccttcctttatgtttgattactcctgataccaaagtgaatggctccattatatcccctgcagcaagtgtactcaaaatgttcttagcttcctcattctccccatagctgctagtcacctcagtgagccaacttggtaccactgtcgaagttgctaacacgttgagttgcagtttggaaccatcagtgcataggtttggccgtctagaaagagcatctgccacacggttttccacccccttcttatatataatgcggaattggagacccaacagcttggttaaggctttttgttgcca

SEQ ID NO: 178654 - DNA, 628 bp, Zea Mays
caggggggtaaggaaatatcgcgtcgtggatgaactccggccactattctactccggccgccgtacccgcctgagtcacagtcgctgtggataggtttgccggagttagccacctcgtgaccttgcgccacgtgccctggcgtcttaccacgtcgcagtagctcgtgttatgcatatccggtgatcgccgatgagctcgccacggtgatagccactaatcgcttgcgccagtgcatccccttctctctgatcgccaccgcgtaatcgcaaattatcgggccaccgctcaagggccctataaattgagcacaccctcgactccgctatgtaattatgcactcaacacacccactcgtgcctccaattactcaccagagccgccgaatcgctcaattcccccaaatcagttttccgacactgtgaacaagctctcaccgtggccagtgcacttcaggtccgatcttgccctctactctcttgtttcaacactcttacatgccactaatgctcctcgacccattcaattaagctagactatgccaaatcgccgggaacacttctgttgatcccgtagttcgcactgtctccatggacagggcgattgagggctcggattgtgcaattgagc

SEQ ID NO: 178655 - DNA, 659 bp, Zea Mays
caccagtgccgagctcgccttgctggcccaggtggtgatacgttggaccccggcgcgatgctccgcccggagatcttcaagtgtcttcctcatcgcctccacagcctgggagcctggggccacctgcgccgcctgagctgcctgcgctgcctgtgccgcctcgaactggtggacccgctcccctagcatccactccttgtcctccagcgcccgctctttctcctccgcctcgagctcataatcggccagcagcttatcccgcctctcaagcattttctccctgaaggcgaggtccttctcccgccaggcaagatccgccgcccgcttatctagggaggcatccttctccttgaggttctcttcggccagggcaaggctgctggccctatcatcgagcccctgatgcacctttttcaggttctccacagctgcggactgctggtcccgctgctcctccagcatcttgttgtaggcacttagcttcgcctgaagctccgtgatgacgtcctgcctctggtccaagtgcacctccttcttggccagcctcgtctccttccgggtcacctccagctcccagtcgaacaccttctggaggtccttctggtagtccttgcggtcttgctcaagctcggaccgctcgaaggcaaactggcgggacg

SEQ ID NO: 178656 - DNA, 387 bp, Zea Mays
gtgatcaactgctagagtgtctcgcgagggagacgatgtcgaagtaactgagacagcaccaacatcagaggtgatgaggcagtcgggtcttgttgtatcaaaagagcctattgccgaaggtactccgactgctgaagctgagggaatcacagttggagagggaagtggtaatgaagacgaagaagattacaccatcttgatcccagaaaaacctagtcaccttgactttggtagatctgctgtgacggcagatgatatggttataatgaaaaaattgggttactttggagaagccaagagtaggctcgttcattttgctggtgaagaagtggttccagagccgaaggatgatgaagttattgtgtttaaaagcttcttcagggcggg

SEQ ID NO: 178657 - DNA, 518 bp, Zea Mays
tccattgcttccggtcgagtcttggtccgtcgttcggcagggcaaggcggtcgttggcctcagcactgacgatcacccagtcattgcgccagttctcccacctcgcgccgccaagggtggcaatgtaggccacggttggatctgacctcgtctagaaatagtaggcatcgaggtggtccttgcccttcccagacctcaccagcacgcagaagtggcggaagagggaagtatagcccccacccccacgaacatctcgcagaggtggacgaagatggccactgtgacaccccagtgtcacctagggtttctctcaagtgctaacccaagaaccatcatcttatgtgaaccaaaattgagcatgaacatcaaattgacttaagaataaaggatccactaagcttatacttaaaagtatcatgttcaaaacaaatgggtttttcaaaaaggcaaaatgtgcaaccccaataaaaaccctaattgagccctataaacaaaattcaagagaaagggcaaaagag

SEQ ID NO: 178658 - DNA, 724 bp, Zea Mays
cttcgcgcagagaggtcgccggcggtgagcacacaacgctggcagtctgatccacatccgagcactgtaccatggcgtttcttcagtcagtcgacctgacagagcatcttggagctcgatttactcctgattttgtgaggtgaccaggctagctctctgtaccaaagttatagacctacagttaatcttcaactttgccatggagcttaccataaaatagttaccgaatccaactcaaaatcaggttcaaagtctgcctaatttcactgttactggaaattcagacttaagatgtcctgacagcctgactttgagggtgattatctccaaattcttcacaacaactgagctcacactattaagcaaaattgttctcctatgattggtctacaactttgatgtggttccctagggcaaaaaccctagaatttgaaagatacaaaggctcaaagttgaagcaatcacactgatttcagacttaggctatatagaggtcaagtggtactttttgcaattagccccaaaacttagggtttggcttgtaaatcttcccaaatgtgaaccatgtgactttatatgctttaacattatagtttttatactttagtccaaatgtgcactgtttttgcacataggcccctagggtttggatttagggttttctagggttccaatgggggtttttggtatctcaggggtataaaagtgattcaagttcattctt

SEQ ID NO: 178659 - DNA, 799 bp, Zea Mays
cggcaggctcagagatttttttatactccgaagccaaggtaggtccaggcgaagggatatcccttgaccaggtcacgacggatccagaggaaatggtgaggttggttcatgccgcgctatcttcgcggggaagaagaagaccggacgacctgaggaaagccgatggcgcgagggagcggcggccctccattgctacagcggtgctgcacgatgagcttctgatgtgcgtggaggacgaggcaccgatctttattccgcccagtaggtttccccggctcccgaggtcaccatgcttgccccgaacgcacacatcgacgagtggatttggtggcggcgctggcgacgaagttcttcgcggcggtgcggtacccgaagaaggaaacagtcgaagggccgtggcttcttgcgcgaccgctggtggtggcgcgaggcggacggtggcttgcagcgacggcacagcatatggtttctcccgcataatctctccctctctcctcgatgacgcgtttttcggtggagcgcggatgaccaattcctatgtctcaggttggacagcagggcacttcgtaaagcagaggggagatgaagaggagcgaggacgagctccaacaacccggtcgaagcgcgcaagtggttacgggagcgggatctacgacgaggagatcggcaggaggcgttcttcggtcagcgcagtccgatcctcgcggggaagaaggtttgtcaggcgagggggcccacatgtcagtctcttaaagcaaagaaaaaaaataaaaaaagaaggaggtggagtaggccgcgc

SEQ ID NO: 178660 - DNA, 596 bp, Zea Mays
gccgagtaggccagcagggtaccgtgtgggcccattcctcaatccatgtggacaggagcggcggtcttcgctcaggacaccgggtcttcgaatcttgccaaggcttgcacctagagtcatggcaagcgaagtcttaaggagcacccactttgaccaactggtccctttgcccctaagcattcgtcagctctccgactgaggcactaccttcggtgcaggttgaggtacccttcgcttcctgtgctgatgtaacctactcagtttatatttaaagtagactgagtgagggggcgaacgaccttcgctccaacatgggtcctctcaaaagagtcgataaggttggcttcaaagagagccttgacttaatcatatcttgcttggtgttctagaggcaacttttcatacgtggtgggcttgtctttcgttgatctaggcgactgtgccttagccttcaacatctagattgtgggtgttgatgtagaaggtcccaccgagcatgccagaatgtgtttctgttcgaaactcaccgacgagagactacaggcaacacgaggagccgagagggtcccggagtggctggtgggcctcgatccctc

SEQ ID NO: 178661 - DNA, 448 bp, Zea Mays
ggaacagcttaggttttaaattgtttagtaccaatgcatcatttcagttaagaaaatgacaattaagtgcacaagtgggtgttgtggcttgtctgccttttttgtaacattagtatgagtatctcactggtcaaatagtctagagaaaaggggcttggtaccgaatatccaagcattgtatttatcttccctcagttacaactgagattcttcgaatgggttgcaattcagaatcaaatgtgcactaccaatagactggaagctcgagggtggacaggccatagaatttgcctaccctgtaggcaacatatgaaacagggctatagtgaaatcactaggtgccagtgcaatgaaaatcgtgtttttgagtgctgtagaaaattaaagatgaggtgagccggtggatgggcagtaggagaaaacacttcattatgtgtctgtggattgc

SEQ ID NO: 178662 - DNA, 756 bp, Zea Mays
agggcgtcgaggttgactttcgaaagcatagccgaagcagaagctaccaggctagaagatatcgatgtgctagaggaagaacgattgaacgcagtaattcagtcggctaggtaccagcagaccttgaggcgctatcatgataaagttgtgcgacaccggtcctttgcagtgggagacttggtccttcgccgaattctaacgggggaaggacgacacaagttgtcaccactatgggaaggaccgttcattgtctcataggtcacacgaccagaatcataccggcttactcagatggacgacacagaagtggggaactcgtggaacacagagcacctcagaaaattctatccttagcaagacctcaaaattcttgaagaaacattgtactttgtaaatctgaggatttcatcatcaataaagttttcattctctaaaggcactcagactcttgactttaactgacctcgattgggttggacttcaaatcagcacgcttactcgactaagggtgaccactataccctgctaacggagcaatcggcttaagtcggcgattacttaaatcagtgcgacatgctcacacttacttaactaagggtaaccactataccctgctaacagagcaatcggcttaagtcggcgacgacttaaatcggtgcgacatgctcacgcttacttaacttagggtgaccactataccctgctaacggagcaatcggcttaagtcggcgacgacttaagtcggtgcgacatgct

SEQ ID NO: 178663 - DNA, 420 bp, Zea Mays
ccattgttggtgcttggtaccgacgacacactatggggtataccatacggtgcttttgggaggacagtgataacgatcgcacctcgatggtttatgccaaacacgatggaacacaacagattatacaggttcgtgccacctagatgcataataccctacgtcctatgtgttttctggtccccacttcgaccccaacattggctccgcttcttacgcgcacctgtccccaccctcgtccatgccccatcctcctcctccacctgctcatcacacatcccatctgcccatcgagataggaggacctcatgtgcccgcttgcgctgctccacggccaagtcactctcctcgccactgctaacccaccactcgtgacccttgtcgtcacttgtgtcaagcttgtctggcgtgccgacatgtcga

SEQ ID NO: 178664 - DNA, 442 bp, Zea Mays
aaacaaaaggcagtttgtgtgccttctttttatagtttcagaaatcagattgctgttttgaacttttggtgatactatttgtgtaacggctcgcgtctctattacggtttggactaggaccagcatagcaccattgtggaacatttattcaacttgttgtggctaacgtggtactagatattccttggaactattgttttagcagccacctataaatccacaaatttttctacaacaccaccaggttgtgctagcagccactgttgttgttcgtgctgtttgccagcgcctcctgctttgcgtggtgagaacttgtaagaacttgtttaaccagtttgagagtgagagattacaacaatgattcctagtagtttatagaatcaaagatattttttattgtttcttgtctttactaaacatggcaggtgatatggacattttt

SEQ ID NO: 178665 - DNA, 1134 bp, Zea Mays
gataattgttttggctctggagataaaagaaaaagaaaaacacttcaacagtcgtgggctcaaactggcttaggcggcccaacatcgcacagaagcgcgcttgcgcacgcgtccacgcctgcgttggccatcttgcaaaagggccctcggggtttctggctaaccggaaacagctcttgccactgtttacagagtcactgaccgtttgcataaacaccctcctatttctaatcctttgcagaccaaagtccctgtcgacgagcgacgccggtccgcgctccggcgaaactattccggccagatgacgccatgactggagttctcaagcgacaggaaccaaattagctacctaccgcacctttcccctcacttaatttctgaattgaagctctacacccttctgcccacggtgtcagcgcgggtgattaagtggatcaaagtgttccggatcagcgagggctgggctggctaaaatgaagctagagaaaggttcctgggttcactagagatgacgcacacgccaaattttggactagacacgagcggaaaggtggggcgacggagagggtgccatggcggtgtttgacagtgcacgggtgcgttccggcgatgggcttcggtcaaactccaaattgttgcgtccaggggcaataagagatcacatactaactgaaacaaagagtaatttgatcattactgaccggaggagcgctggccacgatgaggttgggtttcgggtgtgcttgaactgaattggggcgaatgcaaaattagagctcgtagggaatcggctaggagcaatacttggtgtggaggtgcgcaatgatattgcgaagctagttacgagctcaatttataaaaggcttcgtcggtggcactcaatttggtcgagcaacgcggcggccggagatgaggaaggactctggcgccacggtttcgtgtccaccgccgtggcgggctcaccggcatcggtgaggcagcagcggggaaacacgatgacacgacagaggtgcccggatacgtggcgtagggtcggacgacggctatcaccggcgttcttatcgtcttccaccgcggtgacgcagtatggtggccggagttttttttaatggctggaacttatccacggcggcg

SEQ ID NO: 178666 - DNA, 624 bp, Zea Mays
gctcctcgccgacgtcgaggagccgacgctgctgtaggtctagagttcgccgtgtcaagcttagggggtgattgttagagttaagcttgacagtgtgctggttagcgcgtgcgtgtgtgtgtgtcgtgttgtgtgcgtgttcgagttagttggagtggtggcgcgaaaatcgccggccgttgggcgcatgtgggtcgtgcggacgaacgcgtcctgcgggcacgacgcagcgcacaggcgcggacatggcggggggccgggtggtggaagggagctctgccacggctatatgtagcaccactctctgctgtaatcgctctcggggtgtccagtaaataaaggccaacatacagacaggtgagggagagcttctcgccggagcgttcgtcggccatatccactgttcatctccttcctctcggtgttctctgttttttggtggtgtgagcgctctttcttgagtgagagggtccaaaagagtgtgctgccgttcagaaatatccttccccttacccgtccgaggagctaaaatcttgccacatctcctcctggtcatcgagggtgaacgtcgacttgccctccggggaagcacagtcctaccacgtaatccgtggccctccccac

SEQ ID NO: 178667 - DNA, 383 bp, Zea Mays
cccgagtgacgtcaatgaggccaagcgcctcaagcaccgaagcagggacttcgtactagtcggggaccagctatacaagaaggggatcagtcaacgcatgctaaaatgtgtctccgaaaccgaaggcattcagatcctacgcgaagtccacagcggaacatgcggctcccactcagggcccagggccctcgctgccaaggtgatccgtcaaggtttttactggcccgctataatctgcgccgtgaatcgagtcacgaggtcgtgcgaagcttgccagaagttttctccccgctcgggcaacccttcacagttcaccaagctgattgcccacacatggccacttcaacgctgggggctggatattgtcgggccactacctacgg

SEQ ID NO: 178668 - DNA, 527 bp, Zea Mays
gtagatcacgcacgcgctcccttccatctcccttctttatccccaatttctcgccaccaccagacgccgccgcgcaccgcccgaaaggaaattcgtcgccgtcgtcgaacgccggaaccacgggcactcgggttgccgtggttcactccgtcgctgcatcgtgacccatagatgctcctatcgcctctgattgcgctgttgacgtcgctacgccgatacaattgctcgtcgtagttgcgcagtcgccaccatgccgcgggtcaccgtcagcgggcttctacgtcgcgcaatccctcggtatgaagcccttgccgcattcacatgttccttggctacgtgtagcatagatcggaccaagggatagtcgtaggaatcatgggcgcgcgaagtctggccatggtgccatcgtgtcgtactgctctgccgccgcggttcagtgggcatggagtgaattaacgcaggagctctacgaccgttgatctatgaaaacacgacccagattagatcttgaaatatctgttcggctt

SEQ ID NO: 178669 - DNA, 440 bp, Zea Mays
ggagagagagagacacgcacgaggctgtgcagcagcggcctatctttataagcaatagaccgctgcaggaacaaagagatctgaagagagagaactggatgagctagagggaagttaggcagttattagctagcttctgtcaaagaggagagagatgtttagggggcagcagcagtctggaagccacgaggagcagttaacaagcgaggtctggtatttttctcgttttgtttgtctgtgatttacttctcaagagtttcatttagttgtgttttcgttcgatcgattatgtatgatgagttcaggacacagcgagtttctattgttgctcttcatctacagtatatgtaaagggacttccttcagatttgcagttctcctagaataaatatatagatatgaatatatgattggaactaggatcgattacgacatgtttt

SEQ ID NO: 178670 - DNA, 553 bp, Zea Mays
gaactacacaatcatattctgtgaagtcgtcaacataaatttgtgcaagttcaacaagcttatcttcatcatagttggcaaaagaattactaggatcaagacaagcaacacatctcaagagttgagtagacctttcagcaaaacgattgttaaactcaactataacttgatccaacaccacattgaatatttcatgatgaagatgctcataataagtaaccaactgtcctctacggcctctagaacattctcttctaactatttccgctgacatatctaggacaacaatattatgcttgagacaaaaatccttggcctcttcaaaaatagcatcccaaccatggtgtcttatctcatttaatttttgcaatgtgacaccaaccaatcctatggcacgaataatattttgatctttcttttgcaagcattgtgacaggtcattagtattacccaaaactttgatcatgaggtgtaacacaagaacaaactcaaagctctccattttctctaataaacctgtcgatgtggttctttgtgctagattagtggaatc

SEQ ID NO: 178671 - DNA, 380 bp, Zea Mays
ggtgtctcgatagttggtggccgccggtaatggccaccaccgtgggagccctgttcacgccgtcgggtctgaccggcaggggtaggagacgagatagtctgcggtggatgcatctaaaccgttgaacgggtaattaacgatgggatggggcacgggcatagctgttggaggaatggatctgagccgtagattggatcggatccaatggctggtgcagttaaagtgggtgagtgctttgtagccgtaggatcttgatccgatggcctgatgtgcgtaccggttcgatgccgtcccgatgtgatctgggccctccatctctaatcgggtggcctgggctcaaccgtacccctttgcatggcattcttacttaagagcccctg

SEQ ID NO: 178672 - DNA, 501 bp, Zea Mays
gaccccctcctctatgtcgcaatggcatgtctacttcatcagtgaagtgctgattgagtccaagacgtgatacttgtagatccagatgtttttgtatgcggtactcatcgccaagcggaagctgatccactactttgaccaacactccgtgtcagtagtatccacgacaccgctcggagaaattgtctgaaatcatgatgtgtctaggcgcatcgtgaaatggtccctcgaagtcaatgggctgacatcatttacgtccccaggaccacgatcaagtctcagacactcgttgactttgtcatggagtggacagaggcctaggagccacccctagttaacgacccagagtactggactatctactttgacgggtcctacctctagaccagaaggggcacgacattgtcctcacatcacctcaagggcacaaactccgctacgagatccacctccacttcgacgccaccaataacttcgccgaatatgaagccctcgtcaata

SEQ ID NO: 178673 - DNA, 569 bp, Zea Mays
cttttttaaaaagcgagcttgatggccaggttcaaacttgtcgccacaacaatagcacagaccattctgcctcctatactccttcaccaatcgctctttagacaactcgggtaaggaagcagaccctctagtgtcagacctggacacagtaccccctagtcgacccggactgaccaacttgaatgatttctgtcgttgtttgtctaagataccttgttggatcctggctaacaatgctgctcgttccaccgaagctggcaaatgagacttaaccggtccctgcagctcttgcttcaaccccttaatgaaatgggccacatacaaagtctcatctaaatcatgattatggacagaagtggcataccatgcctcatcaaacacctttttgtactcctccacagatccagtctgcctaatctccagtaaggactgcatagcttgtgaatactcctccgacccaaacttcagcatcacagcttcacaaaattcctcccatgaacatggaccatactaaattttaaaaatttgaaaccacctcttagcattcccctccatgttcaacgatgctg

SEQ ID NO: 178674 - DNA, 454 bp, Zea Mays
atcgagtacaagttttttggagataaacaactcaaagtggtgttctttgattgtgattggttttctccaaactcaacgcgagaaaatcaatatggcatggtggaagtcaaacacaacgacagattaaaaggccacgacactataatccttgcccaccaatgcgagcaggtgtattatatgacatatccatctaagaaaaagggtttggttgattggagggtagttacaaagttaatcctcgtgaacgactatatgctcctggtaatgcaggttatgttgaaagtcaaatcgagcacgaagtgggggctgctgagattttccaagacgaagaacttacaagcacgtttaatgtacaaactgaaatgttggaagaatctttattaggtgatcaaaatgatgtagaggttcctccaaaacgaaaacgagtgacgagaaagaagaaagctacttggcg

SEQ ID NO: 178675 - DNA, 561 bp, Zea Mays
ttgggtacagacaagggaaattaccctctagctctagctctagttctggggaaaacgtggaaaacgagggaagtcgtgatagataaaagaaatctccgcagagggaaaagacacaactaacccacaacatggtgattcgcctcctccaggcgcgcgcgaagactggccacctcaccttccgcagcctcgagactagtatgggtggcgacagactctcctaaagatccaacaatgtctacgtcaagaggatggaatccgtgctcttgcccatcgagatcacctggttgcgcatgacggagaggctgaaaaaacagcacaatcctgaggactcggtaacaaaaagggaaagatgtgcactcggaagcaatcatccgttgcctacaaggccttagcaccggggacaatcctccactggacacttgcttggatccataggaagctgaggataaaccgcccttcgacaaagagaatggtgcaaggtgtggcaagcccgctcggagggaccgtttataaaggaacacagggcatagtaggacggtgctactatttagcgtcgtgcgt

SEQ ID NO: 178676 - DNA, 1020 bp, Zea Mays
attgtttctcaaatttaaagcgataggggagccgtacaagctcatactttccccccttcttttttcttcggcatcccccaaccgctggaagttggaaatgttttgtttgccaaatattcttgtactaggtccctagtacaaatttcggcagctaccactctaaattcaacttcggctagctggcatggggagccaagttgcatatggcacaagggcctggtcattccgaagcttaatttcataggcctcatgaccatagtcatcaatttctcccttttcttctcgttcgctttcacataaaaccattcatttgtccacccgattggccatttagtgcgatagcgaattactggagccttggtatcttttatatatgcaaagttgtagcagccaaagttcttatgaagaccatccgctctggccttcgtctgatagtgcagttcatgcacccggcaaaaagctatggcattagcgctcataccctggcttcagagagcccatataaaaacactaagcctaacaatggcattgggtgtcaattgatgaaggtctacctcaaagttctttaaaacttctcatatcatgtcatttaaggggaaccaaagtcccgctctgaagaagcttttgaaaacgacaacttcgtcctctcttggctccggaactatttcctccctagaaaacgggacaagcttgctctcagcctccccgaaatagccaagttttctcttcataaccatgtcatcctctgttacagtagatttcctaaattcaaagtggctaggctttgttaggctcagaatactgttatcttcttcactttcattgtcactctcgcctccagctacaatctgttcagcttcggcattggaggcaccttcagtagtaacttcctctgacacaaccagacccgatcgcgtcatcacttctgatattggtgctgtttcggcaattttggtctccacttcttcacgagacaccctagcagtggatcttaccctggccatttgtgtgttcaggttc

SEQ ID NO: 178677 - DNA, 1251 bp, Zea Mays
tataaacagacgggttggtgcagagttaccacaacattcattgccattgcactgttgtgctgttaaaaaatttaaccatagccaaagcttttttactgcgctctcaaacaatcacttcatcatttagagttaacttcgtcagaagagtgagcttcgtcagaactgcacaagaacaataaatcttcataaaaaccgagaaaaatccatcaaatgccagagtgcgctcgactgcaatggtgtcacatgagggagaagaaaccgaagttactgagacggcaccaatttccgaagtcatgaaacaatcaggtttagtttcgacagagggagccgttgacgaaggtacacctactgtcgaagctgaataggctgatattgaagaagaagatgttgatgaagaagaggattatagcattttgatcccatcaaaacccagccacctagattttgagaaatctaatgtgtctgaagccgatgtgcccatgatgatgaagctgggctactttggagaagctaaaaggaaacttgttcgttttgccggagaagaaaccaccccagcgccgaaggatgatgaagtagtggttttcaaaagctttttcagagcaggattacggtttactctaaacgagatgataggagaagttttgaaattttttgaaatttatcttcattagctgacccctaacgctatcgttaggctcaacatcttcatctgggccctccgaagccaagggatggacccagatgccgaagcattctaccgagtgcacgagttacactaccaaacaaaggccagggaagacggtttacatgaaaattttggttgctacaattttgcatatcgcaaggatacaaaggctccagttctcagctatcgcatcaagtggccaaccggctggaaaggtgaatggttctatatcaaggctgatgagaagaaaagggggaaactgatgacgatggttatgtgcccgctatctctaaacttcggaatgacccagcccctatgcaacatgcagctagggtcaccatgccaactagccgcagtgaaattcagggtggtgactgaacagatcagcaccagagacctggtgcaagaatacctggccaacaggacatctccaacatcaagtgattggagcatgccaaagctaaagggaataaagaagaaatatgaacttgttcgattaccttatcgttttaagtttgagaaacagttcaaggagccttgccaagaatggctggaaatgattgaaa

SEQ ID NO: 178678 - DNA, 982 bp, Zea Mays
ggagattgacaggcatacagtggagtacatagtgaaaggccaaactatgagcaaagaatgctttcggagggtctttgtctcatttaaagcttgttggaagggcttcctagaaggttgtaggccttatttggcggtggatgcaactgttcttactgggagatttaaaggacagttagtagctgcttgtgcaattgatggacacaattggttgtttccggttgcttatggtgtgatagagtcagaaaatgcagagagttggacatggtttttgaataatttgcgccaagttattgggtttccaaatggattgaccatacacactgatgcttgtaaaggtttggaagatgcggttgataaggcgtttcctggagtggaacacagggaatgcatgagacaccttgctggaaactttacaaaaaagtttaaaggagatctattgagtaagcacttatggccagcagcatacacatgttgcatggatgaatacaatgaacacatgagtgaattttacaagaaggcaggtatgcaggcatggatggcacaacatcacaatagggtgtggtcaaggagcaagttcaatgaacactgcaaggttgattatttgaccagcaatttggcagagtctttcaattctttgataaaggaagtcaaagggttgtacgtggttgatgtgttggacaaaattaggcggattcttatagcaaagttttcgctgcaccgaagaattgcaacagaaaaatttagagaccacctaataattccacgagtgatgaagacattgcatgtgaacactagagggctgagaatggacttgcttatgctacgaccttattttgcagaggtgacagtatttgagaaggagaaggagttgaggtattctgtggacttgcaaaggagaacttgtacttgtagcctatggcagattcgtgggttgtcgtgcaatcatgctcttctcttcatcacctctttgcctaatgttcac

SEQ ID NO: 178679 - DNA, 802 bp, Zea Mays
cagtttcggctcttcagtcggttttgtcctagcttcagctggcatagagcaacttggctcagcaataggagcgggccctcaattagcttcggtacgtcaaccgtttcaatgcgcctgggccgatgtgtcaaaactttagccttttttgatttcgacgcgctagaagtcgccgaggtagcagctttcctcttctttccttgctttcgtgaaggataacagtagtctggatatacaaatccgatgacatcgaataccctgttcatcctctttttgccatgagccccgaaggcagttgtcatggcgtcatcttcagccttcgaatatgctccaagcatttcatcactagtcgcttctatggcatctagccaatcatcattcggctcatcaaactggctcctgtacctgaaggaatacttcaggtagaataaaccaccttggctagagccagcagcagcctccttcggcatttcccacccatttgcaagtggccacactctgtaagcaatgtgttcttgaaccaggtctgttgagccaatgtaggtgcacactgtgttgaaagctgcctggcatgcttgaacttcattcccaagtgcagtggctggcctcctaatcccgaagcgagaccatacagggtgttgaataatccctatcatatcctccctctgacttaggtcattctttatgtaaaaccattcctgcatccaggagcccgaccacgtcttctgaaacgtacgcactgggtagcttgcctcagatcgaggcacgaagatgtaacaaccaaagttgttgtggtactgctcct

SEQ ID NO: 178680 - DNA, 365 bp, Zea Mays
ctcagctaaaagtaaaaaaacaatgataaaatgataaatgaataacaaattgcaactattgtggagtatcatttgcaatacttaaacacaacatatttgcaacttaccctgaggtgtccaaactcggtggtgccaggaggaacatctcccctgagatccttatttgctatcgcatcaatcatcttcgagtccaagaaagcatatcgagggattgaaaagggacttgtgtcaaatccatgttgcaggttgtcgacataaagcatctgcatgttttttaacattaggtaaaagacacatgggtattttaggttgaattcatataatgaaaaaaagtaaaccaaattggcacaggtgcaataagccag

SEQ ID NO: 178681 - DNA, 504 bp, Zea Mays
ctggggtagcgctccatgaatgtgtcgatgtcttcctaagtagcagatgatggtggttggtcttgccactgaatgaggacctggcgcatgcctgtgtccaaccatgcctgagtgccgctgctggaactggaatagctacgccatgatgcgtaggcggcaggggttgtgtagactccggtggctgacctcgaaagaggttgaggaggccaacatggaagacatcgtgtatgtgggctctcggtggaagacgaaggcggacaactactttgttgatgacttccatcacctgatcggttcgtagaagcgcatactcagcttgtcggtggttgcctgtggcagggataggggggtacggtgccgaacccgcaaccagacccaatcgcctaccttgtaggacaactttcgatcgtagtgtgccttgtaggatgcttgggcctgctccagtctgtaccacgcgtccttaagcatctcatcgtgttcagtcattgtcttggccaccgcttc

SEQ ID NO: 178682 - DNA, 395 bp, Zea Mays
gaaatagctattttacccaaacctttaacctttcctttgcgattgtctccaaaagtgatgctatcataggttgagcaaccttcctcattcatttcggtgaacattctcatatcaccggtcatatgttgagtacacccactatccaacacctaatgatttcctcccgccttgtaattcaccttagcatgtccttttgccataagacaatgaggagatgagaaaagtgaggggcctccatgattgcaattccggcatttagtttagatgaagaatcatcatcatcatcatccgagattgcatccgaatcccattcaactagataggctttgccatccctcttcttgtggtagaacttctttttcttcttatcatctccatccttacctttgttcttc

SEQ ID NO: 178683 - DNA, 729 bp, Zea Mays
gtgtgttcctgctgcctgccgtgccctagccattgtcgccgcctccgtaggcctaggtttgctctgctatatctttttggttcatgtccatgtgtcgctgctggaatcggttccagatccgtgcattcatgagggcatgttgtctatgcgtgcttggccttggttaacttacagatctgtgcatttgatagggacgtgttatctatgcatgttggatatttggttggtgcattttggttccaggcttgggtgtcgtgtgcgcatagatagcttttgtagtttgctattgtttttttcctggtcaatcgaatgacacatatcggttctgctattgttcacaagaggttttctgtggtgtagtcttgctgatgtttggattaaggacagtagttgttccaaaaaaatgtttggtctgtattaaggagaatagttcgacaaaaataccatgcctttattgccaaagaacattacaacagtctattcagaacgcgactctcacattacataaaagcacatgtaaagagctgcatacatgtgtatgccttttcgctgttaccgtttacgcatgcgaaaattagcggtacagtcatatgacagttagacatggtggttcccttcatgtttacacttccatgactttctccccttcatgtttacacttccatgactttctcagatctattgccatggtttgttggataatgatgatgataatatctagatgttcgc

SEQ ID NO: 178684 - DNA, 676 bp, Zea Mays
ttttttcaataaaacttgatgaaaattagaccaacagtttcacttgagataaagctacaactgtctttggaaaggtaaaacgatgattcatgttcttaaacgacggatcaagtattatatactcctacatggtaataacacttgataaaaatcatataacttgagtcgtgtccgatccatgggccatatgagctctgatttatgacgatccctgcagatgtgatgcgacggtaggttgaattctgggtttatgtaaccaacaagatagccgcgcattaatttggcttcctccaggctctagctgtccaacattttgaatgaagaaacacgaggattattaattaatagcttgctgactgtcgctttcgcagtctcactggccggttattaatctctccttgtctcccttatttcacgaaaaaggcccatatatgctgctgagattggatgtctagttcctttttatgtggatagttgctgccgacgatagacagccaagtaaagaaatgcaagttcaggaaccaatcgagtccaatctatccggacgcatggctgctagctccagatcatgccaaatacggagtaacacagccaatcaaatgagccgtacgtcaggagaaccgtgatctagttggatgcatacatgggtactggtctgcagctgatgacgctctcg

SEQ ID NO: 178685 - DNA, 638 bp, Zea Mays
gaacttatccgagggctgagcccggggtcaagcgaggtggagcggttgcgcccgaaggcacgttcgctcggcttgtcgtattaggcatcccatcggagggatccaggcggcatgcacgcactgtcgtgtaggtgtaatcatattgctgcgccagacgtgattgttgtcttgtccgccactgtgctccgctgtcacagcgtgggttggcacaagcattaaatgtgcatgtcccccgcctgtttttgagtttacttgtcctatcttcttgaggccagctcgggcgagacggactgggctgaggcagtctcaagcgaggcggagtgagtggtgtcgaccttgagtgaggtggagcccagctagaggtgggagacccttaggggacttctcggttttgtataggtggctcgactgtcacccctcgggagtttggtccttatttctctaagtgcgttcattatggggataatcagggtgtccctaattaccgcacccgacagtagccaccgaggcttccaaggaagtacttctggtacttgtttggaggctctaccgtttgtccgcgagtgtgctgctttgtgagagataggacgtgtttgttttctgaggggtgcgcgcgagcgcacccgtcgggtgtagcc

SEQ ID NO: 178686 - DNA, 546 bp, Zea Mays
gcagagagagcaaagcgcagagggaacatggagggcagtgaggtccgcggggcttcgtgggcagcgaatttcgttactcgaatccaggtattagggctttcctcgagttcacctatctccctacgttcgattacacttagccgcggtctttagagcatgctggggcacggcattggctgctctccgacgagcgcaccaccgcgtcggggccctgtgccgctgcgccgaccgtctggggaggaagacgccctctgggccgtccgttgtgtaatgagcgacttagattagatctagccgtgggtccgacatgaaccattgatcacagatcatggggctcagatagcacgggctctttaaccacgatgacctgatctgagccgtccggatcagatcgtgcggccctaatttctccataccccttcggccaacctttttgctaaagagtccctgtagtttatagaaatcaacccgccatccatgtgtcactattcactgtgtcttggcggtcttgcgagttagccccctgcacatttcggtaattgaggc

SEQ ID NO: 178687 - DNA, 867 bp, Zea Mays
cgctgttttaagccagcaactcatcgacttggaggaaagacagggccttggcttcagtcaaggaccagagcaccgcctcttccctagccaccctaagggctgtgaccaagctaggattacatccatcaaagacacatctattcctatgcttccatatggtccaagcacctaggattactaaagaattgaagccctttcttataagattagatgctcgagagctgctagacttccaccacgactcaaaggaatcctcgtgagctggacacagctcctgcaaccccactgaactaaggaaatcaaaccagaactgcttggcaaaaacacatttgaccagcaaatgatttatggtttcggcctcttggtcgcacaaggggcactgctctggtcggtctagtcctctttttctgagcctatcagaagtccagcacctattatgttccacaagccagataaagaacttgcacttcccaggagcccaagatttccacacacgctctgctggttcgaactgaactgaaccaatgaagagagctttataagcaaaactagttgtataatctcgtgaagcactgaattttcatatatgtcgatcccttattccaggctgaagcacaactgcatcaagcacttcacaaagttccaggaattcagcaatgactctgactgaaattgccccatttacatcggagatccaatggaaattagggagagcatatttgaccaaccgtttgttggcaagacacaagggcaccatatcaaacattgcaggagctatgtccttaatacatctcccatccaaccatctgtccttccaaaaagggtattggctccatcaccgagcttagtaataactgctgcagcaat

SEQ ID NO: 178688 - DNA, 441 bp, Zea Mays
tgcgaggtcgtaattcgtaaagtcggcaaagccatcggaaagactgatatggccctgtctgtgcaacttgcatgctgctgccgaccgcgtggcccaaaggaaactagggtccaccaaatgtgtcgagaggcgtaggtaggaggaggaggatcgccagctgctgatccgttcaacacctgccggcgcccgcctgcctgcctgcccaaaacaagaccggccacttgctagccgtcctcctcccctgcccctgccatgcggcggcaccggcacctttccagattaactggctgcaccaccaccacaccaccacgccacatcgccgtcggccaccacatgatgcacgcgcacgccgccatataatactagtactactgaactacaaggggttcgccgtgcgagcgcaagcaacgacgcgccggcccgcctactactagtacggcc

SEQ ID NO: 178689 - DNA, 786 bp, Zea Mays
ttttctcccattccttgctggtttcaaatgcagcgccgatatgtagagttccattggccattgttctgcaaattgctattgaataggttcgacaaggatcaacatcagtacctacttaggaaactttttcggatctggcaaactagagttgtgtctgaatatatttcccatttttctacattgatggatcagttatatgcatatgaatcggtgtctgatcccctgtactttacaacccaattcattgatggactgagagatgatgtttgagttgtggtcatggttcatagacctgggggatcttgacacaacttgtacacttgcacttttgcaggaggaggtggttgaaccaaccaaacatagagagtttccgaggttgggttctagcccatggagcaaaactgaggtgaaaggtccttttcttttaccatccccaccatctactgagaaaactagtgctgcaacttttgatcgtaaacccacatagccatgtaagaacgttgaagagcgcgtgacaactttacgtgtgttccggagagcaaaagggttgtgtgacaatcgtgtagaaaattagtatcgagtgcatacatatagcacgacaatacagttgcaggctatgcaggaggtctgggatttgttttctgtggaggagaacccttctcctaccccttatgaagcagcccctaaagaacacctcttcacacttatgatcttattctcgacatggactggttggagacacagtcgcatgaaggtgcattggagacagaagtggatgtccatcac

SEQ ID NO: 178690 - DNA, 548 bp, Zea Mays
attctgggtatgacatcaatggataccgtttttgcacaacaaactacgacaaaagtcgacccaatcgaaaaacaacgtgttctggagtctttacgcccggccttgacaatgtcgattattttggatgaatcgaagaaatatatgagctcaatttttatggttccaaacctcttactccagtgatatttaaatgtcattggtttgaccctcaagtgacgagacggacacattctaatcttgggatagtcaaaattcgataagattccaccttagcaggagacgatgtctatattgtggcctaacaggccacacaagtgtattatctcccatatgcgtgccaaacaaaagaacatcttaagggttgggatgttgtgtataaggtatcgccgcacgagaggttacctattcctaacgatgaagattacaacttagacccggacacatatgatggagagttcttccaagaagatgggctagaagggcgatttgagatagacttaaccgaagttatcggaatggacatagatattgaaatggttgttgatgac

SEQ ID NO: 178691 - DNA, 501 bp, Zea Mays
gaataagggaggaaagaaagggggagaacccaaggtgatttttatgtttatcttttgttcatttgtgctgcaatccaattgattagatgttgcgtatgcgattgggtagaggggctgtccagaattttaggtggtggacgaacagcagtagttctagcagtttctgggcatgtttcatgggaaattaatgggaatcagtttgggaatcatgtagaactttggcatacctttccaacgagtatttatgcgctcaattcggagttataaattaaaagatatcgccgtttgaatccgggtatgtggctgtccaaaaaaacagatttttcaggtggacgaacaacagcagtattagcagtttctggtgatgtttcgtgagtaattagtgttaatcagtatgagaatcatgtagggttttgtcttacctttccaacaagtacttatgcgctcgattcggaattatattttaaaagttatcgctgtttgaatccgggtatgtcgctg

SEQ ID NO: 178692 - DNA, 413 bp, Zea Mays
gcggcgatggcccgggtcgacggtggcggacctctgcggctgcacggaggacggcgggtgagcgcgggcagaggaaattagggagggagaggagaaattggagcgtgtcccgggttgcggacgtcgaggcgaagctcaccatggcagaggacacggcggggctccaacgtcgacggagaaacggactcgggacggcggcgggtaatggcggcggtgctctggcgtgcgcgcggcgtgggagaggttggaaaggggctctgcaggtgcgcaaatgagggggggggggagagagggtgagcgaggctctgggctcaagtggccgagggcggggtggttgcgagcttcacgcgcgacgtgggcgcggagaccgcggcacgcgcagctcgggcggcggttacgcggggacgagggag

SEQ ID NO: 178693 - DNA, 1108 bp, Zea Mays
cggcttttacaaagacatcgattatcgcacttgttgtgctattctggctgcacccttaggcgacttttgcacggagagtcttttggaaaagatttcgattttgcgcacttgttgtgctgttccggctgcacccttaggcgagttttgtgcggagtgtcgcacgcgagggtagtcagcgctgcctctcgcggtgacttcggtgtggtcgaatgccgaagaccgtcgatgcggtctttttcgacatattgtgtcttagtttttgcgggggattttcgcaggtatattacatggctccgcctcgttaaaaacctcaccccctgggaggaaaagagtgcgggccggaatgatactgtttggtgaattacaagggcatgttggccctgaggattcaaacaaaaaatttgcggagattatcgatattccaggaatgctctaggtcctcgccagatggcgttgttaccctgtacgcgcttggggacgccttcgtcttgacgatgaatgggccctcccactttggctccagcttgccccgtgactctgtccgggttgttcggacgagtacgaggtccccttcgtcgaattctcttggggcgactgcgtggtcgcgccaggccttcgtttgagcttggtatttgttgagggcctgcagggcaaagacacggtctccgtcgatgaggtctttggaggttggttcgtctacgtcggggacggctgaagcgcttgtccgtggtgacccatgttttatttcctgcggggtcatggcctccgatctgtatagcaggcgaaagggagtgaatccagtcgcccgacactcggtcatgttcagcgcccagactgcttcaagtggcaggtcggcccatttacccttcttgtcgtcgaggagcattttcttgatggcagtgaaaatcttgccgttggcacactccacgacgtcgttagattgtgggtgatatactaaggcgaaggcaagcttggtgccaatggagaagcataagtccctgaagtcctggctgtcaaactatttgccattatcgactgtgagctcggacgggactccgaatcggcaaacaatgttttgccagaagaatttctgggcagtcttcgacgt

SEQ ID NO: 178694 - DNA, 407 bp, Zea Mays
gcacttttgtagcattgctcgttgttcagcggggcagctaatggcctcgacctgaagtgttatccttgccgtttgaccggcagcgctggaggtgtgattatctcgctcgttggtgagggcaatcctaggctaaacaacatagtgaacctggtcgtcgtgctcaacaccgaggtggaccacgcccttgatgagttgggcaaggttcgggcggaggttgcagaattgcgtgctgagcgcacaacatgccactatcaagatggtggttctcctgccccttttgggattcagcacccttaccgctcaccgcctcgtggtcactttgattatggcacccatgactgtagaacccagatagatttggagccatagatcgacagagtcggagtctttaatagtgcttaattcag

SEQ ID NO: 178695 - DNA, 524 bp, Zea Mays
cggtacaacaccaatttcaacaagatgtaagagatcatcttcataaacaacagagacatgattatcagagaaagggagttggctatcaggatcaatcggggggatgactggcgtggtagcattctgtttcctcttcctgggcgccatcacgatccttcaagcagcgtggctcaagaacaaaacgcaaaaagatgtgggagctcaggaagctagaaagcgacggaggaaaaataagaactagggttcaacggccaagaaaacattgacaagaatttaggttggcacactgagtcgggcatagaattacaggttgtgtggctcggacgagttttaagcatagcaaagtaaaggggctcggtcagtatctctagaaagctaagactcgtcaaccaggtgctttgggatcaaactgtcaggtaaaaggacagagtgcacaacaacgaaatggcatcgaacaagcttcattcatttataggttgggaatcattacaaaaggaagaagaccaactcattatgggccgacc

SEQ ID NO: 178696 - DNA, 846 bp, Zea Mays
aaaagattctaccttatccttatggagtcatcttgccctaattagcatatttatcccactctagagtaacaaccatgatctagtccaagatatattaattagatcttatctagtttaatctagtcataccaatctagtcaagattccatctaatttagatcccatgtaatccaatacgatctaatctaaaatgagttacttaaaacatgttagttaatattggtgaagtagattagaccctactcctacaaccatttttaacctaaattggtgccttagaccaacttggccataaacaaacaacctaaccaacatgttcataatgaccatccatcccaccagatcttgacctacttaatgtagttcctcctacacacaattatcttagctacatgtccttagctcggatgatgacgtcaagaccagagatcgaaggcgatcgacctcatcaagacaaggagggacaaaagccagaaaagatcttcaaaagctgggatccaccatctgggatggaatctctccttaccataacctttctcgccccaaccttctcaaatcttatgcccatgctttcctaactacctgctaagtaatattaaaggaaaaaaaacttagccttgaactaattagaaaaaaacagctaaactgcaaaccaaacttgttgcatccctcttcttactaatctcggggacgagattatttttaagggggtagaatttgtaacaaccgaaattctatcttagtttttcctccaatttttttttgaattaaaaatttctttgaatagaaactttcttatctttgaaattattctcctaaaataaatgaatggtaatattatattct

SEQ ID NO: 178697 - DNA, 805 bp, Zea Mays
ggatacaagatggaaaaggtcagattcagagacaacagacatgtggttacctgcgaaaggcaattgactgttgggattgatgaggggaatgactgcggcagacaaactctgggatttccgcttgggcgccatctcaaccttgctagcgaacagagcggaagcagtattgtaagatagcagagaaggcctggatgtagaaaagcaaaactagggcacagaacgcagaggcatgcgacagtgtagtacatatggggttttcccgggccagacgtcatttctaaaaagcacccagtcatcacccggcggttacttctaaaacgctggcgtgccatgtcatcacccggcggttatttctaaaaacgctggcatgccatgtcatcacccggctgttatttctaaaacgctggcgtgccatgtcatcactcggtcgttatttccaaaacggtcgatgcagcccaaattaactcagctgttatttctaaaaatgctgacgttaccagacttcactcggccactatttccaaagcggccgacgtggcccgttatcactcggttgttacttctaaaacgccgacgtcgccagcagtcactcggctgttattcgtaaaacagtgatgtggctctagaggattcggctattacctccaaaacgccgacatcgccagtaaccgctcggtcattatttctaaaacactgacatggcccgctatcactcggatatcacttctaaaagccccaacatcgctgataatcactcggccgccactactaaagcgctggcatcgcggagaaggcagtctgaagc

SEQ ID NO: 178698 - DNA, 1006 bp, Zea Mays
aagctactagtgatgagttacttggggcatataccagagccgaagatgatgctttgtcctcagccttcgggggtcagggcaagaaaaggttgaacagggttttcgatgcaattggttttatatatcctgattattgctatccctcgcggaagcagggaaaaagaggaaaactgccacttcggccatctcttttgtgccgaagggcaagaaaatcaaggttttgacccaccggccaagatatattgaaacgaccatagtgccaaaatttggtgaagagacatcttccgctgccgaagcggaacaagatgctcccaccgctcggagcgctgaggaattgactatagtgccgaaggtgcctatagttgagccagtcgaagccaaagatggggcggccaaaaagccagagtttgaaaaaacaatagtgctaccagaaattctgagcccatcggtagaagcagaattgccgaagattggaaaagctcccaccacaactcccaagaggagaagaatggctagcgtactagacgctgtcatggagacgacaaggtcactaactcctacccctgtagagaaagttgccgaagctgtgacggctcgtgctgaaacagaagctgggccttcagcgcccgcggaggcagatcctgccgcaactgaggagagagccggagaagaattttcatatgttagcataactctggagaagattgtggccgaaaaagccaaatcccctgcactcgaagcaccgtccgaagatcttgactatattatttgacttgcttcgggaaaagtattatccaaagaagaaattttagaagccaaacattatgcccggaaactaaaatacccaaagggggccttagtgttcaatggcatggacgaagatgatttcctgtactgtctcctagacaacaaagatatatccatctgccaggtgatggcccaaagtatgggatttccgaagcttgaagttggcctctccgccatgccgaaggatgacctcgcggac

SEQ ID NO: 178699 - DNA, 316 bp, Zea Mays
cccagccagtggtgtcgcgggattgtcacaagcctctggtccagcaggtacgtgaggctgcagtggtctgttttgacgacgaaccggcgaccccataggtacgacctccagtgtcggaccgcatggatgaggccgatgagctcccgctcgtatgccgccagtgcccggtgtgtatcgagctctctaaagtcaatgtccatattcaaaacctaaaaacaagagccaaaacgaatactagtttgagacggagggaatactcattaacttttcacataataaaccagggcagtgcacagtacataggacttaaaattag

SEQ ID NO: 178700 - DNA, 481 bp, Zea Mays
ttggcttcgacctccgtagtcattcgtgtgctttggcgtggtcgtctgtggtctgcatgagtgttctccttgttctcggccgatcctctcctttttataggctaaggtgggtgtcggttaccggtagcttctcaggaaaggagctactgcgtcgtggcaaaacgagtcgttctaccttggtaaagtcgtacttgtcggcattcgtctcggtcgtcttctctggccttgctctttaagactagctgcgcgtgaatggcgaagagctccagcaccatcattactatctctgcgacacgccgaccctagcctttgttgcatgggtctcaacgtagctcattttgttgcgggtcctgtagatgactagtgcattcaggcctaggcttgataggcaattctgaaccacaagcggatcaggtcctttggatctatggtagctagggtttgatgaaggcaaaggcgttggcttcttgtcgacccctag

SEQ ID NO: 178701 - DNA, 532 bp, Zea Mays
agattctgttgctgaccgccttcgacgtctggatcagattcttggcgcccgcttggaggccgagggcagcagactttgccggtcggcaatagaatacgtcttgacatgcttccggagccacgatccggctgtctccttggggccagtcatcgcaggtctggtgccgatgccgaagatgctgctcatgagggcgtgcaggacgttgtggaagcggtggccgagcgctttcagcgggatcctactgacgatgagtagctaggcctgcgtggagaaaacgaggtttccgctgggaagcgggttgtaatataccattgatttcgtaagatactcttcaggtactacttactgggcgatattacaacttatctgcgtgccacttttcctttgttgtgtgcaccgttaccaacttcttccttggtacttggccccctgggatatggcctcgacgcatcggggctggatactaggaattgtagtcggtaactgatgtcgtgaccctcaagggagctcccaactaggacttgacctacac

SEQ ID NO: 178702 - DNA, 1262 bp, Zea Mays
ttaatattaaatttggaaactaaaatttggaaattaacataggaaaaaaaacaaaacctcctttaacccactcggccactccttccttcacgtagcccatgccttgtgattttttttctcttcatttaatcatccagccgcgacctcatgcatgtgtcatctaagtatttttttgcacgtatcactatcgtgtgactcccgataacagctctatctcctacctgggtacgtaattctgctacaacaaactaagttgtggatccgagatattcggaattagaactctgaaccgcccgttcttttcgctctactagtaaccaccgttccctggatatatatgcatgctcgcacacctaccatcaaataccgctagcatgtgctcatgaagaagagccacgagtcctcgcccttgccgagagctgcgaaagttcctccgccgtgagccgagaagaatagggagaagaccgccgattcggacacaatttctcatcggcgatctctgctcgctgcggggccgccggcttggatccacggtctcacccctgctgtgacctcgattgggggtctgggggttttgccaggtctcgcggaacgcgactgcggcttcatatgggtgagtcgtgttctggtcagcttggaatagctcgccgaacatgtgactccgccgtcgggccgccctccaccgtggactactctcctgctcgcacgattcgtggtaagcagccctttactatgttcgccaggacatgttcctcgttttgcgcgctttggattggtgtttgaagcgacaagggtggcaatgcccctcctccggcgagacctccgccgcggcaggggcggcgccgtcgttggctgcgtcggatgcgtggagaaaagctccctgccgtttgattgtgaacggacgtgggagattagatcggaatcataacccttgggcgtatgatctgagccgtagattggatcggatccaatggctggtgcagttaaagtgggtgagtgctttgttaccgtaggatcctgatctgacagaggtaagggcgtgccagttgctgttgagtgtggcctaatccgtgccgtatgctctggatcggacggtctggattcccggataccccttcgcgtggcaaacttcataaagagaccctccacttttccaaaaccaacccgccgtcctagcgctggtacgctgtgtcttgggaatctttccccgaggaccctgtgttctctggttatcttgtgcccagtccagagaattatgaaat

SEQ ID NO: 178703 - DNA, 287 bp, Zea Mays
agaagatggattgcatgagaactttggctgttataattttgcatatcgcaaagacatgaagacaccggtggttagctaccacaccaagtggccaaccggttggaagactgaatggttctatgttaagatagatgagcaaaaggagaagctagttcagagcctgctggagctaaccttcgggttgactaggcctcagtgcaacatgacgccgggggaaccatgcccggatgctgtgggcgaatttagagttatatctgaacatattggtactagggatttagttcagg

SEQ ID NO: 178704 - DNA, 1116 bp, Zea Mays
cggcatatgagagagagctgaacggactagtcaaagcagtctgcaattggcggccatatttgtgggggcgagcgttcacagtaaggactgatcacttcagtttgaagtacatattggaccagcgcttatccaccataccacaacacgcatgggtcatcaagctatttgggtatgacatagaggtggagtataggccagggaagatgaacggcgcggctgacgccttatcaagaagggatgaagaaccagcggtagcactgtccactccaactctggaagtttttgatacactccgggaagagacattgatagatccgtaagtccaggaactgaagacacaattggcggcaggaactgcaggagaagaatgggctgaaaaggatggattgttagtatgccggggcagagtcttcgttccaaataattcaagtgtgtgggatcagttactgatggttgcgcatgtggcaggtcatgtgggagtagagaatttgcatagatggaggagctcgttccacaacgcccatattaggaaacgggtacatgaatttgtttggggctgtacgattttccaaagaaataagtctaaacatcttcaccctgtcgacatgttacaaccattctctccatcggtacaggtcacggacgaactgtttctctaggagcggagaaatgttgcggatgcattcatggggaaggcttatgctaggaagaggcacgtggagggcatgatcacccttggtgccagcagcttggcgtccaccagcacaacaacaggtaagtcttagaagtgttagctgattaataacttgttgttagctaattaatagtcggttggttagctatataataggagggagttgttatctagataagggcaggataatacctcatgtttatctctgagcagataacagccgaccctgatctataaaaggaaagcagtaactaggtatcgaaggaaaacaatctctctgtggggcggttacttcgatcactctggcctacggtgatccggctccatcttcttccttgcattcttctccaccatatcttctcagatctcttccgtggtctgtgatgctcttgcactcttcgttgcgcactcctcgaaggccc

SEQ ID NO: 178705 - DNA, 382 bp, Zea Mays
tggtcttcgaaagaatagctaaagcaaaagctaccaggctagaagatattgacgtactggaagaagagcgattgaatacagtaattcagtcagctagataccagcaaaccctaaggcgctatcatgataagactatacgacatcgatccttcgtagtgggagacttggtccttcgccgaattctaacgggagaaggacgacacaaattattgccgctatgggaagggccatttatggtgtcggaggtcactcggccaggatcatatcggcttactcaaatggatggcacggaagtggggaattcatggaatatagagcacctcaggaagttttacccttagcgagagctatcggagcaacgttctactctgtaattggaaaa

SEQ ID NO: 178706 - DNA, 1027 bp, Zea Mays
aagaccttagtgtagacgtacacacttttttggtgcacgggtctgcctgcagcccgctccctctcgcggccgcgctctctacgcccccgcctcgctgatcccgccatccacgccgctccagtccgtcacccgcgcggctgttggtaaggtgctccagtgatcccgccatcaacgcccgcgctctctgcgccccagcctcgctgattccgcaatccctgtcgctccagtccgccgcccgcgctgctgttgggaaggaaattccgcttcagtccgccataccggaaccttccatgaacgccctcctctactccgcccgttctccaatagtggaaggttggccaggatccgcgcactgtcgtcatggttccttttcttcgcgcgacatcgacggtggggaggatcggcgcgccctcctctgctccgcccgtctccaatagcagaaggttggggacgatctgcgcaccgccatgcttgcgcgtctccaatagcagaaggtcgcctacgatccgcgccgacgattgcgcgctcagctcctccatccccttccaagcgcgttgatctccaataccagaaggttggatcgtagcctgcgcgtgccctcctccccatgccgatccgccccaccctcctccccactgtccccgtctccgatagcagaaggtcgcctaggatccgcgccgacgattgcgcgctcagctcctccatccccttccattcctgcatcgatctcagcttattctctgcacacctacgactacaaatggggaggcctacagttgatcccccacatctctcccccaagacgcagattcaaacaaggttcgtaaacttttaccagtcgcgctccttaatatttcgttcaacatttaccagtcgctgctgttcaaccgtggagttatggaggcatataccagtcgctgctgactttgcttttaccagtcgctgctccttaaacttttaccagtcgttctccatggagttattctcttttaccagtcgctgctcgttcaacatttaccagtcttgc

SEQ ID NO: 178707 - DNA, 386 bp, Zea Mays
ctaactataactaaaactgactagactaagacactgaactaagcattattacagactccgactctgtcgatctagggatccaaatctatccgggtcctgcagtctggggtaccatagtcgaagcgaccacggggcggtgaacggtaagggtgctgaatcccgacaggggcaggagagccaccatccagttagtggcctgttgcgcactcagcacgcaactccgctacctccgcccgaaccttgcctaactcgtcaagggcgtggtccaactcgatgttgagcatggcagccaggttgaccatgttgttcagcctgggattgccctcaccaactggcgagacaatcacacctccagcactgtcggttgaacgacgagggtagtactt

SEQ ID NO: 178708 - DNA, 321 bp, Zea Mays
ggttggtttcctgaaaacagaggggcctagatgcaaaacgcgcgcagcgaaggggtatcgggtgttatgagcctttagatctaagacctgcggctaggattagatctagacgcttatgatgtggtatgcgatttccaccgctggattgaaattcaagggttcagattttattatgaagctttcgttactctgagccatccgatccgatcctacggccctcatcaaaccgctcggtgggagatcgctcggttcaaatccgaccgttcaagtagatccagcggtcacggttattcaatacctaagatctaatctcaaccaccc

SEQ ID NO: 178709 - DNA, 336 bp, Zea Mays
tatgcaatgctatgataagctaaaaatgcttttactagtattggcgcattctcggctgagcgaaattttatccgtggagatcctgagggtgtgatcaaatggattgagggtgaaatcgaagcattttatgaagttctaactggcagggggacttttgtgcctgtgtaggtgcttgaggggctgtgtcactgctcgaaaaagctggctgtgaacatgcgaaggctgtaattcagccagaattctcagtttcagcaaattacattaaagaaccttcagctgaatctaccacccttggtgggaaattttattctgaagtgtggttgaacggaggcagag

SEQ ID NO: 178710 - DNA, 419 bp, Zea Mays
ttaatattgacatacaagagaagattctatgaccagtggaagaggtgaaaaactactagtagcagctagataggaggaggatccagtattgagaccgctataattcaaagtcaaaaccaccaaacacgaatcaatgttccatcaaacctccagcaatgaatggcctatgaagctctctcctcgtccaaagtgcaagtacttaggtaaaccacaggcacgaccttacggcagttgaaaccggagagaatccgggggaaatgcagcggcaggggaatcactggaaggcggagacgagcgcgaacctacctgccactgccagttcttcggggttcgagcgaatggcgagagcacgagtggggaaagcaggtagagctagaatactactagatgatcctctcctttttgcaagcctttttttt

SEQ ID NO: 178711 - DNA, 722 bp, Zea Mays
gggaccctgatggtttgaaatacctataaagagccctccccactgttcctctgtctcgctgacatttgcatagagaccccaaggttctaattcttcacggtgaggtcacaaggtacggtgtttcagaccaatttgggggaaatccgaaattggggaactctagtgagcaattggaggcacgacttggtggattgggtgcttgactaccttacggaccggacgacacgctcaatttataggcaccgggggtgggtggcgcgtgaattggagttgttgtggtggcggccggagatgaagagggcactggcaattcgtggcgttcaccgtggcaagcttaccgtcgttgaacgagtgagttacggtgactcactgcgacacggttaaagggtcaaggcatgtcgcgatcacggcaggtggcatatgcctcgacgacggccgctgcgccacgtcgccggcgcaagtgggcacgacatagggcgaacagtggcttcgagctcatccgcggtgaggatctttttaccaaaagcgttatccgggcaccggtgagcacgaatcacctcatcggcgtgaatccaggcgcaggggttgccggcggcagggggggtgaacctgcgatcttattcagttattgtacaatcagaacaccatttagtctatctgacagtgctatttgcagggcattaatcttcgtttttttgttgcaacttgtcaatctctctgta

SEQ ID NO: 178712 - DNA, 490 bp, Zea Mays
tgacaatggaagtgagttccaaaatgctagattttttatgacctatgtaatgatcatggcatcaagcatgagttctcggcagtatacacctcaatagacaacaaggctagtgctctatgagtccaactttgtcagactgagaactagatcccctttccctatattattgcctaatgttcattgagatgcaaaaatgaagctcctacaaatcccctttctctaaagtttttcctcaatcccacaaaatatccctctctccctcaaataaagggaatctagtagcactttttctcaatcaccttttctatcttctccttcattggcacatgggctccatgttacattgtaccaagcatgaccaccatgttgctccccactgcactaagcttgatgccagtgaggtctacatcgatgcgatttgcatgcaaaccatcacaaccttgcatggtacatgccaccattgccaagtgttgagcaggttgccaccttg

SEQ ID NO: 178713 - DNA, 551 bp, Zea Mays
gctaaggttttgcttgctaaagtctgtctgctgaaggaaagaggtctgaccgccgaagctgtggttgctgattttgtttttaagaacatccagcccctgaaagaaagagcgtacccggcttacatgtacattggtgttaccgactccacttgagttactaataggagaattcctagtaaggatttggtgagccggctagacatgatcttgagaggcaaagtatcaaatgttggtgctcctgttgcctactctgcttggaatctgccacctcctaagtcctttttcaatttcgtgtctaatcctcctgctggtgatagtggtctgggtcttagagtgcgaccttctcccgaagatattgaggccttggttgcttctctttgtgatcttcccaatgatgataggcaagttcattttgagatgccagcgagtccagatgatgcagagatgaatgatgtgctcgatatgttggctagagaatcttctgactcggcccgtgctgaaacaatggttcttgcagttatacccgagcttgacagaatagtggacacccg

SEQ ID NO: 178714 - DNA, 851 bp, Zea Mays
cccggattgtcgcccatgatccacgcaactgaagcttgtttctgcgccgcacatctaccaacctccccacggactcgagctgagccatacacccatatctgaaccaccacggcgatcttgcggggggtcgttctcttcctcggctggaacgctctcgtacagtgggtataaaaatcgagtcgatgcttcttcccccttgctcctcagattgcaacagatgagcgagggcggacccaagaaccgagagcgccccagcccattggcctcctctggcaggaccttcttctccacgtcgctaggcggctcttgtgtctgctccgtccctgtccctccgccctctgcgcgcgtgaattgcttgccggttttgcgttttgccgcatggccgctgtgtctcgtggtcagccccgtcctgcctcctcgtcggtgagttttaccccccccatgtggtctgctttgtcctgctatgtgtgagtgatgcgccggtgggttgcgtgttcggacaccgggggcggcatgcgggcatgttgcagttgggcgccgccgcggggaagaccttgcgccgtcgtgccccgtcgcgtgggggaagaaaggagttggccgatggatggaaagctagcggcctggatttggtgagagtacctgttcgtccggagtgtatccgagtcgtcgatctcagtctgatcggtcgggattagatcactgggactgcttcggggaaatcgcatcttgtacgtggatctcggatcagacggatgtgaatggggcttagtgtttaaaaatctggacagtcgatctttgatcctacggttagcgtgtcataccgcttcataagtgatgacgatctaatccgg

SEQ ID NO: 178715 - DNA, 637 bp, Zea Mays
tgttacaactggagtaattctagcagtggccgggtgtgtatcggaatagttgttcttattttgcttactcttctgatgcacttccgtaacaatctctaaataataatgagttgttatctattatattgtacaccatgttttttttaaaatttggcatgctcatgtaaagatgatgctgattatcaaagctcctggttcattctagataccgctgattgcatcttaggatcgacatacaatataagagaatttgcatatgccattctagattttgagtttctcttagtcatcctattttcttgatgaacacagtggagccagtaatggtctgattctcttcgaagtcaaattcttttggccagcagtaatgatgatttcagctgcatttcaagctgctgcttccattatcaaggttgagtgttcatagtaggttgtggtgggattttcatgttaatccagctatatagtttttttgtactattacaggagtttgttttcattgatggtgcaaaatgccttgaggttcatttaaacctcagttttttgttgtcattaattttctgatattgaaagcatgaactataatttggtatcttctgtttatatagggaaagaggcctgatatatttgtagtcaa

SEQ ID NO: 178716 - DNA, 794 bp, Zea Mays
cccaaaaggacgtgacagatacaccataccacatgtatgcctacgcatgcgagcgggtgatgtaggcccgtgacaagagacggagtcgcgccattcacggctgcaccgtgggggctgactcacaggacccgccatgcactaccaaggagatgtcaacaggggactcgctataggaggctgtataccataccaggagtacggctacgcacgatcctacggagggtggcccactacgatgacccggaggagcagatttatctttctctctctctctctcatagaagaccaatctcctctgtaagatccaacacttgagctataaaagtgcagacccctctccttcttttgggacaccagcacccacaagttgtaacacgttccatcgcaatactacgattaacactacattggactaggactctggcctgaaccagtataattttgtgtccaaagttcatctttcgagtcctaaagattcgccatttagagtgagtccatgctagcatcccccaccgaacacaaatctattgtccctcggtttccgaaaccatgacagaaggacaccatatgaggccactaagattagggtttaagggcaactttcattggatctaaccaagttaccaccttgaagttcaccagcaatggtcggtcgctgtacgctcatgatacaaaaggattataggggaaggtggaggttagagcagtgccacgcaaccgctgttgttcactagatgttgtacccccatgcacatgtacaatctaattagtgaaatggatctccttgcctcatg

SEQ ID NO: 178717 - DNA, 506 bp, Zea Mays
tggagacggagcgaggtggagcgagaactttccggtgtctggcgcgggcggctccttccgcgcgaagaagccgagggggcggctacagtgaaccactgcatctggcgtgagagagaagagtgtcgcgaggaaggggagaggcgagcgctcaccgctgcgcgaggtagggggaaactgtagcccctatacggtgaacagtattagcgtaggggaggtgaagaggcaagcgttgcagtcagtctgatgctatgccgacgagtagagtgtgagacatctgtcagacagacatgcgccatgcatgcatgaatggagctccacttccacttccatgtgtctgcgtgacgacgaatcaattatcaatcgaagattcgatcgattcgtgtgcatgcatgctcacggtacccttttccgcctgggactgggttttcgcgtgggcacattgtctatttttttttcattttttactaggtctcttttgatagggctcttcttctactagcttccgg

SEQ ID NO: 178718 - DNA, 660 bp, Zea Mays
cagggagccgagaagggagtttgggttcttcaacgacgaagcacgcaggggcgggccacggtgcttccccataccgcgcgggagtcgtccacgacttcaccgagccggagaccggagcatcgctgtcggatcgaagggcaccgtcacgccgagaccttccgtaggcaaccgtatttacgccggtaaaaccacgttcctgtaattcgccatcctctccgctatgcgtaggttcgatccgcgttccaatccatactctagggccgcttatccgcctgtccgccggatttgcaccctcccagtgcatggcgccaccgtccggaatgtcgtggggaggaagaagatcctagggccgttgatcgggtaatatgcggtggagactagaccggcgtgtacccgttcgcaggatttgatcggtgccataggaggggtgatggagggtgtagatgtagtggtagtcgtggctgctgctcggccgtcgaacacaggatcgacgatcctagtcacaccacaattcataaaactcccgatctcatctggtccgttggtgggagatcggacggctcaggttgaaagataccccttcgccgtgtaattttgtttatgagtccctgagcttctacatattcaacccaccgtcctagcctatatatttccttaagg

SEQ ID NO: 178719 - DNA, 861 bp, Zea Mays
gcaagtttttccgaaggtcttcaactttagctttatgagcttcggattgagcgttaaattttgcttcgtctttcttcactttgtccaccaatgaaagcagaattttatctttttccacggcttcatttctcagcttgataaattatgatcgaaggttgccaagggctatctggcagctttcatcttcagcattcttctgcgccctcaaagcgttgctaagaattaagccctgcaaaaagacagaatcaacacgagaatacaagacaagataatctatttttaagttcatcgttttcgtaccttcagactgttgtatgcatggttgtctgcgaggtcatcttttgacatggtggagaggccagcctcaagctttggaaatcccatatttctggccatctcccgacagacagatatttacttgttgtctgggagacagtattggaaatcatcttcgtctgtgccattgtacaccaaggccccctttgggtatttcagttcccgggcgtagtgtttggcttccacgatttcttcttcaggtaacttttttcccgaagcatgttgaataataaagtcaagatcttcggacggtgcttcgggaataggagatttagctttttcgggtgtatccttcttctctagagccatgcctgtatctggagattcttgctcagctctttgctcagttgcagcaggctctgcctcggcgagcactaagggcccagctttggttttagcacgagccgtaacagtttcggcaaccttttttgcaggggcaggagtcaatgcccttgtcgactccatgacaacgtccaacacgattgccattctcctcctcttgggagttattgtgggagtttttgc

SEQ ID NO: 178720 - DNA, 979 bp, Zea Mays
cttttttcctgctttcgcgagggatagcaatagtctgggtaaacaaagccaataacatcaaaaaacctgtttaaccttttcatgcctcgtcctccgaaggtagacgtcatggtatcatctttggcccttgagtaggcaccaaacaactcatcgctagttgcttcgatggcatccagccaatcatcattcggctcatcgaattggctcctgtacttgaaggtgtacttcagatagaccagaccacctttgatggacccaacagcagtttccttcggcatctcccacccacttgagagcgaccacacactataagcaatatgctcttggactaagtccctagtgcctatgtaggttcatactgtgttataagcagcttagcacgcttgaatttcgtttccaagggcaagagatggtcttctaatgccgaagtgagaccatatgggacattggataatccccttgatatcttctctctcaaccaggtcattctttacatagaaccattcttgcatcaaggctcctggccatctcttctggaatgttggcactggattgcttacttcataatgggttacgaagccataacaactgaaattgttgtggtattgctcttttccaacatccttcatctcataagttaattcatgcaagttgcagaaacatttcgcattcggctcttgtccttgactcctcatggcccaaatataaacccctattctgatgatggctttaggggtaagctgatgatggtagactttgaaggttttcaacacttcaactagcacattatccaaagggaattgaagccccgctttcataaaacttctgtagaaaactacctcgtcagcttcgggcagagggacattactctctcccccagcccgcacaatagaaatgtcacaaaaataccttcccctcatggcatcaatctatccttatttgattgtcgactttccgaaaacaacatggcttggcctcc

SEQ ID NO: 178721 - DNA, 776 bp, Zea Mays
gtgtaggatagcgtgggttgaaaatataaattatgtgacatgtgattcgtgttttaaaggcgagatgtgcgaatgatcagttagtgtttcacttgtctagtcgataaacgtcgtcataaataattgtgctaaaattaggcatgagaaggcagtggggacacgtatgtacatgtgtgctgtggtgtattgtagtagtggtggcgtaagataattgattgaggtgtgcgggtatatgtcgtaatgtggttatactcgcgacgaggaaagatgtatgtattgtgtaacacgacgtttaggtcgctattatataatcgtgtgaaggatgctcgtgatggttgtgtgattgaggagtgatgtagtggcaagcgagaagtaagtttaatttttcaacggttagtggatagtatctgtcaatgttgtcatgatttttgttgtatgaccgatctatgcttagctttataaattattgcattacattccctttggataaataaatgtcttgttgatcgattagaggtcttatatgagcgttatcgcagcccaataattattggaggcgagtagcgttcatgagtcaatccttgctaaaatttaagaacagtctgataacatatgcacatgggtgctttaggtctttcagtagccagtgtaagtcttatggagttttatgccatgttttaatgtctctatgttagccctcctaaaatatggtgttttaagtgacttgtgtgttaactaattcgagtggagaaatggttaagaaaaactaattaacc

SEQ ID NO: 178722 - DNA, 435 bp, Zea Mays
ttttgcttttcccgcccttcacttttctggtcttccatccagacagaggtagccggcggccgcgctggtccttcaatttcttggtcacgatcgcttagtgagacgcgatgactgtgatgacacgaatggattggatggaacgttgtgtctcatgggggtggtctgaccaaagcactatccacaaaaatggatccgctgctgctgttgcttttgtcaaaccgccgttgtggcctttagccatagaaagatgtgtagtagctttggcatggatcagactatatgacaagattacagggtcatagttctttggctaaatcattttcttggccatatggttcgtataccatagacatttggccctgctatcactgtttgtttcactgctatcattgttcacatcttgcagtagaatggtcctgctatcactgttcaagc

SEQ ID NO: 178723 - DNA, 935 bp, Zea Mays
ttgccagtcctcagccacgcgtgtttgccgcggccccaacggaattcagttggcgaggatcgcgcctgatcctccccgggctccgcaccccggagcatataagaccgacccgccccagagcttcaccaaaccatcaaaccgagacaccggaccaccgtctaggcagggatgagaaagcgagggaggtgtgcggagagggaggggatttagccgccggcgtggatccacggttacaccgacgtcgaggcctcggtaccaaacttgggagcttcactgcgttcctacggaggtgatcgtggccacgcctgggcgtattggcgaccgggcacagcggaattgctcaccagagttgatccccgccgcgaatccgcacctcgccgcgaactgacttcttcacgacatcaccaccggtaagggctgtctccgcacgttcgcgatctcgtactagatgattagcactcgtcaatctcgggtttggagcgctcggacgtcatattgccgcgcgccggcaagcatcgccgccgcgggacctcgggcaccgccgtgccctgggatcgttgaagcaggtcgcgtgggagccatggatcccagaatcaacggacgagatcatatcgagataacggtatggctgtaggaaacgtggtccgttggatctggcattgatggctgtgattagatgtaggataccccttcacgcgttacaatccgggccgctggatcagatcgggcggttctgattgaatcgcacttcattaaatcgtggccgttgatcctcgatccgagggcggttatcacataccggttcgggctgggaagcttttaatcggagccgttgattcgaattgaacggcgctgatacacctataccccttcgtccggcaattttgcgtaagagccctcgaagaatcaggaaaataacccgcagtccaccctta

SEQ ID NO: 178724 - DNA, 613 bp, Zea Mays
cgcgggagaatcggataagagctacggataatgctcaaaacatcgcgaaccgccttggcctgcgcttgtccattccttgcgtcggcccattccgccagcagttgtcccttggcccacgaaggaatagccttgcaagacagtaagcataaaacctgtttgcgaggccttctaaccttctagtggacccggaggatatatgtcccccacattcaccattggcgatgttaagcccacaaggatctgggtcttcaggggcctatggaccccgcatagtaatgatagtccccatatcgtggagtccgtgttcgcgtgacgaagtcttcgcattcgggtaatcgggtgtgtgatatctgaatcctgcattcacatacaaggttactttggggttagccgtgattgcttagctcgatgatagaggtttggttcagccttcgtccaaacacttcctccacacgatgctattgctagtgctagctagcttatagtcagataccccaaggagaccatcgaattaatctgatgccttctagcagccatcttgtttctttagatcttagcgtccagcttagtttgaacttatgtcttctatttttacatatcttatagatcttca

SEQ ID NO: 178725 - DNA, 2386 bp, Zea Mays
tcttaactcagtgatattctgtggtctaggccatgccagcatagcagctgtctttgtagggtctatcgctaccccttctctggatgtaacatgtccaagatatttcagctctttcttcgcaaaaacacacttcttatgcttcaagaaaaacttatgttctctgagcttggacaataccatcctgagatgtttgtagtgctcctccagactcgagctgtagattaatatatcatccaagaataccataacaaacttccgtagaaatggttctagcactgtgttcatggcacactggaatgtcgctggtgcatttgtcaaaccaaaaggcataactcggaattggtaatggccatgatgagttttgaacgcagttttaccctcatcctcctctgccatcctaatctgatgataccccgtggtcatgtctagacttgtgaaaaaactgagttcctgctaactcatccaagatctcatccaccaagggttcttgatggtcatggagttcaaccttctataatcgatgcaaaacctccaactaccatctttcttctgaaccagtaatacgggggatgcaaatggactagcactgggcactatcagtcctacagttaataactctgtcacttgcctttctatttctgtcttgtggaaaggtgaatacctataaggcctggaattcaccggaatagaccctgggagcaatgatatatgatggtcatacatcctaatcggaggtagtccagtgggcacaacaaacacatcttcaaactccttaagtatctgcctcagtggttcctattccttttcagcaccttcctcctgcattgcatccaacatcaccaaagcccacacttcatttcccttcatccacctgctcagctgtacagctgacacttgcaacacttctgtacttcctacaccatcccccttcagctgcactctgaccccttcatcccagaatgtcaacgccttgttgtcccaatcacactccataggactatggctctttagccaatcataccccaatatagcatcataagcttctaaatccagtactctcatgttactggtataagtgtgtccttctgcccaccactccagcgctgccaccctttttgaactcaacatggactcaccattagccaccttaactcttactagtgaaaccacttcagttgataaggccaactgatctaccatcctctgactgacaaaacttgaggagctgcccgagtctaccaacataaccagcacttgattctggatcagtgcccgaactctcatacaattctcacggtcagttccactaatagcatttatagacaacttatatacttcctccacttccttatcttcctgatccagctgctacaacgcctcatctgacaaaaccaaccccatatcctctatagtcagattatgtaattgtgctccacctcttttaaggcatttagcttgatgccctggctcgtacttctctccacaaccaaaacataaaccatttagcctctgaaaatctctcagttgcctctccttagccaaatcagcagggccagttattgctctaggatctcctttcgctgtgttaaccatcactttgccccctaaataattcctctgaaatttggccttgttcatctccacaacttcttgatgtatctgcgccggaagtattgctcgatccagtgttcgaggtaattgtgccaacacatgtccctgcaattcccccttcaagcctttcacaaattgagaaacaaagaaagtttctcccaacccggggttgtgtaaagtattagtatacttggcctcttcaaaagcgtgaacgtactcctctaaactggacctctgtgtcagctgcaacaaacccctcattgcttgggaatcctcttctgccccaaacttttcctgaactgcttgagtaaactggacccaatttcccaatccttaactcctcttgtattctcgcacccaccgtgctgcatttccttccatgtgcagagaagctgaggacggccacaagagctcaggcacctgataaatatggtaatactccaagcacttatcgaaccaaatcttaggttcaacaccctaaaatttgggaaatgccatctttggcaaatctgaaggccgataatctctattccctccttgtggatcaatcacccggttcctcatgtttccaccctgttgctcacgacgctctctacttccttccggctgatcatccacacgaaactctttctcaccatgctcccgatcaccacccttagaccgcctttggttacgcccttccctctcagactcagtttccataccttccatctccttcgccatccactccaaatgaaggcgcgacactgccttcccgatttcgtccacttggcgc

SEQ ID NO: 178726 - DNA, 400 bp, Zea Mays
gcgaatttaggcatcaatcaactcactgtgtgtgcgaagttcatacctcgccgtggaccaccgtgctatttatagccacggcgacccggcagacgatctccggccccggatagctttgctagcgcatgcttaccacgtcggtagaagacacagtgagggagatcgcggcatgggtgacaccacggcaaagtcactgggtcacggtggccgccggtgaggtctccggctggactcgggaaatggtgccacatatgcgttatctaactatggcgttatccgttccttaccgagcccaaattggaacggcagcgacacgaatcgcggcggcgagtcaccgacggtgagatgcacggcacctcagatcttttgtcactgtaccatggcgaagatcatcagccga

SEQ ID NO: 178727 - DNA, 469 bp, Zea Mays
acgtaggagcgtaaattctaattatgtctaatcttccatggtaatttccgcgatgtccgcgatccctccatctccgcgatgtgatcctcgcgatgtcaccgcatgaccatccgaaatcgtatcgcgatcgccggaatttccatcttcggccaatgcccgccgcacgagcgtcccggtacgatgcatggctttgtggcttaaccagcgaaccccggattttgtggcataatctggaaacctcccccgacgtcctcccgccgtgtagccaggtacagtagacatacaccgcacgatcgcatgtccctcaaacgcaagcctcgatccacccttctccgccccagcggttcttcggcacgacatcctatcctcgttcttcactcgtcgccgcacgtaccttgtctccacctgtcacctgcaaccacagcctgccaagagacacgtcacacgcacaccgtgttgtcaatcgctc

SEQ ID NO: 178728 - DNA, 594 bp, Zea Mays
gatggctcgtttcttgaaagggttaagaccagaactcaagactatccttgccagccaagacttccttagtttctcgcacctctcaaacaaggccatccaggtggaaagagcacgagaagaggaaaaaggtcaccttaagagaaagtttcaaattctccaagctcaacagcacgagaagcaccagagggttcgatcttttgggttcccttccaaggggccaaacctcagcaagccagcaggatccgctccatcacgtttcaactagcctggtcaaagttacttccacaccgagtccgttgcaagcagccaacctccagctaatgcttgttggcactgtggagaccccggtcacttcaagaataattgtccgcacctaaagacattcgtacctacctactccaactcggtgaatggccccaagaatgttacggcacccgcctccaagacaccctccaccaacaactagttaaccaagacttagttccacggcagggctcgagtgaaccacatcaatgcccaggaagctcagcaagcccctggagtagtactcggtgagttcctagtcgaatttacccctgctgctgtgctttttga

SEQ ID NO: 178729 - DNA, 405 bp, Zea Mays
accctattatacctaaaacatactttagaaacaattgtcaaattattgttttgaggacctttggacaagaaaggcccccaacaagtatgctagctagagaagaaacttccaagtaggaaatgctatattgggatatggtggtttggacaaagtagtatttgttttcaagtttctgtggtgcttgtatctgaacttagtatggtaggtagactccttgtgtttcagtgggtatttccgcaagaagtttttcttaaaactttgaacatagaaaatgcacttaccaccttagcgcatggacggttagacattgtggaagacttcatgctatttcgtagtgggacaagaatttccacgaggaggtaatcagtgtgccaaccagaattgacttagtcatgcacaatttta

SEQ ID NO: 178730 - DNA, 776 bp, Zea Mays
aaattttggatttgaaaatgaaaaggaaaaaaaataataaagagaaaggcttagctgggccacttataaccatttcggtccatttttccttttaatctgcgcgacccaaaccacgcaccggccgcagcctccctctgcccgttccccaaagctgtgcgcgccggcaatcacttccaccatcagagcagctcgtcgtgggcggacagaaccgggcgaccccgcgccaaccaaatccaccgcaccaccttcgccattgccgcattgctcactcctggcatttccttgggccatcagggagatattcgcggccggggtcgggggaattgtgcacaggttgcggcgaatttctaaaccgtgcggcactgtcgccaggctcaccctacaccgcgctcggtagtggctgcagggatctctggtgagaggttttccctacttttttttctgtattgattcactgcgttactgggtgtcggccgggtgattggttactggcgttctgggttgccgtcgttggtgtgcccgccgccgtggcgaggagtccgccgccgtgtttctgcgtggtggagaagagatggcgcgaccgtcgacttcttgatagatggctgcgattaggtaggattgtagccgtaggatcgtaaatgcacgactgggattagaaaccagatgccgatgcgcttgagtcaaggctgactgtcgattgttgatcgtaggggtcgggtgcggttcaggtttcattaaatccgcgccgttgaattttaatcggagggcgatctgtg

SEQ ID NO: 178731 - DNA, 441 bp, Zea Mays
agtgtcaaatgttggtgctccagtggcatactcggcctggaacttgcctcctcccaaagccttcactctttttgtgtcgaatcctcctgctactgacggcagtttgggccttagagtgcggccctctgctgaagaagttagtgccttggttgccacactcgggggaattcctgatgatgaacggcaggtttattttgaggtgcccctgaaccctagtgatgcggagataggtgccatgcttgatttgctggctgaggactcttctgatgctgctcctgctggggcattggtggtggtgcccctcccagaggctggtgtgaccttagatactcagaaacctgctggtactcgcccgaggcgcccctgccgagccaatccatccgatccttctgctgatgaacagaaaaagaaaaggagacgccttcggcaggtacccagttt

SEQ ID NO: 178732 - DNA, 724 bp, Zea Mays
agagaagggcattattgtcttcatctcggtcatcctccgtgcagaggttgagatcaaggctgtccaacatcgtgacaggtgaagacgagaaagcttttggggaggagaaggagaaactaccgaacagaggaagaagaatagcaaggtatggaggtgtctattctccttttctattccgtttgttacaaggcagtctcgccaatatatgccattcgaatgggtcacacacataatcatgtattacagccaaatcggtccaacaagcctaaactcaagcttcaaatatccagcacgccagccaccagaactactctgcattctcctgttgttcttcagtcacaattgtgacaggaccccccatcgaagaaccatctgcccccaagatcgatactgcagaaaccatgccttcaggacattgaaatcctcccatgatgccatctctggtggtagcctagtccatttgactaaaatttgaacaatagcagaattgcccttcttaacaagttgacgctgcaatatctgcggtgatacaactgcatgctcttcgaagacattagctaataaatcatcaaaaaataggagtatagtttaaatgaaaatacttcaactaagatatgtggaaaactagttgtatctttgcatcctcaggcaagtccagcttgtaagcagtttgttcgatcctttgaagcactttgaatggcccaaagaacttaaacaatagttt

SEQ ID NO: 178733 - DNA, 594 bp, Zea Mays
cgcccatttaggtagtcgaacatatgcaagggacgacctgctatacatgacacgtacccataccatgtatacacacaccatatatggtagtctaacactccccacaatcacaacgtcgatgaggcaaacattgagactggactgaaactccgtgaagacagaagttgacaaccctttggtaaatatgtctgactgagacgtcgttggaatgtgaagtatgtgaatagaccctaaggctaccagttctcgaacgaagtggagatcaatcccaatgtgtttggtgcactgttgctgcacgtgatcggaagacatgtaatttgtgctaatattattatcacaatagaccaacgtggcaaagcacaatggagttgcagctcagctaggagctggcataaccaggaagcctcgacgattgcattggcaacgacacgttactctgcttctgcactggaatgagatatggtgttctgacgtttggatgaccaagaaatcaagttatcaccgaggaacacaacatagcctgaagaggacagccaatcagcatctaagtagaacacgaggttagactgactagaagaacatatgtgaagaccc

SEQ ID NO: 178734 - DNA, 798 bp, Zea Mays
agcaaaagccccttttcctcttctgtcattttggtcaagaagaaggacaactcctatcgcttctgtgtggactatcgccatctgaacgcactcacagctaaggctaaatttccagtacccattatggatgaactctttggagcagcttggttttcaaccttggatcttcgagctggatttcaccaaatccggatggacccacgagatcagcacaaaaccgcattccagacacatcatggccacttcgagttttgtgtgatggcatttggtcttactggggcgcctgctacctttcagggtgcaatgaacagcactctgaaaccccttctcaggaaatgtgcgttggtgttcttcgacgatattttggtctacagtgatacatgggacaatcatcttctgcacctcgattgggtactgcagctattacgccaggaccagtggcaagttaaattgtctaagtgctccttcgcaaaacagaaaattgcttacttgggtcacgtgatcagcaaggatggtgtttctacggacccaaccaaagtggatgcagtatcttcttggccaccacctcagaatgcaagggagttacgggggttcctcggtttggcaggatactaccgtaagtttgtcaagaacttcggtgtcatcgccaaacccctcaccaacctcttgaagaaacatactatctttgtctggactgacgaacacactttggcgttttctctgctgaaaacggccctttcttcagcaccagtgttagcactcccaaattttactcgcccattcgccattgagacagat

SEQ ID NO: 178735 - DNA, 528 bp, Zea Mays
gggttcacaagtgtgcaaggggaggaggatccatttcgatagttgatggagttgtccctatatgacataaacaatctgatccataagtggatggaaatgggtcactcaaacacggatctagtgctagatgaggagaataccgagagtgacacaccattaccataaagcctcatggctcaaatcacttcaagggaaactttggctgagtggactaagaagaatgtgggggacactcacattggtaagcgaaaggtgtagttcgtgttaccaaaaagaagcaaagaaagaaagaagtggcaagcgatgatgagacctatactggtgattaaagtccacaataccaagagtctatcgatagcagttcaactacgtcttctgatggtgttggtgttggtggtggtagtgttggcggtagctgtgttggtggtggtggtgggtctgagatggctcctcccatacatttcacaggtaccattacatttggttctcagtaaattagtgattgctatctaaccatattattgtaac

SEQ ID NO: 178736 - DNA, 612 bp, Zea Mays
cgctgttggtgttcatagcgaagagcagcagggagctccagctgtgaatcatcggctggggcgcgcgatgagccagcagcagcaggtccgcccgcgttgcttcggtggtgacggctggagctggaagaaggtgctcgtgctcgtcctcccttcccacagcgagagcaggcgtccaagaaggagcaaccgtgatgacagcgaaaagaacgtcaagatcaatcagacgggccgggcggctgcgtcgtcgttgctggtcggcaagctgacggtgggtacaaggcgcaataatatataatctccgcacaagacaaataatagtgttatatatattcttcattgttgcatatatactgtgtatattgctgatctgatcatcacagcaggtttgcaagggcagacgagaccgtagcgggttactgaagccgctcatgtccttgtttcagaagcggccacgatagattgtcgaagaggtgtactgtggcgagcgcggcgagcgagccttctagacaccatggattcttgagcacaaacatgatatcaacatgagaattaataaggttccaggggcgtcccgtcgttttaggagaccctgtgcaaaacataaaaaaaata

SEQ ID NO: 178737 - DNA, 455 bp, Zea Mays
acaaaggtagaaaatagactttggctgaacttgcagaagaaaagaacccgtatggatctatctttgtttatgatcacaaaatgattaacagatgaccatctctctcttataacaacaccaaagaggactgtttacatttgtcgatcgggtgttagtattaatttggtataagaatcatataatataaggaactgtaaaaggaatcaaatatctgtaacaaataaattaaaaatatgtaaggcgtcaagaaggcggaggcgaagtcaaaagataaacagacagaatgcaaagaaaatcagaaaaatatggtggggtcatcagagacttaaaacgagggaatcacaggagaataatcccatcatattgttgcagttaaatactcatcatctgaccagggaaacaggcaagaaaaaactacctatgtatcttggtaaggaatacaacaatactgaaat

SEQ ID NO: 178738 - DNA, 414 bp, Zea Mays
ctcctgcgggttggcgctgccgatctcgcctttcttcgtgctgttgttggaggagttcgggctccagcttcagcaccttacaccccactccatcctccaagcggccatcttcgtccatctttgcgagatgttcgtagaggtggccccctgtacttccctcttccgccacttcttcgtgctggtcaagtctaggaaggctagggaccatcttggtgcctactactttcagacgaggccggattcagccgtagcctacatctccaccttcggcggcgcgaggtgggaaaactggcgcggtgactgggtgatcgtcagcgccgaggccaacaaccgccttgtcctgccgagcaacgggccagccctcgaccgcaagcactggaggaccaagccatcgctatcgccagagctcctgcc

SEQ ID NO: 178739 - DNA, 769 bp, Zea Mays
tgtcgctcggtcctgcagcgagggctcgccggagacgagggggacggccacggcggggctctaggggcttagggaaaggctcaggcgcgttcagagcgacacggcaaacacgaccgtgggtatcacatcggcgagggagcaccaaagggcacagaccacgacggaaaggtaccatggcggcgcagacctacttcggtgaacaattatgcaacaaccaggacgattaacggggaaatagaggcacagggaggttgcttaccacaagcgcgaacctaggaacacctggaggacggcggggaggcggtgaggacatgggtcgacggtggcggactccggctgcacaggaaacactccggtgagcgcggactgggcaaaccaaaggggttgggagcaaactgaggggtgcaaagagctattggtggtgcggtggagcttaccgagggaacgggcgcgacgcgggcgcaacaaggggtgcagaacaacggcggtcctcggtgagcgacggtggaactcggctggtcgcgtgcatagggcgagagaggaggcgagagagctcggttgagggtgcaaatgagcagggggagtgggcgagtggtgtgcgggcttctaaaggggtgcgggctcgagaacatggccgaagaacgcggtcgtgggcatgtccacggcggggggatgtgggcgagaggttagggacgcgaagggggctgacgagtggggccacgaggcagagagagcgctcgcgcgaagagaaacggtgccgacagatcgg

SEQ ID NO: 178740 - DNA, 894 bp, Zea Mays
cccccgcttcgatccacttggtgaagtactctacaaaaataaaggcaaatttgaggttgccctgcgcggtggggagtggtcccactatgtcgagggcccaacgctatagaggccatgtgtgggcgattagcttcgtgagctggaaggtgtcctgcatcgggtgtgaaaatttttggcaagctttgcatgagcgcactatgcggttcgccgtgcatacaatatctggctagtaaaaaccttggcgcatgactttggtggcaagggctctagggcccgagtgacagtcgcatgttcctttacgcacctcgcgtaggaggtcgacgccatcgatcaccatgatacatttgagcagaggctgacatattccttttttgtacatccttccttctattagggtgaacccatgacttcagtatttgagtctcttgacttcggcttggtctgtggggcgatagtgtccttgcaggtaaagggctattggggcccctccagtcttcggtcattatgaggcttatgattctttgtctgtcagggtctcttacgactagggcttcgattatctaaatgaaaacatccaaaggcatggggtctcctcttgcggcggccttcgcgagtgcatctgcctcttcatttttgctcatgtctacgtgctagattataaaacccttgaattgttttctagacttcgcacgaccgatagatattggaagagtactagttcgcgagctatacagtctttttctttctggctagcaatgactttagagtcgctcttgactatgcatgtttttaattccaagtactctgagtttgcggagtccgagaattactgctttgtaatctgctatgttgttggtgcgcttgtttatctcgagggctgacatgacctttcac

SEQ ID NO: 178741 - DNA, 568 bp, Zea Mays
aataatcagatgttccaacgacttgggattaatcagttacccacaatgatgactgccacaagagcaaggagcaaatatgatggtcctcaagaatcagggtctttgtttgacggcgaggacagtgaaggctctgagcaagaggaagtaaacaagtttctaattcatctatttgtttcctcatgttatatatcgttacacatgcatttgcaaataaattgatatgcatgattattgtattatacctacaggattcccatgttgcaaaaggtgtacatggccacaaccccactcatgttgctgacaaaactacacaaggaacacgaggatctaagagggttgtggcccctgatgttcctggacaagaaattagattcactaggcaaaggagtgctgccataaaccaacaatcctccttaagcctaactactactacacatgctagttcacgaaccaccacaaaccaagcatccacagagaacttgactaccgcaacacatttcacttcaagtgttgccactgagcaagattacaccgaaggcctgaatactgctacacaacctacttctcc

SEQ ID NO: 178742 - DNA, 374 bp, Zea Mays
ctattggctttgtctaccccgactaccgctatccactgcgaggtcagggaaagaagaggaaaactgctgcttcggccactctagtcgagcctgcaccgaagggcaaaaagttgaaagtccttacccaccggccacactatattgaaccggccgtggtgcctgagtttggcggggagacttcttcagctgctaaaccaagagagcccattcctcctacgcagaaggctggagagccagctacaatgccgaaggaagcttcggttaaactagctgagtcgaagactgaggaagataaagctgaaaagccaaaaattgaagaaacaaaaacgctagaaattttaagcccttcatcggaagtaactgtgccaaaggca

SEQ ID NO: 178743 - DNA, 947 bp, Zea Mays
cctcacgcgcgggattcgtggatcagctaacccaccgcctggttctcacgcctatatgaaccttcttgacctcgcccttcccttgcgcgcttgaatccaacagcgttttccgtgagatcggcagttcgccattgtcgttgactgagaagaagtgagtgagagggagaacacgaggaaccgagcgcaagattggggtcttcatcgtggaagcgggggcggaccacggtgttcttcgtgtacctcgctgtcgtcggccgtaacgtcaacaagacagcacgccggtatctcgccgtcgaagaacaaggctcaccgtcacgcaacatcttctgtggacagccctgcttgcgctccaagtctcggtgaggcctcgctggcacttccccatggattaccgcgataattagcacttgtattcgctaggaatcggacaccgaagcactggggggttggatttggggcgcgacggcgatattccgccatgcggggtggcgcgccgccgtggccagcgctaagggttgaagatgcatccgtggccatcgattgttaagtgaacggatcgggcgagatctcgtccggatgatgtctggaccgttgatgtggatagacggtcgggattaaaaagggagaataccaggttgggtttttagatccgagccgttgattccgtagcgtgtgcatcggattagatctggcttatttgaaatagtgaccgtagatcggaggatcaacggtgctcggtggaagcggatcgagttgcgatcggttttgatctgggcccttggtttctaatccaacggctcagagagaaccgtaccccttcggctagcgtaatatgcaaaagaaaccctcggttattttagtatcaacctgcagtccgtgcacagcgttatgtgtcttagcagattttacccagagccccctgcgcttcacagaaattgaggcccagt

SEQ ID NO: 178744 - DNA, 478 bp, Zea Mays
cttaaactggtcccaggtgacttgatggccggcaggctcaatggccacataatttccccaccaggtgttggcaggacctcttaactgctgagccacaaataatggcttctgggtatccgtgcatcagaggagtccaaacttctgctcaatgacccgaattcattcgtcagcttcgaggggatcttcggccttgacgaatagtggatgaagagtttccgagaaatccaaatacgaagtttcgtgaggtccttgcggataagctctcccaccttgctgctgcagttgctgtcccgccatttcatgaaggaagcgggtgttgtcagcggtcgcggtgaccaaggaagcgatagcctcggccagtgtgggtggaaccgtcggtggatttggtgtatcttcttggccacgggatgttcctgcgccgtcatgtgcacgagttcgagatggcatctgaagcaaagaaatatttggaaaaaatatc

SEQ ID NO: 178745 - DNA, 573 bp, Zea Mays
ttcaaacattatagaggtcttcccaagggttcttataagatatccccaaaaggtcatcaccgggaagtcaagaaatacatctagatgtgatctacaatatgtatcataccgatgaccctaggaacatccataactacgtgtcgatggccctctataatgatggcgtatgtacacaatgcagtcacatgtcatggaatgtggcaaccgggcaagctctaccctctgtccatgtaaaataaatctatgatgtgaagcttaacaaaatggtagtttgatactatataggataactagcagatctttcctacaacaatgcttagtacaatatcaaccgggagtaaggtgatacatgtatttctttgatgcaatctactagataccacatcagggcaacatgatgcttacctcagaaaacccttagaaaggggaggcaatgtgctaccgagatgacaaacacatgctgcatgggaacatctgtcttctgattattgataatggtatatatacattttatagtccatagactctaagagataaacacttcctaactaacatatctaactgatacttatc

SEQ ID NO: 178746 - DNA, 663 bp, Zea Mays
cgacacagttagggttcactcgcagctgagaaccgatcgaggtcgtaggagagcgatctaacctgagaagagggaggccacatggctaggcttcactcgcagctgagaaccgatcgaggtcgtaggagagcgatccttgcgaagcagatgaaaacaattgagaagataaagcagatgaaagtagatgagcaaccaagaaaggggctaaccttgcgaagcagatgaaagtagatggacaacgaagcagatgaacccgagaggcgagagccaagtagatcgacaaatcgagcttgtccgcgggcacggtgtcgtcaccacgggtggagagagatgatggcggcgagcccgtgagcacggcgactgcgagtgaacccaagaggtgagagcgagtgaacccgagaggcgagagtgagttaaccctagagagaggcgagagccgcggtggctgcgagtggcgagagaacatgagaggcgagagttaaccctagagccgcggcggccaggctcactcgcgaaggacaaatgccgcgttcgaaatgggcctagccacacaatcacttatggctcatctcagctaggctcgtgcgctgggccaggcaactaaacattgcgaccttgtttcaaatgggcatggtcgtgcgctaggccaggcaaccaaacata

SEQ ID NO: 178747 - DNA, 1224 bp, Zea Mays
ttacctgatccttttcaaaaagagcatcccagtcattttccatcaaaagcttcttggtatctgcatagctcagtgcaatacggtagttcagatcaccaagccatatcaccttactgaaaccaacagtgcacaaattagtaggaaaaacatgttgaaaaggaacatatattcacaatgttagatatgacacatcattcttactcatggtcaactattctctccgggatttttcttccagctcttctacagatcctagaaaacattgtgagcctcattatctctagaacatccgagttcctcctgaattcgtctccttctttttgacctgaagccaaatggctgcatacgaaacaaaagcttgtctggtgcagtgtcatgcttattgatatacatccctgcagtagaagtgcattcaagactagatagaataattacaaccaggataaatttgataggattctgtcctgaccttgtttccaagacagcccagaatcccgcgccctatgcaagccttccttagatgcccaatatgctgcactagctctttcttcacccacacagtaacaaaaatgccaaccatttgtttgcacgctatgagattatattttagttgatccctagtggcaggaccagaagtaattccatcgaccacagagccatcagagtcccttgatttctctttatctttccctttctcttcatcctctccagaggaatcagtctcatctgcatatgctttttgacatccaaagcaagcatccctgtaggacgttctggtcatttctaccgggcaattgcaggccttaagttgttttctacgcactggcatgaaagatttgctaatggcttttaacaaggaattctggaagattgtggcaccacttgctgtttttgataggtcggagaatgaggtgccgatgcttgatgaagctcgagaggaagaagaatcaacagagggagatggttcatgctgaaagacgttggcatcaatgtcagctggtcgatttagtgattggtttataagaacaagccatctagcagctggttcattgtcttctattacaagcacattaccagcattgagagggacaatttcctgaaaactgttcaaatgttaaacaaacaagagcaattacacaaaggcttgcatcaaacttaaaagttccattaaaatatccttgatatacttcattgtgcttcaaatagataccaatatgtcaacac

SEQ ID NO: 178748 - DNA, 514 bp, Zea Mays
gaaaaagagaacgcgtctggaagctttatggcccgtgaaaggtggttgaacgggtcgcagcattgacgggagcgtggccggtatccgccgcggttcccgcgagctccgttgtcctgatcgcgcggagaagagatgacaggtgggccccgagcgtagcgagtcgactgggttgcgacgtgggtgcgagttgacgacgtatgacgcacgggtctcgcagagtagtggggcgagtgggcgacgtgggcgtgcttcacgcctgacggtcgagccccagttgtcaggtgcgcgcgcgtgagtgtgttgggctgcgcggggattggattagatgggccgccaggcggattcggcccaagtgcacaatcacaatttttcccctttttcttttccattttatttttcctatttctttcctttccatttcaaattcaaacttcaatcaaattttaaattccacttggcggcaaggttgtacacaaactactattaaatttaatcttaccaaaatgggttgaag

SEQ ID NO: 178749 - DNA, 517 bp, Zea Mays
atttggagccctaggctctctctaattagagaaagccccaaccaccccacccgaccgactgaacaagacgcaccaccgaggagattttacgattagttatacaaacatttatgcttgtcttgtatccattttacacaaaaaacggatgaggtgcgacgtgattgacctgacccacacctcgcttggatcacgcccacgtggtccatgactgaattcacataagaccccatcacccccaaatcatcccaagcgtccgtaaccgctcgcaaccctaatctaatccaccgtcatcttctcccagatcgccatctaccctcatcccctcaaacccaagccaaaccccacctcccacatggtctgctgcagaggaagaacatcatcgctgtcacgaactatgtgtagcctaggttagtaccaccttgcttgcaggaggggaccatggtcgacttataagggcgagcttccctcctctctcttagcccaggttttgagatgtgagtgtagtgctcgctactga

SEQ ID NO: 178750 - DNA, 471 bp, Zea Mays
ggcctttgcgaggtcgtggatgaggtgatcttctttgttcagacctagggtgtcgattgaggagagcgaattctcaatgtagctaaccgggagtgcctggtcgtccatcgtggcgctcatcgcggtgccgctggggctctggcctttgtgcagttctggtcgggctacgagtttggtactatggacttgtcggaggacacgaccgtcggtgctctggaggactttgaggatgacttcgacatagccaccgaaaccatggtcgacatctttccactggaggatgtgatcaatggatctccctagttaggatgtatccgtaggtagcttcgatcatgggacggcccaggtgtgtctgcccctatgctttttgcaatgttgtcatttatttctaaacttgttggtgaaatgtttcccctccctttcctgttcctgatattctattatcctttagtgtgaaaaaatgggttttgg

SEQ ID NO: 178751 - DNA, 635 bp, Zea Mays
ggctagggaagggcgcgcgcgggggccagagaagggtaagccaggagccgcacgggagagggagggagggtgaggggaagagaggggaagctcacctcgaggctcgacgatcggcggcaaccgctcaccggaatcccatctagggcaaggggaggtggaggagaggtggaagagagggagagggaagttgctgcgcgcgggaaaagaaaatgagaggggggtggaggcgcgcatgggtggggagaggggcgccaggggcgtgccgggtcgggtaggacgcgggccgagccaacaacccatagctcgctctcgcttaccgctaaccgaatttaaatcgtgaatcaaaaactgaaacgagacgaacgcgcgattagacataacatcagacaaaagaaatatgcttcggcatgatgtaacgaccatgtcaacttggattttttgtttacacgcgatacagacaccagtctccaaactgctttgaaaatgggaaggagccaaacgagaagagaaaagcgagtaatgcctaaatttgatgaatatcggtacaaaaatttataccccaaaattcagggcgtgtcagacctagactagaccagttaaggctcttttaagcctatctcctccaaactttttcg

SEQ ID NO: 178752 - DNA, 470 bp, Zea Mays
cgcactcgtgctacgcccgccactgcaaacgcatatatatggttctcgatcggtttagtcaccaacagatggaaatggtccctcggttataattaaaaagtcgcaaagcaagcagggttttgcggcgtcgtcgtcggttgataattcggcaggagctttgctttatatattcaggaaaacctcgtccaattaattcatggttgcgtcgtcgtcagcggctcgcaagtagtaggtggtgtttcctattgctccaaggattgtttaaggaagcaatcttgtcctctcgaatctggaagaatccaccgtcccaaatggcactgtccaattaatacactatccagcgataaataaaaaaaacggaaggagtaccatacatgcatgtcgatgacgcacagctcggatctacacgtacatgcgttgcagcacacgctagcatgcgtagttcgtcagttagccgctcctagtgcggc

SEQ ID NO: 178753 - DNA, 2487 bp, Zea Mays
ggtcaccgtggcacagatatgcttcatgggctacctatgatgcctccgatggatcgttcgtggggcacttcgtgggcctcagctggccgaggacaactgaaggagtcacgcgctgagtcaaggagatctttggaagcacgtctcgtgcatgcagtcgtgcccaagcctcacgagaagccaactgaacaccgaagacgtggcacgtttataacgaagtgggtagatacgtatagcgctatgatttgtacatggttatctcttcagtcggtcatataaggctgaagaggtacccctacaaaaaggagagactccattagaccctgctatactcatacaccgctttcatctcctaccttcaacagtcacttgtaatcctcaaactcaaagcaatacaacgaccagcaactcacatgatgtattacacatctaggcagcccgaacctatataaattgttgtgttctgtcgtgccccacacgaaccattgagctgcgatcgtcctcatcgtcctcccaaaagcactacatggtataccctatagtgtgccatcggaaccaaataccgatgagtgtagggggagaatttcgagggtaccgctgtgggagacgtaaaagtaggggtaaaatcttggggatgtggtgcaaaagtgggatatagggggagaaatttagagggaaccgccacggacagtctaagacagccatggtaaaaagacaatagtaaggttggttcccacccgcacatctaccgttacgttagctatcaactgtgccatcaatctttgttagctcttatttaccgtagcactctagtgcattctttgttttcagtgtcatctcaacaccacattagcttttcttttacagacttttagttgacataaaacacattgttttattgaaataaaagtgcatctgattacatatttaagcaagtataattgcatacttcataaaaacaataaaaaatcacataaattaagcataaaattaaaatttacataagtcaataaataaaatctaattgtcatggtgaaggtcctgaatatgctctattaaaatattttagagttgatcatagaccaaactagtatagattgtgaccccatgttgaaggatgactatcaagctagtgggtgcttcgagagagtgatggttgatgttgtaacgaaagacttgaggatctcataatcattcacatcatatgttccttcatgttcattctcaatgatcatgttatgcagaatgatacatgcacacataatcacatcaagtacttggtgagaaaaagaatgacctaggctagcgagaatgtggaagtgagacttaaggatcacaaatgctctctctatgtccgcgtccgcgtcctcctggcatgcaataacatccattgttttagagtctatataagggaaatagtcttcacaaacaccagtcaccaaggtcaaggtcatcagcgagatagtacccttagttgtgatcatgttcattcaccatgaagttcacatttggcgcttctcccttaagcatgccagtgaacaacgatgatcggttgagcagattgatgtcattgttcgaccccgctaccccaaaaaaacatgccaaattcataagtcatatgaggcaaccacctcgagtatgatggtcgagaatccaatgcccctagtaaactatcattttcatacaatggatagttcctctacttccaatgcatgcaatttatactatatatcatactaggaaaactcctctcccccttagctaaaaagaccgtcaatagtggcatatcgactgtactcctcacaaacacctaaaatgacacctcaactgaatgttaaggcgctaaggccatattttttaccatttgaatatatatactcttcaatagattcggcaacatcagtggcggatccagggtttgaaccaagggttgtcgaggacaaaaacatttagacatgtattaccttgtataactcgttaccacatatatctaatttcatcaatctgatacatgattaaaaataaccaaaatatcacataatgcatttaattcatcacattaggttacaagttgcatagatttttctttaggcctacgctgaagagtattttgtttttggaccaaattgcaaggtagttagaggcctatccaaaacaccccttgggtccacccctgggcaatgttattgtaggcaagcatgcagaggggagcagtgcatttttggtgagaggagaaactgttatggtgcatcgactgtaagagtgaaatagggagaatgattacctatcctctgcaagatttaaagaaaaagactcctttgcatatggtaccttgaaagaaagtagagaaaagggtaggcacctaagtcattgaagtagtagttttgcatcaccgattgtgggcggctacacgatcccggtcaatgtagctatattactatgtcctttgtctctcttttgttgaagacccaaaggcaaactttgtcgttg

SEQ ID NO: 178754 - DNA, 445 bp, Zea Mays
tatgagtcctgcatagtgagatggacagacactgcgtgtcctgtttcatgcaactcctaaccctcggtgtgtgcatagtgagatggacagacactgcttgtcaccgttcttatttctgttaccgtggccaccagtgtagtattgttcttcctgtcttctcatgcccctgatcctaaaccagcgagtcctttatccctctctatcttcgtgctcgtaagagctttgctgtgctgttctccctgcctgaactcgccccgcatcgtcgacggacatttagattgacgaacatttaggtcttacgaacatgttcttcgtgctcgtaatttctttcttatatttttgtcgttgtcgtcgctgttccccatcctggtgaccacgccgaccaatgttcccaccccgccgtgaccaaggctttccaaggtgatgcttgtttgttatgttcatg

SEQ ID NO: 178755 - DNA, 610 bp, Zea Mays
gtcgcgtcgaggtacgggtcggcgtcagaggtggtcggggctgaccgatccacgtgcgcaggcgggggagttcgtcggtggcgagaaattcagcctgcacacggcgagatagtccaattggttggcttgggaggcttgaccaggtgacatagaggcggtacacggaagaaatttgagaatggcgcagagacttactcggttcacgtttgttgatgagcggaagaagtccggctgggtgattctggtcctccggtgaggctctgccggctctgagggcatggggagcttcacgggtctctagcaaagcaagtcaagccgatatcaaggactggggatggctagggcgagctggccatggtggccgaagctcgggtggcttggcgggcggtggcgcgtcgtgctcaggggaaagtccggcgaactcgagcttgggcagggctgtgagcgtgcgggggagcacggtcgaagccttggggctgctttataggaacggcgcgggcgagggcgcggagtctggtgtcgctcgacaatggcacgtggtgtctggtgccctgggcgtgctctggcgcgtcagcaagggtcgaacacgtggacgctcgcttctgctctt

SEQ ID NO: 178756 - DNA, 772 bp, Zea Mays
ttctaattccgaagcgcgaccatatgggatgttgaatgatgcccctcacatcttccctctgattctgatcattctttacgtagaaccattgcttcatccaagagctcggccacttctttcgaaatgttggcatgggataatttgcctcagagtggggcacgaagctattacatccgaagttgttatggtattgttccttaacggtcgcctttgtctggtaggataactcatgaatattgcagaaacacctagcatccggctctagcccttgactcctcatagcccatataaaaacccccactctaataaaggcttcgggggtaagttgatgaaggtatttcgaatgtcttcagaacttcaaccaacatcttgtgcagtgggaagcgaagcccagctttcatgaagcttttaaagactaccaccccatcagcttcggaaagagggactgtgctttctcccccgccctcactatagaaatatcatgaaaatattttcccttcatcgcttcgatttgcccttgcttaacagttgacttcccaaaaacaacatggctcggcctctacggccaatcttcatcatctttatttccactctccacatcaaaactatcactatcgctggagtccccagacaacccagctagcgtctcattggtgatcttttccgtgttggttttttccattgcttcgtaaaacccagcaattgtggggtctgtaatcttcttgtccttagccatttggatgatggttacgacaaatgccgaaggtcagaa

SEQ ID NO: 178757 - DNA, 731 bp, Zea Mays
gttgcgtcgttgcgcatcctcacctctgtcaccgctcagtgccttgattcggatcgcaagcctacttagaacctgagtgaagtcgtccgcgatgcttacgggcgaaatcggtggcttatcatccaccaattgctcatcggagattggcaccgccacggatccatcccagtgcgtgggcgagcaccttttctaccttctactccggtaataccctgaccatcgtgttcatacgatctcccactctgttttgagtcggattatgatctcggtagtgcaccgttcggggcaaaccaactcacgccggtgatggcgccgccgtgtaggcgcggccatcaccatcgtccggcaccgtgtggaagagataatcggggccgttgaagtagtagggagcggtcgagattagatcgtaggatacctcttcgcgagattaaatctggggcgtcgtttcggtgatgtgtggtttagatcgaatcggggcatggccacccacgtccatcgatatcgcatctgacggtctgaaacacgtactgattcataatccacttagatttaatctgggtcgcacatctctgatccatcggccagaaacagaggataccccttcgctgcgtagattatacataagagcccctaatcttttggtgtatgaacctgcagtccacctttatagacagaaccttacaatgaggcccaaaatgttatgaaattgaccctatacttcttcaaaatag

SEQ ID NO: 178758 - DNA, 334 bp, Zea Mays
atttacttattttgcttttggatgcattatgatggcttgcaaatggaatggtggcacctaccaactgtttgcctagcattttctctcttgttttgtttgattgttagattccatttctaaacaagtattgtgtgagacagctatcatatcggttctatgagtcccatcattatgtccactgctgaacatcactttttgctctgctttccagatcgaactggttaatgtgaagttacacatgtagctagaaatggccatagaagacctacaagacgtaaggtaggacatgctttgcagtaaaattatgcttgcagacatgaaatggccatagaag

SEQ ID NO: 178759 - DNA, 896 bp, Zea Mays
agctctgcatggaaatactcctttcttcatggtctatggttcggaggcagtgctacctgctgatctcaggtttggggcaccaaggttggtctttgaaagcatagctggagcagaggctaccagattagaggacgttgacatattggaggaagagcgattgaatacagtgattgagtcagctagataccagcaaaccctgaggcgctatcatgacaaggccatacgacatcgatcctttgtagtgggagacttggtccttcgctgaattctaacggggaaggacggcacaaattgtcaccactatgggaagggccatttgtagtagcagaggtcactcggccaggatcatataggcttactcaaatggatggcacggaaatagggaattcatggaatatagaacatctcaggaaattttacccttagcaagacttcaaaagctatcgggggagcattgtattctgtaattggtaaatacctcatcaataaaagatttcgctctcaaggacactcgaactgtttattatcaatcagcacgcttactcgacttagagtgaccactataccctactaacggagcaatcggcttaaatcggtagtgacttaagacggtgcaacatgctcacgcttactcgacttagggtgaccactataccctactaacggagcaatcggcttaagtcggcagtgacttaagacggtgcaacatgctcacgcttacttgacttagggtgaccactataccctactaacggagcaatcggcttaagtaggcagtgacttaagacagtgcaacatgctcacgcttactcgacttagggtgaccactatgccctactaacggtgcaattggcttaagtcggcagtaccttaagacggtgcaacatgctcacgct

SEQ ID NO: 178760 - DNA, 485 bp, Zea Mays
caatgcataacttacttggatgtagatccaatagcattgggatcatttgatgacaacctcatcttcttttgactagatgtaggaccaccttgaccatacttagcagtatggcctaattcatgacattcagtacactctcttttcctcttcttgcttagctccccggatgccattatcctggctactcttggtcttccaggttttcttctcaatttaggcttcttaattttatagcctaaatccacttgtgaccaaagatgctttgatgtcatcggaggcaaaacacttgcatatgcctttctaaacatctctactgagtataactcatggacataatcatccatctccaaatccctattgtgtgttgcaatgaaagatagagcatgactgcatggttttcctttcacttgccaagatctgcactacatgtcatttgttctaaactaactgagtgtctaatggtggaaacaatcacttcagttgtg

SEQ ID NO: 178761 - DNA, 867 bp, Zea Mays
ggatagcatgattgacatgctgtgacatctagggggtaggtagagggccctaggagtagacggcgatgtctggtgggtagatgggtgggtcgacagacgtcgtcaaaatttcggcggcgtgctacgcaacggcggttgagaggctgtggttcggtggctgttgcgcgcagggcatgacgggtagcgacttggtaagcagagagagcgaggcgtggtagaggcgagcaggggcgctgctagctacttgtcggagttactggccaccgcaccaggcgagctcgcgggcaaagggacggggagaggggcaggcccaggcgctacaccatggggtgcgttgaaccggacataggtcttgacgagggcggcacgacgcgcagtcgacgggatgactcgacggggagctcgtgacggcgaacggacggggacggatgcagcggggcggcgtgcatcgaggagcgggtcatgccgaggtgaagctcgcggcggcgccatggaccaggcgtaacaacatcacacaaccggatggacagggcaagacgtgaggcttaccagggcatcggcttgctgcactgctccagtgcgtggggtgctcaccgaggtccatgcgacgtgggaaggagacggtttggattttggaagatgaacaggggcggagatcctgacaagcggtcctaggaaaagaaacccggcgcggttgctccattgcgcgagtgctgcttgctagctccaggtgggccacgacggaggaaagaagaaaaggctggtcgggccgcgtggagcttactcgctcctgcaggtcggcggggaggccttggggcaggtgggccgcgcgcgggacttcagtcaaaatgggagctgggccacgca

SEQ ID NO: 178762 - DNA, 597 bp, Zea Mays
atttactttcccagattattccagcactatagagcttgatatagttgttatagccacttggcaatataaataaatatataatgccacacaacacaatcaaataaaatatagagctaaacaaaattatttacaaaggttgcgttatgatgtgactttaggggtttgaacaacccaccacaattcacgcgagtacaagctctagtgtctggtgtcaacacgtgtgcgaccatcagggctacgacaacacaacaagccttcgtaataagcgcaacaggcacaattatggcgcagtaatcggggtacacgataagtccacgcaacatgcgcaacatgcgcaattgtgactcaatgatcacgacagacaaacagtgcctacagggcatgcgaaaaatacacgactcggcgatgagccgatgacaacctgactcaacgggagcagcccgattaaatgagaatgcgacatagcaatcacatgacgcaactaaattcttacgacacaaatactgcgtcctatagccaggacgcagccaatgctcagccattaccataactcagtcgattaataacgtagcctgatcgacgcggtcgagtacccac

SEQ ID NO: 178763 - DNA, 418 bp, Zea Mays
tccaccaaatagcagagaccctggtttgtatccacaggatatagcatatttcttcagctcttctttttcagcgtctgacaactcttgtccaagtatatcttgaaaattaaaatcttctttttccaaaatatcttcaatctgctcttttcctttttttgttgccgtgttaactgtaaccatagcagtttcttcttcagccattctcagaagcatattgtcaatatcatcaagtgtagtttccaggttaggatcttcgttggtcccggtttcggccccggtggcttcggctccggtggtttcggctccggtggcttcggctctccggtttcggctccgatggctgtgggatcgacagtgacaatttttgacgccgaggtcggtggcggtgtctgatgaatgacatcagccacttggataa

SEQ ID NO: 178764 - DNA, 470 bp, Zea Mays
gtgtcgtcgtgctcacctacgagctccgtgaccgcatcgttaagctggtacgctccctctacccgtagaagcttgtttagatctctgtgaatgccaaatttattgatttctgattcactccatttcattaagaaaactatggaccgtggaatcttttgattgagcaatcacatagtgcttgctaactatttctagccctttgatacttttgcatgtgtgttactgagacatcctatcttggttgtgcgaccattgaaatatgcaaatcttacccataagtgacaaacgttgtctggttgtctgccatggtaactgtctttttgacatcgcccgagaaatgatatgtaccttactcatctaacttgtcccttacaccaaccatatttgatcaaaccgaatgtttactagctttgaggttgatggcatgagtgtctcaaatataaaggatgttttatattcctcaaaactat

SEQ ID NO: 178765 - DNA, 347 bp, Zea Mays
gcgtcggattggaatgaagggccaagattagaacagatgaagcgcttcgttcgtggccgtggatccttgatctaaggactagtatgtcttacatacatgggggatcctcggtcgtcggttgaagatccgatgctcaagattgcataccggtttgatgaggtaatggtctaatctgggccatccaggtgggatcgggcggctgatatttaaccgtaccccttcgccatgccatttcactaaagagaccctatacttttaggtattcaacccgccgtccactcggattatttgctgtgtctgggaaaatttatattttgacccctgacctttctagaatttgacacccg

SEQ ID NO: 178766 - DNA, 589 bp, Zea Mays
gtaccatagcaacacgaagttgcgagtacatcgaaaggttactctgagaaaaatttcactatgttggtgtgcaaaaaacattgtgtgttatcgtcgaaccactttactcgtcctgtctaggacctctatgcttgtgttgcatacatctctcagaattgtaaatacctatagtcgctgaattgactaggtatagtcctttgattggtatggtatacttttaagccaaatcgtaaaggtcagtcctgaatggacatacacctggagtttatgtagcagaactacattggattccacctttgaaatgcttaccgtaatctatctctgatctactaggagtaagaagagtagaaactagccatggaatcccacatcaccataaagcttgaagcgaaattgggcattaatctgtcattggtccttggcgttggaagagccataaatcttgaacgccagagaggtagtgatggtaatttgtgatagaactatgaagatcttgtgaagaacggatgactccttcatatgagagcaacactatctattgttgaagactggtcccaaacggttattagtctttttcgctcctgccaag

SEQ ID NO: 178767 - DNA, 466 bp, Zea Mays
catggtgacaacactacgcaaaatccttgtgttgactaacttaacatggcaatagatgttcagtatctgaacaaaggatggacagggaccaattgctggagaatcacaagggaaggacaggagggggcgctgaacgctgacaaaacttatgctatgagcctatggtggcttcctgatggataccaagggattagcagcaccctacagtacaacaccccacccacaagttgtgtatctaggtgatgaacagatactccctaagtgatggacccagaaacgaggcaaggctgcaaggggggctgataattgaaggctagaaattttactggtgatacactataacctataacagatataacaaagaacacttacagcgatatcaattcaaaatgcttaaataatatatagaacgttgtggattggaaaataacaagaacattttatgactaaaagatcacatattcac

SEQ ID NO: 178768 - DNA, 642 bp, Zea Mays
cccacggctggcgtccgggagtccgtggtgtgccgcggtgcttcgggtgcttgccggtggatcacccgttgacggattagggggaaatcaatctagtggcggccggaattcgtcatcacacccattgattcaccgagggaagtctagcgccaattcgacctccacgttcggtgagccctcgattctttaccctcgtcgtattcccttacctagctaatgtcgcgtcgtcgttaatcgtgggcgaattgggcacgaatttggcctttgtgcggggaatgtcgttcgggcaccgcccgtatcatggtcgggggtgttcaactgtgtggaggtcggcaaaatcattacccatgtgttcgtccttgggctagctccgtgttgcgccaactcccttcaaggttgatgcagtcgtaccccgcagagatttctccggcaatggcgtccgccgtggatttgcctacgccgccgcgctcgcccgtcggagtagggaggagagatcttggccgttgatctctcaggcaacggtgacgattagaaccgcaacataccggttcgggacttcggtttgggccgtggatcagtgatactgcgaccgtgggcgtgtgagagatattgcgtcgtccgattaagatccagtggtagtct

SEQ ID NO: 178769 - DNA, 524 bp, Zea Mays
ctagtgatgaactacttggagtctactccaaatctgaagataacgcactatctgcggccttcgggagccaaaaaaagaagaggctaaatagagtttttgatgctattggatttatgtacccagactaccgctacccgccacgggggcagaagagaaaaattgcaacttctgggaaggatgttgcttcagctgctccaagcgagtccacgccaaagaggaaaaaggtgaaggttcttactcaccgaccgcgctatattgaaccggccacagtgcctgaatttggcggtgagacctcttcggctactaaagcgaaagaacctgctcccccacgcaaaagattgaagagccggctggagtgccgaaggcaccctcatccaaattagctgagccgaaggtggttaatattgaagaaacaagagtcgaagggacaaaaatattagaagttctaagcccttcggcagaagtgacagtgccgaaggcacaaaaaggtcttacaacgacccccaagaggaaaaggatggcca

SEQ ID NO: 178770 - DNA, 594 bp, Zea Mays
ggcggatagccttcacttcaataggtctcaaatgtgtgtgttttgaattctatgccattgtcgctgcatatatctctcatgacattcgtagggaactcattttgcaaccaaagaatcaaatctcaataatgagtaaaagcttcatccttagccttcattgagaacacctaggaatagcgataaaagtcatcaacgaccacaagctcataccacatcccccaaaagagctaacctcagctgtaccaacagtgtccatgtgaagcaaatcactgggttgcgaagtcatcacattggttacttgggaatgggaagtagcaaccatattgtcatgacgacaagagtgacaaacaaggtccttctcaaatttcaacttgggcaatccttggatcaggccaagtgagctcagtctacacaaaagatcaaagctcaagtgtcctagctcctatgccacatgcaaatcaaagaagaggatcctgccaagagacatcgagaagggccagaggagtgtgtaaatcagcttgaaaaactcaaccaaaaggggaaatccagaaaacaggatccccttgagcatccaaaactcgataaagacccttt

SEQ ID NO: 178771 - DNA, 284 bp, Zea Mays
gaagaagattgccaccccaacctgttagcagctggcgtggggaagaagcagagaggggcgaacggaagaggaagaacagagagatacgacaggtaaggtgtttgtttaatttcttcataggtttttcgggcaccgtatccaggtgtttatatacgttgactgcttcctctcgttcttacttgggctaccattcgattacaaggccggatcacttgacccactgtggcccaattactctagagtttggcttcctttggcgcttcagcatttccggcgtcccgcca

SEQ ID NO: 178772 - DNA, 1045 bp, Zea Mays
ctactggagagagagattggttcccccgtgttgtcgtggtgggtcctccgtatggtcgtgtgtagctgtactcctggtatggcgatgtctgttactccggctcctgtagcgagtccatcctggcgtctttgtagtggtgcacggcgggttccacagattagtctcatggtgcagtcgtacgtggcgtggcttctcctgtcgtcatgagcccttcatctcctgttagcgtgcgtaggcgtacactcagatatggtgcgttattccgtccttctgatgtacgtgtcactgtagagaccccggtgcccattcagtgtgctgtgcgtttattcggacgtgggttgatggtgacgcgtcctatcataactgatgtggattagtagcgttggactctgatctttgcctcgctgggttgctcgacgatgagatggtcggtcagagctgattggcggagagttggtcatcagagttggtcattggagttggtcattgtagttgatcatcggggagttggtcagccggtctgcctcgtagagttggtcggtggagttggtcggtggagtttgttatcagagagttggtctgccggtccgcctcgcagagttggtcgacagagagttagttagctagtctgcctcgtagagttggtcgacggagttggtcagtggagttggttatcagagagttggtcagctggtccacctcgtagagttggtcatcagagagttggtcagcgggttcacctcgtagagttggtcggtggagttggtaatttttgaagggcccattttgggtacccggtttccgagtacccgacagttactctcaacctcaaaaaagacgaataaagtgcacacatacaaatcaccaaaatcgactactggtttgatgatatgagaaggttcatggtcaaattagaaacatgcctaaacaaacgggtcgaagtttggacactagactcaaaaaacacacaaaacacaaattgcacaaagcaaaggtggtatggccaggtctagccttccctagttggaccaaagttgtcctagcc

SEQ ID NO: 178773 - DNA, 565 bp, Zea Mays
ggtagctccggctcttgtggcgggctcagggttttggttgctctgccgacctccttggttctgtttttagccgttttctccttagtttcggcaggtcgcttcggcactttggccgtcttggttttctcctgttccgctatcaccattggttttggcacttcggtcgattctcctttggcttcggcaagagcggggtactctggctcaacagcagaagaaggcccctcagcaagcttcggcactttggccgtttcaatgtacctgggccggtgcgtcaaaactttaaccttttttttcctttcggcgcggtagaaatagctgaagcaacaacctttcttttctttccctgctttcgcgagggataacaatagtctgggtacatgaaaccaataacatcaaagactctgttcaatctctcgttgcctcgccctccgaaggccactgtcagggcatcatcctcggccctcgtgtaggaaccaagcaactcgtcgctaattgcctcaatgcaatctagctagtcatcattcggctcatcgaattgatttcggtacctgaaggtatactt

SEQ ID NO: 178774 - DNA, 1058 bp, Zea Mays
accttgtctccttttgccatgaagcaagttggagtataggagtcgtcgtggaggttggtgaagagttgcgagcttgaagtagattggatggcgatgtttgccacctcttcctcttcttcggagctagaactttcttcattggagttccattcttcaccaatgtgggcttggccatatttcttcttcttgaaatatcccttgttcttgcccccttcttgaacttatcctttttgtactccttcttggcttcttgttcctttttgtttggacaatccgctatgaaatgaccggtttggccacattcataacatgtcctcttctttccttttcgttgatacttatcatttttcctcacaaacttcttgaaggttttgataaacatagtcgtgttttcatcacttgaactatcttcatcacttgatgtttcgaccactttctttgtcttgtgatctttgttcttcttggaggaatcttgttcatttgagatcaaggcatgattgtctcttgtcttgattggggcttcttcggactcatgttgttgaatcttagcaaatagttggtgaggtgtcatttcctcatagtcatcacagtcccttatcattcttgctagacttttatccttttctttgtatgctctcataaatagtctagtaaccttggagtcactccaaccatcacttccaagcactcttattttgttgaccaacaccattagtaggtcaaagagtgattgaagtgactcacccttagtccaatcatatcgggcaagctcactctccaaagcttcaattctatgtctcttggctttggggtctccttcatgtgacattttgagaatgttccaaatgtcacgtgcatcctctcttccttggactttccgatactcttccggacaaaggcttccttttattatgctcaccgctcgagcattgcggtgcacttcttgcatcatttctggagtcatcccttctccttgggcgggcttatgcatacctatattaacgatctcccaaagactaggatgtacaccgattaaatgcgacttcatcttatcggcc

SEQ ID NO: 178775 - DNA, 299 bp, Zea Mays
attttgacgtctgattcttgctccgaagacagctgggagccaaagaaaaccctttgatcagccacatcttcgcagagcggaatcggcttcggctgatctatcaaagatgctttttctttgattttcttctgtgacgtttgagcttgcgcttcggcttcatcagtattgtggacatttttgggctcttgtaaggtcccttctgcccttcttgtggcctcttgactttcatacactgatatgactctttgattgcttggtatcttcatgcagagataaactgagtgcaaaattgcttcgaa

SEQ ID NO: 178776 - DNA, 786 bp, Zea Mays
tcccccccgacgcgactatgaagacttgcagggacctcctgcgaagtgccccgaccctcttctctcggctttgctctcacctcccctgttcttgcgaccgtggtggccccattctattttccgatggcgagctcggctccttccgatggctttgatgctcaatatatagatcacagggcaaggggcgagtccgagcccacggcgagtctgggtccgtagatcccgcgagttttggttcggttctgttatggcgacttcgacatcggggcattgagcggagttcggtcacggggcgcgcgagcttgggcggaaactgtggacgcggcggaggcttctaccccacccacatcaccaggatccccgagcggcgcgccacgcggacccggtaaacacggctggtgggtgcggaggtggtcgaggcgagttgtttgcgcgcgattcctttttctggccgcacgatgcggagaagatacatccgacacaagggtcccacacggcagcgcccgcggtcaagggtgtacgcgcggcgtgagacatcgaggacccaggcccgcacgtcagtgacttcacagaaaagaaaaagggaacgaggaaatgggctgccgtggggtagaagagagaaagagtgggccgaattggagaagtcagcccaaactaggttttagtcttttcctttttattttcttctctccctcttttcaaattcaagttgtattcaaatttaattcaaactcttgtgacccattattacagtttatacttgcaacattgagagatactaattct

SEQ ID NO: 178777 - DNA, 669 bp, Zea Mays
ggagcctttgtcaccttcggcagttctgcctctaccggtgggctcagaatttctggcaacattactgttttttccaactctggctctttggccgcaccatctttggcttcggctaacccgactataggcaccttcggcactacagtcgatccttcagcgctccgatcggcgggagcagcttgttctgcttcgacagcggaagaggtcccttcaccaaattcaggcactacgaccgtttcaatacatcgtggccggtgggtcaaaaccttcattttcttgcccttcggcacagcagtgatggctgaagcggcaattttcctcttttttccttgccttcgcgaggggtagcagtagtcagggtatatgaaaccaattgcatcgaaaaccctgttcaatcttttcttgccccgactcacgaaggctgaggataaagcgtcatcttcggctctggtatatgccccaagtaactcgtcgctagtagcctcaatacattttagccagtcgtcatttggttcatcaaaccggtctctgtatctgaaggtatatttcaaacgaattaatccaccttcactggacccggcagcggtctccttcggcatctcccagttatccgcaagtggccataccctgtaggctatgtgctcttggatcaggtttcttgtgccaatg

SEQ ID NO: 178778 - DNA, 774 bp, Zea Mays
ggcgactgtggcttcctgtaactattggaagccctagactctcaatataccaaccatgatggcagcagcccacatggtgtagggagtcaatggtcccgcttcggtaacgtgtgagggcccatgtactttggtcatagcgcccgtcactgaagtgggcatgtatacatcttgtccgtggctaatgctgaggcacattgtactccggaggtcgagaccgggtttccccggtggtccacgctatgtgtcgtagtatacgcggcagcgctgggcttcgcctggtaaggggagtagcggtcggcaccgctcttccttgtgacgactcctttccgcctccttgccttgcgatctgcaaaaaaggcacccctccacatggcctcgttatggtgctcaacagtgtatctgcgagtcgtcgttcctaacggtttcaatcttttggattttttcctgaacctcaccgagcagggtcttaggacctgtcccttggttaggaaaaggcctaagcctttaggggccagctctaggttctggaatagtcatcctagtatgatggagtgtgcgagctttgggtgctggaccaagctaagtggttactcggctccggaccaccactgagaatgcgttcctctcccctcagacctagcccttcgcggcctgggccttaccggttataagggacgatcccaaaaccaggtgacgaagtggaaacataatcgatgtttcataaacgtatttagaaattggatcctgctcgagtgcggctatagttaatccatt

SEQ ID NO: 178779 - DNA, 684 bp, Zea Mays
cgttgatatggtaatgttataaatctatgctcaaaatctactgtgaagcatttcctccttcgccatcacctaaaagtaagaatagaaacaaagtagaaggttttcactaagtagaaccaaggtacaccctgttggaaataatcatgtccaggtgcatgttagtgtctaggttcataatatttacttcagctaaatttcagcatggagtaataggtagtaataggctgattagttgggtaatattctgcatttattaggggccatcacagcctgatttgtagctcatattagctatatttattaatagaagagaaaaccagaaaatgttaagtcatcctagccaccaaaacacttgtgctcttgtgtgatactctgttcctgtgtcctgttggaggctttgggcctgtcacaccctccaaattgaatataagtcattttatattttcatactttttaagtgtaaatcatcagagtttccagacaactggccataattttattctccacgcttatgccatttttttcttgaacacataggaaagctacatatcatttcattaaaagaaaagtagagtgaagtacaacgcacacctcagtcccaccgccaacaaagctacatattacagtaactcaggatacaagagaagaacgacctcaggtaaagggattaagtcaccccctcat

SEQ ID NO: 178780 - DNA, 452 bp, Zea Mays
ggaagcttgggctcggatccgcctttgccggacatggcgccgtcgggggaaggccctgtgtcgctgtgccggccgcctggggagggagatgatacgtaagccgtggagtggtaaacggacggctgggattcggtcgaggatgtagttcggcccggctccgatatccgtcgttggatcggcaatggatgggtgaggggtcgcggaccggtgatccatccgtgaacggtcgtgattaaaacgtcgacaccgttttgggtagatcacttccacatcgttcatcttcacgtctagggtcgagatcgggtccatgttactttgaatcgccaccctcggttccggatctatggtttcatataagtatactacggtgatctaatcggggtcgttcaattctgatctggcggctgagattgaagcataccccttcggcccgtacgttttacaaaagagac

SEQ ID NO: 178781 - DNA, 776 bp, Zea Mays
gcgagatcccggcggtcatcggcaacctgtcgtccgccaatctctccctgctctacttggacgacaacgagatcaccggtgccatccctcgcgccatcggaaaccttgcctcgctgacggatttagagctgcaggacaacatgctggaggggccaatccccagcgagctgttccatccacgtgggcttacaaagatagtcctctcgaataaccagatcaatgccgaaatacccaaatccatcggcttattagctcagcagctagccaccatcagcatatcgaatagcggtctccgaggcgagataccagagaccttgtcgaacctcaccaacttggactacgttcttcttgaccacaaccagctctcgggtgccataccacctggtggtcttagctgccagatgatcctggacctttcgtacaacaagcttacaggccagatccctagtggcatgcctgggctccttggtagcttcaacatgtaccttaatctctctaacaacctcctagaggggcccgtgtcgtcactggagttcggcagcatggagatgatccaagctcttgacttgtcgggaaacaagctctccggcggccttccgtcttccatgggcgccttgaaaaacctccgtttccttgacgtttcttccaacggccttaccggtgtgattcctcggtctctgcaagggttgccgctccagtttgccaacttctcacacaacaacttcaccggcgaggtgtgcggcggagggtcattcgcgaacctcacgggcgactcg

SEQ ID NO: 178782 - DNA, 428 bp, Zea Mays
gcaacgcatcggcatgtttgctagtatgtgataaaaaatataaaagggtaaacagaactatataacaagagcgccaaagaaggtagacaaagaaatttacaacaggctgtttagtcaaggggagaggctgatgctaagactaagagtgggcttaatctgtgaagatgtagctttacagtatgtacaaagcatatttttcaagactggaaagaaggttgtgttactctgaagatttgagcatttatttgtttccatatctcccatgctgcaatgataaaggcatccatgaagaattgatgttgacattgcactttggctttctggattgtatcgaataagctgatgacatgatcccaagaaatcccaacaaacttcctacatctagtgctgaaggggcattcaaagaacagataatatgtggtttcttc

SEQ ID NO: 178783 - DNA, 699 bp, Zea Mays
cgagtgatcttggcctccagggtgtgtagtttcttgacgactgctagtgcggcggtgcggtcgccctgcacggtgaggatctcagcgggggacggcatcttgaggaccaagtacccataatgggcaatgtccatgaaccggtacagggctggcctcccgataatggcgttaaaagggaggttgacctccgcgacgtcgaactggacgttttctgtatgaaagttctcttccgttccaaatgtaaccgggagtgttatgctccctaggggatatacgggctgcgggcccaccccggaaaatgggcaagaaggccccagccgcgaccccgggacctgcagctgtctgaatgctgcgtggctgataacattgaggtcggcccctccgtcgatcaacacgtgatgtagccgcatgttggcgacaacaggggcggtgatgagcggcagcacgccggctcccgccatgttgttagggcagtcggatgccccgaaggagatggtagtgcccctccaccgttggtgcggagcggttttggggacccctaggaccgccgaaagtacctcccggcgtagggagttgacactcctgagggaggtgagctcccagattccgccgtacattacatacagcttcttgcgacggtcgccaccgtcgctggagtcagaatctccggtgaaaacgtcctttaggcacccctcgggc

SEQ ID NO: 178784 - DNA, 1746 bp, Zea Mays
tcggcggcggcctcgacggctgggacttcgcgtcgctgcccggcctcgaggtgctggacgcctacgacaacaacttctcggctccgctcccgctcggcgtcgccgcgctcccgaggctccgctacctggacctcggcggcaactacttcacgggcgagatcccggcggcgtacggcgcgatgcccgcggtggagtacctgtcccttaacggcaacaacctgcaaggccgcatcccaccggagctcggcaacctcaccaccctccgggagctctacctcggttactacaacgtgttcgacggcggcatccccccggcgcttggccggttgcgcagcctcaccgtgctggacgtctccaactgcggcctcacggggcgcgtccccgcggagcttggcgcgctcgcctccatcgagacgctcttcctccacaccaaccaactctccgcgcccatcccgccggagctcggcaacctcacgtcgctcaccgcgctggacctctccaacaatgcgctcaccggcgaggtccctcgctcgctggcgtccctcacctcgctcaagttgctcaacctgttcctgaaccggctccacggaccggtgcccgacttcatcgccgcgctgccgcgtctggagacggtgcagctgttcatgaacaacctcaccggccgcgtccccgcagggctcggcgccaacgccgcgctccggctcgtcgacctgtcctcgaaccgcctcaccggcgtcatcccggaggcgctgtgcgcgtccggcgatctccacacggtcatcctcatgaacaatttcctcttcgggcccatccccggctcgttcggctcgtgcacgagcctcacccgcgtccggctcggccagaactacctcaacggcagcatccccgccggcctgctgtacctgccgcggctgagcctgctggagctccacaacaacctgctctcaggcgccgtgccgtcgaacccgagcccgagcgcgtccagttcgcagctggcgcagctcaacctgtccaacaacctgctggcggggccgctgccgagcacgctggccaacctcaccgcgctgcagacgctgcttgcgagcaacaaccggatcggcggcgccgtgccgccggaggtcggggagctccggcggctcgtgaagctcgacctcagcggcaacgagctgtcggggccgattcccggggcggtcgggcagtgcggcgagctgacgtatctcgatctcagcaggaacaacctgtccggggcgatcccagaggcgatcgcgggcgtccgggtgctgaattacctcaacctgtcgcggaacgcgctggaggacgcgatcccgacggcgatcggggccatgagcagcctgacggcggcggacttctcgtacaacgacctgtcagggcagctcccggacacggggcagctggggtacatgaacgcgacggcgttcgcgggcaacccgaggctgtgcggctctgtggtgagccggccgtgcaactacacgggaggaggcggagtcgcgggcgcggcgacgacgcggctcggcgggctgaagctggtgcttgcgctgggactgctcgcctgctcggttgtgttcgccgtggcggccgtgctccgggcgcggtcgttccgcgtggacgtcggcgcgggcaggtggcggttgacggcgttccacaaggtggactttggcgtggcggaggtgatcgagtgcatgaaggacggcaacgtggtgggccgcggcggcgccggggtggtgt

SEQ ID NO: 178785 - DNA, 839 bp, Zea Mays
cttggcgctgaaagttataacattttgtttctgttgttagaattcaacagtcgttatgaacgattgcagaagtaagtgcggcgtgctggtttttggaatcttttcttaatttatgtcgattgatcagctggtaaggcatagagatcaccctatgacgagtagctgtgagcatgttgcaccgtcttaagtcattgccaacttaggccgattgctctgttagtagggtatagtggtcaccctaagtcgagtaagcgcgagcatgttgcaccgtcttaagtcattgctgacttaagacgattgttccgttagtagggtattgtggtcaccctaagtcgagtaagtgtgagcatgttgcaccgtcttaagccattgccgacttaagttgattgctctgttagtagggcatagtggtcaccctaagtcgagttagcgcgagcatgttgcgccatcttaagtcattgccgacttaagccgattgctccgttagtagggcatagtggtcaccctaagtcgagtaagcgcgagcatgttgcaccgtcttaagtcattgccgacttaagtcgattgctccgttagtagggtatagtgtcaccctaagttgagtaagtgctttgactccaagtttaatcaagtcgaagtcgacggataaccaatagtttgaatgcttttgacagtgcaatcttttattgacgatgtattttccaattacagaatacaatgttgctccgatagttcttgctaagggtaaaacttcctgaggtgctttatattccatgaattccctacttccgtgccatccatttgagtgagccgatatgatcctggccgagtgacctccg

SEQ ID NO: 178786 - DNA, 1063 bp, Zea Mays
ttgattatttaaagacatgatgttgatagttggatcttgaaacaccagatgtctagtaagcttagaccaactccaccagaggtcgtatatgggcgtgcatctgtaaaattttgcacgtcttcgcactgttgagttccccagcatgcgctgtatccggcgacggaaaaaacgggccaggggtgggcgctcctttttatcgcgtattctctctcatccacacaacccaaccatcattccgaacttcctccttccttcgttggtacggcgacacaagatctattttcttcctccgagctatcggggtcacgctcaagttctcgagttttgtctcctaggtcgaaggacgtcgcccccatccgcggcgctgaagcacagtcgactatgaacttcaaatctaccggatcccataatcgtgcaggacctttaattattgcgtactgaccttgaagaaccctgaagcaacgttcgacgtcttttcgatactctgctttcatctggccctccgtaggctagcttacgaattgcagcatgaaccctccagtgtagtggcctccatcagaactgagacgacgctggtcgtccttcgttgctacatctgaaaggctgcgccaagtggcacaaatccaaacgatgaactcgcatctgcagaggaaatcaaaacgatgaactcgcatccgacgggggaataaatgaaaacgatgaacgcgctggcaacctaccaccggggactgcggatggctgcaacagagcagaaatgggatactagccgtggccgagccagagacgaggcagagctgcaatccggcgacaagagcttcgatgaaatgctacggtggaggttgtacccgaggccggtcgatgcagcactgtgactttgggcagccggtgtcttcagacaggggccaacggctctcgtttcagggcgttggcgggaacagaaacgatgccttgtttacaccgctttacggagccatttatggagcttcctggaaatcgggctactgagcaactccgtatcgtcgcctgccactccgtaggatacagatccgcagccagccattgc

SEQ ID NO: 178787 - DNA, 773 bp, Zea Mays
cgaatgccgaaggccgttggagcggtctttttcgacatggtgactatccttggaattttttgtgggggctttttactggtatattacatggcgccgcctcgttaaaaacctcacccctcgggaggaaacgagtgcgggcctgaatagcattgcttgtagaattacaaagacgcgtaggccctgtgacttaaacaaaaaaattcggagattatcgatgttctaggaatgttctaaatcttcgccggatgacgttgccaacctgtaagcactggaggatgccttcgtcttgactatgtatggaccttcccactttggttctagcttgccccgggactctgtccgggtggttcttacgagtacgaggtccccttcgctgaattctcttgggatgactgtgttgtcatgccaggcttttgtctgaacctgatatttgttgagggcctacagggcgaggacacggtctacgtcgatgacatctttggaagttggttcgtcaacatcgggtgctgctgaattgtttgttcgaggggacccgtgctttaattcttgcggcgttatggcctcagatccatacattaggtggaagggtgtgaacccggttgcccggcactccgtcatgtttagggcccatacaacttcgggtaactggtcgacccatttgccctttttgtcgtcaaggagccttttttatggtgctaaaaatcttgccattggcgcgctcgaccacaccgttggactgtgggtgatacacagaggcgaagacaggcttggtg

SEQ ID NO: 178788 - DNA, 555 bp, Zea Mays
gtcttactgtaactatctcactaaatgaaagaccgaatctagcacaaaaggttcggagactgaacctacaaattgtgccaaatggtaccacaaatatcctacatctgtgttcaatattggaggatcaaataaaagaagctcaagctaaggatgaagagatacaacacatcaataagagcaaagtattgagaaataaattttagggtctaaggtcgatgaacaaggaatattaattgtgctatgaaaattggatgtgtactgtgcgagatgagaagatcatgaatctaattttggatgaagctcagtactcaacatattccattcacacaaaatcaacaaaagcatatatgtatctgagacaaaaagatcggtggacgagaatgaagctatcaaaagctggtgataggaaaatatcttgcaaccaaagaacaaaagggattgtgtggtttcttatcagcctcagttgaggtaacattccagtcatgggtattcaggtttcttagtgaagcggggctgtgaattgtctagatgtagctggctagtatttagtttaag

SEQ ID NO: 178789 - DNA, 376 bp, Zea Mays
ggaagagcccttgaattcattctaagataagcaagcatatcctttgacaccaattccggaactcttgcacatttaactgtgtcaccaaatccaccagcaaggtgttgtttgaaccgctttattcctgcagggactatcttttgacagaaaatacattgcacaaaatctttctttgtgggatctggccaccatccataattccatccagggtcttgtgatcgagccttccttttagaatcaacagcttgtgcagccagagcagggggtagtgctgcaatagccttttcagtgagagaggcagcatctggagcaaccgatgaagcagtaccaccagcaccagtactaccaccagcagatgatgtcgtggctaggatag

SEQ ID NO: 178790 - DNA, 481 bp, Zea Mays
ggaagtgcgtgccattgccgctgccggcgtctcctctccggctctccatcccggtcacccgtcgcaccaccctcctcgtcgctgcttcatcgcgtcccccgtcgtctggtggtgtgcaatctcgagctgctgaatctatcggggacttgggtcgctcctcaggtgggtctgagtacccgtcggcaggttggaggccttttccgcttctcgttcttagtggattgctctctgttttgcttctacatttttttcctcgagttcgtcgattgcatttcatttcgtttggtcgggtgggtgtgatttggtagtggtggttctgagttgcgagaaatcattcggtcttctacaactcagacgaacgtgtcggtcgtttcccctgtccttccttctcctctgcgtttatccattcctcagcattggggatgagaagcgatttccgtcatttgtcaattcatgcttcgctcactgtggctccgcttcc

SEQ ID NO: 178791 - DNA, 2026 bp, Zea Mays
gtttaaaaaccatgccaagtcgaacaccacctccataaacaaaatggaagggatacttcctttagcaattaatttttttttgttaatatatatagtccacacttgtttaaagccttgtcaaacgttcgtcatagaaacaactttgagaaagaagcccggaggagttggagttgttaattttgagtccatgggtttgtttggaagcaaggagattggaggagaattgcagggattaaaatcttctcgatattcaaattaaatagcgagtggattttagcccttacagggctagtttggtgaatagcaagggatttcttatccatggatcctctctaattctcttgttaccaaattggctctcggtctcctttaatcctctcgctcccaaacaagcactaatggttcctagaagcatctacaatacaaccattttagaatacacatggaagtcgtttgagacttacaggaaaagcataaatatggccataggaggggcaagggaattaaatccatgttatttagatttgtttatgtattctaagtctgttctaaaaaaatatgaaatctcaacgtaaaaggtatagtaggtgaatagattcttaaaaatctacatagtcctctagttcaacccataatcttttgtcccctaatatttttcacattcttagcatccaaattttccaaaatattatccacatggcaatttataggatgaatcgttgtcttttctatttggaggcctctcatttcactcccacacgatggcaccttccaaggacgactagggctaccactgtgtccctgcgccacactccggctcaaccatctataatcgccgcacctcttgcctatctccccttcaatgctgcttcatcgtccaacatccatgttcttcttttccatctaacggtaccctccttagcacatcccgcctcacacttcaatgttcggtggagtgggtatgactacaaccacgacgcttgcgcctagtcgggcgtaggatctccatggcaggacgtaccccctgccggtgatgacatgttgttgaatcggttcgtctcaatgggcagagcggcatccctcctgctaggttgtcacatcatcataagaatctcttatagaatatatagttgacaagtgtttcaactaaacaacttttagcttttctacaaccatcaactcacatcgactttcccgtagtttacaactaaaatcagattttcaagaatctattactgaaccaaacaggcacttaatttaattcataaaaatatgtggatactacctatccagtaaagagtgatattttatcctatgacaaactatcttatatttaaccagttttcatagaataattattaatatttatgatacaaaatatgtttactataaaaatagattttatgataaatgtaatggtatttatttaatttggtatcattaatcttagtattttcaatataatcttagtcaaacttaagattgtttgaattatgacattaccatagtgacactctttgcagaactaggataatatgttacaaacaaattacaaaaaatatgaaaatagaagttttgtatctagggatgcaaatggacacttgatatgaattggtcttttctaggcattcaagtttatgtcatttcttctcctaggcaattatatcatatgatatatcattagcttattttagcgagatcgtagaaaattgaactctatgatatatatgtcatatcttaatagtatatgtcatgagctccatatatcgccagttgaacacatacatatctcagcggaatattttagagagtgcttgactgatataacatgacttcaattttacaacatctagtgaaaaggtctggctttgaaaatggtaagagcaaaggtttataggacttgcataactagtagaaaaaacaggctgtagtctcggtttttcagtcaggactacaaaaccaagattagacctttagtcttggtctagagaatctagactaaaggctctgaggctaaaaaatgttc

SEQ ID NO: 178792 - DNA, 631 bp, Zea Mays
ggatcttgttcatgtggaccacccaaataaattgcagcgctctctgaccagctctgtcatacctatgctcgttcagaagaaaaacaaagaaccgttttgtcatgtttaggccctctcattttctttgcgctaatttgtctcggcgtgcagacactgatagttgagtagagctgaatatctgtacattgactagatctccgctgaaagatactggttttggctgtgcctgaagtttctgaatttcttgtggcaagaactgacagctcaagccaccggatcatgaatttccctgactgaaccatgcttggttggttcccatgcatatcatcaaagcaacatgcagcgatctgagaagactggctggtacctgcctacgaacaactattgcgtaacatctgaaaatggccccatgaaaaggaaattcaggaattgatagttcgaaaaggttggtgcagtgactccaggggggcattgtgcatggttgctgacgtggttgcactgaagcgtgattcacaagaatatgtaaaagttttcttgtgggccaaaatccgtctttggttttctttccaggtttgatcatttccataagttttgggttggttccttgtgggttcagttttctcgccctctc

SEQ ID NO: 178793 - DNA, 1040 bp, Zea Mays
taattgcaaaataggcctcaattgagttctacaccaagtctgaatttcaggttataagctcaactttggggctttgtaactttcaaagtataaggtttttgccctagggcaccacatcaaagttgtagagcaaacataggagaacaactttgcttaaggttgtgagcatagttattaagaaaatttgggagataattaagcctaaagcttggctgtcaggctggttccattctgaaattgagatattcagtggaacagagccagctttgagtgtgaattcaaccttgatctagtgatcaaatgagttcaatcactatagtcgaaatataggtggtatatagctctccaacattgctacagagcatagagtatgttaccatagggatttgtgagcaaatcaagcctaaacattgactgtcaggccaactgaatcctatttcgatggtacaatagtccaataaggatcagactgccagcgttggatcctcaccgccggcgactcctccgcgtcaagattcacaccgctgccgttgcgattcacgtcgccggtgaccagataagaccgctcggtaaagccatgcgctggacggcactccggtgaacccccctagtacttcccctctgtcgtgcggcttgagcagataagcccgccggggatcaccgtcgctcggccttacgccacatatccgagcacctctgtcgcgtcactgtgactctttacagctgttaaatcatcgccggtgagctcaccacgactgaggacacgaacccacgacgccagggtcctttcttgtcttcggctgcccgcgttgttcgatcaaattgagcgccaccgtcgaagcctcctataaattgagcccccggttagctgcgctacctcatcgcgaaaccagagcccccaatcccaccctcaatcgttcgctagagctcgtgaatttccaattccccccaattcagtttccgccaccgcaaagaatacctcaccgtggccagctcgattcaggtgagctcaagtccctctgctgcttgttctagcattc

SEQ ID NO: 178794 - DNA, 458 bp, Zea Mays
ggaaaaggttaaacagtactaggccggcttcagcccaggcggcccaagtccacgcggaatcgcgcgcgcgtccgcggcagcgctggcggctttacagaaagggcctcggggtttttgctaactggaaacgggttcttttactgtttcacagagtcgctgacggtttgcacataaaccctccggtttctaattctttaccgcgctgggtccacgacggcgtcgagcgcggccgagctccggcgagctccaggaccggccgaatggggcaacgactagggtccccaagcgactaacacccaattgaaccctccccgatccattcccctaacctaatttcatcaacgactaaataattagctctggccatgacgaccgtgaacattgcggacagaggagtgtgttcctggcgatcagagggttcctagcgcaattgcgttggtcggcaagcatcgtagaca

SEQ ID NO: 178795 - DNA, 939 bp, Zea Mays
ctaatctacacgagtcaaactgtccacatgaaccatcctcagatacatagagccatggagcattgataaaggaaaacaatcatatgagtgcaccataaaacaatcacacgacccatctagtgaccatagtaatctctcaatcggacatgactcaggcatgtcatactgataaaaaccaaccccctctgaagctaaatgaacccttggtttgtctcaaactcttgagacactgaacaagtaaccagaaaacacataacttggaaccacccccccccccccccctcccaggtaattcggctcccagcctcccacatcggactacccgtttcaagtcactcctacttggtcagatcagattacggcgagcagtatgacaccaccggtgccggcgatgcaaggaataacagtcgtgccccaccagtagcagcatccctcgacagacaaggcaacaacgcacccggggtccagacccaggggcacccaccttttgcttaacaagggagctcttgttgtcgaggcgcttgaggacgaagtcggcgacctccttgacgatgctggcgtcggaggcacgcaggagctcgcagatctcctcgagcttgtagacgggcgcgaccttgtcgtcgtccgccgtgacgccgtccaccatccgcgagcgccagtacgactccaccgcccgccggctctgatccatggctgctgccccgatcggagggggaccgaacccaccacggtcgcggccgaatcggagggctggccgggatctgggattgggatgggaagggggtgggggcgtggaccgggtccgctcgtcgacgaggagaggcgtggagggagggttgcgggtgagccgagcggcacgggcacgtgccgccggaggaacgagggaggtggaccgtggaaggttctagagaatggcgcgcgggtctgcctgccttttgc

SEQ ID NO: 178796 - DNA, 309 bp, Zea Mays
gcgaaggggtatgcttcaattctggccattcatatcagatccagaggccaggatttgatcgagccctaacagaagtcgcacgctagtaccaccatcggatccaaatccgatgactcagatctaattatccccagacccagtccttaccgaacgatgcacgatcaacgactcggatcgaaacgaggtgaaacgttatcgctattctaatccaggccgttatctcatgatttaacggtccacgacgctatctacctctaccactgtggagaagggggcaccggatgaatcacagccgttggtcccctaatc

SEQ ID NO: 178797 - DNA, 362 bp, Zea Mays
gtcgtttcatagcaggacgaacatctgttggtggcaataaaggagcatctagatagccctgtaatagcataaaaacattaggacataaaaacatcttatgtcctaaaccctaaatattgaagatttcaatagaagtgacactctgcaaaagagtaaatatgtttatctgtgcctatgcagttagatggtatgaactgtatttgccagaggtccaatgctattaatatgtttatatgtgctggtaaatgtgactaggacccatcatctattatgtgcggcactaagttcatgagtagacctataccatcgtagtgtgtgttgctggcattggaattgttttagacaattcagactagttcttg

SEQ ID NO: 178798 - DNA, 355 bp, Zea Mays
cccaaacttgaatattatatcttgtatgaattccactgccttggctgaagttagagaagcgatgggtttgtattctatccatttggtgaatttgtctatggcgaccaacacatgagtgtagcctccctgagctttcttgaaaggtccaatcatgtccagtccccagcacacaaatggccacgttatgggtatggtctgcagttgttgtgctggtaaatgctgctgttttgataagaattggcaagcttcacatctctggactaactcgactgcatcactctttgccgtcggccagtaaaaaccagacctgaagaccttcccaaccagagttctggatgctgcgtgtatcctgcac

SEQ ID NO: 178799 - DNA, 524 bp, Zea Mays
aggccacgcctattcccctgtccggaggaggaacatccatacttctgccccccgtccctctcaccacaggagacgaggacgaaataatcacaaccgtgccacgggcggcactctacgcctagacaatgctcctaggcaggtcgacaacgtagactccctcgcaagggacttgttgcgcattagcttcatgcccagagaatcaacctcagcacatgttgccctaataccagcctcactagcccccccgcaggttgggaggtgccgactccgctagtagactaggggagccatcgatatttaacccaatcccctttagattcaacttcaatccttcgggctacccatatacgacaagcacctacaccagcctgtatggggaactcccagaaatctcgaagtacataggctccgagactaaagatgatctaggtctaggcctataattctccaagctatgcgaccccgaggccatgcgacatctcttgatcgcatgttactgcctcctctccgaaggctccaacgac

SEQ ID NO: 178800 - DNA, 789 bp, Zea Mays
gtaaaatgcacacgtggcacacgcgtgtgaagaaaaaaacatttttaaattctattcataatgttatttgactacatacgagtcattattatatattcaatatctaaagtcttaaaagacactcaagtttgaagccctccctgtgttctgcgcggctcttggccacgcgcatgccgacgcgtgcccttgacctcagatccaaagctctttctccaacttgtttctaaacctcagtcgcgtccgcccgtccagccgttctttagtctgtccagtcgttctttagtcgctcccaaacctagccacgcacgcagcctcgccgctccccgtctccatcgcccctcgcctcgtccccgatctcttgtccctcactacttgcgcgttgtgccacgacacttcagccatggagtctgcaagagattcaggagctcgcttgggggctggccagcgagcggaggaggtttcgcagggctgtactaggtatctggctaaaatcccgcagcgcttcccctccaatgccctctatcatcgtcgccttctctctccccttgagagagggggacgctacggcgtcgcgctctctttcttcctcccgttcacgcgtacttagcgacgtatctggctattcgagttgtcttcctcatcgagcagccacagcaatacaagccaccgccgccaactccaccacatcctcttcacccgtacgcaatgtcaacgagaagcaaagcttcacgccaggtttgccattgtactgtcgcaagagtaggggatggaagaggatatgtattcctc

SEQ ID NO: 178801 - DNA, 499 bp, Zea Mays
cgcatgggctgaaactaactggtcggcccaacagcggactctcctgcgcgggccactcggctcaccagcgcgcctgcccaaccctagccgccagacttcatctgcgcgccacacctgctccctccttgtcacacctgctggtgggccctcgtagtcagcttcatcacctccgccacgacccaacagaaaacgctgagatcttctcccccaacaactcccgtgcggatcaaaacaaacccgccaaattcgtcgtgcttctctggccgggatccgcgacactgcatccctgctcgcccataaactcgcggcccgtggtcacagcaacaacatctccgtgctcgcgcggattctgcggatggttggacctcgcccaccgcatccggctaggagaataaaagccaggacctcaccacctctccttccatcccgagccaatctgtctgggctaaaaggcacgcggagtgctttctcctttctcccctttactctcgtgaaccgc

SEQ ID NO: 178802 - DNA, 948 bp, Zea Mays
atttgatcttcagttgatctttaggaaccttcaacatggtttacgaggcagcccctgagcctttgtgcagggcaagaggtcggtcgaggggtgtaaggggggaacacgtcatgctacccttgatgggtggcgagcaggacgtttccgttgagctgttattgggtaatccgagcgggggtccgagctcctttcgataagagtcggctagtggtccggagacacaccccaaaagatacctacgggtgattcacctggtcctgaacccgtttgatggggtttgagggcttgatgcctccctacgatgggacactatcacgaatcgttcctgggggtctcggatatgtcttaaggttcctcgagtcgcgaaccaagctagagccatgtacgggtgtacctacagccatccctgactctgtgttctgggctggttatggagcccttccaaggggccaaccttcgaacccctaatcagtaacaggcttgaagccatggtgtcctgaggcgatttttctgaatgccgagggcctgacctttgaaccactgaacaatattcccccttgcttttttccttcccgaggtgagttgcctgaggtagaagacgccttcttctggttaactactgcagaaataaaggaaggagggacagagggaagagggcataccttttgaggtggaatgcgaaacgacgctcaacacatttttcttggagggggcacgaccattcaatgcgatgggatgtcctgtcgatcagccgatcatttgcagcgcgtgtgcacgagggattcgaaatgtccatcgtatggccgttacgattcacaccttggtggcttcacccatccctataaattcgcccaagacggacgcttcagacctttacctttaccgcctcaaccttcttgctttacatgccatcttttctttctgcaaaaaagagctcttcgtcttctc

SEQ ID NO: 178803 - DNA, 843 bp, Zea Mays
ttttttatatgcttttatggccatcattccataagaccattgcactcaaacaaaaatccaactcaaacatagcaaccaacaccatttacatggttgttattattataaagataacttaaaaagagtattcatcgtctgacgtgagaactatcttattacaatttataacttaaaacttcaaagtagcctggtgatggatccgggctccccatagcgaatcctcttgcggagaagggacaacgccatggcagggacctaggcttcaggcggatcccgtccttgaagtagggcttctagggctgtaatcctagcgtggacatcctccagcgtcaagtgcaccctatagagttctagggtggcactatccaggtcggtgttaagaccggccactacaccagctagggtgttgaggcgatcctcactaggtccaccttgaacgatgctggtctggcttcctccactcagacgcagaggaagatgcatgaacctcgtgtcatgcagctgctgccggtaggtgtggctgagagaccacagagtccgtctggcagcatcgctgaccgaagcagtgtaggtggataaaggtgtcagggactcatgagctgatagagtcctgaaccccctatcccctacatccatcaccctgacgtggatacgagtgatgtagtagcaagcccggggaggctcgcacactcgccttgtctcgtacaagggtcggacgtaggttcccaacgcatgcagcatgtcttgcagcaggttggggaagtgccccgtctcgaacattgatgtgtaatattcggtgacaggcccaaatcccatgaagtagtcctgctgagcatagttggc

SEQ ID NO: 178804 - DNA, 878 bp, Zea Mays
acaacatgtttgtttgcatcgcagttagagaagccgatcaccgattggactgggcggcccggctgaggatatccatgggggtcgcttactgtctggagcacatgcaccagctgaaccacctgttgtgccaaggaaccttgactccagcactatatacctcactgatggcttcgctgcaaaggtctcggacactgccaccaccaagggatcggattccagctcaaccgctgatgacgagctctcctcggtttcaggcatagatgccatggttcatcagtatggcatgctattgctggagagactaaccggaaaagttgcctactccgaagaagacgacgacgacggggtttcactggagcacttggcgtctcgctacttggatgatggcagcatgccccttgcggagctgattgacccgagcctcggttggttccctcaagaagccgcgcacgcactgtgcgaggtcgcaaggtcttgggttgggtggacccagaccccaacaagagaccactgatggtacaggtggctgctaggatgaaggagatcgcaattcgcaaggtcttgcgtggacccagacctcaacaagagatcgaccacggatggtacaggtggctgctaggatgaaggagatcaccgcgctggggccgggcctgagggagcgactcccaaggtgtcgccgctctggtgggcagagctggagatcatgtcatctgactgaaactagcttatgcatgcacttatccattctcaatctcctcccgctgtcactggcaattctttggtttgttgtgttgtggttgcggagcctgaagcaaagttccatcattccttggtatttgaggtgtcattttctttctttcttgatagcattgcgtacg

SEQ ID NO: 178805 - DNA, 595 bp, Zea Mays
gctcgagagccggttgtcgttttactgggttgctcggcgggtaggttggtcagcaacccgacttgctggtttgctcagcgggcgatttggtcagcagccccgccgagccgggttgctcggcgggcggtttgttcagaaatccgccttgctaggttgctcgacgaccggtttggtcggctgccccacctcgctcggttgctcagtggtatttgctcgacaggcgagctggtcggttttggatggccgtcactaggaggccttttggaccttcatggcaagccgcttggcaggtcgggtgatcggttagtgggtcgccttttggaggcctttgagcttctctaggtaccctgttctcaggtacccgagaatagccccgagcctttgtgtaactccttggggttgcgtagaggcttttcttgagattgcgcagaggcttttcttaagcggttccttttctgggtgcacacaagtgcatctgttagatgtagccatcgagcaatctatgtggattgttcacgaggttatgcagtgcaaggggcgaacccttccctgcgatggttcgccatgcaccgggcgtgattacattgccctttcg

SEQ ID NO: 178806 - DNA, 633 bp, Zea Mays
ccctcggtctgggcccaggaatcccgtgcggcccacttgtcctcagccgcactcgccacttacgtgtggggccgatctctcagcctctactggcgcgcgctcggtatgacatgtgggcccgcgtggacagcttcgtcttctccctctcctgctttctcgggtgacagctatggcctatggcgcgatgggagccacagcaaccccccaaatcggctctaatcccagaacctgaagctccgccgggcttccctcgcggtgaatcaaagactcccactcggattttctgttatcctccccagcattcggatctatctctctgctccatctgaattccgttgagagaaaatctctcgaatctgccggccacatacctccatggctgggcgaccggtgcatatatatgtggcccctttgcgtcagctacgtcttctcaaatgaaacggaatcgcgtgcggcaacctcgccggggaatccgcgcgtggattgctggcgaccgcgagatccgcgcaacaaccacaccgtgtaccccgcccggattcctgcgcaagcctatttaaccgtgccgcgtgaccctgcaacctcgtcatcgtttggtgcgatcctcgttccccccataccctacgcataggtgac

SEQ ID NO: 178807 - DNA, 547 bp, Zea Mays
aaaacacaactggacaacatgattatttaggctcacccttattccttccaaagtatcaaaggggagaagggtggttaagaaaatatctgcaatcaattcaaaatgatggcaaagatactcatgtattgaaacatgtaaaattacagatgacgaagtaaactacatgctcacaataagctttgtccatttatattgacaatgaagtatttatgattactgtaaacaacaaaccatattcatgtaacgaatgagaaaagattcatttatttatacctttaggagctctctaggaagtagatactacatgcatagtgttacaaatggttgatccatgtaacggtaacactattcatctatttatagagttatctcataagaaaaaacaactggacaacatgattatttagtttcgcccttcttccttccaaaggtatcaaaggggagaagggtggttaagaatatctacaatcaattcaaaacgatggcaaagatacacatgtattgaaacatgtaaaataacagatgacaaagtaaactacatgctcac

SEQ ID NO: 178808 - DNA, 520 bp, Zea Mays
ttggtcggtgttagctagtatccttgcactataagcacttgtgaacacctcttacgactagagaaacacacttcactcacttgcatcgtttatatcatcatttgggtaagattggagagctcatagtgcatcacatatagttgttgcatcttgtggtactagctggttacactcattttactcttggtaattgtcgtctcctagacgacctagactttgttggatcgttgagcagctattgaagattgttttcgattatgctcatcattatgaggggctcttgtgctcgttcccacgggatattcgcaaaaacaactctagcaaaatcttggcttgttgaagtgcccctctagtgtggttcttacggtgccctgattatgggcttggcatgtgatgcccattagcgcatgaaaacacctatcttggactcgctaatgaggacgtaggttgctgacaaacgactgaacctcgaagatatatcttgtgtcattgcttgccccatgtggtttgctgattgtac

SEQ ID NO: 178809 - DNA, 529 bp, Zea Mays
aatacggaagtcacgggtcaatagagggcgagctggagcagcatggcagtcgccaatcaaactttggccccacctgcaggctcgttccctctcctgaggcgggcccggggccactgtcggcaccctggatcaggggtaccccttactacggtatgaagacacgatgcctgtgcggctacccctagtcacgcggagaatagccccaaagatatctcgtgagcagttgagatggtgttctcagaggcaacgtcatcgggcccagacatcctcaagaaggtgtaggacccctgtgcgcacaacccggacccccgaatacggcccgggacccccgaagtaaagaagcccgaagccgttggatggagttcggacccctccaagtaagctccagaccacccataacaaggtctcgggacaggaagtgtcgtggcctaggcaagggtccggtgttgacgcgtgttcgggctctatccggcgcgcctccgctccccgctcggccaagggcccaatgctgccacatggcttattgccc

SEQ ID NO: 178810 - DNA, 374 bp, Zea Mays
gtctatctggaagcatcgaaatgactatgttttgaaaggagtttctccttctattaacacaattctaggtgccatcaaggatgatcttagtctttggggtttggcaagtgctaagaggttacaagagcttaatcttgtgctttcttcatcagcaagctaagcctctaggttgtgtgtgtttttgtttcagtcatgtatctgctccaacttgtgtgtagctaccttactcatgttctggtccccatatgagtgatgatcatgtaggggacccacctatttctctctaatttcaatgaaacgcagctctcctgcgctttaaaaaaatgtatatgtggagagtaaattgtatttgactacatctacaacataaatat

SEQ ID NO: 178811 - DNA, 652 bp, Zea Mays
agggcgtgtagctctgcagtttacagagtccgcgacaatttcgaagtcacgtacgagggcatccattgtcaagtcgaggcgatcgagacggtactcgaccacgaaatcaaagctaaataggttgcagctccactgatgctggggaacattggacaactgttggcccaagaggaacttgaggatgtattggtcggtgcggacaaggaagcggcgaccccagagacacaggctgccaatgccacacaacctggaccaagctgatgagttcacgctcttatgtcgccagcttgtagtgaggggcggcgaaccgtcgtttgaataaggccagggagacgacccctgaggccaggcaagataattgagttgcttgctttattccataattgtttgaaggtatttatcctcttctaataagaatcaatcattatcctatttttatggaaacaaccaaaatatctaagaaaggaaaatcctagacatttcgcgccctaactgtcggcatggcctagccactggcgtggccccgacacctataggtaacgatggtcataacagttatatccattagtatgtctagtttacttgctaacacagctgccttttcagatgttcgcacttagcaaacataacacaaccatacaagtgtaggcac

SEQ ID NO: 178812 - DNA, 531 bp, Zea Mays
catggtgtcatgcgagagcaggcgctgcaatagttattacatcacccacaggccttaaatacagatatgccacgcgctccatttcgcacttgaatcagacgaatgcacgaacaatatagcagaatacgaagctgtcatccttggactccacaaactgtgagccctaggggtaacaacgtgtatagtcaacacttatttcaagatagttgtcggccaaatcgaaaaggactgctccaccaaagaaccagtcctcatgcaatatctctcgaccatgcgaagcttggaaaaatagttcaaaggattcacattgcaacacatagagcggaacaaaaatgaagaggctgacatgttggcgaaagcaacagcgaaaggtgacccactgccatctaacgtggttttccacacaatcggcacaccaactgtaagaaaccccgaagccctgcagataacacaagacgccaatggtcgcagaatcgtacatttgataatgaccaaagactggcatgcacccttcaccttatacctccaagg

SEQ ID NO: 178813 - DNA, 677 bp, Zea Mays
aacccgccccagaagccctgcatctgtcgccatctcaatcatcctctgcagagggtccattgctagaataaacaagaacgacgatagcggatcaccctgacggacgccacacatgtgcttaattgcatttgtttgttgaccgttgatgatgatttttgaagagcaagatcctaatattgttgcgatccaatttctccatttctgggaaaaacctagagctctcagaacctctaacagatatgcccagttgatggaatcaaaagcttttgatatgtcaagcttgacaaaaagggctggctgattattcttatgaagttcctgaataactttttggacgtagagaaagttatcatgaattgaacgtttttgaatgaacgcgttttgagcagtggagacgatctcattcattcttagcgcaagcctgtttgctaaaatcttggtcaatattttcatgaagctattgatgagactgatcggtctaaacatgtcaatcctgtcagcaccctcccttttttgtaaaagtgtgatatttgcctcattaacgaggttcaggtttttgcatctatggtgataaaaatcatgaattgcactggataaatcatctttaatcagttcaaaacaactcttatagaaaatccctatgaaaccatctagacctggtgccttttcagagtgca

SEQ ID NO: 178814 - DNA, 592 bp, Zea Mays
accgttgttgcgattcacgtcgccggtgaccagataaggccgtcggtaaaagccatgcgctggacgccactccggtgaccccccaccgtacttcccctctgccttgcggctggaaccgataagaacgccggtgaaccgtcgtcgctcggtcttgcgccacgtgtccggatgctttaccacgtcgcggatagttacgctaggagcgtccggtgatcgtcggagataccgccacggtagaagccacctagcgcttgcgccagtgccttcttcttcctctggccgccgcgcgtctcacccgattcaccagccaccgctcactatccctataaattgagcccgcggttagctgcgctacatcatcacgaaactagagccccaatcccaccctcaatcgttcgctagagctcatgaattttgaatttcccccaacacagttctccgccgtcgcgaaagagtacaccaccgctgccagcttgattcaggttagcacgagtccctttgctgcttgttctagcatccttaggtaccccgcaaacccctcgacccctttaattgaactgtaccgccagggatcaccgggaacgcactcatc

SEQ ID NO: 178815 - DNA, 503 bp, Zea Mays
ctctatctcaaaactctaagctcccattgacaaaactgtgtctaactaacccctctacctcatacctgaagatggaattgggatgcgtgccctggacacgtcaaacccgagatcttctctcagtgctcggcagtgagacaaacccaacttcacccctccatatctcttgatccagtcagcgaaaccttcaagcctccacacacaaaagacaaaggaatgtcaggggaagagatctctcaatgggatcgtggccataatctcaaatatttggagccaatccgcgcttgaactcgacctctctctgcgctacctcatgctcgatgtcgtgcccagacgccagagcgtgcactggtgctcgcccgcgcacgccccgagcgcttgtcagagcctcccctcggccgtgctcacccgcgcctttaaaaccacccccgggcgcgcctcacctcactccgcgctcaccctcgctggccagacacccctcccttagctccgacgagctctcc

SEQ ID NO: 178816 - DNA, 474 bp, Zea Mays
tcaggtccgagtgcccatcatacatgggaagctgggtggtttgtatgaaggtggccatggggtagcctgcaattctatggctagggggaagcatcatcaaaagcaatgttatcatgatgaaagtcgtcatttcatatgtcatcatggctagggctttcttgacgaagctctctctgttatggattatgtccttgttcagtgtcttgtgtgatgtgtcgcatctcttcggctgcttcatcaatctttttctggagctcagtcagctgaatcatcttctcccttcttctctccacttgttgatgaatatcttctagatccctgatctcttgatccaactcttcgtcctgtggtgttgggctaacaactttcctcttctggcttcaggcctcacttagaaggagctcatcttgattggtgtctaggggagcaagggcagcccctggcgccgctgtcttcttcggcggcatgacgaag

SEQ ID NO: 178817 - DNA, 734 bp, Zea Mays
gcgcgccctggttggggcacagcgtcgtctcgaggaggaggccacgggtgacgacgccgacattgacgttaacgtcaacaatgtgtctgtgctgcacgcccaagtggtagccatactcaatgtgtgtgcctcggtgtcaactacagtcgacctcatcaggtcgtcctcctccaaattgttttgtcgcctcctcgcccgcgagtaggccctcgccgattatgacctatgcgaggcggcattctctgtcgttaaccaccgggttcgcagggaccttcatgtgctctcatggatctacggctctgtctcctctgagctcttcgatatcgtcagttcgtcaccacctccaccctgtccgcccacaccgcatggctcgctctcgaggagcagtaagtcgttaatcgacaatcgcgaaactcaggtcctcctcgttgacatcgaattatgcaccctatcgcagggcatcctttcccgctcacggactcccatgtcgaacttggtgagcggactccctcgtcgaatttgatgagcccatctccgaccgcctcctcgttaccaatgtcctccgtgacctcaacgaccgtttcgctcacactgcccctacctcaagcgccagctgcagctaccctccttcgccgaggttcactccgagatccaactcgagaagctctccctggggcctccctccagcgccacaccgtccaccgccccttttctgtctgcccccacagccctca

SEQ ID NO: 178818 - DNA, 455 bp, Zea Mays
atttcagactagcaccgcttaatttttcactaaaataagcaactggttttccttcttgtaacaaaatagcacctagcccaataccgctagcatcgcattcaagctcaaacactttattaaaatcaggcaattgcaataagggagcttgggttaacttatctttcaaagtgctgaacgctacctcctgcgaatcacgccaatcaaacgacacatctttctttgtgagctcatgtagaggcgctgcaatggagctaaaatcatgaacaaatctgcggtagaaaccggcaagtccaagaaagttccgaatttgtgtgaccgtcgtcggtgtaggccactcccgaatggcagcaatcttgctgctatccacctcaatgccctgtggagtaacaacataaccaagaaacgagacacgtcgtgtgcaaaagatgcattttttcatgttagcaaataactgg

SEQ ID NO: 178819 - DNA, 557 bp, Zea Mays
gggctcgtggcagcgtgcgactggcggtttgcgtagtctgttgtgtgagaaggtagtgacagtctcgatgggccgttgaaacgcaatcctacggcgggatattaaagagtacgtggataccaccaagattaggaacgcgttcgagcgaagcgttagcgataatatttcttcctcatttttttgttctctacagccatacctcatttttaccttttgcgctcgccactgatccttagtgtggaaatgttacgaggaaggtgacaatattatgttcatccttcattcatcctcatcacgaaaccaaataagagacggtgcagtttcaatccacttcaaccctgtaatcaaacaagaaattaggtttaacccgtcacttaaaccaaacaaggaacgggtccgacccaacctaaaaatagatcggttttgacccaacccactttgttccgaaaccaaacgcactactagagagtgggaggaggcggcgacgacaagcgacgcccatgccagcatcacaacagtgtgcgggaggaaggaggggcttgtggcagcgtgcggct

SEQ ID NO: 178820 - DNA, 610 bp, Zea Mays
cggacagcgggaggaggagctacaccaatgaccggacgctcccgcaagccacctgtcgtacccagaaagcgcggcgcggtagcctgctcgtccgcgacgaggaccggcggcgcaggagactgagggccagattatgggagcaggagccacgccgaggatcggacagattggagctagcgaggcaggggtggccgcaaccgctatctcgtcaagattcttgaagtgcgacgggaacgactactattttcttgagctcatggtgaataaccagcgaccatagcatagccagatgaccaacacgagtatgcgacattgggaagggatcaagggagtgaaagaggggagaaaagaatgagtattaccttcagaacgaccgccaagaagaaagcgaagacactgaggttgtctgtcatgttctgtcagctgagcaacattctagagaacgcgaggctcccaaggacggcaaataaaacggagcagtgaacaacagctggatggcaggatttgcattgtggagaagcaatcggacggcaaaggaattctgaatgacgtggcctagctagtttgcaagctagggtccctggtttaatatataggaaaggaatatccg

SEQ ID NO: 178821 - DNA, 491 bp, Zea Mays
tatgtcgagacattcttggagagatgctttctccttcttgagctctttgacttgctgttctaggctttccacctgggagtttaagtgggtgcagtgggaggagagatcatcgtagtgggtgttgagggtgtggaggtatccggccatgtagacaatggtggggtcatcctcggtggggtctctccctgatagagcctgaagtcttttcctccaggtgggggtatttttgttgctgggtgggaaataacgaaggggggtttcaaagatctctcggctgtagttttggcatagttgtttaagggcttttcgggcaacattttggcaagtgtctgggaagcgatgcccggtgaagttgacttggaagggagggtggtttgggtggctttggctttctcccaggtagaccgccatagagcacttctctattccattttcgcggtattccttccaaacatattcgagcttcttgcggatccccatgcgtagtccgc

SEQ ID NO: 178822 - DNA, 443 bp, Zea Mays
gggtgcacgagctgcattactagacgaaggccagggcagatggccttcatgagaattttggttgatacaattttgcgtatcaaaaggatacgaaggcaccagttcttagctaccgtactaagtggccaactggatggaaaagtgaatggttttatatgaaggcagccgagaaaaagagggagaagctgatgaccatggtcatgagtccactgatattgagcttcagaatgacacgacccttgtgccatatgcagcttggctccccatgccaagtagccgaagtggagtttagagtggtagcggccgaactcagcactagagatctggtgcaagaattctaggcaaatagggtatttccgacctctcatggctgggggatgcccaagaaggatggagcaaaaagcatgaacttgtccgcctctcttatcatttcaagtttgaga

SEQ ID NO: 178823 - DNA, 1596 bp, Zea Mays
gaaaaatctttaaattctaaagtggaaaaggaaagcttgtccacgagtggagtgtggaaccccctcctatgcacatcggggtatgtcataagtggataagccagattgaataataggagcatatgcaaaacaaatggaaaagtgatagaacggaattaaagtgatacaaaattatgccacaacacacaaatcatcttaaccaaaacatattcttgtgtgcattagcactaaagattcaacataccgaaaattctacaaagtagtactggacatttgttgcagatgaatatataccatataataagtggattgacacactaaatactcaataaggcaggcatcctaacataactcatgtacaagtaactacagatacttatctacacgatttctgtcaaaatataacaagcatgctaaatgcatgtaaggtagagacaagcctggttcctggagatctggatgccagccttcaggtcctgcacaaagtgtttcaactcgaggtcttagacctttacatagtaagtaagaataatgtatcactgttcactaatgatttgcttgtatcatcttctatagtacataaatgcagcgattcacttgggataagcattgctcgcacaggagcaccgaaagggtaagtagtagtgatgagcccatcagaggatccaaatcacatcacaaaaatgcacgaaagggtaagcaacagcgacgcacccatcagcggatccaaatcaaaatgcagccgagggacgggggaaagacgtacaatcaaaattgcggtgatctaatgtcgcaggccacggcttcaagatttgagaaacctccaactccgacgggctgggctgggtgccagggttcttagtggccagcaagcatagtagtcgaggttgatgctcctgagggcctcctggtggcaatccatagaaaacatttaactcatcagagcttgtgcacatagaaaatgactcacattttattattaaaagacaaacttctaaatcccccaaatcccaggaacaaaacaaggttgtacacttttgggtcaccttgtcctcaacattgattttatgttaatcaatcacaaacgaagaacctagacaacagctcctagcccttgttttggtttgattcagagaattaaatgaactaaattcaaaagagcaaattaatagattgcagaccaccattgggtgtagtaaattgctcccctattttttcatcaaatctatggttacactctgtttttgcgagcggaaggtgaatattcttctgttgttgataatcatcaattaaaatgcagaatagtgtagcaccactcatgaatttttattttgaggaagcggcgagagactgtgcagcatgtagtcacttgtttctgtagtagaaaacaaaagaaactgcggtcgtagtaggaggctgaaacgggggaccgacgacaattgagatggacccgcgcttcccgctgatgactgagactacaccgtcctatttggtggtggcggcactcgggggcaccacaggcaagcccactcggagtcgttcatccgcttcttcgacgcagatctactcgacccggacggatgatgcgctgcgcac

SEQ ID NO: 178824 - DNA, 1252 bp, Zea Mays
tgaaactagcccgagtcgtcccacgaacgggaaaacgtgcccgtgcacgcccgtgttggtgtctttgcacaaagatccctgccaattcgaacaacctgaaaaggggtcgcggcactattcctatgtttcactaacatttgcggaaagcccctcctatttctatttcttcacagcgtcaagtccacgacgtgaacgacggtgagcatgccctccggcgaacctgtactggccggaatgcacagagactaaaaacccgaatttggttgacactagttcctaccctcggtgagcccaaaccctccgttaattgcacaatttcgggccagagcttgtcttcccacgacgatggagaacgctaaggacaaaccgaggtgttcccggtgattggatgcgatctagctcaaatgatcgggtcgacaagcatgccaagcgtgcctaggtgctaaaacaagggtgaggagggtgagaacaggcctggagacagcggtccacggcgcggtggctcacggtgacgcagagaaccaaattgggggaagaaaggaattagagcgctatggtggctaatcggaggcaagggtaggtgctttggcttcgtgacaacctaacggagctagcggcacactcaatttatagtgttcgagggcggtggctccgaattttgaaggagaaggctggcggccggagggaggggtgagtcaccggagtcgcataacgtggcattactggggtagaggcctgagacgatgactgaccaattcatacgacaccttacgacgaggtaacagggtcagtagcgcggcggattctagtaaacggcggtcacaccggcgatgggccgtgcagccacgtcgtggcgcaagtggacgagcaacagagcggccacagtgctccgacttcatccacggcgagatcttttcactagggggtcgttatccgcatgttactgggtgcgaagcacaacaccggcgttaatccgagcgtgcgggtcaccggcgacgaggttcagcgcatatgagatttttctggctactgtaccatggccatcttgttcagtcgttctgacagcgtgatttgaggagccttgttctccattttccatgtgacaacttactaatcggtttgtaacaaagttactgacctataattcagctataattcaactatagaagccttgagcgaattctgattaaatcacacagaatttagtctccaaagttcatccgaactcactgtcagttcagccctaacccct

SEQ ID NO: 178825 - DNA, 593 bp, Zea Mays
ccataccaccccctgctctgtaagataaataaggaaataaagttgtgacatgtttttttccattacttaccctaggatcctaaatctcgggacgagattcttttctaggggaaggatgtaacacccctggtgttaccagaactaaaatttgagcatggcatcatatgcattgacatgtcattatgtttgttacacctagaatgcatccactaggctaaaacttcaaaacaagtgtgatgtggtgacttgaagtgttcttaaccctagggtagggtatttaactatgggattagggtatatgggtgtggtgaggccaaattgagtattacctcaaaagttattggaaatgttcacaagagattaactttgatggatttgagtggcacaaaaacccaaaagcacccaaaatcctaaatggaaccctagaaaccctaatttgtgccctatatggtgatttcaatttctatacacttttggaccaaagtgtatatatcaaagtgctagaatatcaaaaactaaataacttttacgttagaagattttcatgtgatgtggaacaatttggacttaattacaaaaagcctcaagagttg

SEQ ID NO: 178826 - DNA, 645 bp, Zea Mays
ttcagccgctgcacacatcggctgccgaagtttaagcatttctcctgaagttctttgaaggatttctgcaaatttgagtatttatccacttcagctttcaggcttgcttcaaaatatttcttttcttgctcgaatttttctgattgtcggaccaattcattctttaatttgtcattttcagtttggacttcagccaaagagccctccatggtttgaataacaaaatccttcttttctaatgcaccttcgtgctctttgaccatgatttcaaggttttggattgcgaagtctttctttttcagattggcttcgtgattttcaactttttcagccaaatcttgaataacggctttgtttttctcctcctccagatcttgttgcatttttaaaaccttgcttaataatatgctccgtcgaaacgatcttcgttagaacacgacctaaaagataataataatggtaataaaataacaaaaatattcgttaccttgaagttagcatacagcaagcttccggcgatatgttgtcgttgataacggcataagtccgcttccagcttcggcaagccaatgcttttggaaagggttctaacaattttggcctcggtacgattccgaaggcatattagtttcccttcgttgaccc

SEQ ID NO: 178827 - DNA, 563 bp, Zea Mays
agggaaaaacatgtacaatgtactagaaaggacaagaaaaattaagagaagataaggacgcattagtgtatactagccttcaataaaaatggaacatttgcttaccgatcatttaaaatagagtgcgggaccatacaggcatccatctgaatctgatcacgaaacattagaaacatgagtgcaggatcgtaaacacattctgcggaaatgacaggaaggacaagatatagcttgcagacagacgacgcacctgaatacaagtgcttagatagtgcagatgcctgttgccaaacgttacagacatctgaatatatctcaagttttcagttcttcataaaactactatgtaaaagctaaatcagtatgcccatgtcaaagattcgatgtttacgtgtaatcctaactcgataaatcccccaatcctcaaagatcgttcttttcatggtattctatagttacttgttactcaacttgtttgagattaaaaatgctttgctgctgtgttattctagttattgaaggtagaccagttattcacagacaccattaaccccgttagttaa

SEQ ID NO: 178828 - DNA, 532 bp, Zea Mays
agccatggcgctccgccgagctcggggtgcagtggccgccgtggtttggttccgtggtgggtgatggacatctagccgtccatcctttccgttgtaatcgtgacactacttagtatgttgggattaggggatttgaggtccgagcgtggaattcggtggaactccggtgggtctctggcggagggagcactgcgaccgctggtgtggtcagtgatagggataggagggagcactgcgccgtccgatccggatcatgcggatgcgattagatcgcgcgcaacgcttcagccgggagtcacatgggccgttgatatattgtggacgcctcagattagtagtaacgcgttcctcttcggggggattaatcggatcccttgatccgagggcgtttggtccggattgaatcgtggcgtggtcgtgtgtgggccgctgatccatgatcctagggccgcagttgatcgctgtttcttaaaagcgctggtgtaatccacaccgatggatgatgatcccatggccaggattctaagatacc

SEQ ID NO: 178829 - DNA, 705 bp, Zea Mays
cgggactactgttattgcccgaggctaggctcgggtgagtcgggaccacgtcccttggtagacgagaccttgacttgaaccgtgcttatcagtttttacgatttgttttaaagatgttctccagccacgtttaggagtactgtgagtacccctaattatgatacccgacagggggttaactgaggagtgtgttgtgtttgtaacatgtttcttagtttatggatgtggagacattggctcaaatgtgaacattgttgagcgtgagacattcgacgataataaaaaaggtcaagcaacgcatatgtatatgataaatccaaagagataaaagggcagacttgaaggcttggatcgaggaatcaagggacagaggataggtcatggatggttagcgcttggtacatctagggatagcaatttgatccgcggattcagatatgcgtcgaatatccgatccgacagagccggatatagatacattttttacccgtgggttaaattcgtatccgatccaaagtcaggtggacacggattaggatattatcacccaaccacagattattcgttggatatctgaaatcgacccatagtttattttttgtcgtagtctatatcacatagcaaagagcaaatcgtaactccatgaacctcatgcctaacgttctcaattcccaaccttagattgtcccttctagctttattggc

SEQ ID NO: 178830 - DNA, 534 bp, Zea Mays
attggagtttaggtttaaatagaggggatgtttgggtttattcgcacccctcactctttattttgcttgtcttctttcatattgtcgccttccactctctatttgatcctaggtggagtttgaacttttaaacattcatcgacttgatcaacaaccaatattcataacttctcgacacccctgtcaatgtgagggaggtcttcattgacaacatttctcacatacatcattatcgggacaatatttctatctgtctctattcctttactccacaacctctatttccataccaatatcctcgtccttcgtatctctatcgaccttccatggatgctcctcttctctcaataaaaatcctaccactaatgttcctcctcctaccactaaagctcctactatcaatgctacttgtccaccaccattcacttatccatatcctcctccatacccgtatgaatatccatatgacggtcctgtgtatggattctatggtgctcctcctccatatgatgttccatatagtgctcctccatt

SEQ ID NO: 178831 - DNA, 1161 bp, Zea Mays
ttcgtgtctcacttcttggtgtgccagcctcagcgtaggccatctaatcgtgttgagtcacagcacaataatttgagacatgtcgggccatgtttttttgaggttctatttttaggccgtggacgacccaaaatggtcagcccaaattttcagatctagtcgtggtcctgcttgatctgacagtcttcaccccgaatctctatttatatccatacggaaaaatataaagcgtcattgacaattgtctctgctgctgcttgtggcctgtcacaccctcactatcaccatcctatccctgtagccatgaaattccgtggagaatatttaagaccgcctattaacagtcgtctcaaagtaatggtctctgctgcttttttttacgattggaagttaattactcaatcggttgccatccactcgttcatataaaggagcagtggagcatatcctgtacgcaaaggatgccggtgcttccatgcgcaaaatgcatccaacccatcggtccaatattcaacggtgttgtggtctttttacaaataaggtcttccactacccacgctccccacgctaagtgatgttcttttttttcaaaaaaaatccgacaccccttctttccaaacagcagcaacatttaactagtctcttggtgatgccctaaggcagcaacattcagaaaatatagtagctcagtttacattcaaaagcaaaatactgaggctttatttggataacattaacacatataaatagaacagcactagcgttgggatgcgtttgcctgctgtttggggagaaggggcgtaccggggtttttttaatgaacaacactaatgtgggaagcgtgggaagacttatttgcaaaaatgtcataacaccgttagatacagaacggatcggctggatgcattttgtgcctgggagcacatgacttctttgcgtacaggatatgctcccacctttatccctgtaaaaattatgtcaaacacacagtctacaggttttctatattaaacatagattcaaaaccgatctacaggttttctatattaaacatagattcaaaaccgatttgaaaacaaatcagactccgaactggttttctcggtgtcaggctctccggctcagccaccagtttggacagcggaaagcctaaagggatcc

SEQ ID NO: 178832 - DNA, 486 bp, Zea Mays
cgaacgtggacaagatcttcgcagtcagactccggtcaggacagccgtagtcagcagcaggtgcataacattgccaaccagcaccccgctggtgaggcccctcgccgtcaagattatcccccctagggccgcgacaatggcacacatggtcggggttgaggacgggcacaacagccacgcagattttactgcctgtttcacgacgaagactgcgcgcacccgacgagggactgcctagaaacgaaggccaccagggataggatgtcctgagcacaacccgccgacaacccaagagttgtcgcccatacatatcaacaccacctcccacaaccatacaaccacggccccgctcagcatccacctaaccacgcatatcaacacaaccaggaggtacaaatcgtaccacctccgctccagcctccgcacccgcatcagccaaacatccaccacccaaatcaccccaagcaccaaagcaagaagacttcg

SEQ ID NO: 178833 - DNA, 629 bp, Zea Mays
caaaggtcgtttaccgtcacaggcggtggactttgtgtggatagatattccctaggttctaacaggacttgagtgggttggacagttggttttatgggctgtccgactaacatagacccaaagacgacacacgacttggagttcaagccaccgtgacggtcgtttccaatatgactggcacgaagcgctacgtcgcacgcaagttagaacggtttctaagcatgcaagatgagcgataaggaacaatgtcgatttgtggttctaatcctatcgtctctatataaagcgggttaggtataaaatgattagtcaccttgataatctgagagagcattcttcacttcctcgatactttgtaaccttaaattgtgagcaagatcatctccacagcacacatgatgtagggcattacgtatttcagcgccccgaacctatataaatttgtgtattccgtcgtgttaagcatgagccatcgagctacagttgatctcgccaacaacaaaatacactacgtgatccaccccatagtgtgttgtcggtatcaaacaccgacagctggcacaccaacatatagaaaacctttggctccaactaggagtggacacttttttatcataaaccgaaaatcg

SEQ ID NO: 178834 - DNA, 342 bp, Zea Mays
ggctggggttggtgtgttttcgttgtggtgaagcgcatcgccgtgccgagtgtcagtggagtggtaggtgctctatctgcagccaggatcacaaggatgtggtgtgtaggaggaatcccaatgggaaactcaaatgggagccagtgacttcttcctcttcgcagggcactgtcaacatgatgtcaagcgctgagcagcaattttctataccaccccctcaacagcaattctatatgcccgggactcctcagtttgtgcctatgcagggtttccctcagaacctagtcgcgcctactcctgcaccgaccactcatgtaccatcccagtttggagctccgcgtc

SEQ ID NO: 178835 - DNA, 557 bp, Zea Mays
ctaactgatggaccctgattgccaaaggcttcttccgagcgtccttgctgactaatgggccctagggaccggggatcttatccccgacaattctggaaaagttagggtctaaattataaacaaaaggactaatctgtaacaattgtataacataagttgactgtgggttgtattggaagtttctcagggtctcttttgcaaagtgtacgtgactattatacgctcgggagagatatgggttgttggatcttacatcagtggctcagattataaggccgaaggggtatactggttgttctaatcctggccgccccttccataactaacggctcgcatcccttctccctcccctacaccaactcttggacgacggcgctccgctggagcagcgcccatttcatgactcagtgctccactgtaatacccactttgtaagaaaatcaaaatggagaaattacattcatttatgtatgtgtgtgcatctctatctatcatcacatgtgcctgatcatgattaaaaatgagtaaaactccactaagacaaaaataaaccatgg

SEQ ID NO: 178836 - DNA, 1144 bp, Zea Mays
ggctgcacgatctgatccggacggctcggattacaacgtggtcataaccgaaccggtacacagcgtggggcatcagattaagatcctacggctagggtgttatgaagatgtgatctaatcccggtcatcgaactaccatcctacggctcggatccgtttgatgaaggggtatgctgattctaatcctgaccgtccacgcagagatcaacgtcccaaaacaatcagctgcacaatttaatccccactgttggatgaggatccaacgccaagaacgtcatctgccaccccaagcgcttggacacggcggagcataccccgcgcggcgggcttcacgccaacgagcagcgcatccagggttacagagcccaaatcctagaatagattggcgcaaaacgtagaggggcagctagcggagttatccggtggacacttacccgcgattgaagaggtcgtgagcctgcccacggaggacagcggatccgtggcggagattgaaccacggcgagcaattccagtcgccccaaggccacgcagttcaaattgaaggcgcggacagcttcacgggtccccggcgaacgcccccacccacacgcgcggacccgtgcgcgagcatagaggagaatcaccggcggcggctgttggcgagatggtctgcgcggcgcgttgccgtgcatgatgggggaggatgatggctcgactagggaaccagagaggcgaggcaagaggtcgcggcgggttttatgccccccgcaggcggagtccacctccccccaagcacacggcagaaaggatgaggatctgggcgagcttttcgccatttctgttgaaactaaccccgaggagacggcgcggatgtcgcaacagaccgggtcgaagaccaccctgaccgtgggccccacacggcagagattctccccgggataatcgacttcgggtgcgcgggactggagctcagccatggactcgatctacccacacgatcccgagcgacccgcgtggagtgaagaagactgatccgacaggatggtcccacgatgcagtgacactgcgaggataggccggaggactaggtactggcgagtgggcccggttccccagtgcccaaacatgcaggcgcggctacagggaagaaggtgggccggca

SEQ ID NO: 178837 - DNA, 499 bp, Zea Mays
cgcctgcctgctggtaagccaatgtcttgctagcatattttcccctgctgatcctttgctagtatttaggttctgcagttgcagcccttccatactgcatcgcatcatttgtttcttgtcgctttcttagttcctttgcattttagttcattgatgattagtagctcagtgctttggttgatatgcaggccaagcccctagcgtcggcatatttgcatttaggccccttgcgcgcgtggccgccattgctatgaagctttgcccccataacttcttccacacctacgacctatgggtggccgccgttgcatccaatcaccattcctctccgtcgctgacaacagctgcctgaaacaacctcaattactgccctctagctctccttcctttttccgcgcatggaagccgaatcttctgcttcttgcgtcactggtagttcctcttcgtggaggtccagcaggcgtcctggttgtgctgctccatggaggcccatccgagg

SEQ ID NO: 178838 - DNA, 658 bp, Zea Mays
cgctgtataccaaggatcctgcgggatacttcagatccttggcatattgcctagctttggcaatttgctcctctttagttttttccctgtagcgtgacgcactataaattataattccttagtggatgcttcaggagtagggaattcaagttcttcgataaccttctctttttctaatgataatgatactttcgcggcatccgaaggtgtcagttcagtgttcttctcaacaatctccgcaggtctcgcttcggcggcagctgagggctcagcttcagtttcaacctgcgtcatggcaatttcggcatatttctttgtattcttgtctcccacgctaggtgcttctgcagaagcaggagtcagcacctttgtggattccataacagcatccagtacactggccattctccttctctttggagttattgaagcaatcttttgaaccttcgacagttttgcttcttgcaataaactcatggtagattctagctgctccgctactgtcttcgggattggttcttcggccgattccaccctagtttcggcagtagcggggtgacttggctcaatggaagaagaagacccttcagcaagcttcagcactttggtcgtttcaatgtacctgggccgatgtgtcaaaactttaacctttttcacc

SEQ ID NO: 178839 - DNA, 499 bp, Zea Mays
gtagacatttggggcaggcatttcagtcaggttcctagaagaacattggtggaatctggtattcaatgggttcagagaacgttggagattagtaacgactgcttcgacatgtttcgcatgcgccgaactatttttagacgattgcatgacacgttggtagaaaattatggtctgcttcctagtcggggtgtcagtactatggaagctcttggcatattcttgtgggcatgtgggggtccacaatcttttaggcagatacggaataagtttggtcactccttggaaacaattagtcgcaagtatagtgaagtccttaatgcactgtataagatgtcatctgacataatcaagccaaaagacccaaatttcattgagactcatcctcgtttgcgagaggcgaggttttggccacacttcaaggattgcataggcgcaattgatggtagtcactttccagcggcagtcccggcctcggagcaagcgaaatatattggccggc

SEQ ID NO: 178840 - DNA, 576 bp, Zea Mays
tttggactccctaggatagaccaggcggttgattagaccgctggatgttctatgttgtccttcctggactgctattctggataccatcagatcagcttagcaaaagaagatgaggaaaaaactgcattcattaccccgtttggagctttctgctatacctccatgtcgtttggcctcaggaacgcaggagcgacttactagagagctattcagacatgcttagccgatcactggggcaagcaggtagaagcttatgttgatgatgtggtgatcaaaacagaaaacttcattgaagatttgcagctggtcttcaatagcctgaggcgatactggtggaagctcaatccagaaaaatgtgtcttcggagtaccagccaggaagttgctcggattcattgtcagccaccgaggaattgaagccaactcagaaaaaatcgaggacatcataaaaaaggaagcgtcacaatcacagaagaaagtgcaaaggcttactggatgcatggcagccttgagcgggttcatatcaaggctaggcgaaaaaggcttaccgttctacaaattgctcaagaaggtggac

SEQ ID NO: 178841 - DNA, 621 bp, Zea Mays
aaatttgaagaattcaaattcgaaatggtaatttcaaatgaatttggaaaatagaaagcagaaaaaaagaaagaaaacaaatctgtgttgggcccaatcctcgcgctggcccatttccttctcatctgcgcaagcccactccttccccttttcttttctttcgcgctagctgacaggtgggacccccagcttagtctcttcaacgcgacgcggactcatctcttgtcgcctgaaccgtggggtcagctggtcagggtgttcttcctcctctatgacgaattccgccccgctccaccattgccatcgccgtgtagacccatgccgcatgcacctctgctcaacccaccgcgccctcaccaaccactgttgggtaggaccagagcgtcagctctttcccctccgctgaaaccaaacaaagccgaagcagccaccaaaacagaatccgcggaatcaccggtaaatcgagcaggatccggaaatgacttgggggaaatcggcgggcggatagcgcggactccgtggtgccaggggactttctcccaccttccgctgcgcaacaaactcgactgcatctcgcgtgagctcaccgaaacgaacttcgaatcgtccgtggcccctccc

SEQ ID NO: 178842 - DNA, 361 bp, Zea Mays
tgaaaacaagtcaggcggcagacgccgtttcacgtaacatgacaccattgggactgaggtcaactgcttggacgatatgattacaccccgcggtcacgtcaagttactactcaagggcagtttgctaaacgctcagtgcaccaagccatcccttggctacacccattagggaggggacgtccaggaattttcaatagattttcccaagcagtcacatccatacagtgtacgcaatgaatgtatcaagacagaagaaagatatcgatagcgatcggaggaaagccaaaaatagctactgaagtacaagtctaatcaacagaagcattgaagcacgaagcgaaatgaagaccagccaagagcc

SEQ ID NO: 178843 - DNA, 462 bp, Zea Mays
gattctttcaccttgaggacttgtcaacgtaattgttccgttggcacactgtatcactccatcacaacttttcaaccagtcgcatccaagaatcacatcaataccattggatcctaggaccactaggttgactgaaaaatatattccttgaatcttgagattaacatgggggcatgagtgtgtggccttcatgttacctcctggtgaactaatatgtaacatcttcttaagggggtacttaggtatgttgtgattttcctcaaatgactcagttataaatgaatgtgatgctccagagtcaaataaaactgatgcaggtatggagttaacaaggaacataccatacactatgttagcatcttcaggcactgattctgcggtgacgtgattgacccttcctctactctggttctgcggagttttgttctgtgcagatccacgagcgggggtgttctggtcatt

SEQ ID NO: 178844 - DNA, 997 bp, Zea Mays
gaaaatactactatacactaaatatataaaggaattaaattttggttcatgctgtcattagagtatcaatatttaacccaggtacgaactctaaagatatgaattcaagtttgaaacataaattttaaaagagaaaaataagaaaagaaaaagaaaaagtgaataaacgcagtttgggccgagatgccgctttcggcccactactccaaatttcccactgtgcggcccaaatcctccttttctcctcccgcgtacgcactccgcgtacgcactcatctctgtcgtatgggccttgtccatcagctctcgcacgtgtcatctgtgcctgtggccgctgacgcgcgggcctgcctcgtcagacccttctctttccttcgccgtgcaactcgggagatcccagctgtgccacgcttctcagagtccattaaggtcgcctctcctacgagcttgtcgtggctataaatgatagctctgggctttgctttccccagttcatcgcccccaccaaccgtccgccacagaaaccgccgtgatttcatcgccacgagggatactgcgccgccgtcgtggttgtgtacctgtgccgccgtttaagggtcgtcgtcgggtccgggagctccgctacacctttgagattgcgctcgtggtttatgcgggtgtgttgtcgtgctgaggcccaacgaattgctcaccgaagcttcaatcaccgccgcgggtggacttggattctgacgccaacaacaccggtatgagacactccctggaaagcacctttgttcacgcgttgtatagcgaccaacgacgtaggatttagcgctcttttatgttgtgaattgcttgtcggtgcgtcgggccaccaccctggtcatgcgcctccgtgagccataggctctgctggaccatcgcgtatgaaacctcactgaatcgaatcaccgtgttgcgggccacgtgtagcagcttttaattcgagtttggcacggtggtgtgccgtattggc

SEQ ID NO: 178845 - DNA, 559 bp, Zea Mays
aaatatatctatgtgttgaattagtctatgtatacacgttgttgcccgtttcccagtccagatggacgtaggtcaccgttcctgtgctcagtctatcaaattgaatcctactgccatagagagagaaccacacattcgtcctacatgttggcttatggcgtagaaccaagtggttagtgtgaacggcgtagatgataagtatttacgtactaacatggaataagatgagaagaacggcgtagaaccaaagtggttagtgtgattgccttatggcgagagaactgcgcttttcagcggttccggattcagaggcggcggctttcgtggaacaaatctgccgtgacttgagatattatgacgaatctgtatgtggtgtcgtcggatgcttcacaccttcaccgtgcacttgaacgccatgaagagtcttgcaagttgcaactcgcgcgacggggcagcaaccagcagagcagatatcggtagcaagggaaaggaaggcaaccggccatacgagcctgaagagtgttgctaaaacgccgagttttttctattttgttactta

SEQ ID NO: 178846 - DNA, 650 bp, Zea Mays
ttcgcctcactgtgcctcttccttacgtggttgccatgcgttaatagcccacctcgtagccgtggatcgatcaccggaccgccgtgcctatatataggacagggagccacgacgaggtgctcgctgttcttcaagtaagcttgagtacaaccaggaattcgcactgccctctccaccttctcctaaatcgattgcgcacggtgaaagcacagcctcttacggtcctatagccccgatcccatctcccaatttcgcccagagccgtcgcgacaccgttttcccctttctctgtctccggcgaacgtaaagctttgcgctccgtggccagccctctctggtaaggccctgtccgattcaagctttgttttagcagctctgtgtattcatgaagctcctcgtagtggccgtttgaccaatccgagcgtagattattgggaacacaggatcgacaccacgggttccgccctgatcgtggacagatagtttccagtggggtttgtgtcgattaaatggatgttcctaggtcgccttaagccagagatgcctccccggtcgttatccgtagcagtcgtcaccggccgtggccggtacgggccatgccaggcttgaacggcgagcgtgccgtgaccagggaggtgtttggagaagaa

SEQ ID NO: 178847 - DNA, 475 bp, Zea Mays
tggcttcatcggagaggcggtggttcgaccggtcgatgtgggagctgcctgtgacagcgttctggacaaacctcatggcgttccggctagggcagtacgatagagttcaaaatggcaacgctatgagaaccactgtaacctatagacaacaaaatatgaactaatggtgtaggattcaccttagaaattgctggtcatggtgaactgagaggaacaagtgtgtggtcaccagtttcaaggtcttcaaagacactaggggttttcttcgtggagggatggtgtcagttggctatcctggtgcacaatagtgatagcagctgatgctctatcaggtggtggttgaggagcccagagatattggacgtacccctttatgggagttgagagtggtggcaagaagtaaaaaggataaactctattggcctccacgtgttcacaggaggggtggatttgagaccccagtcagtgcatgaac

SEQ ID NO: 178848 - DNA, 648 bp, Zea Mays
ggaaagagaggaagagagagggggcggccaaaggggtgggggagtgagagggagggggcggctagggttaaggggggaaactaatgggctccccaccgccggatcgagatccacgacccaaactcgctctcacgtctgctcccgaccctagcgcacaaatccaacaagtaatctactgttttactggtgaatgcttcctaaaaaactccaaccccaactacacagatcacgaaagaaaagagaaaaattaaatttaacttcttttcagcaaattgggtatcacatgcccgcaggtcgttagtctgtgcacccctcacggagggtgagcgcacaaatgtcgatgcctcgcgttgatgccaaaatgatcgaggcctggacctggccgagccaagatgggccatgccgagaagatggtcaacatcttcgcgccactgcctcatggcccccggcgaggccgtggaacttggtgggttgcgtagcaactccctggttgcagacaacgccccaccatgagcagcccccgacggagccctaaatgtctgcacgggcgtgcgctgctgcgcagtgtgtacagcagcaccaggcgcagggcggtaagagccctgtggcacagaagatgctgccccttcctccatcaggaaatcctcg

SEQ ID NO: 178849 - DNA, 477 bp, Zea Mays
atcctggcaaggccaatgttgtggcagatgccttgagcagaaaggcccagtgcaattgtatgagcatggatgcaagagttaccaccctgtgtgatgagttgtgcaaattgaacctggaggttatttcttcgggtaatttaaattatatctcggtggagcccacactgcaagagcaaatagtcagggcacagattgaagacaagggtgtgcaagttatcaaagaaatgatcaagcagaaggcgaagaaacacaggtgcttccgtcaggacagcaaggggattttatggtttggagatcgattggttgttcccaaggaccctgaactcagaaagaggatattggatgaagctcacctttccaaattctccatgcaccctggtagcaacaagatgtaccatgatctcagatccttatactggtggaccaggatgaagagggaaattgccaagtatatatccgagtgtgacacctgccaac

SEQ ID NO: 178850 - DNA, 341 bp, Zea Mays
attgattgtaacatactaataataagcagtggtcaaagtggacctaaacagattaattgaactgggttgggatgagaattgtacctacgacgtcctggcggtgaggtgtgaggactcgttgtcctcctcactcttctgcgtgcgcagtcctcctctggctctagccatctggcgtccacacgtatgcctcctctctctttgggtcgcgtcaagcttctccttaatgggaactcatctggctccgacgtccgcatgcgctcaaacaaaaattcgataatcaaagaaaccgggagggaaactgggtgtagctgggtagtatcgatgaagtgtcgcatgctcac

SEQ ID NO: 178851 - DNA, 755 bp, Zea Mays
cgacggagccatggacgccgatggccatccacgcaacagtggatagagctctcaaatgaaaggtgctaaacgatgcttgggtcctagcgaatacgatggtatggatcttactgacgatcggaggcacagagagcactgcccacgacgaagggcggcaacacgggcccgaggaactccggtgagtgattccggtttcatcagtcgacgatcaaccccgccgtgacgacgaccccccccccccccgaaccgcccgagaaggtcccatgccaattcttgtgtcccaagcggccccgaacgcgtagatctatggcggcggtgtggatcccgccctgcgacgatgatgcttttctagcggcgattaggacctaaaagtcaggtggctaggcacgagggaatgtagcggagaagcaagtgcctaaatagccgagcgaggaagggaggcgggagcggaccgtaccggccatctgcggttctcccaggaagctcggagatttctgttacaggggaggagacgaagttggcgaaaggggcccacgcggcagtgtcacgagcccggccaacacgcgagagaccgataggcgggacccactggtcagttgggagcgtgcgcctgcgcgaggattgccagagggaagtgggtcgcgcgtagagtaaggagtgggccggtttgagtgctttgggcccaaccgagttctttcctttttcttttatcttttatgttttcttttctcactttgaatttcaaattcaactca

SEQ ID NO: 178852 - DNA, 530 bp, Zea Mays
gaaaggtccgatcaagtccagcccccagcatgcaaatggccatgttacaggaatggtctgcagctgctgtgcaggtaaatgttgttgctttgataagaattggcaagcttcacatctctggactaactcggcagcatcactcttcgctattggccaatagaaaccagatctgaaagccttctcgaagagagttctggacgctgcatatactccgcactgcccggtatggatttcatctaacagttgcttcctaataaccgagtgaatgcaattcatgaggactcctgccgcacctcttctatacagtgtgccccctatgagggtgtagcgggctgactgccttgcgatgcgttctgctgccgccttgtcatccggttcttcttcaatttttatgtacctgatgatagcctctctccagtcattggggtctgactctggttggctcaaggtgttgcactcttccatctgatctgagaggatacttggttgtgatatttcttggatgaagatcccgggtggagcctcggccc

SEQ ID NO: 178853 - DNA, 403 bp, Zea Mays
agtagctcttggcagacagggcagagcaccgagcattcatgactcatatccttcagcacactggtgttccttttcctctagtgcattctgctccgcctcttgctcttcaggctatagttgtgctagccatacaatcaggaccctagctacactcttttggccctaccatctctccgctcaggccggtcaccttggacttctctacccaggtcgtcggaccagtcaatgctcagccaccagtgcctccagcgtctgttgtaaccactcctattgtggctatctctatgactgctccaactccagcagatcaagcaccgcagccagcgtctgatcagcaccagctccagcctctacagcagatactggatctgggactaactccaacaccttgctcgtgtttgcg

SEQ ID NO: 178854 - DNA, 496 bp, Zea Mays
cagaaatgcgtacaacatggtgggtcaagagatctttggatgcatggatgggcgacgcccatgttttttcactgcacgcgtaccggcagacatgcatggctcttcagttcgcgcccggcatgcagtgcatccttcctacgacctcacctagcctagttagctccatcctattcatcatctaatgctacgtactcctactgcactactccacacatgcactagccgacctacttcctctatgttcttagctatccatcggagtggccgtggcccgtggccgtggtgttgtgcagtagagaccagacagtaccaccgtagcagccatcttttctgttgggctggtgattcgatttgggccgaaggcgtcgttgggctggaataaacgggccaactcgctaaacgtgccaggctccgggcgcctgttaaaaagttccgttgttgtatggcagtggcagacaagaacagaagctccatagaatctaactactgataaccg

SEQ ID NO: 178855 - DNA, 561 bp, Zea Mays
gattgggctatcattaatattcaacctttgccggagcgtgaagtgcttttccctacggttagagatgtggttagagaatatcttgttgagcatcggaggctcggggtgcgggatattcagcgttcgcacctgggtcaggttttggtgcagtttaacagcgtgctagatagagacaaccttgttttgcttgggcctcagcaatatcttgatgccaccttcactactcaaagacataatgatgcctggaaccacagggcactttttttaaccgtgagtgctggctaatgctgttgggatttcccctagactatcgctcctccgagtacttgtaggctgccattggctcttttggtagattaatcttgtgggaggaggacaggcacaatgtgactaggactatgcttagggttcgggtcacatctcttgaggaagtcccccagttcattgtcttttctgaagcagatggtttcctcggagattcttggactgtgcaatgcgagatcatttagcaaaacttgttgggtggtcagccccaagacaaagacccagtcccgatggtcc

SEQ ID NO: 178856 - DNA, 424 bp, Zea Mays
ggatcgccatcagcatctttgaaggacttgggctcctccacactgacgttgtgcacctcagcctcctcgacgtcgcggtgagcccgcccaggcacggtgttggtgcacaggacgttctccagagtcctgtaccgatgctccatgtcctcgtcgtcgtccgcgtcgaagttcgggtcagcgcttagtggtgtcgcgaactccacctgcgtcaccctggcggcgttcggggcagcagttgtcggtgaaggttcttccctccgcgtcgaacccagtacgggcgagcccgctccagaagctgctggcgtcgctcctccagagcgcgacggcgcacccgacagtagaggcgtagggctcgcgacatgcgacggagatccgggcgcagatggtgtcggtgcctgatgacgcagcttgtactcctcctcga

SEQ ID NO: 178857 - DNA, 476 bp, Zea Mays
attagccttgcttgatggattcctctcaaaggatagcaccaaagaactatagatgccatgggatcctggtttacaaaatctacatggactcgagggcgagtcgttttttaaggaggggagaatgttagggacatcgaccaattatgtctaacggtccatgccggcccaagtagctaaggaaaaatactacaaaggcgcagtggaggtcagcacgaaggaaacatcagagaaaatatgagaaccttttattattcatcttcctactccgtctagcattgttcttcttccccaactctctcttgtacccggatcttctagaactttatagcatcttcctcctagctgtgatttccctacttgctgcttccttcccaaactccatctattcagcatttgttgcttgagttatgctttggctggttcagcgattcatgctctatcgatgagggttgctaacaaccaagctcgcaagctct

SEQ ID NO: 178858 - DNA, 831 bp, Zea Mays
ggtgcccacattttagtaaacaatgaatgattatcaagtgagtaacaatgcagtatgacttctatctccatattcacccttcgaacttaaggtatcacatttcacaaaggaaaaaatgtaacatgtaagttcattgaaaacaacaaggaaaacagcaatctattttgtgtctagtgtcactctctacacaatgtttattcctctttttgaggactacaacctcaataggtggtttaggagtgggttctgttgacacaagaaaaacagcacagcagcacaagtagtcaagtggtgaaaactggactacaacagcacaaggaacacagcacagcaccactagtaataaagtagtcaagtggttctgttgacacaaggaaaacaacagcacaagcagcacaagcagcacatgtagcaatctattttgtgtctactgtcactctcttcacaagtagtcaagtggttatgttgacacaagggaaacagcagcaccagtagcaatctattttgtgcctattgtcactccctacacaagcagcacaagtagtcaagttcgaaacaaccaactctgtttagtgtgacatgctatgacaaagtttcctatatgtattgattctgctcaataactttgtatagtggcttcttctaaagtttcctatatgtatcctcctctcccttagcagcactaccattctagatcccacaccaacccccaggccatacccctcctctcccttagtagcaccaccattccagctcctataccaaccctgttgctttcttccctgtcttcctcgtcctgccagctattagcccctcctccatgtcatttcc

SEQ ID NO: 178859 - DNA, 836 bp, Zea Mays
catgccccaagaaagccacttcggatagccaaaaggcacacttcttcaacttgccatagaactgattcttccttagggcacccagaacgagacggagatgctgctcatgctcagccttagtctttgaataaatcataatatcatccaggaacacgaccacaaagtcatccaagaactcatgcaacatcctattcattacttccataaaagcagcaggagcattaattaagccaaaagacatgactatgaactcataatgcccatacctggtgcaaaaaatggtcttctcaatatcctcctcacgaatcctcaattgatgataaccagagttcaaatcaattttggagaacacccgggcacccctcaactgttcaaagagaacctcaatacgggggagcagatatttattcttgattgtcacttgattcaaagcgcgataatccacacataaccgcttgcttttatccttcttctcaacaaacaataccggggaagcccatggagaactgataggcctaatgaaacccttagcatgtagatcatccaattaccacttcaattcaacctgctcctttggggccattcgatacggagccttatgaataggctgtgtacccggaatcagcttaatctcaaaagctgcatcacgctccggaggaatgcctggaagctctgccggaaacacgtcagcaaagtcacacaccaccctcatgtcctgcacccgcaaggcagcctaaccctccaccaccatggagaaaaagattcccaacttccttgactggcgatctggaagcaattgcgcccacaaggataacgtgaactttggggaacatccc

SEQ ID NO: 178860 - DNA, 1492 bp, Zea Mays
gtcttgttctgctggctgacggtggagggcgccttggggcggatgccgaggtattcttggggccattcaccgagttggagtaggcgagtcctggtggcttcagttgcggacagttgttcttgaagtgacttggatcaccgcagtgccaacatgcatttgccggaggttggttgcttgccactgagggggaatggaaagaactctgactctgctggctgaatcatgacggagtgggtccagctggtctactgaagttgggccccttgggtggaaacccaaatgatcgagtcttctggtgccggtcctgctgctgtgcccggagaacctggaacttccttttgagatgtcctttttcttcctccttagccctttcaacttgcatggccttgttggaaaggtgagagaagttgaggaagtcttggctagccagaattgtcttgagttccggcctgagtcccttcatgaaacaggccatctttttgctctcggtattgacatcatctggcgcgtagcgggctaactcagtgaacttgtgcacatattcgctgacagatcttccgtcttgagtcaattctcggaactcgtcctccttaagctgtaccagtccttggggcacatggtgctcccggaaagctgcttcaaactccacccaggtagcatctctaatggtgacgttgaaggtgtcccaccaggctaaggccatcccagaaagttggtgggcagccagttgaacacgctgattttctgtgcaaccaatggcttccagtttccttttgatcgtgcgcatccaatcgtctgcatcgagggggttgcttgatccggcgaacgtgggaggtttgagtcttaggaagtcccccattctgtcttgcggtcttccaccattcggtcgttgattttccagatttcgagtgaggacctcgatgagtcgggtctgattggctagaacttgggctaggtctaagggtaggggtggaggtgcggggaggtgggtttctctttcttctgtaacgacttccccttcagctcttcgggggaaacctgctccaatccctgaggcggtaagcgtggttttatccgaagacatctgccagggaagagagtcactatcatgcacatgcaaattgttttcaaccaagttattttattcattacaccatcacattacaagcataagattactacaggtgggactacacgagagcgttcttcgaggtactagcgagttccttgtctaaggtgtccccaaatgccttgagaagatcatcgaggctggctagggatacatcttcttcgtcgaaccaatcatctattctagggggaggtagggctagaggggccttcttcttcttcttcttctctgtctagcatccctggttagtggtcttcttctggatcttctttttgggggcgagtgcctttagcttcttgtcaaagtctatcttcaaggtccgataggcctcacgggtgttggcttcctcgccttccactatgc

SEQ ID NO: 178861 - DNA, 507 bp, Zea Mays
cttaagagcatagcgtaggcgtccacggtgcacggttctgcctgcccctctcccctgcactccggtgtggccacacgagcgttgcccgcgcctccctgcaaggaaaccacacgagcgtttccagcgctccctctctcgacgcagtgcccttccatccatgcgtcgtgctccttccttccatcaccgcccaaaatctccggcgtgaaagtaggcgaacctcgtgcccgtcatcgtccttccgttcccccgccttccatcgtcgcgactgtgttgcgctcgtcttccattccctcccacatgacttgccctccttccatcgtcgctcccatgcgcgctccccttccatcctcgctcaccctcgctcctccttcaagccgccgtgaatgtcgcgatgccgtgggcgacctccacttgggtcgtcccaagcctggtcgctggctcgtggacctcgaggcgcccattctctcaccaccccatcgatcgcgcgcgtcgccgccgccgccccag

SEQ ID NO: 178862 - DNA, 1324 bp, Zea Mays
ctaattacgtaataggtttggcacttggggtgtatgttacacttatgggacattatttgcagtgcaaggattagttgttgctggaagaacttatgaaaacagttcttctattaggaaagcatgtaggtttctattgtcaaagcagctaatcacgggtggatggggtgagacatatccgtctaatggaactgcggtaattcttaatttcccttacctaactatgtgtcttcttggtcatttcatgtttgatatttcatagaatagcgtggtacacatatatttggtcttcgacaaaatatttaaatgttatcatgtgaattgttcccatctagccagtccatcaagtagtttagttcttaaagcattatatatcattagtgatggtcttcattttaagatttaccaggtctatgcagaggccagtagtcctcatgtagtgaatacagcttgggcaatgttggctttaatttatgctggacaggtagacattccacacattgttacatttggagcatgatgagactgttatatgtaagatttatagttcatttatgtgcatgcaaaataggttcagcgagatccaacaccattgtatggtgctgcaaaagaactgatcaatatgcaacaagagtcaggcgagtttccccaacaagtaaggcttcatcttttaggcgtcaccatttggtagttgtaaggattatcttgcactttgatttgtcactaatcttagttggagcttctaaagattgaaatgctttatttcaacctctgtgcaaagcatgcacgcactgaactacagttgaatattatgagatagaaattctatagtataattcctattgtaaatcattagaattggatcatatagctataaaaaccatcttttctacaatcatatggatatgagttgtatttgaatgcacatataccaagcttattgtagaacccatggtctatagttttggcaatatacgtgctaaaccccacctatgtttgatcacaggaacacattgggagcttcaattgttccttttacttcaactatggaaactaccgtaacttgttcccaatatgggctcttggagagtttcggagacgaattgttgcagaaaagaagaggaaccaacaaacatgattgttttaggcatcaacaaattcggggtgaaagcttgtaaggggctcaagtttaacatgtggtgaaagacatgtcaatatactaaagctgatgtccatctggctaaaccatatgtacatatttttactatggaaacaacgatccatatgtatatatggaataaagggccacatatatgaccgtttcgcc

SEQ ID NO: 178863 - DNA, 677 bp, Zea Mays
ctctgcggtggagaagatgaaggcgacaacatgaatgttcttgagaaaatgaaggagatggcagtggaggacttaccagtgtgtggaggggaatgaggaccgaccggtccctctgcggtggagaagaccaaggcgacggcagcttgaactctgcggtggagaagctgaaggcgacggcggctcggtctctgcgttggagaagatgaaggcgacggcggtgagaatatctagggttcggctgccgcgatggagcgaaggcggctcagtctctatggtggagaagaacaaggtgacggcgactcggtctccgctttggagacgatgaaggcgacgacggcaagaatctctagggttcggccgtcgcggtggagcgaaggcggctcggtctctgcggtggagaagaacaaggagacggcgacgagaatctctagggttcgaccgccgcgtgcgttgcgggtgaggtgagctgaataactgcgtgctcgtgggtggaatcgtgggcccgatacacgtacactgcggtacgaaatctacgcgaaggcccgtagaccgacacgtggattactatttcataaacagaaacataaaacatcgtaataccaatatttgtgtggggactagtacggctgcccagattgcgggaacacaatcttctcgtggtcctggatgcccggaac

SEQ ID NO: 178864 - DNA, 551 bp, Zea Mays
tgtgctccaagtgcttagaaacatcggcggtactcaatttataattcttgagtcataggaatcgccgtgcaattaagagggatccacgatggttaagtaagttatgcaatgagttaagttcaaaatcccttgaaaacatcttcgagaacatttttccagatcatgaatgcccttgagaaaaacaaattttacttcccacaaaaaactccacttttgttctcttcaaaatactcaaaatttggttttagccctggaaaccggttcaaccggtcctgaaaccggttcaaccggttttgggactgctcctctgccatccctgctctgacctgtctgatagtcagagctgtcagaaaagtcgctgcagatcttttgggaaaaccggttcaaccggatttttcccttactcaatcggttttgaatccggtcgagtctccggctgagtaggtttgtgaaccgggatctccctggtagaaaccggttcaaccagtttttactccttttctcccaacggctgccagcttttgggggatcctttatataccccccccccc

SEQ ID NO: 178865 - DNA, 645 bp, Zea Mays
tgccactgcttggacgcggaaggggactgaacgaagatacttccatgttgaggtcagcgacgaagtttactccatcttgtttcactgcagctttgcaattttccgcatattttgatgtcgaagcagacaagaagtgtgctcgttttactgtcgctttggtccgtagcaagaatttcgtgaaaaaaagccctgaagattttgcaaataaattcaatctgttgttctcgcgtgttttttctctccaaatgcaggctaccaaatctctgaagcacggacaagctgatagctaaagagtaccgccacctcgatcaaaagctgagagcttgctctctcgcagcaatggtgtcggcaaacctgcggctcgtggccgcgttcttgctgccgttccttgccatcgcctccgcgtttgatctcttccaccagactgggccacggatggatccaaagatggtgccgatgggaggcggccagcctctcttcatcccgcacgagtacgtccgctccgccgacgtcaagcggcaatgccggtcggtgctgtccgccgccaccgagctcacgttcgacgccaaccgcgccaacgccctcatgccggagctcagcttcgtcaagggggactggaagcaggacgacgacggcgtgccgctg

SEQ ID NO: 178866 - DNA, 379 bp, Zea Mays
catagtttgtgggtggtggtagcggtgagattaggatagcatttgcaaccgaaaacacgaaagtgctcgtaggagggtggttttcctaggagaacgaagtgaggtgtctgaaagtctagagtcttggttggtaaaatgttaaggagataggtggaagttcctaggacaacaacccaaaagatgggagaaatgctggcctggaagagtaaggagcaaacaactggtctgagcggaagtgtagggacatggcatgcaaagatgaactttgtgggagggaaaaaaaaatgtgcgggcgttgaggttattgaactcgcgaccattgtcgtactgatttccttggatggtgacgccgaactgtgtgtggacataagcaaaaaac

SEQ ID NO: 178867 - DNA, 296 bp, Zea Mays
gatttttcacattactgttggtccttcccgctgcgacacaaatctgaagtacaccgccacatagtcgatttcatcgcttatgctcagacacagtttgccaccacacccaaatcatttcaagccgataatgggactgagtttgttaacactgccaccacctcatacctcgctagctgtggcatctcgctgcgcctctcgtgtccctacacctcaccacaaaatggcaaagctgaacgcatgcttcgcacaacaaacaacaccatccgcaccatgctcctccatgcgttcatgccacc

SEQ ID NO: 178868 - DNA, 623 bp, Zea Mays
cgcagatcagaccgccagcgcaaaatgttcaccgccggagacctctttgtgctaaaatccgtgccgccgccgtccgggttcgtgcgcgataggaaatggatagagtcggagttaaacgacgcatacgtggcaccgttccctgagtccagccggagacttcaccggcggccaccgtgaccattgaatcttgccgcggtgtcgcccatgcctccatctcccgcactgtacctcctaccgacgaggtcggcatgcgcttgtgatgctgtccgtggccgcgaagtgatcgccggaccgccacgactataaatagccattgggtcctcggcgaggtgcttgctgttcttcaaacaagcttgggtacaaccagaaattcacacggccttctccacctcttcccaaattgatggtgcacggtgaaactacagtctcttacgaccgtgtagcctcaatccccgcccccaatgtcacccagagccgccgtaacgctgatttcccccaaactggtctaccgcatcgcgaagaacagccgcccgtggctgggccacgctggtgagttcctattcaagtcaagtgtcgtttccatgcctctatatgcttgcgaagctcatggtggcgcccgtttg

SEQ ID NO: 178869 - DNA, 612 bp, Zea Mays
caaagcttgcaacccaagcctttcctagccacacgaatgagcgcctccagacgaagctcaaagggcggtggggtaaaaaaggaaaatgtctggactccatcctccacatcctgcacgcgggcatcgccgcatgcctcgtggccctcctcgccgatggctccaactcacacggttgcagcgtaccgctcgccgcgcgcgtcatcgccgaggccaaccttttagagtcaatggatccatgcgcgagctagctgatagtatacgttgtagttgcatagccccgccaaagacgcccattcttttagagctaatggctccagtttgatgcattgagcctgtgttgtgttgccagatttgacctactcggaaggttaccctcctcgaggtcgagaccaacgcttggtgaaccccaagggcatgcaggaccgtcttttttatattctacgcgttggttcgtagccttggacacgctctctttctctctctacactagcttctttgcatgatggcgacaaggtcgacgattggccgattggggcggcgaacttccaatcctaggccgatgcactcttgaggaaaattctcgcgatccaggtatcatcttgtcatctagcc

SEQ ID NO: 178870 - DNA, 546 bp, Zea Mays
gtcgaacttgaaattggtcgatttcttgggaaacaagatgtgcaatcgtttgggggtagtgagtataacaacagcatatgcaagatgtccatgcaacactttgatgattataaattagctggcttctttgttatgtggcaggcatttgttgccatactgcttcattaagttaggaacattgcatcaataacatagatttttgatagacaatgaaatgtaatgggtgttttactgcaaataacataagaaaatgcagaatacaggttctagagtggtaaaataccatagcagaaccatgggataatccctgagggagatgagtctctatcacctcgatccaacggttaattccaagtgttatgtccaaagtgcaattctgtgatgatccagcagcttccatttcaaagtgaggtgcagacttaatagttttatttatggtacaatcagaaatttgctgaatatccagtaatctgcattctttgatgtcatctgctcctgtgaatccagatgaaacacgcagacattcatccattacctggaaaaaga

SEQ ID NO: 178871 - DNA, 467 bp, Zea Mays
caggagcacgattgttattaccttgctggcggtgtggcataccttctgtgttttgatgaagacggtgacataggcgcaaatctctggtggccgcttcatcataattaccttcttcatcaaacaccgcatcatcgggaagacgtggacgaggaggtggtggtggcggtgcttgttgttgcgtctccaacacagcaagtctgtcgacgataacggacaatcgtcgatccagcctctcataagtcttgccaaggttcatgtcaatgaaggcatcatgcactgacttgtgcactgtctcctccatttgctccttcaggagcttgttgtttgcctcaagatcttggtggctaacacattcatcgaagtctgtagggatccttgcttcttcttcgttgcctgccatcgaaacacaaaaacaggaaacaaacggtgaaggttatccctaataatttcactacacgctcctctta

SEQ ID NO: 178872 - DNA, 1097 bp, Zea Mays
tcacatgtgatggcacaaaaagtttaaactcccacatagataaagtgaacttgtttctccctttgatattagctcctgcaaattataaattgggtattacatctaccaaccctgtccagcatcagcggactaagcatgtggagattgatctaaacttcgtgtgtgaccgtgtcacccttggagaggtctgtgttctgcatgtgcccacaacatctcaatacgccgacatattcaccaagggccttccgacttcagtcttcatcgagtttaggaacagtctgaatgttcgcagtgctccaagttccaactgagggggagtgttagaatgtaaacatatcacggacgatgggcttactatacaaggttccccatcttcctatatgtacacgattgtggtgtctgagtaatatacaatttacattctctaatacccacaacccgcgacaaaccatcactggtgcagaaccatcctctgacggtctgacccgattagatatttcccaccctgacccaggctacacgtcgcagatatgaaggcgaatccatgcagaggaaactcacagtgcgacacataacatattgttagggcgacgaacgcggggcggatccgaagtggtgttgaagtctggcgagcgattacggtcagcccccaacttcccacgcttggcggctaaccttaacacgatctgcatccacgggcaaacactctagggacaatgacgacgtggaggtggagctcaactatggcggcgaccctctctctctctctctggttcgatgtttatcacacagtgcccacatgatgcgttagcatgggcaacagggtctgaggggatcaaagccacgacatccgcatacatatacccaagagaggacactagtatgggctcttgggacaacggttgagagaaatccccaggcggagagtggcaactatggctgatttttgttgatgcgagaggataacggagatcccgaccggcggggcccagtgtctgaccaagaacaggtcttggtgttttgatgatgttcattcggcgtcggaggttgaggatgcggatgagtcggtcttgtagtagaccaccttcttcaacttc

SEQ ID NO: 178873 - DNA, 450 bp, Zea Mays
attttttatgccgagaccgggggcggggtcttgtggatagccttcatcatagccatcatgttttgtttcttctgacccctcatttcccccagtcaccgaatcagtcttcttctctccttccgcacctttttcaacccccttttcctttgactgaaataagctagtcagatttgaccccagggtacttagcatagcaaacgggaagggtttagtcattaccttcaaaatttctgtaacaccgacagaggaggacgaagaggtgccgcaatcttctctcatagatcttgcaccttctccttggcaggggccaaaattgaggactttcgttttttgggagcccaaaccttcggctccgctgaatttttgttttgttttttggaagcagtcttctgatcttcttcaatggatcgcgttgcttgccttttcaaaatacttacaactccctttttc

SEQ ID NO: 178874 - DNA, 779 bp, Zea Mays
attatctgctagtatttttagatatacttgaaagaatgcataagtaatcttaggctaaggcaaatagttaattcagattatcaatacctcaatcaacacaataaaagacatggtgaagatataatatatacaagagtttgagatccacgatagaagaagggcagacaaaggcagaaaacaaggaggccagacaaaaaaaaacaaggagaacaaatgttgctcatcaacaccctaagtgtcccataatgcataagatatcacgctagatatgaggaagctgttcgactgcaccttcaagctatggctagctgcaattgtagcatgtcttttgttgcttcaagctttcagacgcagcaacttccaactacactgcacactttggtgtgcaccagatacaacaccggatatgacactcatagcgtgtttggggaagtctaacacaccatacatatttagtgagcattggataccccggaatggacatggtacttagagagggttgcaacacgactatagatggccataaggcatgtacaacaccaaatataaatcggatgctcgatcttcattggtcaccaacatctataatcaagggctagctgacatagacacaacagataggtttggtgagtgcaccagacatgtccggggaaattttgtgttagtttcaatggctatttttaaacttggagcatatataccacctcaacctatcattttagaagtttgggagctaaggaacatataaagagagttgaggctcatttttagtaacttta

SEQ ID NO: 178875 - DNA, 528 bp, Zea Mays
gctagatatatcacatgtgctcggtggtgcggtaggattaccaggccgctgtacattgtatacactagtgtccatgctagctatcaagatcaatagctgtgatgttgcgaagccagttgttctgcgtacaatagatgcaaaagcaaatgctgatttacctatcgttgctgagaaatctccccccatctgttctctccctcttgctctcttgtgtctacggaacacactttgtgatgctatataaagggcagaccctgtgctggaggctcccactttgtgatgctgtatatatggtttatatgatttcaaacgtgaagtttgtcgctcaacttcgattctcaagtgttcaattgttcatgggtttataaattccatactcctgtgacactgcaaaacaaatatgaacattgtggtttgaaccacactctactaattagagggctacagcagttaccactggtacggaaacatcataattatcagcttatggttgactatcgaaccaggcttcaaaaagcatttcattcc

SEQ ID NO: 178876 - DNA, 730 bp, Zea Mays
gacggtcaagagccaactcccacaagatctaattctagccctacaacggttgatcaacggtctgctggctttcttccacctcgcgacaaacagggcggcgctccctccctggtggctgcaacctcgccgcgcgcccgttgactctaatgagaccggttctacgccaagggttgacgaaagcggacatgtagaggaggttcttactggagattggggagtagacggacgccacgacgagattgcacgacgaatccgccacggacggcgaccggcgagaaattgcgcagttcccggctcggcttcggggctggggaggtcgctagcacccacgggcaggcccacgcgaccccaattgctaaggcaggggcgccacgaaccttgaaccgcggacggcgccgatgacattacttgctcggcggcggcaccccattctctctctcccaccgctctgtacgcatacacgacacggggactacttgcttcgacttggcgtatccacaggggagcgatagggctcgagttttatgcgccccgccagtgaagtccgggtcggcgattcctggcggcaccaccggcttccgttgctacagaccgagcaagaagacggagtcagaggcgctgggtagactttgctgcagcgattcgcggttcaggtagttggtccgagcggaaaccatggaggtgaatcaccggccagagtgccccacacggcatggattatttaccccgg

SEQ ID NO: 178877 - DNA, 1006 bp, Zea Mays
catccatccaactgtttgaccttgttgttgtaaatgtaaacagaacaaatataagggcctacttgtatattgttgaaatataatatggaaggatgggtgtgttgtgtaagttgacacacaccaaaatcaatatggtatacaaagctagggttggtgtcccttaccactggcactgccactagagctaagtttgcatgtgtgagagagaagaaggccatccaccagccccgaagagcgtcaacaactgaggaggagtcagtggctcctgcagcgcgtaacatcggcgaccaccgttgagcgttcaccctcaagtgaccatgatggcacggactccgacaagtcaacctcactgccgtccacctagcgtgtgccctcgagcacgtcgatgtcaggaattgcgctgacagctcctcctagatcccgccatcgtccatcgcgtcgccctccatgcaattcctcggcaatgacaaccattgacaagttcgcaggtggtggggcacggatccaatagaagtggggcaggacatgctaggtagcgatggtcgatagacgataggtgctaggcatggtgtggtgctggcagagaagagggaccaaggtgttgggactaggacctttagcattgcgaacaacactctagaacaactagttaaactgctggtaagcgtggtgcttgttgtaccatgtggttgctcatcatgttttagtccagtccttagtcctattaaggaagactcgtgtgaaactatgcaacttgattttgtgcttctgtgaagatgagcatagacgaggtgtaagtaaggagaagggaagaagaggctggaatgaagtcaacagttggtggtggtggttcaagtgggattacaaagagtgagatgcggagtatgatccaggagctcatggggttggggctgattggtgccaaggccaatataggcccatctgagttgaagttggaatttgtgccaaatgatgtgaagttagaaggcggtaaaaagtacttgag

SEQ ID NO: 178878 - DNA, 1154 bp, Zea Mays
attctgagataaatgagcctaaagttggactgtcaggctgttatggtctgaattttcagactagcagtgaactaacatcgacttcaagctaaattctgagcatgatccagtggaaatctacctatggttgccatagcaagtttgtagtgggtataatgctctacaagtttgctgcaaagattaactcgtgttaccacaggaatttgggagaaaatcaagctccaacttggtctgtcagacaagctttgtactgaatctggcgcactgttaactgtcttcagaaatatcacgtcgtggataagggtcagcccccccccccccggcgataagaacgccaccgcggcgtgactggtcgtcggtggccacggtaaatatcctcggcgtcgtggcaaaaggttactgaggtggcgagctccggttaaacggcgacccccgtgccatcaccgaaatccaccgcgcggaaagcttgccagcgcatccgaagtccgcgcttcttctccaactccggtcaatggcctataaattgacccctccccgaactccgtagggtagtaagctgtccagccaccacgaatcagccgcagtcgttcattggaatccgcgaatttggaattctccccaaatccactctccgccaccgcaagaaactgctcaccgcggccagccctttctaggtccgttcatccctcactttcctttgtttgagcactcttgtcaccctgtgatgcttaccgagcctccaatttgaactaagagaccaccactcgtcgggaacacgatcaaacgatcatggtcttcgcggttctcgtgggcaggctagaataggtcaccaattgtgcaattaacttgggggaattactcggggtagcttggatttggtgtccgccgctcgggtgcgccggtcatcgcctcaatcggccggtgcagtggctcgccgaagctcctccgtgcgctgccgtcgtcgaggacgtatcaggagaagaaatagaaggggaagggtctttctgtaatctgtcagcggcacacaggaatagtacaggaacttatttccagttacccagaaccccagggacctttccgcaagatcgccagcgcgggcgcgcgcgcgggcgctttctccctctgagctgggccactgggctgaaatcagccca

SEQ ID NO: 178879 - DNA, 1105 bp, Zea Mays
gactatggactttggaaatccatgtagtcggactacttcaaagaaagactgagccactgttgctgctgtataaggatgacttaaagcgatgaagtgcacatatttggaaaactgatcaacaattgtgagaataactgacttgccatgtactttagggagtccttcagttttgtccattgatatgtcagaccaaatctgagaaggcacctctagtggttgcaacaataggcacctctagtggttgcaacaatcctgcgggatgtaaggcttccattttgttctgttggcagattgaacaagagcgtacccaatcccctattgtgaatgatatagaaatctgcacgtaggcgttgcagtgtcttctggatcccggtatgccctgctgcgtgtgctgtgctgaggatggccggcaacagtgatgaagtggctggtacaaatactcggcggccatggagaatgagatcatccttcacctgccatggggcggtcagagtaccctctctgatctgattgcagaggcgctgaaattctggatcagaggcgcacactcttgtcgtagatcctcatataactggaaggtggggctggacactgcgttgagcaggccgtctgctgtgttgcgacgagacagggcgtctgcaactgtgtttcactggcctgccctgtattccactgtgcaatcaaatcctaacagtttgctgacccactgatgttgaggtactgtggacagtcgttgatcaagcatgaacttcagactatagtggtctgtgcgcaccacgaaccgtcgaccccagaggtaaggtcgccaatgacgaacggcctgaaccaagccaatgagctcgcgttcatatgcggtgagcttgatatgccatgctgcaaacgacctactgaagaaagccaccggacctgctccttgatgcaaaaccgccccaaagcctgatcctgaagcatcacaatcaaccatgaacagttgttcaaaatttggtaattgcagaactggtgctgtggacagagcttgtttgagttcctgaaatgctgtattagctgcagcccccacgtgaagccctccttcagtaatgtggtcaaaggtgctgcaattgtccca

SEQ ID NO: 178880 - DNA, 1011 bp, Zea Mays
gtggtggattcttgttattttcttctgcttttcccccaatataagtctgctttcagtcagttgggttggtggatggtgatcgtttgtttggtcttagaaagattttatccttcctgcttgttcgttagtggcaaaagagttggtttgacgattagcatcttctgtgatatatgattgatgatttagtgtgatgatcatatatgtgaataggaaactcttctttccttctttgacacgtacttatgttctgttcccagcattctttgattgtattcattggagtttatcatgaatttgatcgtagctaaagagcaattttagactggcatgcaatggttatgaggtaaattaagggtcaatctccagcggttgaaccttattttcttacacttcagccgttgaactgaaactctacttagatgtgagttggctgttagtcgctcaacttttcaacaagccaaaagtcattcttggtggtttggctgattagattgaactaatacaacattagatgatgcatttaaccttgtctttttctcctttgctagattacttggtgtcaattctgtaaacaacttgcactattatttacgaattcatgccaaactatttacatgctcatcgataagaagtaaaagtcgtattctaatctgatttgtaagaaattctccttccggactgccaatagtctgtgctccttatctttcaatccaaatagctttttgttatatattgtagcgcatttcagttgctaactgagttttcaaatcatacggaaacaactgaagctgacatggtaaaagctctaagaaagtctatggttcattggttccaggagccaactacatttgacggtgttgcttgctgctgttatgttatcatattgcctgaaagtgacacctccacaaatgattaacctggatagcacaataaaacataatcatgatacttcaagtcaactggataggtttgatcctgtattaaaagctgggaatgactatgccaagtaca

SEQ ID NO: 178881 - DNA, 2310 bp, Zea Mays
acatgccccaaatatgtgacctgatttgtagcatatgaacatttagacaactttatcttccagttgtcatggaccagcaagtccagcacttgacgtaagtgacacacatgggactccaaggaggtgttgtagaccagaatgtcgtcaaaaaacacaatagcacatttgcgtagtaagggagacattgtattattcattgctcgttggaatgttccgggagctccagtgaggccaaaggccataaccctgaactcatagtggccaacatgtgtctggaacacagtattatattcttcaccctccttcaacaggatttgatggaattcaacacgaaggtccagaatagagaaccaagaagcaccatataactcatccaatagttcatcaatgactggaactgggtatttggatttaagggtgagagcattaagatgccggtaatccacgcaaaaccgccaggactggtctttctttttgactaacagcatgggggaggaaaaagcactgttgttgtgttgtataacaccattgcttagcatttcttggacttgagactcgatctcatccttcatggctgtagagaatcgataggggcggattgacactggccttgctccctccactagtgggatcgagtgatcatagaaacgactgggtggtagggaggtagggggttggaatagctctgaatattgttggagaagtttgagtacaggtgcaggtgcagatatattttctagtacccaaacttgagctgaaggtggtaactcagttgccatttgtctgacttccaacagtgtcccagcaggtaagcttgatgaacagccgcgcaacaccactgactgacccatataagaaaaggataaccacttgttcttctagtcgacaaacatggggctaaacatttcaagccaatccattcccaatatgaggtcataaaatggcaggggcaagattttgaatgtagagcaaaaagacaacccttggagagtccagtcagtttgaggtaattcggtggtgcactgtaattgactcccattggtaaccttcacagacagtggacactccagcttgaccaatcctgacacaacagcttcatgtttggcatttaaaaatgaatgggaactgccagaatccaataaaatgagtaactcaatgccctgcaactagccttgaaatctgaatgctttggaatgtgatttgctgaacactgcttcttgggataataaaatagaaaattgctttgctgagtcttcatattcaccttcagaatcatgatgttcagtacccagcatgtcccacaactcctgaacagcatgcagttgcacatgagtgttgcacttgtgttccttggaccacttctcggcacagtactggcagagaccgcgtgcgcgacggtaagcccgtagggatgccactttgctatccatggaggatgttggtgtggtaatatgattcttctggttggccgtcagggatttgtcaggacgatgaggaggcttcagtgttgatcgttcatcgaatggcaccacactttggacagcctcgtggtgacgcgaagagtatgcctcctcctgcaataaggccaacgcacaggcaatatccaaatctctcggccgttgtacaagtataactgatttaatgtcatgacgcaaaccatcaatgaatctcatggtaaagtaaagagggcctgtggtgtgttcataagtaacaagcaaatcaactaattcacaaaaatgatccacataatcttggacagtgaatgtttgtttaacgtgaaaaagtttgcggataacaatctcatgctgttctcgaccaaatcggtcgtgtatggctcgacagaattggtgccaagatagttgtggaagttgtggttcaatggattgtagccaacgacccgctacaccagcaaaatgcatggtagcgaccttcacccacattcgctcttcagtagcgtacatgtcaaaataatcttcgcaacgcttttgccacagtttggggctagagccatcaaatgtggggaagttcaactttggcaaccctcccaggtttcggggtgtataatctctatggacgaaatcaccaggatgaggaaacgcaaactgcggggaagagtggtggtgccacatacccgtgaccgggtagtggaattaggcactggagtgaccgaaaccactttcccggtgaaaattgttgttgtggtggccaatttgggggccgtcggtgaccagggtcggggaaggtgggcgccccaacaccgagccttgtcctccaccggtggctacaggaatggagttgtcgacgcgggcg

SEQ ID NO: 178882 - DNA, 595 bp, Zea Mays
caactggtccgtacaataggataaagaccctagtgaacaagatccgaagctacgaaagtacaagatggacggatcactgacgtcgggcgcctcatgctaaggtcatttaccgttattggtccttatcttgtaaatcttattcatgagaaccctaggtataccaaattgtcacccgaataaattcttggtaagtttgtgagcgggcacatgatggtagaagaatcaaggtacgtcgacgacatcgccaacggacctcttctcactacgaaccgcaactcgttcactcaaagcaacaaccaacaaagaggcactccccaacaaggtggcacaagttaaggtggtcaaccttgatgaggacgaaatgtcgcttgtgatcaagcgcttcaagattgctttgaagggacgcaaggactacccccaacaagaacaaatcaaggggaaagtgttcatgcttattctggtaattttattgctcaatatcctgataatgaaaatgaccaggaccaagacaagaaagggaagaaggagaagaagttctatagaaaaaagaagggactgctcttcatctgactccgacaacgaaggacttgccgcc

SEQ ID NO: 178883 - DNA, 363 bp, Zea Mays
taaaccaatccgaaggactctgtaatggtacacgactaattgtgactgcattaggagaaatggtactagaggcccagataataacaggatctcatatttccaaaacagtgctaattccaaggatatctctagctcttaaaaataccaggcttccctttgttctcgaaagaagacaatatcctgtgaagatttgctatgccatgacgatcaataagagccaaggtcaaacactaactcatgtgggtgtttaccttaaaaaacttgtattcacacatggacaattatatgttgtcgtctcccgtgtcacctctaaaagtggactgcgaatactaattgaagatgatgatggaaaacccactgatg

SEQ ID NO: 178884 - DNA, 563 bp, Zea Mays
atggtgccaaggggctcatttgaggccatggcatacctgccagtagcctgcccagctccaaatataatttgcatctgcacatagttttcaattggcacattgaggaatcagcatcctttgggttgtcttttgtatggcccagcaggtgttcatcatcaaggatgattgtgaatgtattatcatcccaatgagcaccacttaggtccttgagcctacaaaccctgatccatttttgacgccacttcctcaaatgattgtagacctgggtgcctgtgacttcttggccactgaattcagtcaatgccttggcaacagagttgacatgtacctccttgaaccctttatccgtttttactccttgtccaaccaagtctgcaaacttcctcaggataaaggctgacatcacaggggtccagcgcatggcagtccttgaggtactaccagcagcaacttgctcaacttccatagtctatatacaattgataggacatttatagaattgaagtcataagaagaggtaatgaaatggcatcatagcataggaccagttttctcagcatata

SEQ ID NO: 178885 - DNA, 937 bp, Zea Mays
ctaaacttggtttagttggcgtgaggtgcactgaacctcaccgtcgccaacgtgctttgcgcgtcgtgatttggtttgagtcattagattcgtgctatgggcatgcaatcaatagcgccactgcatcgttctacaggttgaacaaagatttggctttaaagttatccgctcgccatgccacttcattgttggccctattctggataagctcatcgccacaacgatcgttgtagcttcgggtgtggccacacagctggtcagcttgggcacgtcctctgctgcggtgtcaaagttctaggtgtttgtgtgccacgcaatcctgtaatgtcgccattgttttcacttggagtttcctgtcaccgcgccatcctctctcctctctatccaaattgaccaaagtgcgagtagcttccattaaactgagcaaaacgtccatctcacctctcccttatgcgccttttctaccggtcgtttcactagtttacccagcacagtcgaaactcaccggatttccctgagcttgctcactgccatcgctgtgaaaatgcctcaccgtggccgggccatcccgagcatgtttcatcccgtggcgtccatgttttagttccctctagtagtattgaaggtcctcgacttgattgtttcagctctactgttatgtcttcactggaacgctaatttgtcgccgatgtacaccgttgaaagtcgccccaatgtcgactagccattccgcactttccctgctcaagcttgtgcgagtagagtgttcggtgagtcgctgatgctcaccacgccctatgtttgagttctaccacgttgtatctccgggaacaggctcgccagacttctatgtccaccgtcgttgtcggtagtgtagctcccgagcctacatgattcgtctatgctatgtacgtgttcgacgtagtacggagtacgt

SEQ ID NO: 178886 - DNA, 967 bp, Zea Mays
gatgtgttctaggcgtccattttagtgtagactggtcacccatatatggtttcaaatctgaaatgttaaaggttggactaatcccaaaatctggagacaactcaagtgcatatgcattaaaattgatctttgcaagaactttataaggaccagcaacacgtggcatgagtttagacttcctcaaattaggaaacctatcctttctcaaatgaacccacactaagtcatcatgttccaattttacttccttactaccttttctagcagcaatgcgatacttttcattcatattttcaatttgcaacttagttgtttcatataacttaagaatgaattcagaacgttgtgtagcatccaagttcactattttagaagtcagtaatggtagcaaatcaattggaccacgaggattaaaaccataaactatcataaatggactaagcttggttgtgaaatgaatggaacggttataataaaactcaatatgtggcaaacactcctcacacaacctcaaattatctttcaaaacagcccgcaacatggtaaataaaatgcgattaacgacctcgttttgcccatcagtttgaggatgacaagtagtagaaaacatcaactttgttccgaatttaaaccacaaggttctccaaaatggctcaaaaacttagcatccctatcagaaacaatagtatttggcacaccatgcaaagacacaatctcagtgaagaacaaatcagcaatatgccaagcattatcagttttgtgacagggtataaagtgtgccatattggagaaacgatcgacaaccacaaaaaggctattgctccccctctttgttctagacaagcccaaaatgaagtccatagaaatatcctcccgaggtgcactaggaacaagaagaggcatataaagaccatgtgaaattaagtcgggacttagctttgttgcacgtggtgcaatgagagacgca

SEQ ID NO: 178887 - DNA, 542 bp, Zea Mays
caatcgctcgaaacgggaaattgagtgaaatttaagcctggaatatcggattggcgtaaaatttggcgaatatgttactggagatgttgtgaaggcgcctgaaaaatttggggtcaatcggagcatttttggctggtttggacatttcaccgaacacgtggcgtgcagagttctagggttttggagaaatggctattagaggctgtgaaaccctccctaaggagctagaaacctgcagggatacacaatgggcacataggaacacattgcaccacttggattcactggaattcatatgattttgaattgggcacaaagggtgaaaagagaggaacttctctggtggcaggaactcagagagaaggggggaaagagagataaggggatgctcaccagagagggaaggggagaagcacttggtcgccgccggtgaagagatcgccggagaggggtggtcgccggtgagggagtggaaatcgccagagacagagagcagagtggaacagagaagcccactagtacaatttggctctatacaagcg

SEQ ID NO: 178888 - DNA, 974 bp, Zea Mays
gtggatcttcctcctcgcatgcgcaacaaccgaccgaaatccctgctgccgctgcgcgatttctgctgaccgcgtccctagccgacccggctgtactctagccataaaatcggtgcccttgcgatgcccacaaccctcagaccaagcctccattggctcttgagtgctagccgccgcgcgtgattgtgtccagtgagggagaaagcgccgctgccgtcgaccccctcgctacaccgtcgccgtgtccttggagtactgtcccggtgactcgccctatcgcgccgctggtgtgtgaccacttcagaaaggcgggaaccagccgttcactcctcaattgctcgccggaggagggtcatcaccctggtcccgcgcctcgccgtggacaaagggtcctggcatcacgactagctggtaaatctacctcacatgaattgctgattcctaatcttagtgtagcacctgtatgggttcgatttggtgcacccgcgccttagtaactgacctcgccggagttctctccgtggctctgcgcgcgccgccgtcgcccgtgagctgggagagatgatggtccctgggtcgttgatctcaggagttgcggctacgatttgatgggatcgagtagtggataggatcgtaggatccgtatccttcgcgtagaaatagaccagggggagttacgatctgggacggttgattctagaacagacgggcctgatgcgataatccctgagccgcggtgcatataatctagaccatccgcgccagatccaacggccgatacaccgcgacacccccttcactgcgcacgctttgcataacagtccttattctttagggaaaacaacccgcggtcctctcctcaggtttctgtgtcttggtatactttacgccagggcccctgccttttcctgtaattgaggcccagtcctgatagttgataaaaccaggaaaaccatttagaaaatagtttttag

SEQ ID NO: 178889 - DNA, 1221 bp, Zea Mays
acttgggcaaggtgtagtggtagttccggaggtgcagggaggtgggtctcactcccttctccgccagcttctccttcggctctcagaggacaacctgctccaatcccggaggcggtaggcgtggttttatctgaagccatctgccatgggaagagagtcactatcatgcacatgccatttttttaaactagttattttattcattacatcaagccattacataatacaacacactgctatcataagctcatcacacacgagtgctatctagggtactcccgaactccttctctaaagtgtccccaaattccttgagaaggtcatcaaggctggccagggacatctcctcggtgtcggacgagttccttaacccgggagggggtagggttggagggttttcttccttctgctcagtctgacatccttggcttttggtcttcttgcgtatttttctcgcgggggcgagcttcttcagtttcttgtcatagtccatctttagggtgcggtaagcctcacgggtattggtttcctcgccttcagctattgcgaggctctcttgaagggatgccttctcccctgaaagttccctgactttttgctccagactttccacccgggaggttaggtaggtgcagtggagggtgaggtcatcatattggttatcaagggtgtgaaggtatccagccatgtagacgatggtgggatcatcctcaataggatctcctcctgacagggcctgaagtcttttcctccaggtgggggtattcttgttgctaggtggaaagtagcgaaggggggtttcaaagatcaccttgttgtagttctagcacagttgtcggagggctgttcgggcaacattctggcaagtatctgggaagcggtatccggtaaaggtgacttggaaggaaggatggttcagatagtttcggctttctcccaggtagactgccatagagcatttctccattctgccctcgagatactccttccagacgtattccggtttcttgcggattcccatgcgaagctcacaacttcgcaaaagttgtgggaacccttccacctccgagcagtaggatgtcctaatggccagagagtcttccatctggaataggaaaagaagggtctgttaaaatcggggaggaggagagaagacttttcttggggaaagaggtattttctttttagggcaagttttagggtcagggctgtgacctacga

SEQ ID NO: 178890 - DNA, 461 bp, Zea Mays
ctgctgagggctgagaaggaagacgatgggagaaacgttgatttctggtggacggctcagattgaacgctgcgtacaccccttcgctggtttgatctgtgcggttggttccgatcggacggacctggtgtgatcacggttatttaaaatataggccgttggtctggccagggacggttacgattagactgggcgcttacctcttcgttggttgagtatgtaccgttgatctataatataacggttgtgatgtgcgcggggttaggcagccgagccaactttacataagagccctcgagatttaaggtaataaacccaccgtccattttcagtataaagaaagtaaaattaaatgaagactttgcgttttagcccatggggtttgtttttaggcacaaaattgatacaaatatgcacaaaagctaagaaaatccatatcttgctcatgttaactccttttta

SEQ ID NO: 178891 - DNA, 778 bp, Zea Mays
acatgatggggcaggtacatcccgcggcggggaggacactcctaatcctccaccggtacctcctaccctggacgaggctatcgcccccttggtcaacgccaccaccgataacacgcgctttctgcgcgaaatggcgggcaaccaatttcaacaacacggaggaagagttccccctcaaggaccacgagatactacctatctggagttctccgaaacccgcccactgctcttcgtcaaggttgaggaacccttggaagccgacgaatgggtgcgagtaatggaatagaaacttggattaatccgatgcaccgaggttcagaagcccctattttccgctcaacagttaagaggccccgccagtcttggtgagcaaacttttcggccatccaacctgtgggacatcaaatcacttgggaacaatccaaattgacatttagggaacattatgttccggagggagttctacaaatgaagctagaagagttcatctgactgaagcaaggtggagattctgtgatgcagtatctcaataaattcaatcatctcttcagtacaccattgaccaagtggatacagacctaaaaaagaagaattgttttatgaggggactaaataacagactctagcataagatggcaacgtgtctggacctcacatacaacagggttgtcagtacaacactggcagttgaagccaaaaatgcgggacacggaaagtcaaagggataatcgggtgaaagatcgactcaaggacctgaaaagagaacaaggttggtaat

SEQ ID NO: 178892 - DNA, 392 bp, Zea Mays
tacgttttcacgctctgcagcttctttagcttgccttgcttctgttcgggcgtcatggatgtcttttcacttttcttcataatttcatgagccatctctcggccaccattcacccagacatcattatagaattttccgcccatcaaggttgcttcagctgaaggatccttcgtgacaactgcggagaaggcagcttcagcctgggccatggtcttgatgtgatcacatcccgcattctccaagatagctgaaatcccacgcgcaccggaaaatgcacagacatccccgcgatcacttaagatttctttgaagctctcggcctccccacttatccattcgataacaccttcagggttgcctcgtatgaagttctcttcggtagaataggcgcc

SEQ ID NO: 178893 - DNA, 327 bp, Zea Mays
atcagctagcccccagacatgaagggagtagtagcggcagcaatgacccaatcggagacttggaggccaaggtggaacaacttcagacagagctatgtcaccggaataggatatgggcgcaggatagccaacatatagctgaattgtcagctgacgtcagctgcttgcagtacgagatatctgaacgggattcggccattgactgggccatcaactcgcgttcgatcgcttgggacagcgaagcaaaagctcaagctcgtgtggcagatcttagtgcagccctcgacaacctgcaagtgtactgtaatactttacatgaggaagtac

SEQ ID NO: 178894 - DNA, 3533 bp, Zea Mays
atgttatacttatataggaggcccaatttttatgttcgctctaggccaccgaaatctcagttctggcctggtcgcatgtctaacagtatcatctcgtttagttctggaaaggggatcaaactatttgcttatcaatgacataaactcataaagttacctgtgaacgaagctgctttacttcttcagtgagcaaggtttcttctatgctgttaagatctttcctctggtcatcattaggctgttgcaaagatctgccagacttcagcactgtggggtcatgcattctctcggaaacagaggcactatacatgtgattcttcgatatagattgataatgagaactgtcttctgcagatagaaattgagctgggcactcaacttgcccccatctctgagatttcgcttggactggagtgtacaggacctcatttctctgattggagcgttgtactaaagccaccttttccttttccacaggtaagtttacatccctgaatatacgagacaactttggtgtgtatgaccttataatttcagctcctttgctggtatttagttcagactttaccttaccagaatccacaactttcagtagctgactgaaacacccatcacacacacgataccttctgctcttatctggtgcaagtgctgccttggcaaccttgttactactacaggaattacagaacatggatccacaatggtaacagttgtgcttctttctagtgaaaccaaaagccatcttgcaaccactacatacagagaggtccttccttgagattactttatgcagacatactgctgcagtgtagttgtaaccacaagataggctttccacatgcctaccttccaatgcatctactaaagttggagtgctcctattaaggaagtcacctaaaccaagctgcccttccttgcctttaccccatgtaaacactttcccatttgtagtcaccactgctacatgggaagaacctgatgatatatgtctgacaaactcgctcttaagtagtccttcaacagcagaaacagttttaccatctgcatgggggttccctaattgcccatgcatcgaactgccactagtaaagaccacaccagtaacagagagagcaacagtgagtgccgtcccgcaggacacctgaataaaatcatagtctgtgagtgaatcaacacatgttggtataagcttcatctttttgtcagcatgacccagcttcccccgatctgcatcgccccatgtgaacagcttgcttcttggtgaattgctcttgaaatcactgatcacttccacaatggcagctgtgtgccatggcccacatgccacacatttcactcttgagcctttcaaagactctacttctttaggccgggtagttccttgtgtatctccatgaccaagaacaccaaatgttccatccccatatgtgtataactgaccagaagacgttattattgctgtgtgccaaggaccacaagcaatcttcacaacagatatgccgtccagtggactaaacaatttatgcggaaaccattgattcctcgcatagctgtccaactggcccatatagggtccttctccccattcaataagttcaccagaaacagttactgcacaagtgtgctttgatccataggccacatccttcacatgtaaagaggcaagagattgaacgaccttgggccgggagactttgatatttacttgatttccaattctgccactgctctcatttccccaggagtagacctctccttgcttagtgattatggccgcatgagtctctccgcaagcaatgctttgtacatcaagcatgttcgttgagtccactaacattggaaggggttttgaggtatcaccacactctaaaatacttccaaaagcatcaccccagaaaaaaacatccttcagagaatctaacctacatgctgcacggggtccttcaaaggttttcagtttaggtgtttgggtaattttctgctccttttcttggttaccaaccataacatccttcaaatcatgtatttctggatttgacatcttgcgtgtaagattttccaagtaggtacctatgtcagagaatgttcgctgccttgtgtaaaataatgattctgaacaatcagcgctaccaccaaaaaatgttccgtgtgccttcttgggcttcctttgcgatgaacataccttaacatgaagtgcattagacgaattgttagacccaaacagaagactgtaatttaaccaagagaattaagtgtttagaaacagaaaagcgcatcagtaaggtatgcctacttacatatggacaagattaaactacacaaattgttgggttcataaagtcaaaatcatttcaatgttgatctcatttactagtacccttgcaatcataattcatagatgtgtggtttgctgagattgatataagttggtacaacttaagaatgttgtgtttatcaattggcctcctgaatttcaaattcagacagtccctgccctgtagttgccacgtgaatcccctttcccgagaaaaaaaacaaatgttgctacatgaaataccagagaaaaatgccaaagcgagctatacaagtgttatcattcagatgctacaatgtaacttcctgaactaacctgtatgtgccttggtgtgccatgcacacttagtaacttactcttaagctgaatatagctgctgggagtatttgtacaactgtcgatctgcctactgctccttgattcaattgatgaacatggattacaaggagttggtaatagggccctcaagcccagataccagttttcagcttgatctctatcgctgcagatctggtcattgtttttcaaaaatatggtgctggtgaggaaaaatggactacagacttgcagaccaaaatgacttggacattgcaatgaacataccaagtcaagtgagcgctctccgtttttgtatataagtgaaaaggaatggggttccttctctggacaacgctgtcgcagaaattttatctgcaaaattctgaaatctttagaaatggttgcagtgttataatatgaataatgaataccatgactattctttcagcacaaaattaattgtataccgtcttctggccaagaaccacagctgacacggagcttaagctcaagtgtttttccctcccttttgagtaccatattaatgttgtctcatcctgaaaatataagaaaatatttcaccatgactggaaggtggattttcatataactagtgaactacatatacacaacataacaagcttcaattcaactagaatacaatagccacaggaaactgccaaggtctcacggttcaattggaccaaactttatgacttccccctccaaaatatattaatgtcaaaatataaacatttgactgctacttcttctgaccatgtctatgcaaaaattgtgaaataaagactggaggcacttctgaatttctgataaccaatatactaatatcatttgtcatgtgacaaacctaaatacttgtatgactagtagtggccac

SEQ ID NO: 178895 - DNA, 522 bp, Zea Mays
caaccaactctagtccagataccctataggctcttttagaaatgtgggtggtgccagaaataagctctatggcaaactcaactttccgctcaggtggcatacctggtaaatctttcgggaatacatccaaaaactctgacacaaccttgatagtctcgagtggatctgcctccttgctatcaatagccatctggtgatgacctcctttccttggctcgggtgagactaactcagtcaccacttcttctcgtagtggggactccaatttaattgtcctcttatcatggctgataactgcttggtacttatctagccaatttatccctaggataacatctattccctcagtacccattactatgaggttagcggggaactctaccccccttatttccacacttacattcaagcaaacactatcggctcgaacttttccaccggctgagtcaatttgaattggtgttgacatggtggttattggaagaatatgcgcttctacccatgatgcagcaataaatgaat

SEQ ID NO: 178896 - DNA, 753 bp, Zea Mays
cgcgcgccagcgccccctctctccctctgcccggtggggccggcttgtcggcgccgctcccctcagcctcgcacgcgctccatttctctgtgccgcgggctcggcccgtcaatgccgttacccattcactgtgtaccctctctctccctcgctacaccgtgggaccccctgtcagctccgccctctccgcggaccgccgttgaccagcgtgcacgcacgccgagaacgtcggacacatcgcctgcccacgccctagctcccttttgaaacccgcccacacccgctctctctcccctgccccatttcgcccactctctccttctctcgcgctcagccgccatcgctagagctcgccggaggaaagcacccgccgtgccggccacccagagcaccagacgtcgtgtcgagcctccccgagcgttgtctcgaggagagaaacttgttcccatgctctggttgccttgattctggcctaccttagtgaattcgtgctcgtcggagctctgccacggcggtttgctgtgcccgcacgacacccggtcgattcagcccctccccgcacccctgctttggttcgtagtgttccccctcactcgccggagctagccgtagtctcagcacgcctgatcccccctcctcgcgaccaagattgatcactggagtagccccgacctgcccagagcgcccctcctgccgttccctcgtccctagtcccgttctcaagaccaaaaacccgctatcgtgtttgttagg

SEQ ID NO: 178897 - DNA, 1142 bp, Zea Mays
ggacggcacatggatgtctcagattaaatggtggatgtgcaagcgacgcgcacacgatggaggaatggcttcacgacggtgggctaccagagctagctacgtcaaccaatggagggctcggtcgaggtcaaaatttgctgccaagccactgtggctcacgatgagtcgattgagcaccatatcgaggtcgagggtcgaccggaggggcaagatcgatggtgcagtggtgttctcgatggaaggggaaacttcggtgagcaattcacgatttcctatcatgtgaccgggtcagggaatgggcgcatggggtttggtaccttctggtgcacatcatgttgctgtatcgatgtcgagggagcattagggttcaccggtcagtgatggcgggcatggtgggactcgtgtcaccatggttcgatcaactagggacgatagagctctatgaagtttcacaacttcctcacactctagggatcatggtgacaaaggtggggaggacggggcgtctctagtgagggtggaatgcagttctgtcacgtgggaatagtggcggcatcccttgtagtgagtaagaggtgcttgggtggctgggagtgcaatatgagggaagtagttggtgcgggggtgttccttttataagggagcaccattgattaatgggagacaatgacagagagggtggtgcgaccatttaaagctcgaatgccgctaggggtgctcagggttaaatgatcaggcatcagggaggaaaggaagggataaaatttctttactctagttgtggggtgatggggacaagggcagtgctcaagcaagggagggcgagttcagcgcagagatgcctgtcgtgacacgtggggggtgggagtgggaggttgaggttaacaggtggggttatggcgtcagcgagagagagagcgactgagggggagagaagtgccaacaggtggggacgaggtgtcagtgactcacgggcacatgttagtggtaagtgaggtcgggaatggtttgggctgagtggatctaggctggctcggacactgtgctgattcttttatttttctccatttcccaatttaagtttgaatttttaattcaaatcaaatgaactccaaatctctccaaaaattacaaaaatctag

SEQ ID NO: 178898 - DNA, 464 bp, Zea Mays
ctcgttgttcagcggggtagctgatggcctcaacctgaagtactaccctcgccgttcgaccggcagtgctggaggtgtgattgtctcgccagttggtgagggtaatcccagtttgaacaacatggtcaacttggctgccatcctcaacatagagttggaccacgcccttgatgagttgggcaaggttcgggcggaggttgcggaattgcatgtcgaatgcgcggcacgccactatcttgatggtggttctcccgcccctgttgggattcagcacccttaccgttcaccgccccgtggtcgcttcgactatggtaccccagactgcaggacctggatagatttggatccctagatcgacagagtcggagtctgtaataatgcttagttcagtatcttagtctagtcagtctagttagagttagtttgcttattttatgttggatgcttgttatgatggacatgta

SEQ ID NO: 178899 - DNA, 552 bp, Zea Mays
tgtccacggcggcgacgaataccgaagacaaatcgtggtgctctaggcgatttaatgcggtctagttcaatcaaacgggtctgcaagcaataggagacttgagggaggctagaacatcacacagaagagcatgaactaacccgtagacgactggccacgacgagatgtctcacggcggcgttccgaccgatttgggggaaatacgaaattgggaggctcttgtgaacgatcagaggcgagagctggtgctttggatgcgcaattacctagcggagctcactgggacatcaatttatagagtccatcagcggtggcgcccaattttgagaagatgcgctggcggccggagagaggggaagttcactgacgtgagttaccatggcattcattggcgcgtcgactcagaggacaggtaggcttcctattgcgaccaacggtgacgtggtaacaaggcagtagtgtggcaggctcggattaacggcgatcatcaccgcgacggcctcgccaccacgtcgcgacgcaagtggatgaggcgacagagcggccacagtg

SEQ ID NO: 178900 - DNA, 628 bp, Zea Mays
ggagtgccagcacgatcaaccatcgcgctaaccgccggttcggactcgaggatcgatccaggagggagtgcgagacttagggttggtggacggcgcgactcgtgagcacggtagtaccggggcaccgccaatttctcaccaaagttgaggaacgtcgccgtggtcagagctttagagtgttcaaagcacggtaagactactcctaatgtattcgtcgctccctagggatcatgtagatgccctcggattcacctttggggcactggcgcgactatcttggggtgctcgccggaattcttcgtcgcggatggagtatcatcgccgcgttcggtcgacgtgagggagatgatgagttctgactgttgatcgcttgagtaacggtctggattagaatccatccaccggatcggttgatctgtggtggaccatttgatttagatcgggcgggggtaattcaatccaaacgttttaaatcagggacgtccacgctggatcgggtggtggtcgtatgataccggttcagtgggggtatgttttaatctggatcattggtgttcgatccgacagctacgattacaacatactctttcggcgtgaccattttgcaaatgaacccctggaaaactca

SEQ ID NO: 178901 - DNA, 849 bp, Zea Mays
ctcatatggtgccatcttgatgctagcctggtagtttttgttataagagaactcggctaaggcgagatgatcctcccagctacccttccaagatagaacacaagcacgcaacatatcttccaaggtttggatagtttgctccgactgaccatcagtccgagggtgaaaagcgacactaagagagagcttggtacccaatgcacggtgaagactctcccagaatttggatacaaatttggagtctcgatctaaaacaatggacttaggcaccccgtgaagcctgattacttctttcatatacaagggaaccaactctgaagctaaatttgtggtcttcatgggaataaagtgcgcagacttagtaaagcgatccactaccacccatatagcatccctgcctcgaggagaatgaggtaagcccaccacaaaatccatggtgatatgctcccacttccactccggaatttccaatggcttcaataaacccgcgggcctcttatgctcggccttcacgcgctgacatacttcacggtggccacatacttagaaacatcaaccttcatcctcttccaccagaatttttgcttcaaatctctgtacattttggtttcgccagggtgaacgatgtaaggcattttatgagcttctctcaagatatccatcttcacctctgatttctgaggcacacaaagatgacccctgaaacgaaccaaatcattctcatcaatggtgaactcacggggtttaccatcgccgaccctatttcgagcttcctgcaacaaacgatcctgctgctgagccatgtgcactctctccagaatggaggattggatgagcatccgagtctcc

SEQ ID NO: 178902 - DNA, 509 bp, Zea Mays
tgggtttttgtacagttcagccattgtgcgcgctctgcaaaagcgaggttgccgactgcggatctgcactgcaccctgccagatctgcaatttattccacaatcgtgtagtagcagtagtagtacgatgtacaacagtgactagtgtagtagcagtagtagcagcgtaggtctagctagctgagtctgaactgcacgcacgactgctttagcacgcttcagtttctgggaggttgacaacttaaactaggtgcgtgagaatggtgtgacacggtgagatgatcagggaatcaactatgacataggaagtgcagttttgtgccatatctcaccatgacaagcagctaaaaagaggtggagtttctgggttaaatgggaacctcacaaagaagtacaaggttacatgttccacacttctattgcatggacaccacgtaggataggggcacaggaaagtagcagttgtcgccaaatctccactgagcaccaacactgaagttcagtttcttc

SEQ ID NO: 178903 - DNA, 485 bp, Zea Mays
gcgcataaaatcgagagagtgtagggatctcggtgcaactaatcccaagacacagttcgccttacgcaggactgcgggttgattccaataaagatctgggtctcttatgaaagaaaacccggccgaaggggtatcgttctatcatagccgcacggtctgatctaggcggccaggattggattaggttgacactctaactggtacgcaactggaaccgtccgatttagaatagagtgctacgatcacatcggtcgagggagttctttattttcaatcctaaccgctcgatcttttctcaacggttccgatcaattcctcgaactggtatctagtcgctcaaatcttcgccgttgactaggatccaatggcctgcgataaaatggtgaaaggggaattggccaggtctcatctggaccactgcattccgatccaatggcagcagggcatcatcctccgcccgaccgagcagcgcggcggcgcgcctg

SEQ ID NO: 178904 - DNA, 447 bp, Zea Mays
gtaaaaatctagggttatgcgcgttattcccagccacagtatggatggcgggtttatttcagtaaatcccaggggctcttttataaaatgggatcggcgaagaggtatcatgcgtccagggccgttggattgtcttcgcacggtgcagattagatcgcatccatatccaagcggtacgcactagggaccaccggatccgtgattgacggcccaaattcagtcaagtcggattcaatacccaaccgtcgattcacgcatcaacggaggttatcagatccgaccgaatcctttccctggcctaatcccagccgcacgcagacaaatcaacgacccacgctaattactcctcggacctaatcctagccgtatatctcgaagtctagggccatcccctgtcttccccattgagcgcttagagcggcggcgcccgagcagtcccagacggcg

SEQ ID NO: 178905 - DNA, 1233 bp, Zea Mays
ctaattgaaaactgaatttaaaacaagaaaatacagatagaaaaggaaagaaacaaaatggctctcaggccaaaagtacctagccgctttgaccaacagcactggctcacgttccaaacaattatattctattgtgttggcagaagcatgcgtcatcaggacctcagcaaggacatcagccatgtttcattgacgcgtggggtccatcggacttctcttctgcaggttcatggccgtaggcccgtagcacatatcgtagcaatccatggggagtttgtttaggaaaatctgttgcaatcgtccgctacgtccggctcctcactgcataaatagaggagatttttctctcagatctcaaccctgtcatcttcgtcgccaagaacgtagagagagagagagcttgagatcacgttgtggcactgggagcaaggctgcgggcgtcgacaggaatccttgaaggaccagggagaatcaccgtcgggcatccatgtggtcgtagtcttacctggtgaggaagaccagccagagccatgggagtccacactgtcgtttaggctacaatgcggaactactgcctggcgtggtcagcatcgtctacaccgtgatcacgagtaagaaattgccccattaatttgccactggattagggttgtttagcgcctagtcgctcagttgtttagactccagaatgcgcaaccgagttgcgtagcaatggcgccgccgtgggcgtagccttgccggcgccgccagtgagttgagcggggacgatgcccatcagccgtagatcggggtatgggcgatggtgatttagtgcagagccaatgggaatcgtggtctgttgatctccttggctgcggctaggattagaagtcattacatcccttcgcgtgattcgatccagaccatcggatcgtgatcgtgcggatccagcgcgatctggaacattttgaatcggcaccgtcgatctttgatctaacggctagagcgccgcacaagtctattataacgctgttttaatccggggcgtcggcacttgatcggacgatcgagtttgctcggtacaccctttcacggcacattttgcacaatacccctcaagaattgtagatttgaacccgcagttctgcgcgggttgattctgagtcacaggaatttttgtagattaacccctattgtctctggaattcaaggagcagtccagacagcaaataaaatcagagaaattccttataa

SEQ ID NO: 178906 - DNA, 416 bp, Zea Mays
gataaagcatcatcttcggctctggtatatgccccaagtaactcgtcgctaatagcctcaatacttttcagccaatcgtcatttggctcgtcaaaccggtccctgaatctgaaggtatatttcaatcgaactaatccaccttcgatggacccggcagcagtctccttcggcatctcctagttatccacaagtggccacactctataggctatgtgctcttggattatgtctctcgtgccaatgtatgcacagacattgctgaaagcctttcgacacatttcggcatcactttcaatcgccaccctcggccttcgaaggccgaagcgagaccagatggggcgctagataatttctttattgtcctccctctcaatcagattattcttaacataaaaccattcctccatccaggcctc

SEQ ID NO: 178907 - DNA, 1018 bp, Zea Mays
tggctttgttccttaaaaagccgggtgtgacagcctatattcgcacatataatttccagaggaatcgagacaaagcaagaggatagtacgtaacatataagattgtctttagttgttttctctaaatttctccacatatatctcactagtgtgcaacgttaaaacaatctctcctatatccccaccatctgtagacattcccatcgttgatggaggcgaccacctcgctcgggcaaggagggcagagaatcaaccaaccctaccaaccggatctcggtggcgtcgaacgacatgaagatagcactcgcgataccggctgggtctccaccatctctctcccttccaacgacaacgacatgctctgctctcgaagtcttccggagaacatcaggagcacatgcgaggatacgaggataacggtcgagcggtcgagcgggtatagtgtttccctccatctagagggatagagaagcaaacgggagggcaggagaggaagagggcgacgttgaacggtggaggggatgaactgtagccgctagtgggggtgaagtagcaactgttaaagagagtctaagactatctgcagtgaggaacttcaactagtacgccatgaagatagagtaatatatatggtagaaaaatgttgcagcgggcaattaggacaactaatgtaagtttcgtgagggaatgagagatgccaaatatagagtccatgcaactcctaccgcaagctggctacgatcctaggatttagaggcggtgaaggttattgtgtggggactagggatagaatagagttgaaaaaaataatatatggtagttgatatagagttgagatataagttaatatgattacagaggattgtgatatatggtaaagaatcatgctgaaggtggcataatattttctttagatagaaatttagagtaacgtgagtatggatagcctaaacttccagtgcaagagagtgacagagagtgacgtatggagggggctttctacttgagtaccagtacc

SEQ ID NO: 178908 - DNA, 469 bp, Zea Mays
gcaaggcaaggctcatgcatgccgggggtgaagccattgaatcggcgaggaaggagacaacgctggcatgagggcagtagtgcaactgtgcgaccaacgaggaggcacaacatgacgtccaagcgaggagacagggcgtgtcaaggagaggtgacacaggggtgcaggtccagtgcgggcgagctgcgacggggaggaggctggaggcaacgcgactgacgtcttcggagcatagtagggtcggtgggtgggctgagggtgagccctagaggaacggagggaggaggctaggcagggttggcggagctggccgattgtcggctcgagcatacgcggccgcatcgggcacaacggagaaaggacatgccgacgtcgagcaggctgcgattcggtggcctgaagtttgggcaaggggagtggcgaccacaagcccgtggggcttgggaggccgagcgcgatggatatcgcg

SEQ ID NO: 178909 - DNA, 759 bp, Zea Mays
gttttcatgcagcccatcttctctggcttttgtttgataatgaagctcgtgtactcggtagaagccttcggcaaatggttctaccccttgacttcggatggcccagatatagacactaagcctaacgatggcgttaggagttagttgatgaagaaaaataccaaatttcttcgaaacatcagcaatcatcccattcaaaggaaatcttaatcctgccttaaagaagcttttgaacactaccacctcatccttttccagcttcggagtaatctcctctccgccaaaatgaaccagctccttttttgcttcattaaaatagcccagcttcatcaggttagacatatcaccttcggtaacggtggatttcccaaactccaagtgattgggtttagatggcacgacgctgtaatcatcatcagattcaatttcctcagcatcagcctgctcagtttcagcagcaggtgcatcccctgatactacaagccctgaccgttgcatcactttggagattggagcggtttcgacacctttggcttcctctccgtcgcgagtaacccttgctgttgagcgtaccctagccatctgatgattgaatttcttgttttttgatgaagttgaaatttttttaactttgtcgaagctctttcttgttatgaagcttgagcaaaatgaatagcttcggttggcaatgcagtaagcaagctttggctatggtcaaatttttggcagcaaaacagtgcaatagcaatgaatgatgtg

SEQ ID NO: 178910 - DNA, 782 bp, Zea Mays
gttttcagtccgcttgcaacgtgccctccagcgcgcggcccagcccctctacacccctacaggcccagccgcctgttccgcacgaccagtgggctcgtgaccgctgactccttggctgccgtgttttgggcattgacgggtgggctccaccgccagcctttcatggccgacgctgacatgtgggcccatgtggccagcctctcttcctgcctcggtcacacttggctcttcgctaggcactgactcgcgggccgcttgcctgtttggctgccaggtgaggcccaatggtcagcatcgtcatcatcctcatgtctgaatggggatcccgcgtgctggttacgcaacaactcaccaaggatctaggaaatttttggtaagcctacaaacccgtgcatagaacccggaaccacccctcggccatctgcaagcataaatacagggcccgactgccccctcctcaaccatcatagcgcatgtaccaccattgtgtggggtcaaagacggagagaaagtgacgagaccgccggggaaaagctctagccaccatcatccaccaacgaggtaagagtcccttccaaggtttcgacgtgttgcccgccctcataacagcgttttgtttggtgttggctcccctgggtgtggttatggatcccatccatggcgcccctaaggtgggtcggccaccaccgtcttggcctggggtctaatgatggaggggaaacaatggtgaccgtagatctgttgatgaacgcgcgggattagggtttcatcttaccccttcg

SEQ ID NO: 178911 - DNA, 554 bp, Zea Mays
cgtctgccgtcgtcgcaaggtgagatcccgtccacgaatccctttcttcctcacaaccagcacgaccaagtgtcccccacacgtcgttgcgtcatgtctctgcatgcgcgccctcgacccagcccttgtgcgcgtcgttcgtcgtcgagccatacccgtatcctcgctcgtcgagatgggcagcaggcgtctacccctatgcacgacccccgcacggcgcgatttgtcgaaccgtgtgcgcaacaggcccaaaacacatcctcgtagctagcgcgcactcgctttcgcatatgcgcggcacgtcgtcgagactctgatggcgtctgtctacccctccatctaccccctagaactcgttcgtctacccccctgcgtgcgcgcattcgtgtcgctcgccccgccattgcccgctctgcgcgcgctatgtcgtcgtgctatgcttgtcgggtgtcctcgcttggtcgagcgagctgtcatgtgccattgtagatgtcgccctcgtgcgttgttccactttgtccacacgttattcaattattttcgttatagtcgct

SEQ ID NO: 178912 - DNA, 515 bp, Zea Mays
caccaatccggggtatgagaagattcaaagtaaaattgaagttgtctcgtcgctttattggacttttcttgatcttaaagcgagtgggaaaggttgcctatcaactggaactacctgatcttcttgcagatgtacatgatgtcttccatgtctcacaattgaagaggtgtctcagggtgcctgaagagcagctacctgtgcaggatcttagggcacgcaaaatgtgtcgtgtgtatacatcgtttgttgtgagcttttgcgttgcatctacagtaccacacacaaggtaaaatggttatgcgtctccttttgcatgtcgtgttgggatcagtcctagggatcatgcaatgtccaatttccttttgcctctcattctgaaacatgtacaccatgcatgcactcagctttcggtccaaattaaatcacttatttgtactacatctgtcccacttttgtttttgcgaatgctgtgtagtagtgctgtttgtgggctttgttcagctagctagctattg

SEQ ID NO: 178913 - DNA, 825 bp, Zea Mays
cttcgatctcgcggtgggcctatgctgggtcgcggcgtgcttctccgatgggtgctcgtcgtcccgaggaagatcttcgtggtcgtctcggacgggtgatgtgccttagcttcgccaatggcgcatcggatgctgcgtccgccaccggggggggcactgctggccaataccactgcctggcaaccggtaagatctcctctagcgtactcaccatcaacttcgtatcgcgtagaagctttcgtacttggaagtagtgacctagggcgccgaattgttgatcaccggcgatgtttcgctgctggccggtggcgtcgccgccacccaacggtgaaaggattggggagaatcgtgtgcgacgtcgatcgcggatcagatggtgtagattagatctggcatacccgttagagtagatgagatctatgtcgttggatggaaatcgagcgggcggaaatcgatctgaagattttgaatctggagcgttggtattgcatcggagggctctcgattgcgcgcggggtcgcaaggatgcgatctaatctaggcactcagatctaaatccaatggaccagagctctccatacccattcagcctggagatctttctaaagagcccctcggttttgttatattgaacccgccgtccgtgcggctgtagtatgagtcttgagaatgtttcggtttagcccctgagtttcactagttttacgcgcacggtccagagctatgagaaaataggaaaaatgaattcagaaaatgaatatccaatgtaaaaagaattccagaacttattttatgcatagaaaactcattttagctcctttttag

SEQ ID NO: 178914 - DNA, 562 bp, Zea Mays
aatttgtcaatggcgaccagtatatgagtataaccttcctgagcttttttgaaaggtccgatcatgtcgagcccccagcatgcaaacgactaggttacaggaatggtctgcagctgctgcacgggcaagtgttgctgttttgacaagaattggcatgcctcgcacttctggactaactcggtagcgtcactcttcatagttggctggtagaaactggatctgaaagcttttcccaccagagtccttgatgcaacatgcacaccacactgcccggcatgaatttcatctaatagctgtctcccgctggccaagtggatgcacttcatgaggactcctcccgcgcctcttctgaacagcaaaccccctatgatggtgtagtgggctgactgtcttgcaatgcgctctgctatagccttgtcatccaggtcctcttcattctttatgtacctgatgattggctctcttcaatcattgggatctgcctctggctaactcagggcgttgcattcttccatctggtccgtgatgatgcttggttgttgtatttcttggacgaaaatcc

SEQ ID NO: 178915 - DNA, 517 bp, Zea Mays
ttggaattagcacctgagttaaattcaaaaatttgaattcaaatgaattaaggataaaagaaaacagaaaatagaaatgaaaaagaaaaggagaaaccacatagctgggccgatttccttccccaccggcccaactcgcgcttccactgcgcctcgcgcttgcccacgcgtgtcacgccactgtcatgtggggccaccccgccagcctcgcaatccccacgagccagcaatttcttccctgattggtggggccatctcgtcgggtccatcttcctcgcggcggaccataacaatcgccgccatcgtagccaagttgtcgcaccggattccgtctgtagctcgggtggtttgaatcggcaacaaaacgcgccctggattccggagccggccaaaccgcgccatctctaggaacgtcatacggctcgcctctataaaacccaccgtccgcctggagttcttcgtgggcgctacgagaagcaggcatgagctccacccgcggtcggagaagggaagaggg

SEQ ID NO: 178916 - DNA, 980 bp, Zea Mays
cgcgccaattactaagaagctcgaggtttaacttgcaaaagtctaccagactcagacttaacctgtggtggacagcgggttaattgctaataaacccagggactcttttacaaaacagactcggcgaaggggtatcctcaagtcttggtcgccgattaactttctacggttcagattagatttgtcacaaggctgaaacgacacgagccaatagccactggatccaagatccatgaccgagatccgactacaccaaattctcatctgaacccaccgatccaatctaacggccacgatttaatgcaccgaaacggtttacttgccgctaatcctagccgttcgggtgcacatcgacggacagcaaccgatcaccgcccgatccaccgatcagacggcggcgccgcccgcagcagtggtggcgcaacgccggcgagacccatggccacgccccgagggcccgaatctctcgtcctactgcggctacccaaccctggggtcgatgcgaacatgctagaagcgaaattaccgtggattacgccgcgacgttcactggtcacgggcggcggcggaggatgaagtccggtgagcaattcgaagtcgcgctagtggtcgaacccgcacgaggatctcacgtgtggactcccagtactacgacggagctccccgacacgatttatgggcttcagcggtgacagaattgaatatgggccgcggtggcgcacaggcagatcacacggcggcagaggtggctatgggtgtgctggtccagggttacgaaagtcaaggtggccgcgcagagcttcactttataccagaccaaccatcctccccacatcccccgtgagctgagcatcatggaaatccgttggtcaaccacccgcgccgagacccccgagagtaagatacacagggcctacaaggcgggtctcgcgaaccagtgagacgaggtgacgagcaagcgcgagggagtgactgccaag

SEQ ID NO: 178917 - DNA, 988 bp, Zea Mays
tggtgacagcggcgctgtacaggctggtgaaggagagcgcggcgatgtactgcgagctcacggaggtgatggtcgtgctcttggaccgcttcgccgacctgggcactcctgcctgcgtgcgcgtccactccatcttcaccagtactgcttggaatttgggtatgctgagttcacgcttcacagacagaactgcttggaatttgggtatgctgatattttagagctcctagacatcttgtttcttttgctgattctgagttacaagttcctaattacaggattcacgttttctttccttcatttatatgaacaattagtctgatacttgactactttctgttagataataatagccctggatgtatggttattttgagacacacaacattttttttgaggcattgtggttagaatatccgagcctttgattggataagatgtgtttgagtgccaatgagacaaatccttctcaaaatataagaagcctgaaaatttgatgtttttgttgtgttcttgctttttctagagacaacatctcatcacaagctgtgtattatgatgtaatgttctggaaccccagatatatttctgtgaagaatactgttttgtttgtgatgcactttgacagtttgacttagggctggtttgtaaaacccgtccatggtttggcaagcacaatatttgattatttttttacctccatgttcagatgtcgggacctaataaagctccatttagtggagtggctgatgatttgaaaggaagagcaggttgctacaaacaagactggaaccatggatttcgttctggtttaaggtttgcacaacaccatgttgtaattgcttgacatgtcatcattacttaattagcctgttgtgttcactgtgctacatgaattctgttgtcaggatactggcacctacgctctacatattctttgcatctgcagtccctgttatagcctttggggagcaattgagcaaagata

SEQ ID NO: 178918 - DNA, 670 bp, Zea Mays
ttcttcaagctccggccgttgcgaacgcatgccgaattctccgcgctcgcctgttgaatcaccgcacccagccgggtaagtcggacttgcgcggacccaagatatatgggtgggcttgggttctcgccgagctcgcctcgcgcctcgctttgcccccttctggcggtggctctgtccctcgtgcactgacacccttccggcctccatcaccttcctcgccgccgcttggatcgcggccaaccagcgtaaccgcctggcgcactcgacgcacgtgtgcagctgtgttgcctctggcgtgacccatccgtcaccgggaggaaaagagccctcgcttcgccgaggtcggtgcgccgccgctgcccaccctcgatctcgttgccgctaaagcctagaagtcgtggcggggagctcctccatagtacttggggttcacacgtgggagcgccgagcgaattcaaccaccggggcagctttgaattgctcaccgtcgacctcgggccgccgcagaatcgttgggcgtcgtgggcggagctcggtgcgccgccagcgctggtaagaacttccccctcggattcgcgacccttccttctacgttttagaattgtctggcgggtcgggggtggccgggttgctgttgcaaccggtcgccggcgtggggccgtcgcggctg

SEQ ID NO: 178919 - DNA, 317 bp, Zea Mays
cgaattcggcacgaggggtttagtctcctctggtcagctaggggtggcgctctccgcggacacggcggcgcagtcgccggaggtgagacagaccggggcttctagggcacttggggttggtctgggtagccagagaggttggggaggactcggcaagcactatggcatggtctgggtgccgagaacaggactaagatgggaaaacggtggagggggatcctcgggcgaacccaaggttactctggcgagcaatacccgtcgcggtgagggttaaaccggcgctctgcggtcggcataggctccggggagagggtggg

SEQ ID NO: 178920 - DNA, 572 bp, Zea Mays
gcggataggtcacttggacctcctgcaacgggtcaggccatcccgtgtggagtcatcggccagggcatgacggaatcgctcgtcgggcgtacccaccaccgtgtggccgccggtaccaatcaccatgcatggatgccgcgcctcgacgaaattggacatcccggtggaaaaatccatggtaaggacgcccctgtccagttcaccttcgctccctccttgcatcacaactgtcggtagaataggagactctctaggggcgttggggcatactccagcaacatcgctgccgcgcggagtgctctgctcaccgtagctcaccatcgagtaggagacagacttttggccgtttgattaggtttgaacgggtgagatcaaagggggacgtgtggggctgccccgacctttggatcgagaattgagggtcgtgataagatcgggatcgaacaggatatggatcgttgatctggaatggacgacagggatcatacgtgcgtaccccccttcgttactttaaatctagacccttggtattggatcgggtggtcaatcgcatacaccggttcagattataa

SEQ ID NO: 178921 - DNA, 988 bp, Zea Mays
ccaacatttgacgcccatcgttcatgtgacgaagactattcccacaatgcctcccaaaaagaccactcggtctagctcaccattgaacgagccagagcagccctcaccgtcaagaagggcaagcttaccctcgctactgaccaacccctaccacaaaacccgaaggccaccaacgattcacatgccgagggccatgccataaaacaaaaacaaataaccacctccaccgaacaagaaggcgaggtccacaccactagttcagaaaactgtggagaccccctcccaaacccaaaaagtctaccctacaaagctaaagtttggccgaatctgacaaggaactttccttcgctccccaggttttaacaccgcagtaggccaccagcaccaaccatttggaatgcctccgaaagacaatgataaagacctccaggatggcatggacctcggtatccacaccgagaaacaactattactcaagagccttcgcatatgcaaggttgaggcacaccgtaagccaagggacccttcacacccacaaggttgaggcacagcgtaaaccaagggacccttcatacccaggaagctccaaaacatggtcgcgaacgtcctttatcgcaaacccaaatccacaatattcaacagctcgaacacacccatcacaattatgaccaaaattactagtcatcaagaggtgatagaccacccaggagcaggggacttggatgtggtccacctcgcaagtacaagccctactgcatttttcttgactagtcactcaaccagagactgacgcgcatggaaaaagggatctcccagagcagccagcgaaggccatagcccacatattccaaccacaattccaacactctcagcaagaagcatacaaccattaccaacagtaccaaccaaattaccaaccactgccatcacacctagaaaggctacaactaccacccccctccgcatccaaaccaccaaagacagttac

SEQ ID NO: 178922 - DNA, 487 bp, Zea Mays
ctcggcggtggcgctgaaggactctggcgaggaattaaacgcagcgggggcaataaaaaggaagggagagggcggggggaggttccttacctcaaggcgaactccggggactcctcggttgcgacgaaggcgcgacggcaacccgagtcgacggtggcggaccacggcggctgcgcagagaacggcgggtaagcgcgggcagaggaattcggggagggagaggggaaattggggcgtgtcccgggttgcggacgtcggggcgaagctcaccgtggcagaaggcacggcggggctccaacggcgacggagaaacgggctcgggcggcagcggttaatggcggcggcgctttggcgtgtgagcagcgtgggggaaggtggaaaggaggcctgcaggtgcgcaaatgagggagggggtgagggcgagcgaggttctgggctcaagtggctgagggcgaggtggttgcgagctccacgcgcgatgtgggcg

SEQ ID NO: 178923 - DNA, 982 bp, Zea Mays
cgcgaccgcccgcgcacccaccctgtgctgccttgcgcgatctccttgtttttgctcgacccgtctctgtcaacggggatgtgggcgctggctgatgcatcgaggactcgaggtgatagggaaacgcctgtgctcaatctgtcccggaagcaggggatagggaaacatcagccctctgtcttgaattcgttgccacagagccgcgagaccggatccgaaaatggttatttgcagttttgcacgatgtatcacgatcgcttcagtaccactgatgtgtcacctcgggttttgtcagatttaggatgcgcttaaaacccactcgtagatctaggatgcccctaaaacccactcgtatatctaggatgcccctaaaacccactcgtagattcacacatgcagtcttggtgttaaatgatttagggtgcagtgtgtagatcagtagatgttcaatccacttgtctactgcaagttgcatgagcaagctctggtcgctcacagcgtgtttggtttgcatcacaaaaccattccatggcgtgtgctgcagtttggtttaagttgcagaatcaatcagtctttcatggagttgttctacgtagagaccccccgttggctattcctaaggaacaaacacattcctccaaaaagttcagaccatgcctcactggtacatgcggttttggatggatatccaaactaaatgggatgtttattggcttttttatgcttaagtaggtcaaatcatactgcaacgtcaaggcatctacagaccaaaacaacagtaccatgtgacaaaagttctctgtcaaactggttttactatctattaagttagtactgtagagaacttaatttatcaaatccagttcgtgggcgtaccatgcttatcaaaacaacagtaccatgtgacaactccgcccgcccgcccgcaaatccctccgcgctacgcagccaacgccgacaacgccgccgcaatccacccgcc

SEQ ID NO: 178924 - DNA, 547 bp, Zea Mays
gtgcaaaacgtggccagcgaagggggtatcggccgcctctgtccgttggattagttctggacagcatagattaactcgttcttcatctgaatcggtacgcggctcgcagcggttggattagggataaacggtggagcaccccaaagcgacagcgccatccatccctcaatcgacgtccaggattcatcccacaaaatgtgatgtggttcgtttaatcccgatttccattcctagatccaccgttcgcgtctgcccaaacccggcggcgcagcaccgccgcagcgccattgccggcgctcccgactcctcacccccgcacgccattcaccaaacgattcagcgctactctacgaggggaaaaccacgattcaacttagacggatactacacggagaagatgatctgggcgaggcggccacggcggcccgcggaagtgctcgaagaaagaactccagtgaggaattcgtcgtgctcagaccaccaattccgcccgtgaaggtctcgattacacacggcgcacccaggcgagctcctccagctaccccac

SEQ ID NO: 178925 - DNA, 797 bp, Zea Mays
ctcgcacactaccttgataatttccaagggcttttcttccaagtgattgatcactgtctttccttttgcatctgttgacttgtctatgctaacttggattccttcaccttgaggacttatcaacataattgttccgttggcacactgtatcactccatcacaacttttcaaccaatcgcatccaagaatcacatcaataccgttggatcctaggaccactgggttgactgaaaaatctattccttgaatcttgagattaacatgggggcatgagtgtgtggccttcatgtcacctcccggtgaactaatgtgtaacatcttcttaagggggtacttaggtatgttgtgtttttccacaaatgactcagttataaaagaatgtgatgctctagagtcaaataaaactgatgcaggtatggagttaacaaggaacataccatacactacgtcggcatcctcaggtactgattctacggtgacgtgattgacccttcctctactctggttctgcggagtcttgttttgagcaaatccacgagcgggggtgttctggtcatttctctggttactgcttttctgaggtgtctgctgtttgcgccttgggcagttgttagcatagtggcccagctcaccgcacttgaaacagccattgggatggactggtgcattgttgcttctggcctgcgtgttactagcgccactttgatggttctgtgaactcccaccagacctctggttggtctgagagttgctcctttgttggttctaatttttattatttctctggccttactgtc

SEQ ID NO: 178926 - DNA, 373 bp, Zea Mays
gcatgagcagcatcaacagcttctgcaacagcgacgaccggagaagttcgatccatctccatgattttggtgaggagtctgggatgcggcagctatggttgcgcaggaagagaaggagaggtaaagcggaggtacagcgacgggcggctagggtttaggagatagatcgaaccaggaaaagaacgacggctgccagcaggtaacggaggtagacgatgtcagtttcatggttttaatcaaagaggttaccaagtaatggagtgttcttgttcgttttagcgagtggcctattctctgcttttccatatcagctaatccctcgcctacgcctccaaaacgtcgaagccacacgtgcggatctccgtaatagcaa

SEQ ID NO: 178927 - DNA, 1205 bp, Zea Mays
gtcagcagggcctcatattcttccatagcacgacgccaatggggatcggggatcagcgtgcacgctactgaccgaggatgggacaaatgagggaggcgtgtagtggtggcggttgcgagcactaggcggccgatgggacggagaacattgtcggatcggcaagtgacaatcgggtggacgtggtgagggttgcgatggatggcgaccggattatgcaccgacggctcgtcatgagactgggtcgggacacggggtggctcattggaagaggggaccgatgaaccaggctgcacacgtcgctggtagatacgagcaggatcgacaaaggtggtcgaagaggtggggtcgaaggcgatggggccgcgcttggcgtggaagagggcgtcaggaccgagggtagggaaagagaggggacgtcgacaggaccagcatcaaggaggaaatcaaggtcggtaggtggggtggagctaggaaggggaaacaccctcgtcgaacaccacgtgatgtgagatgatgacatggtgggtggtgagattgaggcactggtaccccttgtgatcggtggagtacccgaggaaaagacaatgagtggagcacgacactagcttatggagcgcggtggcagagatgttgggatagcaggcacacctgaagacgcaaagatgctcgtatgagggggaggccccgaaaaggacggagtgcggagtgggggcacagatggccttcatagggagacgattcaagaggtgggtggcagtgtggagaccctcaacccagtagcaagcaagaagggaggctgaaaaagtatggtgaggatgatgttggtaatggtgcgaatcatacgctcggccttgacgggaggtgtaaggccacaacgtccacagttgcacgccaagcgagagaaagaaggcacaagatgtggagttatcaaagtaccgctcgttgtcgcactgaagacctcggatggtgcaaccaaactgagtcaacacccacgcgaagaagtgagattgggtggtgaagatgtaagacttacgacagagtggaaatgtccacatgtcgagagagaagtaatctaggatgaccagatatcggggatgtccaaaggtcacagtggacgaggttaaagtggcaagcgctttgggacatgaaagaggggaagggtaagcgacaggggtgggcccaggatttagacaatgggtattcga

SEQ ID NO: 178928 - DNA, 550 bp, Zea Mays
gattggcctagatccggtcgatggcagatcaacggttcagattcaaagattcgaaccggtacgctatgcgcctatgccctatcgcggccatctgaattgtcatctacgacttggattcaatcatctagcctctaatcgtggccgagtgctgcgagatcgacggtcaggactccgtcttcaaccggccgcagcacaggcagaggtgcccaaccaatccatggcggggcctcaccggagtaacggtgctccgaggtcctagtgcctaaaatcgagcctagctaggtgttacgcatggtggagacgatgatgagcaaagtggaaggcttcttaccagtgattagtctccaaggattcctacccacggaggagagcggatccgcggtggcgcttgaactacagcgagcgattttgacgttgttggcccacaatcgcatttggaaagaccacgaacggcttctagacgcgtcggcgaaccacccgcgccggttcttctgttaatgaggtactgtcagcctggattcgcaagcggcggcggtggaaacgatggggc

SEQ ID NO: 178929 - DNA, 371 bp, Zea Mays
caggcgggctccggccggcaagtcgagacggacgacgacgtcgtgggtcaactcggtgacgcggtagggcccgaaatagcggggctttagcttgcctgttcaggcctgaggaagagaggaagctgcacactgacgcaggcggaggaggacccagtcgcccacttggtagatcacctggcgatgtccggcgtcgtagtggcgcttctgaacctgttgtgcctgctctagccgagagcgaatgtcagcgaggaactcgtcgcactccgctatgctccgggcgacagcagcgaccctcgtgtcgcctggctcgtacgatcggattgacggtggatcgcgaccgtagacgacacggaacggcgtgtcgtgcaggg

SEQ ID NO: 178930 - DNA, 412 bp, Zea Mays
catcccaatccagtatcggaagcatcgcaataaacttcaaagggcttggtgttgtcaggttgagctagcattggtgctgttgtcaaatgctgccttagtgtatgaaaggcatcctcacacttctggctccaatcatacttgactcctttcttcaacaattcagtcattggcttggcaattctggagaaatccggaatgaatcgtcgataataccctgccaatcccagaaaactctgaatctgccgcactgtggtaggaggtttccaatccattacttcttgtaccttctaaggatcaactgatatcccatcctgagaaattttgtgacccaaaaatttaatttccctcagccagaattcacatttagacaacttagcatataaacgatgatcgtgcagtcgctgaagcacga

SEQ ID NO: 178931 - DNA, 380 bp, Zea Mays
cctcggtcgcttcgaatctaccctcgctagagttagacacctcgcggtcttgtgccacatgcctcggcactttaaccacgccgtcatgactcatattaacctatcctgtgatcgccggtgaggatgccacgattatggccaccaatcatgtgcgccagtgcacctcctcctctccgcccgccgcgcgtccccattaaattcactagccaccgctcaaacacactataaattgagcacaccctcggctccgttaggtaatctagcatccaatccaaccgcttgtgccctcaattactcactagagcccgcgaattgctcttttcccccaaatcggtttccgccaccgtgaaagagccctcaccgtgactagcttgttccag

SEQ ID NO: 178932 - DNA, 694 bp, Zea Mays
ggaggaaccgactgaacaagtgatgatggcattatctgcagcagcgtggactggatcagatacatcttccatgttgcgtttggcaggttctattcaacaacaacatctaatggtcttggtggattccggatcatcccatactttcattacggatcggttggtgccactactcaagggaattaaaccattggatcgatgtttgcatgtctgtgtcgctaatgggtagatcatctcttgctcccaacaattgtgtcaagctgaatggttgttgtctggatacaagtttcaaacagacatgatattcttaccgttgtcgtccattgatttggtgctgggcatggactggttacaaaagtatagtccaatgcacgtgaattggtgcaacaagtggttatgtattccatataatggtgatttagtatgtttgtcgggagcggcttcatcatttccgttaggggcatgggtggaattgcgtatgctatcggaagagcacatatctgctgcagcaggtgattttggcaaccacaacttggaccctagggtgcaatcagtgttagatcaattctctaaagtgtttgccgagctagtgggtttaccgccaagtcgcccatgtgatcatgccattccgctcattcctggcgccaaccctttcaccgtgagaccatatcgctacccgccagcactcaaggatgaa

SEQ ID NO: 178933 - DNA, 846 bp, Zea Mays
aagcaactcggagtacatccggcgggctgccttggagcagcaagtcctcggcttcctcatcacctccatgaccaaagaagtcatgggtcaggtatcatcctacaccacgccgcaggaggtgtggaacatgctggaacagacctatgcattgcagtcccagtctcccgggcaagaacagtcaacaccaggattgcattggccatgactcgaaaaggtaacttgtctatttctgagtatgttgcaaaaatgaaggcacttgcagatgagatggcatctgcttggaagcccattgatgaagaagaactagtctcctacatccttgtgggactagatgaagaatacaaccatgtggtgtttgcccttgttgcacagaaggattctgtctcatttggggaggcacactcgcaactcctcaattttgagagcaggatggctttgttgtatggaggatcctagccatcggctaatgttgctgcccgtcgaggtcgtggtggttctggtccgtgtggccggggtcgcaatggccggtttaatcctggtcgcagcagcaacagcaatgcaccaggagggtgcagatctgatgggaacacaataacctgtcaggtttgtgacagaactggacattctgcccgcaagtgctggtaccgatatgatgaagacaactattccaactcaaattccaagagtgcagcagcagcaatgcacagctatggtgtcgatacaaataggtataccgacacagctgcaacggatcatctcacgtctgagctggacaaactgaccactcatgagaagtacaaggggacagattagattcacaccgcaaatggtgcaggtatgaacatc

SEQ ID NO: 178934 - DNA, 285 bp, Zea Mays
caaaatggcgacggtggagctgatgtaggaggaggaggacgacacatctagattgagtgagcttatcgctctcgcagaggcaggattacatggggaagaggaggacgacacatcaaggttgagtgagctcatcacactagctgaggcaggattatgtgctcaagaggaggatgacgagtttatgtctcaggccaccgaagaggtagagacggcttattacaagcagaagtctgatgaggctgaggctgaggatgagctattctcccaagctgcagatgaagcaga

SEQ ID NO: 178935 - DNA, 860 bp, Zea Mays
gcaccgccacgtggtcggagaaaatgatacaccccaaggtatcaacggtgggttcgggcccccatgggaaagtgccgaacccctgcatgtacaggccggacctccgggcggggtccaggaccttcgcggatacagactagacctccgggatgggtcctagacctctatgcgtggggttcgatccaccctcagtagggtcccaggattctgggacaaagaatacccaggccttaaccaaggctaggcgggggcccggagccgacacatgtccgaaccataccatgtacacttctgctccccgcccaggcggagacccggtgctgccgcgtggcctaccgcctatgacgtgagcccatgggtggggcctgacgtaaggcctctgggccgcatggcgctgcatttattacgaataaggcacgccgcctgtccgtcccgctgacaggtgatgtgccacctcagcatttaatgagccctgtccattccactggcagggatgtgccacctcagcatttaatgtgccatgtccactccgttggcagacggcgactaggccgtcccgcaggcggcgtgcctgtccattccgttggcaggtagtgcgcccgtgctgcggagagcactgtgctcatcatcactcgtacgttgacagagaagcttcgctgcacgccagtactacgcaagccatggatatcagggcgcaaggagattgccctggcgactagcattagttgctccaagtattacatctgttatgttcctgggcccgcatgtcggggctcaacacccttgtatgtgccccccttgagctataaaaggggaggcacgcagtgttatagggcaagctcactcagacacacttagac

SEQ ID NO: 178936 - DNA, 574 bp, Zea Mays
aacagacctgggattcgctgaccacggtgagggttctaccacggcggcggaaatagaattgggggaagaaggaaattctccggctatggtggctaattgaaggcggtaatgggtgctctggcttcatgatagtatggtgcaacatgccaggccatcaatttataggagcgcaaggcggtggtattcaatttcgcgatgacgcgctggcggccggagagggagaaggctactggcgcagttgattcgtggagaataccgtggcggactcaccggcgatgatcggatggctaacgtgagtcacggcggtgcggttaaaggatggaggcgtggcgcaaccgcggtgagtatcgcggattctgatgacggccgtaaggccacgtcgccggcgcggggaaccgagggacagcatggccacagtaacttgaacccattcgcgacgagatctttttgctggcgaactcaatccacagcccagacgcatgaatcgcgacgagcagcactaatcccggcgaagggtcaccggcggccagctcactgaatctgcggattgtttttggttactgtacccatcacg

SEQ ID NO: 178937 - DNA, 880 bp, Zea Mays
acagtgttatgggctcaacttttaagctttgtaactttcaaactatagggtttttgccctaggtcaccacatcaaaattgtagcccaatcgtaggagaacaactttgcttaagagtgtgagcatagttgttatgaagaattctgagataaatgagcctgaagttggactgtcagactgcttgaaatctgaaattcagattaacagtgggatgacatgaacttagggcttaattttaagctagatctagtgactttttgtgggaacacattgtagcaaagttatagctggatggtagttctacaactttgctacagatcattggttatgttgccatatgaaattgagagaaaaattgccttcaacagggactgataggctgtctgaatgagttagtcgccatggtatagtgctccagatggattagaccgccagcagggaatcctcaccgccgacgactccctccgccgcgattcgtgtcaccggcgactagattcgtgcctggcgttgatgaatggcctcgcgaggtaaaaaaccgtgccctggacgccactccggtgactcaccgtcgtagcccttctgctttatggctggagcagataagctcgccggtgaaccgccgtcgtccgaccttgtgccgcgtgtcccgacctcgccaccgcatcgccgtgactccctctaagcttcccgtcgaccagcggagttactgccacggcgttgaacacgtatccactgcacccgtgttcttcttcacctccggccgccgtgtgtctcacccaaattcgcgaccatcgctcgctcctcctataaattgagcccccgggcagctgcactagatcatcatgaagctaacgcacccaccctccccctcaattaaccacc

SEQ ID NO: 178938 - DNA, 1008 bp, Zea Mays
cgacactaacggacttcacttcaccttatatagctcagtcaacccctcgtgcctttcccttcttcccatctgcaccgtaaggagccgccatagccatctatcgccgccgtttccgattgacaccggggtgctgcgggagtgtactctgtcgcgtgtgctaaagctccccagaaccttctcgggtgagggcgcagctgtcctcgggtgcggtggtgaccggggatcccgggatttcatcgccgtcgaatccacgcctccgccagaccaattttcgcggccgccaacggtgagacccctactatgctcgcgccccgccccgggattttggtcggatagtgtcgccaggacccagggaaggtgtgcgtgcaccagcatcgggttgggggcgatctacaccggcgaattctacaccggagcttcaccaccgcctcggatccgccgcgcaccgtggtcacgtctacgcgatccagaaacgcaggtgagaactccactcctaccttcaccatgtcggtctcgtggtgtagagcggtccaattttgggtatggggtagtgattagccggattgcgtgccgccgacgagctatccgccgcggcaccagtgcgccaccgccgccgtgctcactgtatattggtatgcgcgatctcggccgtcgatccccggttggatggtcaggattagaaaccaaatgacgtttcggccatggcgtatagagatcgttggatgagaatccagtggcggggaatgggtccacggatcattagatctagaccgtgggatctaaatccggtggtcatcgtggcgtaccggttcggcgcacatgggatctaatcctgtgcgcccatctttgaacgaatggccgtgatccaaacttaccccttgacgggtacactttacaaaagaaaccccatgcttttagaatttagaacccacggtccatggactctattctctgagtctagggagaaattgcgagttagcccctgggtttctctgctattgacgccca

SEQ ID NO: 178939 - DNA, 455 bp, Zea Mays
gtttttgatgtaatcggcttcatttaccccgattatcgctacccgctgcgagggcaatagaaaaataggaagattgctgctttggccaccccagttgatcctgtgccgaagggcaaaaagatgaaggttctaacccaccggccacgttacattgaaccggccgtggtgcctgattttggcgtagggtcctctttagcagccaaagcaatacaaaccgcttcgactatatagggcgctgaagaatcaactgtattgctgaagacgcatatagttgagccagtcaaagataaagttgaaaaggctgaagagccgaagattgaggaaaaaatgtcaaagattttgagccctccgatagaggcaaatctgccgaagacgcaaaagacttctgctgcaactcctaagaggagaaggatggccaacgtactggatgcagtgctggagactacaaaggcatt

SEQ ID NO: 178940 - DNA, 771 bp, Zea Mays
tgggaggtgagattagggctacacgaccgtaaaggactatggtttcaccgtgcactaccaattttgggagaggtggagaggattccacgaatttgggcttcaactgagctcactgatggagatgtgaatacctcgtcgtggtccatggtgctatttatagccacggcggtccggctaacgattagcgaccgtggattgcattgttcacgcatggataccatgtagagaagaggcacaataagggaaaaatgaggcatgggtgacaccgcggcggaagcgaccgagccacggcgaccgccggtgggatatctccggccacgcacgactgagttcgcgggatggtgccacgtccgaagttatctctccgcgatcaaatccctttcaccagatcactcgagcacatctgattcaacagtgccttagatcttttatctgcgttcttcagatatttgcagagttttgatcttcagcgttttactgaaccgaccaccttccatcctctctatctcctaattcttgttaagaacagggtgatcttcattaataaaacttgttcaccaaacaacagtctttaagtttactataaggttcatggttcaattctgtacagattttcagatttggtgctctcaattcgactgcatttcattggggccatacctatctgaacccaattttcagatttgcccaacttactcgacatcacaacttcacccttatttatctccaatttctgttgagcaccagtgatctttcacttaatcaaacttg

SEQ ID NO: 178941 - DNA, 355 bp, Zea Mays
tttcaaatgaacccgccatccaatctttctcatcccatctctaaataacctaaaaccgtcctcgccacagccgccacccttcctgtcacatccagcgttgccacctctgacctcccttcccaccaccgactatgcccctccactggaggccgaagcgcatattctcccttactgcatccacccccatcctcacgacgggaatctgcaatgaacccctctctagggttccttcctgccaccctgcctcacgccatccagaggttgtgaggcttcggcgtctacgcgcggctacttcttccgcggcgacgggaagcacgacaaggtgtcgttgattggctccgctcccacgcatccc

SEQ ID NO: 178942 - DNA, 363 bp, Zea Mays
ctttaatagttcatggttatcttatttcactcttagccaccaacaaatatgtcttgtctaactccttgataactcttacccaactccttgatgtcataatatctttcttattccaaacctcgtctcacctttttgttttggttgaatgagtataattggattgtgttgtgctggtatgcttgagttaattgtcctttgtgttcatgtttgatttgcttctttgaaatgattgttggtgtattgtgtgacttttgtccataatggcatcagttagctaggtaaaccgtagatagatgtgttttctctgctctctataatctgtctttgctcaaccctttcgtcccttccattcttccataccca

SEQ ID NO: 178943 - DNA, 415 bp, Zea Mays
gggtaccggatacgggtacttaaaatacccggtttttcgggtaccggatacgggtaattttgtatacgggtcggatacggatactacccggatatgcatcagtcggatacgggtaggatacaggatgaccactacccggcaaatacccgagaagtacgggtaggatacgggtacccggttagcgggtacccgcttcagttcctgcgtgcattgtgcctgtacgtggaacgtctcgggctctcggctcatgcacgctcgtttcaattttctagtgcctgtgcgtggaatgtcttggcccatgctcgtttcatgcacatgctacgtgcaaacaggcccagtcggcagcccatccggccatttgtttggacgaccagacagacgcacggaaacaggcccagtcggcagcccatccagc

SEQ ID NO: 178944 - DNA, 1302 bp, Zea Mays
atctccgaatcgccaccgcgcggcccacgttgatctgcccactgcgcgcttggccactcgctgccaaccgggcccgggtcgtcagccggctggaaatcgccccgcgcgcgcaccaacgatgtggttccgctgaccggtggggccgtttgaccggacccatgcaatagcctgtgtccacttccacatcgcgctcagacacaacgccaacaaataggccctagcagctagccacacaatgctccttcctgccattctatcaccgccatgtgggaccaggtgggcagggaattcttcccagccgtatcatctcacaacgaaatcccgcagatgctggatcaccccataaccaacctccccttgattggagaaaaaaaatcgatctcctgctcctccccgtgggactctcttcagataaatacgtgcccctctagccactgcacgcatccaacaaattcaccgtgcaaatcgtaacctttgcgagctgagaacccccattgtcgtaggtagaaaaaagggctcgccgccatgggaaaactctagtacgccgccgtggggaccttgggtgcgatccaggttgcgtcgtcgtgatacatcgatgcagacccgtgtcctcaccggatgcgaatggtggccagggcgctctgaaattctcgccaatgccaaggacagcagccgcagcctccgattcgcggtagaccctgggcagcaaaactaatgccaccattccaggtaaaaaaactcatccccatgcttcactatcgcctcaacgtcatgtagcacagtttcctctagtgcgtcgggcacttgggagtcgattccataatttccggtgaaaggcgccaccgcgacctgggcagcgcgcggccagtggtttacagacccttttgtctccctcgttcgcttccatcgctcgcgacaggctctccctgctcccgttctcggcggctgaagcatgtcgcgaaccacctttccgtggctcccgaacgagtcctatgggcgatgcgggcggatcgcgcgatgggggaggtgagagcggcaaccagcggggcatgtcggggaagacagtgtctgcgccgtcggatccaatttggacggtgtagagttgatcaacggataacccttagctgtagtgattgtgaccgtagatcagagatcttgtggttgcgattattgaccaattcggggcttcgaatccaaccgttgattccaaatcgtaaggcgggtaggagagatctagtcaatgatttaatctcgaccgctggtggatgatcgaaccgtccatatttgcccataccccttcgc

SEQ ID NO: 178945 - DNA, 568 bp, Zea Mays
ggcgtacaggatgttgttgacgtggtggttgggcacttccagcgggatcctgttgacgatgactagccaggcctgcatggagaaaaacgagggttcctctggggagcgggttgcaatatgtctttgattttgtaagatactctttaggtactacttgtcgatgacgttacaacttatctgcatgcccttttttctgctgtatgcattgttgtcggcttctttcccggtacttggcctccctgggatatggcctcgacttgtcggggtcggatgccaggattcttaaggtggcactggtgccatcactccgaagaggcaaaccctactgggacccttcctggacacggcctaggccaggtatccttaacatcgcacccataaggtccgccagctggtatttcttatcctttgattcacgcaacaagaccggcaacagggcggtggggcgtgtgtagtctttgtggtccttgaccatgcggccgtacggccctaaccaccccatcgcctaattgtcgagtctggctactcaatttggatgtcgccataccagctagggagggagacagta

SEQ ID NO: 178946 - DNA, 632 bp, Zea Mays
gacttccacatatggattgaacggattcttcctgcgatggttcgaggctatgtccctaagcatgtctggctagcgctttcagagttgagctatttcttctgtcagctttgtgcaaaagagttatctcggaccgtggttgcagacttagaaagattgccactcgtgttactgtgtaagcttgagaagatatttccacctggcttcttctatccaatgcagcatttgattcttcatctcccctatgaggcacgaatggggggggtcatgcagggacgttggtgctatccaatcgagagatgtctaaagactatttgaaagaaatgtagaaataaatgcaaaatcgaggcttccattgcagaggcatacattctagaggaggtgtcaaacttcaaaacaacttattatggtgacaaactgccgagcgtgcataatccaccccctcgttacaatgatggcaacaatgaatcgaaccttagcatatttcgagaccaactcggaagcgcaagtggctcgaccaccaagaccctgacacatgaagagtggcggcatatcatgctatatgtattgaccaaccttgaagaggtgacgccatacatggaacaatttcttcatgaattctggcgtcaatcaag

SEQ ID NO: 178947 - DNA, 627 bp, Zea Mays
agagtacaacgtcgctccgatagctctcgctaagggtaaaacttcctgaggtgttctatattccatgaattccccacttccgtgccatccatttgagtaagccgatatgatcctggccgagtgacctccgacactatgaatggcccttcccatagcggcgataatttgtgtcgtccttctcccgttagaatttggcgaaggaccaagtctcccactacgaaggatcgatgtcgtatagtcttatcatgatagcgcctcagggtctgctggtatctagctgattggattactgtattcaatcgctcttcttccagtacgtcaatatcttctagcctggtagcttctgcttcagctatgctttcgaagaccagccttggtgccccaaatctgaggtcggcaggtagcactgcctccgaaccatagaccatgaagaagggggtgtttccatgtagagctcaactgggttgagttcttaggctccagaccacataaggtaactctctgatccacttccccgcgaacttttcattcttgtcaaagactttcttcctgagtgcttccagtatcattccattagccctttccacctgaccattggctcttggatgtgctaccgatgcatatttg

SEQ ID NO: 178948 - DNA, 486 bp, Zea Mays
tggtgactcgtggccggcccggccggccatccggccatggccgagcgagtaaaatactaggcaaggtgtggattgtgttcatcgggcggccgcaccatgtccgattattctagtggcaccacagccagacatgtacactcctcttttcgcctccgtccatccaatccaaccacgaactggagcacaagtaggtggtgtgtgtgactcgtgacgacgaactgatatactatactactcatatcagcgtgattccacttggaatgcaaaacggtcgcggggctcaaatgtatagagcagcatgtcagctagtattcagttccaatgatgggatcggtgaagctggcctgattcaggttggctaattgcgcagcagaaaaagtgatcccctcatgtagaacttctcccgtagaggagagagaagccatgaaaatgtgcgaccgcgcggccgaccgtatattttacgcgacgacatccataacatgctgg

SEQ ID NO: 178949 - DNA, 871 bp, Zea Mays
cgaaaatttcacaagcgcggtccacctgaagcaggccaattcctagctgccgcctattctttcactgagccaaaccctagatagttattttcttcttcccaattccaaatcaccgccccaccgtcggcccgttcagcgtcagcacgaacgcacgcagcgacgatcctccttcccaattcaagctgctaccctgagtgtttagcgtttgcaagaaacgagtgtagctagcgccgtgcgtgcgttcatgccctgcctctcggctctcatgtgtgcatcctctgtcccaaatccatcgtgaatcatccctccccaagttgttgtggtcaagccgacctcctcactcacatcattgccgacggttctaggtacttgttttttgttgtactcctgtcctcccaagcctctcgccatctgacatgctaccttgacttgaggcaatgtgctaagaatccaagtaggagtgaaaaaccaagaaggagaacaactcaaatcgtcgcactgctagaagcacgctcagacactcagtacaggaagttcgatgggaggaataaaaagatttttttgaagagaggagacatcgcctgattctccaaggacaaggcggaggcagcgaaatagtgcgcaggtcagtctgtgttctttccttaacgaaggccagtttggtttgtaggtgaatggataatttcctatccatgtttgtgaattgtaaacttgattagtgtaaattgtagaaagaataaataaaaaaattgtgacttggagctgcgtatggcaactatagtgcaaatgggaatccataaatgtacagtttcaagtactgtagtaagacgatcagtcgccaaaagctattcgtcgctatagatttatcccg

SEQ ID NO: 178950 - DNA, 602 bp, Zea Mays
atcgagggtcggcagccaggacaacaccgccgaccgcaaccctggatcatcgcagagcggcggaatgccctggggaggtatcaaggatccgggaataaaggcctcaccagtgatccccttcactgaaatctccagcagctcccaggacaggtcggtctccggcccacgctgaatcttgccaatgtcattggggccggtgtaccagcaacacaaacgcggcctcccctgcaacggcatgacccggcgcttcaggaaatcaccgactacgtgcatcgaggtcaaaccaccggccgccagttccttgatcctgttcagtacgggctcgaactccagcgcaagggacggtttggccctccattgcttccggtcgagtcttggtccatcgttcgacagggcaaggtggtagttggcctctgcactggcgatcacctagtcattgcgccagttctcccacctcgcgccgccaagggtggcgatgtaggccacggttggagctaacctcgtctagaaatagtaggcaccgaggtggtccttgcccttcccagatctcaccagcacgaagaattggcgaaagagggaagtgcaggctgccacccccacga

SEQ ID NO: 178951 - DNA, 663 bp, Zea Mays
cctggcgatctaaggctactccgtgcaaattgagggttcggtaagcatcacagagctgtgagagtgctcaaacgaggaagcagaggacaggggctgacctgtggagggctgaccacggtgaacttagtttcacggtgttcttcgactgatttgggggaaatcttaaattcgagctcactggtggacgattgctagtgattctcgatggctgggtgggtgatgaccttgcggagctggtgggggcttcaatttatagggagagcgagcggtggccgggaattttaagaaggacgcactggcgcacgtgaatccgtggctaacgtcgtggcaacctcaccggcgatgatgggacggcggtagggagtcacggtgacgtggtagatggacagagacacacggcgggctacggcgaaggtttgacgatggtgagaaccttatccacgggcggtgagcaaaggggaagggattacggctggccggagtggcttctaggtcaccggcggcgaggatccccttaccccacgatgctatcaatccgccccgagcgtgaatcttgacgccggcgacacgaatcacggtggggagtcaccggcggtgggatttttctggcgctggcgatcagatccacaatagtcactgtaccatggcgatggtcattctgat

SEQ ID NO: 178952 - DNA, 499 bp, Zea Mays
ggaggggagacggcgtcagtggcggacggggaaggggtgaaccggccgatccgcggggaaaaccccggccgccggcgggttcaacggcgattcaccgccggtgacccggtttctggggattgggcaggtgccatagcacgaggagaggctggcgagcttaagggtgggtccaattttgtcagaggtgactgggagggagctgaccacggtggggtggcggagctccgcggtgggagtcgtcgccggtgaactttgggtggtggtcgggggtaggggagcgatgttccgagtttgcggtgatgtggtgaagctgctgatcctagtgaattgctcgctgaacaaccagagagggggggggagaaagagctcacctaagcggagggaggggcggcggagctggagcggttgagctcgggaaagggggagaagagtggccgaggccggtgcagggcatggaggagctcggggcggcccttttataggcgcccgaggggagggg

SEQ ID NO: 178953 - DNA, 786 bp, Zea Mays
tgaacacggaaactctggggcgaggccgaggcccagcacgaggccaccagatactacgagcctgagcatgattaaggaaaggagggcccaaacgattgaaaaccgaagatccagcccgagccacacgctgagcatcaccaggagacttgatagagttgcgaatcggaacagcattggcaccggtgagagggagcttaacaatatccgcatatgaaggattcttcctgccccggaccttcaaccaggaagcagcttcctcatccgaaaaaagcctgaattcatgcttccaattaggtccaccacgattccaaaggttgaagaaggccctgaactccttacgctcaatggaacctgagttgtaaatatgaaaacccaccgccatcgaagaaaccgaaaaccgaaaaacccggccagccagctgaagcacctcaaagcccgcggcgaacccaccaagggcagcctgaagaatatgaccaaccgagaccgaattcaacttgaagatgcatctgccaaaggagaccaccaaccagaaggacgaccgtagacacgggcgggcaggacaaactggagctgccaggacatcccagagggagtccgcgaaggccaggtctggtcgaaagtccagaagagagaagtccatggctgaaaaacgagaagaccgggggaggaaggagcgagaagcaggaggacctgagctaggggccgacgagggccgccgagaccgccaccatgctgaccgtcgtagcccgcctctcaggttcagatgcaaaacagacccatataacg

SEQ ID NO: 178954 - DNA, 692 bp, Zea Mays
ataaccctaaccgcccgaaccctatgtccctatcccgatcgcaacgccgaccccgagtccccaaccccgaagccctctctctctgctctcggtctggcggcggcgccgccgttttctctctgccctctctaccctccggcctccgcccctccctgctcgtcggtcgtgctcgccggcgtcgccctgctcgccagtcgatctcgtgctcgccggcctcgccctgctcgccagtcgccctgctcttctccgcgttcgtcgaggcctgcaagctcgtggtggaggagaaatcccctgctgaagcggcggcgatgcgccctgaccgcgctgcgtgcaattctgtcctttctggttgctaccgcgggctaggttcgctggcagatgcagagcgggtgctggagactatgtcggcggttggtgtctcgccagatgtagagagctttgggtgtctcgccttcctgtatgcttggagaggtgttcccagtcgggttgatgaactggatacattgtttgatgctctgggcttcagcaagaaggggtttttcaagaacctggttagtgggtacctcaaatctggtgacttcgagtcggtttcaccaatcattcttcgtgcagtgaaggagcgcagagttggggatgacaatggacttgatgaggaaacctatactgaggttgctcggtgctttgtggatcgt

SEQ ID NO: 178955 - DNA, 566 bp, Zea Mays
gtatcgttgtgtttgtgaagcacggaagcgacccttgagttgtgtagtgatggtgacccggtgatcccaagtcatgcacgggcccaattctgttcaggaaaatatccactaaatacttgtttttattttacgcactggaacacaggttgatcttttcagtcacattgctgttttatataggagtcatgtttatataagctactagcctactactgaactcgaggtcgcatgtgcattatttgtgtgactgtgcaagctcattgacatgaaaaacataaaccacaggtgtccagttcatctctgtttcaagaatatgaaaactgtccatcttgaccaaacaattcagcctgagatgggccaagtcaatttgaatagtcatggtaataccatgttatttactattatattcttgattatcagattgaaaaaatgggatttgtagccctgtgagatatggcctttggattggcagtatggttaccaaagatgatttgattaggtacactgtatatttgaatatctggcagtattttcaccctcaaaattatgcatcatatgtggttcta

SEQ ID NO: 178956 - DNA, 500 bp, Zea Mays
gcacatgaggtattatacaaatactcaagcacatagtgaaaatgtcccagtaaattgtttgtgagctaagtatttgtcgactaattgttagccactgccaaacagttagctaggagcaggggtggagctacatgttcttattggggtcagctcacccctataaaatttcacaaacccctgtaaactaatgtagttagatgatgatcagtggagctgacattaatgacttcgttgcctggcttcgcggacaggaggatccaaacagggaattagtttattcaccctccttacacgagaatatatagtggttcaccccgttgagttagaaccggcaagctgtttttatgcaagaaagacagttttaatttgacaccaaaacacgacatagcagcaatccaataatccaatggctataacacccacacacccacggtgttggttgcatgcattgtccgcgctgcacaggagatcacgactaaaatatatcaaaactaatcaat

SEQ ID NO: 178957 - DNA, 1117 bp, Zea Mays
cactcaccttacgcgaactccaacagaaacaccgcacatatcagcctgaaccgaaccccctagctcccgatcgaggcagacctaactgaagcaaccaatttctgcacgcacgattgtggagatcgggtcaaatctagacaacactcacatcataaaaaccaggccgctccctccccaacaacgtctcccatggttgtgcagacaccgttcattccacgacgggtggctccctgccaggtccgctcgaccagtcctccttggcgagctccctccggcgcccgggatcctccgccgcgaccttgcgccaccctctgctcgactgcgcccgggctctacgccatttcccttcactcggcgccctcttccttgagtcatcgattcatcgctgacctacaccgcgtcgtgggcgaagcttctgcgcgccaaacaacatgagaacctttccctgtatttccgctatggcctccatgttatgtttctttgcatccgttcaagcggggggggtgggtgctcggcttgcatgcagtacgcgacggcgctctccgccatgggccctggggcatcagcatgattggccgtcgggaggtagacgacgtgtgctggccattggatcgggcgtccactgcttcgattaatcagagggctaagatttgtgtggtcgttgattcggccacggatggctgggatcgcgccatgcataccggatcgatcggaggcctcgcaaccgtagatttggagatggagggctggggcgtgaccgcagtatattaaatcacaaccgtagatccggaatcaaggggcctagattgaataatggttcagttaagggttgttctaatctgagccactcatttatgatctgacggttgatactcatccataccccttcgcggctgacgtattgcaaaagaacccctatgcttactagatattaacccgccatcccccgtggggaagatctgagtcatagggaattttatgagttagacccctgggttctttgttttatgtgcgtagtccagaggtcagagaaaatgaataaaggattatagaaattgatttttagaatataaataattctagaaacttgtttaatttatagaaaattcatattgag

SEQ ID NO: 178958 - DNA, 404 bp, Zea Mays
cagattagatttggggctgtctgaaccaatatgctgagatggcccttggattcagaatcgaaggcctggatttaattaaccctagatctagatcctgccgcacgacgcgagatcaacggtgtggatttattccgagcgaagggatacgctggacctaatcgggaccgtccgtcaacgatccgacggccacggacccgtcttccccaaccgagccatcgcacggcaatgtggcccatcgcgcagcggcaagtccgccggagttgcaaatctggccaacctggccaccattttctaattcactcgctccccgcccaactaatgacgttatgagctcaattctcgtaccaatttctaccatcgtcgagtgcaaggctaggtccacggtgcgccgcggtgacaccatt

SEQ ID NO: 178959 - DNA, 632 bp, Zea Mays
tgccaaggctcggaccttactcggagggacctggggcttacccgagggacccggcatgccctcttgggagctccggactcttacgtacaggggtccggtgtccttctgcggaggtccggacctatcgatgcaccctggggagtattatctttccttgccacgtggtgcttcctagacctgcccatgtggtggggtcgggtgctgctctccgtgtgacctgggggtgtcgcacgggtgcaacgccttcataccgtagaagaggataccccttatttagggtaccggcaagtacctacttagacaactcttacatattcgccaacactcctctgtcactgagtatgtagagcacttttctcaattggtagatcagttgaatgcatacaatctgccctcagatccactatattacacaaccaaattcattgatggcttgaggagtgatattaaatctgttgttttgattcaacacccacgagatctcgatactgcctatgtgctcgctcaattgcaggaagaggtggctgaggcgtccaagcagcaggattttaaaggatcaagtcacacatttactaaagctcctcccactgatgatcgaccagctgtgacggtgcccaagcctcctgctacag

SEQ ID NO: 178960 - DNA, 540 bp, Zea Mays
actgtacaccaaggatcctcgggggtacttcagatccttggcatattgttttgcttcggcaatctgctcctctgataactgcttccgtgaagcatgtcgcacaatgaattccaactctttagcaggtgcttcaggagcaagagatttgggtttttcagaagccccctctttttctaggattattggtgcgctttccgaaggtctagcttcggcgggaacttccgagggtccagtttcagaaatagtttgcaccatgtcggcctcgccagatttctttgaagctttaccctctgtgctaggcgcttcagcagaagcaggagttgatgtcttcacagattccataacagcatctagcacgctggccattcttcttttccttggagttgttgcggggatgcttgatggcttcggcaggtctgttgtgcatggtggactcggtgcttttaattgctctgctaccttctccagttttggctcttcagccagttttgtcctagctttgactgacacagagcgacttggctctgcaataggagcggc

SEQ ID NO: 178961 - DNA, 685 bp, Zea Mays
gtttggaatctgaattgggagaaaggaaaaataataaaaaggaaaaatgaactacctgcgttgggctgcattccatgcccctcggtccaacagtcccgcgcccccgcagcccacgtaccgcgccttcacctccactcgcatttgatcccaccccgtcagcctcacatcacgcgtgcagcggaaacaacctcttacgcgtgggccgcctgggtcagtgaccactgcgcctacctcatctctgccacgtgggccccgcgaatagattctcctcccagctcccgatcgtggtggactccaactaaatccgtcgaactctgcgcgcggcaagaactgatcccggccgtgtttctcgccacccgcgtggactcggcttccccctggccagccactctgctctcccgctcgccccttcctcaatcaccgctaggtgggcccataacccacgggtcccaggaccgtattctccgccgtgtgaagctccgggcgcaacaaaatccgccgcctgggcactgggttgttgggatcccgcttgatctccaaaccgaccaactcggccattaatctcgcccataaagccgtgcacttctcttctcctattacgctatcaaccaacgggaggaaccacgaacgagccgtcgtagagttgaaggatttccgccgtggttgaacgccgattgcccaccag

SEQ ID NO: 178962 - DNA, 603 bp, Zea Mays
atcgtgatgaccgatgaagctcaggcttgtctggtaactttcaatgttgtgtgcagctatataggcacaagggatttagtccagaagcacatagccttttgggtgtgaccacttgtgaatcagtgggaaatgctgaaggtgaaagaaggtagcccatctaagcaagtggcgaagaagggtggtttggtgaatctaaattacacgtacgtatacagaaattggctctgtgaaccagatgacgaatgactagaggccattgaatcaacatgcaacaaaattttgggtaattataaaaaaataagactaagccttgatcattacttttggggccggaggcaagagaagactgaatcgaggttttgatgctattgggtttgtttaccaggactattccttcccgatacaaggtaaaagggaagaagagaaaggatttcgtcaaatcgattgaaagcttattacaaagagagggcagcagtgattgaaccaaagttgtctgtggttgatacttctgttgagaaaaccattaccctgaccacaccagtcgttgagccaaaggttagctctcgcgtttttacgaaggtaatgactagttggtgttttgat

SEQ ID NO: 178963 - DNA, 317 bp, Zea Mays
tatgtgtgtgatttctacagatgtctaaaaacaggtgcagaggtgcaaggcgtgctcagccagaacagcagccaccccaagaagatgcagctcaccagcagttgccaccaccacccccgatgaccattgagcagatgttcctgatgcagacccaagcagtccaagcaattggtcagaccttagcagcgatgcagtaggtgcagcagcagccaccgccacctcaaccttaggtgcaagtccagatgccacaggtgcccagagacaagcgagcagaattcatgaggggccatccccctgtctttgcccattctgctgat

SEQ ID NO: 178964 - DNA, 369 bp, Zea Mays
gccacgtaggattgtggcccagcaggcgtctagaaagcaaaatatgttaatttactttggtccatctctacaaggttgtaactctgtcatctcgcccatgcacgcctctacgtcttgtctccagtccactcgtgacgtcgacagcgtcatcaatcccattgtgcccttctcctccgcacttccatcttttacagtcaatcaatccaatgcctagatgtctgcaatatacctgtcgtggttttggaaaccagggaacaataagatttgtgtccagaggggaagctagcatggactcgctccgaatggtgagccacgctggactcaagcgatggattttgtgatggtgggttataccgatttagtcttacg

SEQ ID NO: 178965 - DNA, 295 bp, Zea Mays
ctgaaggcgcgggagccaaactggacaatgtgggccgttcaaaggagaaagaggagccagctgagccaaggagaggtacacgtgagcgtaagttgaaccagaggctgttgggcccggagtgggtgaactccatgtaacgtgtgcgtggcctatgggggatgagatgccggcgtgttgccttgctgcataaaggagtgagtgcataagagatggggttatgaaaaatgtaacagaattatattcctctagctactctctgatcaacgtgttcttcacgttgccgcctgtcccctgt

SEQ ID NO: 178966 - DNA, 633 bp, Zea Mays
cacagatgctctttagaggctgcagtgcggcgtggcgcggagaagaggagggctgcgaggcggggctacacaccagcggtggtagctcgcccggggctgcgctacggcgaggcaaggcggggcagagcacgtaggaggttgtcacgcgtggagcatgagtgcgcagggagaggaggacgtgacacacggctaggttgctggtgcacaacgcaacgcagggccgacgaggtctactttggtctaggcaccggggatgggagagctcgccgcgcaaaggggctaggagcgcgagtaggtggctcactgtgcaggggtagatggcgtatgtcgagagggagagagtagatgagggaaggaactcaccttggatagcgagggcggagcacggacgcggcgaggcttcggggactgctccagtgaggccagggcgcgacactgcgagtggcgaacacgcggcacggtggcggcagtttcgtggggaggtgagcacgatgagggcgcttggtggctatgcaagaatgagagagagggtagtgaggcaaggggacgtggggggttcaaatggcactccgccgtggggcagttgccgaacgagcatgggaatggggagtgggtctgtttccttcttttcct

SEQ ID NO: 178967 - DNA, 617 bp, Zea Mays
gtcagggcccacagcaaacactgtttggcttcccagtccgggcgggctaaggttctagagatgcagtgacgccagtcctacccccttgttttctggaggatcctgtgtcgtgccttactcttataaagaagttgtgctctccaatgatgagagagtagcctcttctcctccgctgtgtgttgctgcttcttctcagctgaggggtgcccaccagttgcaagcggtgaagaagacagtccgtgtgcgcccggtgctgcaaagtcaggaaccagcgcttcgtacccgttctaaacacgggtggcaggaagtggtgcgtcggagatatagacatgcggcacttggtcctcgtcgatggtccccagaggatctccgaggaaggtgctacaattgtttttctccctcccactttggtgctgcatgtagacgacctacccgctgctttaggtgacaggggtttgtccatcgtgcttctgtgtattcacttcaagcgagtacaaagaaggcggcggggccgcaccgtgagcgccagagtattcgtgttccggtgtggcaacgcctgtcaacgacacaaggctccagcctgcgtggtggtgcattgcaagagttcaagcgtaggg

SEQ ID NO: 178968 - DNA, 395 bp, Zea Mays
gcaaggtctcccctaggtgctgaaggagaagtcggtggagaagggagcgagacccacctccctgcacctccggagctgccattagacttagcccaagttctggccaaccaaacccgactcattgaggtcctcaccagaagcctcgagaaccagcgcccgattggaggaaggccttaggacaggatgggagagtttctaaggctcaagcctcccacatttgttggatccagcaacccactcgacgctgatgactggctgcgcacagtaaaaaggaagttagaggccatcgtatgccttgaaaaccagcgtgttcatcttgctacccatcaactctctgggagggccctatcctggtgggataccttcagcacgaccgtcagagatgctacctgggc

SEQ ID NO: 178969 - DNA, 580 bp, Zea Mays
ggaaggaacttgggcactgcgctaactggtctgcagtgcccacttgctcggcgtcatgacagagttaccaccatcgtgatccaccagtcatccttgcaatgccacacgtagcctcgcttcacccccatcatagtgagcgtggcatacggtgatacaagtttccgagtcactgagccacatgtgtgccatggagattcaacctctgtgaaaaaacccgactgtcgtggagctcgatctcatcccaaatttgtgaagcgtgcgattgatccctttaaatttagcccccctgctctgcctatctgttacacatctagcccaccctcagccagcccctctcgtccaccatagcccgtaggcttcagatttccctggagttggtcaccatcgccgctgtgaggagcttcatcgtggccaacgctcctctggttagtttgtgcccctctggttcccatttgggtacctatttgacctctagttgctcacggactcagccgattgaacgctaccacagtgaaaccctaagaacatcgtctcaccattgctggacatttccgaaggccacccttcacgtcgatcggcc

SEQ ID NO: 178970 - DNA, 532 bp, Zea Mays
atgattctttttggggggtttggatttagatttgtatcgttttttcatcttatttcaagcctgatttatctggttggttggacatatggggtgattggggtagtgtattgtagtgtgtctcagtgatggactcttacctatctgctccagctccatacttgcgctaaaactgaacatggactttgggaattggggcagcaccagctaattcaaattgttgcttaaaattatggaaatgatcactgattttaggaacaacaatgttggctgcatggggggcatgtccatttagaagaaatcattgatatagtggtacctcagagtagatagagtaaaccaatcattgtactccttccttcctcggacttgaaggtagcttcagcttggtttcctgttcctcggtgtcttctgaagaaacaagagaaacatgtttcagttgctggtcctactttcttgtcctgccagaataccctaattcacgctctgtcgatactatctccgcctgcctcaaggctggcatgttcagtatttg

SEQ ID NO: 178971 - DNA, 350 bp, Zea Mays
gagagagccgtcgcacgtagagagaagggaggagtctcggatcggtgggaggagacagtggcatcgtggcctggggtcgtgccttgtgctcgtggggtcatccgtctcgcgccgcgaattcccagcggtttgccggccgaagtcaaccattagcacttcgggggcgctcgtcggggttggcagttgtcgccgcaccgtggatcgggtcgctcaacatctctattgccggtaaagcttgtgaactcagtttgttttgatccccgtgacgttcacctaggatagcacttgaggttggacgctgtggcgcctttggaccgtgtgtggtaatggcgccgccaagaggctcgtcc

SEQ ID NO: 178972 - DNA, 1142 bp, Zea Mays
attggggtcaatactagagtacccaaactatgcctctgggatatggccctgatgagggtcgactggaggtctacgagtgcctctgtaatggtgtcgaggttgctgtctagggggattgaggggctgaggcagtaacattctccctccgcagtgacgatgaagtcaaggttctcgaagcatacaatagctccggcgacctagtcgacgttgcagcttgccatccggtacctgatgaggaggaagacgaaaacaagtgtgtgcaactgttgtgtttcgagtaagcacaaatgagtatttttatgcgtgttttaggccatgcgtcaggtggacataagagttatactgatttgggtcgaatatcactactccagtcttcagtggcttgcgctactggcaccagattgctcatagtagggggttataagcaggcgagagagggacagagctcccaagtatctgatctaagtgtttgtgggtcaggatcgggtgttgtgagctagagtcctctaggtttgagtgtcgtctagtcttctgctcttctcttgtggttgaggccgacccttccattttagctcaaggaaggagcctcttacaaggaacatgtaaaaaggtaaagagaaggggttttcggttgactagatcctgcaatgcgtcagtactaggagtcgtacctatcgtcgtacttgtcgttgtagttttagatcggaatactttgtgttgcttacacgagaacagggctccgtaccccagagggtacatgatattgaccaggagggcaccctggagttggtagcatagtgcaatcttcaagttttcgggatggggcggcgctatcgaagtttcgttcataccctccactttcgccgaccattgtacctcgtagcccgttcatcaggttttcctctgctttttcatacaagggtggtgggtactacagtaatcttagattcaaaggagcatggggcttggccagagaaaaagggcaggtcttgcctttgtcacgttctgctgactgggacaacaacggaggcaagtatggggcgatggtacaatcgtctgacctcgagagaccctttctagcctggtcaaccctctcctcctttctccgcctcacccgaccctagaggttgagtcgagttccg

SEQ ID NO: 178973 - DNA, 564 bp, Zea Mays
cttcgatttgcctcattgtgcctcttccttacgtggttgtcatgcgttaacagcccacctcgtggccgcggatcgatcaccggatcgtcgtgcctatatataggacagggagacacgacgaggtgttcgcagttcttcaagcaagcttgagtaaaaccagaaattcgcactgtctcctcctcctctcctcaaattgattgtgcacagtgaaactacagtctcttacggccctatagccccaatcccatctcccaatttcacccagagccgtcgtgacaccattttcccccttccctgtctccggcgaacacaagactccgcgctccatggccagaccactctggtaaggttctgcctctctcgagtgttgttctagcaacgatgtatgcacgtgaagctcaccgtagtagccgtttaaccaattcgggcgtaaatgattgggaacacgggattgacatcacggtttccgccatacccgcgagcagaccgttctccaagtgttcaagccaaagtgaagcatgttcctaggttgccttgggtaggttatgcttcccctgtcgctcg

SEQ ID NO: 178974 - DNA, 616 bp, Zea Mays
atatagtctcaaaattagcacatggtggataatactggacggattgcttctatattgtttcttgactgagcttcattgatggcttactgtatgtgtagtacatagtacatagatgatattttgataatttttttgaaacattgcaacatgctgcattcgcaaatgggaataccacaacccctggaatctggatataaacctgacagctttatgtaaacaactttgttctagttaagtagaaaagttgttggggcatggatcctttagaattcatttagttccctagcctttaaattatctactagatttaatctttctgccaataaaactaaaagaagttatccccacacccacacccacataaatgataggagaagtgttttttctctcaaacacacacaggagagccgtgtatctttgtattatagggaaggagagtggtgcatacaagaacccttcttttacttggaccaaggcaagatgagtaaaccaaatccaaaacaaccagaaaagactttctgagattataactaatcgaccctactatgcaaatccagtggacctagagcccaagacgccaggagaagcgtgaactttggaaaataaaaatgttgag

SEQ ID NO: 178975 - DNA, 737 bp, Zea Mays
ttccgaccaaactggcgagatttataaattgtaagttcgaagaaaaaacattcaaaactctagttcccaaaccaaagcaccaaaaggcaggcaacaaaagtcaccaaactgagtctgaggttgaacgcttcaaggggaaaagagagcgcgcctcatctcgtctcgtctagcagcagcgcgttatgtggcaaaagtcgcttgtacgaagaacctgcaagctgctttctgctgctagcggcaagccgcaaccgcacggatcgatcgaagcaaaagcaagcgaggcccgaggaaacagcgacaaggcagcagagatcggaaaggaaaaacgagctgcttttgcgatcgaagtatagaaccagcgagctttttggcactgccgcggaatcgcgcagcgcggtaggaagtggtccgcgtgcgcggcttcctcgtgcccggagcctctctagcaaaaaacccaacagcatcagacacctatagcagcagtgcagtacacccgtacaacagttcgttttgatcaagcgggttttaggtcacgcccttttcgcatcaaattgagagaagggaacgaaccagatggagaaaaatggcccggatcagaacgaagaagaatgagagaccggatgaacacacactgctaccagcagggcgcggttagaaatagatcgcagaagaatacccacgacgcatacatatgccagagcaattaggccactactcacctgtgtggtatttacttg

SEQ ID NO: 178976 - DNA, 1165 bp, Zea Mays
agagcttcgacagaggcaggagctgatgtctttatggactccaaaacagagtctagcacactagccattctcctttttcttggaatcgctgcgggagcgcttgatggcttcggtaatcctattgtgcctggtgggttcaacaccttcaactgatctgctgctttctctaatttcggctcttcgaccgggtttgtactagtctcaactggcacaacatgatctagttatgtggcagaaggggcaactcctgcacgttcaataagctccagcacatcggtcgtctcaatgtgtcgtggtctacatgtcaagaccttcactttctttgccttcggcgcactagaagatgccaaggcagcagtcttccttttccccttttgtttccgaacaggaaaacaatagtcagggtagaaaaacccgataacatcgaaaaccctattcagtatctttttccatcgagcgccgaaggcaactgtcatagcttcgtcttcagccctcgagtaggctccaagcagctcatcacttgttgcctctatagcatccaaccaatcatcatttggctcgtcaaactgatccctgaaccgaaatgtgtacttcaaataaaccaggccactctagctggagccagcagcagcctccttcggcatttcccatccacttgcaaggggccataccctataggcaatattcacttggaccaaatccctcgtgtcgatataggtgcatatagtattgaaagccatctggcacgcttgcacgtcatttctgagtgcggctgaaggtcttctgatgccgaagcgtgaccatattggacgttgaatgatgccccttatatcctccctctggtccaggtcgttcttcacataaaaccactcctgcatccaagagcccggccacttcttccgaaatgtaggcacaggataactagcctctgagcggggcacgaagttgtagcagccaaagttgttgtggtattgttctttcccagtcgccttcgtctaatgtgataattcgtgaatgttacaaaagcacctagcgtctggctctaacccttggctcctcatagcccatataaaaacccctaccttgataaaagcttcgggggtaagttgatgaagaaaaatttcaaaagtttttagaacttcgaccaacatcttatccaggggaa

SEQ ID NO: 178977 - DNA, 833 bp, Zea Mays
attccgttggctctttccacctagtcgttggctcttggatgtgccactgatgcatacttaatctggatgctcctttgctcgcagaaatcaaagaattttgagctggtgtagttggatcccaggtcagtgatgatgctattcggtattctgaacctgaacattatatcctggataaactccactgcttttgctgaggtcaaggaagcaattggcttgtactctatccattttataaatttgtcaatggcaaccagtacatgagtataacctccttgaactttcttgaaaggtccgatcatgtccagcccccagaatgcaaacagccaggttataggaatgttctacagctgctgcgcgggcaagtgctgttgcttcgataagaattggcacacctcacacttctggactaactcggcatcgtcactcttcgcagttggctagtagaatctagatctaaaagcctttcccaccagtccttgatgctacatgcacaccacactgcccagtgtgaatttcatctaataactgtttcccggtggccgagtggatgcatttcatgaagactcctcctgcggctcttctgtacaacaagcccctatgatggtgtagtgggctgactgccttgcaatgcgctctgctgcagccttgtcatccggctctttatgtacctgatgataggctctctccagtcattgggatctgcctctggctgactcaaggtgttgcattcttccatctggtctgtgatgatgcttggctgtgatatttcttggacgaagatcccaggcgaagcctgggcctgactggatcccagcttcgataatgcatctgct

SEQ ID NO: 178978 - DNA, 695 bp, Zea Mays
ggttagcgtgcgacgtcgagctcgtgttccaacaaaactatgccagtaatggccaaacggccaccacggtgagcttcactagcacacagggatgctcaaacacaaatcaaaggcatagaaccataccgggttcgcctggccacgggaatgcggggatgagcacgctctgtggggtccgatggggataatggatgtcgcgatgaattctggcggaaacaggcagtcacactagagctatacgatcgcaagggactacaagttcaccgtgcactaccaatttgggacgaggaagggaagacaccgcgaattttggcttctaccgatcacaccggaagacagtgaagacctcactatggttcatggagcaatttaaagggatggcgacctagctagctatccgcggtcacgaggcacgacgtttgtgcatggcgaccacgtaacaaagaagcacagtgtggtagaatttaggcgcgagtgacaccgcgacggaagtaccgagccccggtagccgtcggtgaaatatccctaccccgacccggcctagtccacagctgtgaattggcttagagttatcccaccccagccatctctatctcatcttcatttggacacattcggattctacagtggcacggatcttttcttcagatatttcaacaccatggatcttccgtgctcgactgaaccgactccct

SEQ ID NO: 178979 - DNA, 581 bp, Zea Mays
tccttctccagctttgtctgctctcgttggtctgcaagaattgtctctggcaaattttgatcagactctcgaagatatggtccctgaagatctgttgtgcgagccgacagatggtggtatgatggacgtttgcactgatgtgcctgatgtcgggttagagttatcccgagcagcgtctcgtgcctcatcgaccttggagcgcggtcttaagagtcaagaggttgatctagattgctccgttcccatggaagtggttgaaaatccttcagccttagaggtggctgctacagagaacccggtccccaaggatggcgctagcatttacccagcccccgagggtgttgccggtgatgatccggctcgagtgggcagcgcgagctatgacccagcccccgagggtgtccgagcgggttccccttctcatacttccatggatgtccacgtcgggtcttctcctccacattctggttgcatggctgcagcacgagtttcaggtcaggaagtcgccttagaggtcggcgcacctgatgctagagttttgatttctgctggtgatgctgaattggtccccaatgatgctc

SEQ ID NO: 178980 - DNA, 558 bp, Zea Mays
gggaaggatgccctctttgttggcagcctcaatagaatgttgtctaggttgatactgttgcactgaattgggaatactatcttttgtcaaaatttgttgccaggcccgtgactctatcgaaaaggtccagggtccttgcaagcatagatattctgctttggtgagtgtgacaaatatggttccgtcgtccacaaacatagatatgtgcaggccaagtgtttgacaacaaagcttggcgagcatattgagtccagtagctgtttagagcagtctttgcaatgtgtctattgcaatgacaaagagtagaggcgaaaggggatcaccttgtctgaggcctcatccatgtcgaagaggataattacgtacgttgttgagaagcacccttgaggttgatgaagagagaattgctacagtccatccctgccatctcataggaaagcctaggtgtttgaaaagagtaaggaggtactcccatcttatggaatcaaaggcttgagacatgtgcaatttcattagaagtgtcggggtattggttctgcgaaggtggtgggttgcatt

SEQ ID NO: 178981 - DNA, 2343 bp, Zea Mays
atgctttgttctaagaaaaaagatcctcctttccttagcgataccctgccacccttggtgtagggtctcctttaggtggccatccaatagcactgtgtatgcaactacatcaggcttgattcctaaatttatcatttgaacaaataagtcacatgcttcttgcaaccgaccaaccttgcaataaccattcatcagtatagtgtatacaatgacatcagaaagtcctctttcatccatatcaaggaaccataagtgagcattgtgcatatctctgttctgacaataagctgaaataagtttgctatatgaaattacatcaggaataacattcttttccagcatcatactacacacggttgaagcctcctcaaccttttcatctatgcagaggccatttatcaattttgaacatgaaaattgatccaccatatttccttgtttagcaactctaagaaaaagtgcgtgagcatggtcagtccagcccgagtgcaaataaccacaaaccatagaactgtacagcagttcaatattatctatccctttttcttctactatattaaataatacctctgcttcgctcaagttgcctcctctacaaaaactagtaatagctacaccataggtgagtgaattaggctccaacccttgattcatcatgtgctcaagaaggtcatataccttaataacagtgccattcctgctatacccactggccaatatgttatatgttactacatctggttttacattttccttcagcatctgctcaaatacttgccaggcattttccatttctcctttcagacaataaccattgatcaggcatgtatagtggattttgtctgggaccaaacctcccgccatcatttcagttagtagcttaactgcctcattcatgttcccaagcttgcaataagcatccatagcaatgttataaagaacgccgtcaagatggagtcctagatctctaaatttctggaagtgaacaataacttcagatatcatgcctagcttcttgaggcactgtagaaggtaaccaacaatgtaacaatttatctcgatgccatgggataccatggcttcaatataatgccacaccttttctaagttacccattttgcaataactacgaatgagatagctataaccatatagatcaggggtagatccatgtctggtcttgatgtccaagactttttcagcctcctccagtttcatttctttgcatagtccatcaattaccatattataagcgatggactcaattgcaaccctttcctgggtgatctcatgaagaacagtgtatttgcttaccatgttataagctagatcgtactttccacaatcacaaaggccaattataaatgatgagtatccatgtgcatcaggtttcattcccatttcaatcatcctaacccacacttgaaatgattcttctgccttatttacttcaaaaaacgacctaatgactatgttcaatgattgagtatccagcatcaactgaaagcacttcatttgatcataagctctaacaaccatatctgaatcaccactctgggatacaaatttgataaggaaactgcaagcccaaagtgtaggaacaaatccaagcctgcaaaggtgacaaaacatctctactgtttcttgtacgtcgtggctgttagtgtatgccttgattaagcaattgactgcatatgagagtatgtgagaagtggcacaagttttgctcaagtgaccaataagtgttaagatttctgggtcaccattagcagttcccgaaagaatctcacaaaacaaggataccaacatcttcccctggaatgaatgggataaaatttgtatgatctctgagtaggttgagaagtcatggttaaaaccaaggctatgtatatctttaaagtaggcaaatgcaactgcaggcttcctccttaggcagcggagagcctgcacaacactgtaagagctcaaagacttctgctgtttctggataggctcattatcagaagcataattcagcctttcatcaccgcttgagtcatcatggtgaactgaagcgagtacggagtagttgcaagaaggaacttcccgcgataaatccttactgtgcctgaaccattcagcagtgcatttgagccaccgtgacaggatcattggagatataaatctttgtgctcttctaacgacccattagccatcaatgatagaagaaacattcctgcatcagaaaagaaatagacaaaacattttcagatggttcccataaccgaacagtcaaatgtattatttgatttaaatgctgattgcacataatgatttaagtcaagagatgattggaaaaaagac

SEQ ID NO: 178982 - DNA, 278 bp, Zea Mays
gaacaagaagaggaataggtttaggcaacagctgaagacagatgaggcatcacgtacccattttggtgaatcaaatgatgatgagtaagaggatgaactttaggcagttctacattcgtgtgaggagcacgaattcagacagagctagtgcaaggtatgataggggtggtggatctaggtctagccagagggcatcttgagggccacttgataggatgttgggaaggagtaggaaacacgtacctaagcatgttagagactacaatcttggtcaagct

SEQ ID NO: 178983 - DNA, 562 bp, Zea Mays
cacatatttactagtcggctaggagcttcaggttcaaactccgaaagttggcacgccaggtagggggcgatacgtgttgacatcacattcctatcaaggttccggatagcagatcctgaacaccttttgccgcttggcacggtgatttggttcaggagccttgagttcatgcccctcgactacgactatgacatggtactcctcccactcatacaccaaaccaaccgcgactatcgattctgccagccaggaggagcacattcgctcctactttcctggccagaggagggacacccagaccttcgtcgtcgtccctctcactagaagagatggaggcgaaacatttgcaaccgcatcgtgggcagtacttcctgcccagtcgcggggtagacagatggcgcaaactccattgtgagggacatgtttggcatcagcctcgccccaagagcaaagacggctacacacgtagatcccacgataagtccatcagtccctcctcccacgacccgagagaaaggatcagcgccacgctctttccctttcaggatgagcaatgtcgccg

SEQ ID NO: 178984 - DNA, 520 bp, Zea Mays
agcttcttcagctcgtttagcctcttctcgagcgtcgtgagattctttctcagtatttttaatcgcttcatcagccatctcacgacccccttcatccaaacatcggaataaaacctcccgcccagcaaagaggcttcggccaaagggtccttggtgtcatttgctaagaaaatgcattccggttgggctgcggccttaacatgttcataaccgatcttctctaaaattgccacgatccctcgtgcgctagcaaaagcacagaaatccccacgatcgctaagtatttcatcaaaagcttcgacctcttcgtcgatccactggataaccccttcgggatcaccacggataaacttttgctccgaagagtatgctgccacctttgcaaaactatttttagcttcttagcgcatgccaaggttatttcgtagcacctctccttggagtcccggagctcttcgacattcttttgcacccttgatctttccatttcacttatttcctgcttagcctttgcaacttc

SEQ ID NO: 178985 - DNA, 1121 bp, Zea Mays
cccgcggtggacggcgggttgattttaatgaatatcaagggcttcttaacaaaaacaccgcggtgaagggttacgcacaaataagagccgtccgatccaaaccctgcggaccagattatatcgcgcctataaatgaatcggtaagaaatggtggccaccagatccgaaagcgacggttctgattttaaaggggctcgatcaaatctacgccatccaccgtatgatcgacggtcggggccaacactttgccagatttaatcctattcgttcccccctatccaacggctaccagcccatcttcaacctctcgcttcctactctctctcctcgcctgtcagcccagacagaacgccatgccggcgtgcaacagtgcatcaagcccgatcttggaacagagaacgcgacatagtagcggtagggggggtactcaccatagggacagagattccctgcttgcagcggttcgacgttgaagtcccaccgtgaagcactcaccggccacctgggcaccgcccttctcttcccacgacgagtgattgccagcgagggccgagcacactgaacgcagttggggcgaggaccatggcggcacaccttttctctctctctctcacctctcatgtgtttgctcgcgctgcacgatgctcgtttccgcgacgcttgtatttatacggtcttgagcccacgtggttgcgtagcaggcggatgcggcggttgtaacagccaccaagatcaccggagggagggttgttaagctttgcgcagatccagcgaagaagacggagtccgttcgggtgcgattctctgtgatctggtgcgactcgataaagatggtggagctgccatgtgggacccacgttccagcgccagagatagcgggtttggtgggcgcagaggccgattgacaggcgggacccgccaggcggtgagtacgagcatgagctcggttggttgggctgctcagagcaagggagatgggccgcatggggcaatttcggcccaggtgaggtagaattgttttgtttttttgttcatttccatttcccatttctagttttcaaacttgaattcaattatgtgttttaaattctcatccaaaattctagcatgatgaaattatt

SEQ ID NO: 178986 - DNA, 479 bp, Zea Mays
ttctacacgcgggtttcaaacctgttgccaactctaggtgatgtggttaaaattttccttgcatgaatgacggagcgaagacctgtaacttaatggggtgagaatgaggatgaaagttcacccataggatccagtgaggacctaaattaggagtcagtcccttcacttgcatggtctattaaggtcgaacctaacaaatcgcctcaccatgactccatataatgatgcaaaatcctcactcgctaactctaacccccatttccttcactcgaatgtcgttgtcccatatgtcaagcctgatttacgtgtgtatatcgtaatatttatactcaataatttatccccactgctcctcgggatcgggtcctcgacagagatggaaaagaaatacttctcgttatgcattttgggtttggggagaggaagagattcggggatcaggacaaggacgaaggagcactcccgggcctcgatccact

SEQ ID NO: 178987 - DNA, 630 bp, Zea Mays
ctttacttgtgcctggtttgctcttgctgatctatatgtatattctgttggattagcgattggttgtagtattgcaaatatttacttgtcgcttgtttgttctgtattgaggaagaattggtaaatcatatgtgtgtggtagctaaatagatatggtaaccatgacttcctcaagtatctagccatagatcctatgtgacctcacttttctcgtttcatctttaaatatttcagataggacaaggtacatatagcattgtttataaagcacgtgatcttgagaatggaaaaattgtcgctctgaagaaagttcggtttgccaatatggaccagagagtgtccgatttatggcaagggaaatccacatcttacgaaggcttgatcatccaaatgttgtcaaacttgaagattcggtgatgtcacgcatgtcaagaagcttgtatcttgtatttgaatacatggagcacgaccttgcatgacttgcagctacacctggctttaaaattctcagaacctcaggtttaccctcttattttttcctttggcattccatttgtattgaggtttaagttctcacttcaaaagatggtcatttcaggtcaagtgttacatgcaacagctactttctgg

SEQ ID NO: 178988 - DNA, 511 bp, Zea Mays
caagaatcgtgatattatactctgtgtaagtcaaatctccctgaataccgagctcttccattggtaactgttcctcgaagatacggaggcacttcttaagctaagacatatggaaaacattatgctcatccgatagattatcaggtagcttgagttggtaggccatctctacaacttgcctaaaaaaactctaaagggtctaataaagcgaggggacagcttgcccataactttgaatctcctcattccacgaagtggtgacaccttgaggtacacatgatctccttcttcaaattccagtggtcttcttctattatctgtgtagctcttttgcctggtttgagctactctcaaattctctcgaattatacggacttgttcttctgcttcttgaatcagttcaggcccaaagaactgtctctccccagtctgatcccaatatagaggagtcctgcacttcctcccatataaagcttcaaaaggtgacatcttcagactggcctgataacta

SEQ ID NO: 178989 - DNA, 436 bp, Zea Mays
gtagtgatccttttttgtcgtttgttctcaaagtcagagctggaccctctagtgatcatgtgaatctgggtgctgttgttgtggaaagagattggggttttgctgctgggggtaatctgggtgctcgttttgatattgatgctagttgtactgttggggttgataggtatgagcgatgactctttggttgtcggtcggggcgaccctggccattcggtcttttgttgctttagtctcagggcagtctctggttgagtgttctgagtctcatcatggaacagacaatagaatattctctgttgctaaggcccttggcctctgcctttgcccctggcagtgctgccaccgcggacttgttgtgggggatagtcttgacgacgaggagtgttttctcctagttgctgctggtttgcgatgttgtgcacctagagctggg

SEQ ID NO: 178990 - DNA, 778 bp, Zea Mays
cgcgtagcttgtgatgacttaggaatctaatttcaagactgccatccttacacccattgcctttagtttcctcaatcctaggagcaaagcttcgtattctgctatatcatttgtacactgaaaccgtaacttggcagcatatgaagttcttactttggattgtgaaacaataatggctgtagcaccagccccgaaggatccccatgaaccatcacaaaaaactgtctagatagcttcgtctgatggggctatgagtccaattagcaataaaatctcctagtgcttgaatggatgatctgtgaacaaagtcgatggcatactcattgagctctgctacacattttccgattcgtctcgaagcctctctatttcttatgatgtccttgagtggctgagacgatggtacaataatgttgtgggattgaaaataatgtcgaagcttccttgaagccatcaagactacacacatgactttctccatctctgtgttgtttcttttggttgggccaaatactttggacacgaagtatacatgcatttgattttttacaccttcgttcaccacctcttgaaccaaagcagcacttacaatcgactacgaagctgatacataaagcaataaaggagccccaggcgaaggtgagagttgttaactgtatcagataatctttcaactcttcaaaggcttgttgctgagaaggtccccactaaaagacctctactgacttcaaaacttctaagaatggcaaccttcattctgtagatctagaaataaaac

SEQ ID NO: 178991 - DNA, 614 bp, Zea Mays
gagcttatgtgctaccctctgcggatggcagagagctgggagacgtagtgacaggtacggcctcagttgatttgtttgttgcccatgctctttttgactctggcgctagctattcgtttgtttcggagatttttgtgtcgcgtgctggtctttcggtgcagaggatgggtcatccaatcgtggttacttctgctaatggctccatttgtagttgtttagtctgccagggttgttccgtcattcttgctgatgaggtcttttcagctaatctcgtggtgatttccttagggtcgtttgatgttatcttgggtatggattggttaactcagtatcacacagttaaatcctgtttttggaagacaatgtcattgcaggcgccatcgggtagggaggtggtattcttggggagttctccaaagttcactctctccctgttgacccaattactttcggatcatcgatcaaggaagtcgggaattttcttctccatggtggtggagagtgggactgccttgcgggtgcatgacatctgtgtggtgtgtgattatgccgacgtgtttccagcggagcttccagacattccaccggatcgcgatgtgacttttgaaatcaaa

SEQ ID NO: 178992 - DNA, 783 bp, Zea Mays
ataacttggaaggttctgccacatcatgcttgtccaaataattgccaactatattggaaggggaaaaaagatgatgatttctgctctacctgtaaggcctcacggtggaagggtatgcaacttgagtcagttttaataaagaaacaaagaaggaaagctagtccttgcaaagttttgcgatactttcctattaaagataggctaaaaagattgtttatgtgcaaggatatagcacctctcctaaggtggcatgatgaagagcgcataaaggatggtgcattacgtcatccagcagatgcacctgtatggaccaagttcgatgaaaagttcgcaatttttgcatcagactctcgtaatattcgttttgggttggctacagatgggtttaatccatttgggatgttgagcagtactcatagttgttggccagtagttttaacagtatataatctacctccgtggttatgcatgaaagatcataatcttatgttgtccttaatgattcctagtcctaaaagtcctggagacaaaattcatgtgttcttggaaccactattggaggacctgaaagatatatttcagaatggcatgtccacatatgacgcatcgagagatgaactatttaatttgcgaggggctgttttaatgacaacaagtgacttgccaggtttaggaatgctctcatcacatatggttcatggcaaatttgcctgcccgccatgtggtgacaatgcatggatgaaacgtctaaagcacgatcgtaagtcatcttttatgggacac

SEQ ID NO: 178993 - DNA, 589 bp, Zea Mays
aaaagatgaggttacaaactcgcgagccaaagaagaggatacgaccaagagaaagaaggtatgagacagaagaggggcgattttaaagggcaggtatgagacaaacatcaatgtaggatatagaggtgtcaagggtgcatatgataataattaaaagcataacaaaggatatagttaaggaaacactcgtgaaacgacaaagtggagaaaacaatcaagggtaagataggtaaggttccaacataagagttgaagtaaagattcattactgagtggagttacaaggagacaacgagatcaccaaggatatgcaaagtagaatgaccgctcatggatcattaagaaacaagggtggtcaagggcatgttaactgaaatgtctcaaacagatattgggatataaaggtaagcatatataaaaataagagtatgcaagattccaatggtacgagcataccaagaccatgaaagtacaaattgccaaaaagatagtgacttatcaatagaataggaaagggtctcaaaagacagtaagatcatggacatataaactgaaatgtttaaataggcagtagaggtacaagggtaag

SEQ ID NO: 178994 - DNA, 513 bp, Zea Mays
ttgcgtctatattacatggctccgcctcattaaaaacctcaccccacgggaggaaaagagtgcgggccggaataaagctgttttgcgaattacaagggcgagctggccctgatgagtcaaacaaaaaatttgcggagattatcaatgttccaagaatgctctaagtcttcgccggatggcgttgtgagcctgtacgcgctgggggacgccttcgtcttgatgatgaaagggccctcccactttggctctagcttgccccgggcctctgtccgagctgtccggacgagtacgaggtctccttcgctgaattccctcgggatgactgtgtggtcgcgccatgcttttgtttgagcttggtatttgtttagagcctatagggcaaagacgcggtctccgtcgatgaggtccttcgacgtaggctcgtctacgtcggggacggctgacgtgactgtccgtggtgacccatgttttatttcttgtggggtcatggcctccgatccatatagaaggcgg

SEQ ID NO: 178995 - DNA, 321 bp, Zea Mays
cgaagagagcgaggacggggtgaatttataggcgcggtgaagcagagccatggccacggtgataaccattgccggccatagctggcgattaacggcgacgtcaagcgctaccctttccttacggcttgccacgtcccagctgcgacagtaacacgaccgagtcgatgcggcgtggaggaacgaaggtgagcggcgccgatgatcggacacggccgggaggagggatggccgcgtggcagccggagttagtgccctccaccgcggcggtcttacccggagcaaaaggatcttcgctcggagatgctcgccgcccgatcatct

SEQ ID NO: 178996 - DNA, 521 bp, Zea Mays
gactttcttggagggacgccttctcctttttaagttccttgacctgttgctctaagctttccacccaggagtttaggtgggtgcagtgggagaaaaggtcatcatagtggttatcaagtgtgtggagatatccggtcatgtagactatggtggggtcatcttcagtaggatctcttcctgacagggcttggagtcttttcctctaggtaggagtgtttttgtagctaggtggaaagtaacgaaggggtgtctcaaagacttccctgctgtagttttggcatagctgtcagagggcttttcgggcaacattttggcaagtgtctaggaagcggtgtccagtgaaggtgacttggaaaggagggtggtttgggtagtttcggctttctcccaggtagactgccatagagcatctttcagttccattctcgcggtattctttccagatatactccgacttcttgcggatccccatgcgaagcgcgcaactccgcaaaaggtgagggaatccttccacctctgag

SEQ ID NO: 178997 - DNA, 644 bp, Zea Mays
actccaagctggaccgaatcccccacagaccaggaagtaactgaagcaggggctttgctagctgaagttggattgctgaaagaaaggggtttgactgcagaagctgtggtcgctgattttgttttcaagaacattcaaccgctgaaagacagagcatatccagcctatctgtatcgaggctttgctgattcaactcgggtaaccaacagaagaattcctgccgtggacttggtgggccggctcgagatgatactcagaggcaaggtgtcaaacgtcggcgctcctgttgcatattcggcttggaatctacctccttccaaggcctttaccagttttgtgtcaaatcctcctgctggtgatagcagtttgggccttagagtgtgaccctctcccaaagaggttagtgctttggttgcctcacttggagaaattcctgacgacgagaggcaggttcattttgagctgcctttaaatccaagtgatgcagagataagtgtcatgctggatatgttggctgaagattattctgatgcagtccctgcagaaacactggcggtagcgcccatcccagaggctagcgaagctttagatattcagaagtctgacaatgttcatctgaagcattctcaccgagcccatcagcc

SEQ ID NO: 178998 - DNA, 562 bp, Zea Mays
ccacaaaatcagcgcgggaggccactaatccatggctattcctcgtcggagtacgggcgcagtcgcgaatccgcctcgcgccatgaaccgtgcggtcgtcgccataatcagaggtatgaatgtcgcttacgcattcgcctgggtcgcctctaggggtaggacagtttcgggtcaggtaattgtcaggggaagtgcgcattgaccgggtgccggtgaacttccgccacagggcgtggcggcgccgccgtcctggccagtcatgtggagaagatgtcggagcaccgtccgatcatgcaccagtggctgcgattagaagcttaaacaccggttcgggagattgaaatcgggctattgatcgacaatccaagggtttaatcaatctcgctgcgtggcacgttctctagcgtggatccttgatccaacggcttctgtggcgtaccgattcgatgtagaagaaacctaatccgagcgcttgattggtaatctgatggctcgcgattgtccataccccttcgccatggctatttttctaaagagccccttcacttttatacaatcaacc

SEQ ID NO: 178999 - DNA, 352 bp, Zea Mays
acaagcagatattgaggaggctggtactgacgatgattaaaatatcgcagtaccgagcaagcctagtcacctggagttcggaaagtcgactatctcgaaggctgatttcccaaagatggtgaaatcgggctgcttcagcgaagatgagaagaccgggttggggcgtgtgcaatcatcctcgccggagggatggagattgtcaaagaggccctatgtggtagcgacggagcggacgagtgtggatgtggagaggagcacgagggagtgtgtcggtagtggcacatctaggggcacgatcagggccagggcagccgccacgtagacgttgacgtccatcgccgtgcggatggcg

SEQ ID NO: 179000 - DNA, 328 bp, Zea Mays
ctacgactcagggaacagtgtataggatggcgggttgtttttgataaaactcagagtctgttctgcaaaatgcgcatggcgaaagggtacagggtgatataggccgtccgattagaaatccaaggtccagatcagatccagacataagtgaaccggtacgccacccaagccgttggatcagagatccacggtttacattttaaatacacgcggtcgccctggatccgtccgagttgagatcgacggcccgaacgaagggggtatccccgatctaatcagaaccgttcgtcaatagatcaatggcccaggcgctaacccagctacacac

SEQ ID NO: 179001 - DNA, 884 bp, Zea Mays
caacccatattattgtatcggaattttactactcacagtcacagtagaagagaatttatagcattaaaataatgcttgagtttgcgtaaaaacctagttgctactagccatgctttctcaccacctcatttatttccaagtccatgagacaaatttgtatccacagtaaggtaccatgaagtggaaaataattcaacacttctttccggtgagcaaggctatctctgcaacattgtatcactcaacaagatccagtttgagcatactcgtgctctgctatggccatagtcttttggatcacttggagcgcatatacaattgatgagatgtatgtgtcaacacttgtagcttttaaataacacaattctccagttgacatgaagtcatttcttatgcacccttatgatttctcgtgaaatcccaaaacgagaataaagggcttacgataacctagcctcatcagtgcgcactgagctaggttgtgaatgtcttccattcacaggataatccatatcctctaggtgtccaccaacgctaagttggttaccaacgaatagttggtctgcatttactatctcgaaaggtctagccctctgctgcttgcaagcatcttaatcccaatttgtgaccatacttctccccctcttatttacaactacgttgcaatagggagttaagtggttttccatgtaaccactctttctggcacttccacataggattaatttgagtgacacctcatagtaatgaacatggcagtcaatttgcaacttcttgcaaatcattcgaacccaaaggtttagttttagtacgtgatcctgagcctgaatgcttactgcattcattataatttcatggcattgtttttggtatttgaaatctcc

SEQ ID NO: 179002 - DNA, 586 bp, Zea Mays
gtaattcttcgccggagcggagtccgtcaccgtgctcgcgtcattccatggacgggcgtcacctcacctcggtcggccacaagtgagtccccgttgtgttcgtcttcccttcctccctgttatgctctagcgaatttgggtatggcgctcgggaggaccggatttcgcgagctccggtgaacccgccaccgtgcggatgctacaccactgcgctgtcggctctggcgatggggtaggttggccgccgttggtcctagttcaacgtacgagatttggtccaacgtaactattcggtggagtgaacggtggaccgatgatctatgatcgtacggtcgggcgccttgagcgggatttagaagttagtaacagttagatcatcatcttggggctctggttgcagaccgataagttgcagcgatgctctaatcagagccgttcatttgtaatcataaggatctcggcgttgggtactccttcgcagggacattttgcttaagaaaccccgcactttacatgaataaacccatcgttctgtgcatagtgcgctgagtcttaggaactcttcggtattaacccctatctttcc

SEQ ID NO: 179003 - DNA, 358 bp, Zea Mays
aaaagatctaactcaaccagtagagtcatgatggattgcataatctgtctttccccacctaacatcaaacaaacttttgacctacatcatatagtccatctcacccataactacttcgaccatatgccccaactctgttgatatatagtaacatcaaattaatgagaccaaggctggaaaaggaaaagatcaacctcgtcaaggaagaagagaagtcgaactcaaccttcagatgcattaccacccaacacggagttcttcctcaccataaactttcttacccctggctattcttgccctaacctatccatcttttatcccacataataagtatttggatacctatgctctcataatc

SEQ ID NO: 179004 - DNA, 493 bp, Zea Mays
gtgtttttggcatgggggctgcggattgatatcaccggccatggcgtcgccgctgtagctcaacggcgcctttaatggccaccgtcagcggtagaaggcaggtctcctgtcgttagatctaggaggagcggtttcgattagaagtgtaccattttgcctgggttaaatcactaccgtaggatctctgatgaacgcatgagaatagatctaggtatttttaaatccaggtcgtttattcagaatcgggcagttggggttgcgatggggaatattggttgggtgggcgatccgcagcccttggattgtgatcccgtggccctggtcatgcacatgtgttcagcggagacacttttatcaaagagtccatgtgtttctatgaataaagtcgtcgtccacccatgcggtaagaagattacgcagtggcccctggaaattgcaaataagtccctagagctcgattttaattataaaatgacctaaaactcatttaatc

SEQ ID NO: 179005 - DNA, 552 bp, Zea Mays
gtggtaaggaaaggcactaaaagctttagaatcatggctaagctaagtattgatcataatgagagagagataccctagctttcatacattctcacccatgaaaaagattctaaaaccctaatttccctcttaagcaattaaaccctaaacattggataacagggaaaagattatgcaaatggccaaataatgaaatgaaacctttaccaaagatgaagaatattagtaaatctacaaaatgtaataaggaaaatattacaaaaaggccccacaaaaaccccaaatcaattcactaagtggagagcacactagagccatccatttttctctaagtcataaaatcaaccctagcctaaaagattagatgtgttcaccctttttctggcaccaaaaccacttggttcaaataacaaaaagtggccaaactactcaaggcacacccctgaaaaatttgaaaccaaaccagggtcatttgacacagtttgacatccattttgttgtgggtgaacagtgcagacagacaagacttggcgccaccatatcttctaagtt

SEQ ID NO: 179006 - DNA, 743 bp, Zea Mays
ccggagttaaccgttgtgcaccgtgcacttttgtatcgggtgtggggcacggattcagtgcatcaggagtcaattccttgccggtgtcgaggagggacttcgttcgcgcatggccgagcttgccttcgcccagggatcctaggtatgaactctcgttcgattaacgatcatctagaagccatgtagcatctatcggccaagtaattgacgagattaggcgccggccaccactccggccgcttggggaaagtgccggggccgcccgccatcatggacattgcgccctgtttcattgcacgcgaattagtatagaagggggtgttcgttgtcgtcctttcggcatgaatcatagtgtgggaggaagaattaggggatgtaggtgctggcccgcgatccacggccatggcgccaccgtgcgccagcgcggtcccgctgctcgtattcgcgggtgtgctagggcatggctgccgttggctggggaaggagcgcctaggattagatctggcatgtgtttgccctcgtccgtcgatcatgcagcggacgactgtgattagaccataacgtaagccttcgcgcgttttgatctcaatcgcaagtgtgtgatcggacgactcaagatggccgatacctcttcacccacctattatacatatgggcccttatggaacctaggaataaacctgcagtccaggcgactgaggatctgagtctggtggactttagaaagttgaaccttagacttt

SEQ ID NO: 179007 - DNA, 489 bp, Zea Mays
tttctatctttaacgtacataccattctatatttaacgcaagttttttattattattattttcccggccggtcccccctcccctcatcacctgtgcttccgtgaaacaacgcttcaaattcaacagtgcctaaattaagtgacacaaccctaaactttcatatgactactatatagcatgtgttacacacgatctcgaggagatgattgatgatggcggtggcacaagtgagcagagggggaagggaagggaagggatgagggatgattcaaataaagtagttcatggggaagggagatgagttatccaactatctggaccgttgattttgatagtgtgttaagtttgagtacattatgtttggtgaatttagtgggataatgagtatggggtgatttggttgtgtgacttttgcaaagtttaaactgatggattatatagtggtaagagcataactcttttctattatataaatatatgtaactttct

SEQ ID NO: 179008 - DNA, 356 bp, Zea Mays
gtgactcccgctcctcgaaagaacaaacgttgctaacggcgtcgggaagtgagtaccaaagaagtctccaaggtagttcttttgctagagatcccccgtagttcttggcaagagcgagtccccactccgattgtaacccttaacaatcgtcaataaagtgcaatttcgagacctttacctgagtcaggcgtatgaaataagcgacaagccctggcccaaggacagactgactctcctctttttctccagtagctaactttataagcaacaagatgaacacaaggatcatgggtcagccaacgaaggaattagcagaacaataggtagaaatcttcatcgataaaccaactaagtta

SEQ ID NO: 179009 - DNA, 699 bp, Zea Mays
caaaatgtaccacgagtctggtttgtgccattcacaggatccaaactaatgttcagccacgctgagacaaccaaagcatcctcctgctggctgaaattagcagaccttttctgatttggtctagacgaagtcacaactacagatggatgctgctcagaaacaatatcgtagtcatccaaagacatgttattgttaccctcgctcatcaggttactaaaatatcctccttgcattgtaagtacctcctatataaaaaaactataaatcagaggtatttccaacatgacattttgatacggaaaggatgtgtcaccagccaatggctacagaaattgtttcatagaaattcagattaattgaaaacttggtctatacttcctttctcagcagcacatactccaaagtggcggcacaaactagcaaaatcagtacgatctacgaaattaatacatcctaaaatgtaaatcatcgtggactaccctttcttagcaggcggtggcgcaagaacacgatgtgcaaccatttgtgaattgaaataaaaaagctcacgaattaaatgtcttacctccaattcaagaccggttgcagatggattttgagtagccatcgcagaatcatcttgcgtcatggattccccaccaacaggatccatcggaagagcagtttgcatcgacctcaacttgattgaagaccgccgcc

SEQ ID NO: 179010 - DNA, 639 bp, Zea Mays
ctggcgtaatgttgcgcttcagcaatttgttctttcgataatttttcccctgaagcatgacgcactataaattctaattcctcagtagatgctccaagggaagggggttcagattctttggtagccctatctttttctaacagtaatggtgcattcgtggcatttgaaggtcttgtttcaggagcctgtccaacagccttcaaaagtcttgcttcgacgggagccgagggcctagcctcagctgcaacctacgtcatgccagcttcgacagatttctttgtattctcgccttccacgctaggtgcttcagcagaagcaggagttaacgcctttgtggattccataacaatgtctaatacgctagccattcttcttctctttggagttactgaagcaatttttgctatctttggtacctctgtcccttgaaacggactagaaacctttagttgttccgctgctatctttgattttggctcttcggtcggttccatcctagcttcagcgggagcgagatgacttgactcaagagcagaagacctttcagtaggcctcggctcttccgctgtttcatcgcgtttggggcgatgtgtcaaaaccttaacctttttttggctacggtgtattagagatcgccga

SEQ ID NO: 179011 - DNA, 786 bp, Zea Mays
cgacgcccacccacgtgccccagctccctcttagagccccgccagcgcctgcactcactcccccgcctcatttcgcactgctccgccctctctcgcgctctgctcatgccgtgagacaccgccggagacccgggcccgtttccctggccatctagcttgccggagaccgcgccaagccaccccgagctccgccccgaggtgagacacctgtgcccgtgctcagttttcccaatttcgatatgtgctcggccaattttggcatcaccggtgctcggccgtggcggtccgccatgcccgcacggtggccggccagtttagcccggtccagtgccccggtgtaggtccctgtgtcacccctgcctctcctgaagccttcccaggccttagcgtgcctcaagccccctccccgtggccgaaatccctcaccggagttcctccgacctgcccgaggccttctccccgccgttctaccctctctgacctcggattcgtggcctttcccccccactgagttcgtcgtgtcgttctccccctctctgacccactccagcgaccccggagccaccctagctcgtgcctgcctcaactccgccaacctcaacgccgtggagaggagcagcgccgctcgcagtcgttcgtccctccctggtctgatctcccccatctgatcttgatcgcatggcccatcgcggatactgcttcgcacacacgcgccctgcgcctctggcccacttgtctgcgcccgtgtcccctggcgctaggcccgctcggttagtgcgccctccc

SEQ ID NO: 179012 - DNA, 442 bp, Zea Mays
gaggccgaatggtccggtctttcacaaaacagttcggtctttaaggccgaacatctaccacagcatagaaacagtatcacggaggatccagcccccgagaccagagagtccgccataacacaaagatcgtctgattcctctgtgggggacatgatagaggaattcagagatctcgataaactaggacaggggtttacatcggtcgatcctttagaggagatcaatataggagatggtaaaactccaaggccgacttttataaacaagactctggagaccgattctagaagtgaaatgatcggtctattgaaggaatattcggattgctttgcttggaattacactgagatgccgggattaagccgagagatcgtagagcatcggctgcccattaagtccggtttcagacctttcaagcagagagctagaacatttcatccag

SEQ ID NO: 179013 - DNA, 656 bp, Zea Mays
gttgggctgaaaccgacccaacctggcccgtgccaagcaaagtcgcgcgcgcccgcgcctgtgctatcggttttacacaaaagacctcggcggtttgaaaatctagtaaggaacccgcacactatttgtttgtctcactaacacttgcaaatacacccttgcgctttcatctcttcacaacccgaggtccacgacggcgagcggcgccagaccgaactccggcgaacctgtactagctaagctacgcaacggctagccctcccctttgctagacactgaattcaacccttcgtcactaattcccctcacttaattgctgaattcgagttctacatcatccagtccatggtgacagcgagaggaatggaccaactgaggtgttcccgatgattcaatggattctagctcaattggatgggtcagagagtattaggagcatccaaggatactaaaacgagggcatgaacggatccgagacacgttggccacagcggggtctttttcatggtggcatagttttgaaggtacagggcttcaaagttgaccccattcactgaaattcagacttagtcttataagaggaattgaatggctttttgcaaataagcccaattcacaccttttggcttgtaaatcttcaaacatgtgaaccattt

SEQ ID NO: 179014 - DNA, 553 bp, Zea Mays
ggttacaaatgagggttcagtttggtgccaaattcagttcagattctgaaacgtattcagttttgctgaatttttagaaaccatgtattcctttcagtgttggacccttctaactcttaattcttggtgaatgaccattacatcaaacttggagatctattatggaggaatacttcttatgatgaaggatctccctgttcttattttagattagaagaaaactttgctccaagtcgagctgttgggctggtgatggactgaatattgttcagctgactgaaaccggttcaattttggtgagaaaaagatctccatgccactgatgtttatcctgtacacgtgctcagttctctaaatttttctcctttgttccactcgttcttatccaatatctagtacacgtactccctggaagtctctccgtgggttgtctcatctccagaaatccacgtgcagccctcagcagtgagcactagcttctccacgtcatatatcccctcaccccatcgcttaggcagcagcagccgagctcccttctcgtagtgcccctcgc

SEQ ID NO: 179015 - DNA, 582 bp, Zea Mays
ggagacagcaagacatatggaaaaagctcgcaaggaacaacttccagaccttaggacagatgaacaaggagtcctttggttcaagaaccgtctgtgtgtaccaaaaggagaggcacgggaagtcttgctcaatgaagctcataactcagcctacttcatccacccaggaaccaccaagatgtacctagacctcaaaaccagatactggtggagagggatgaagaaagagatagcacagtatgtggcccggtgtgacacttgccaacgaacaaaagccgagcactagaaacctgcaggcctactgcaacccctcccagtgcccgaatggaagtgggaggaaataggcatggattttgtaaccggactaccccggacgcaaaaagggaatgactctatctgggtaataatagaccgtcttaccaaggtagcccacttcatcccagtgaaaaccacttttggaggatccacccttgcccggatatatcttaaagagatagtcagaccccatggtatccctcagaagatagtgacagatagagggacacagttcacttcaaaattctagaagagccttcagcaagc

SEQ ID NO: 179016 - DNA, 732 bp, Zea Mays
gtgaggcagggcttcgatccttgcttggagaagcttcacggctcctaggggaaactatccaagggttcggttgaggctgagggtctctagaaatggctggccctggtggccggcgctcaggtggctcgggcgggtggggcagagctcgccggagctaaggatggtgtctggccagcgaaggtgagtgcggagtgaggtaaggtgcgtccaggggtggtcttaaagacgtgggcaagcacgaccgaggagcggagctctgacatgcgctcggggtgtgcgagggcgagcgctagtgcgcactctggcgcctgggcacgacgtcgagcacgaggcagcgcagagagaggtcaagttcaagcgcggattagctccaaatcttcacgattgtggccatgatcccattgagagatctcttcccctgacattcctttgtcatttgtgtgtggaggcttatgggttttgctgattggatcaaaagatatggagggatgaagtttggtttgtctcactactgaactccgagaggaaatcccagatttgacgtgtctagggcacgaatctcgatgccaccttcacacacactgcagaggggttagtttagaacaattttgtcaatggggacttaaggatttgggctagggattaaggtgaacgtgctcaagttctaggtgaaggctgaaattcagcaatatgaatttcagatttttcctagggagcttccacttggatggc

SEQ ID NO: 179017 - DNA, 349 bp, Zea Mays
ccggtttgggtgggcaagatctaatcctagcccttgatttccaatccagcggcctcgattcactgataccccttccttggcttatttgcttaagagcccctggttaatgcctgaactaacccgcggtccagtccaggattcgctgtgtcttgggaagttttgcaccgagacccctagctttctctgtaatagtgcgcccactccagagacccaggaaactcaataattaaatgtagaaattgatttttatgtataaataattgctagaaacttgatttaatcatagaaaatccattctagctccaaattagtatattccagttcctaaaattttgtaataatgttgttt

SEQ ID NO: 179018 - DNA, 1074 bp, Zea Mays
aataaatatatcattttaggctagtagttttatttgaacacttggttcctgtgtgaaacctataaacaattttgacttcaaattatgaattgagtaggaatacgaaattagaagataggaatgataaaagaaaaaaaataaaaacctagttgggcctgctacctagctttcagcccacttgcagcatatcccctgcgagcggcccagtccctctacttccctgtgggcccagccacctattccgcacagcctgcgggctcactactattgactccctagctgccgtattttgtgcactgacggatgggcccgcgaatcagccgtctcacgcatgcgcctaccctgacgtggtgctgactggtggggttgtgctatcagcaggtcactacgcgcccaggtcggggtcttctctaagttgccgaccaaatcctccccttctctatgcggctgggcagggaatcctccttgctcgccctcattcctactccctccgcttccccaaaggcgcctcagcgcccagccatggcgccccggtggctagccatgccctagcccactcgccacccaagcccctccccgtcaagctccggcaggatcatcttctcctgtatacaatagcggtgcgaatcacacggccgccgagaccaatagggcggagctcgcgctgggatttccggggaaaggtcgcgcgcgtaatccgctgctcttggctcgcctgtgcccgccgcctgaaaactcgtcgggcacgaatccattgcgaagaacgagttgctgttatggttgttaggatttgagcgaatctatagcgattcggttgtgcggtctagcacgtttttgccgcctctacctatatagtctttccgtggcccttcccctgtagctcgcccaaccaaaccaccttgatccaaaccatcatcatcgagcgcagggggagatcgaacgggaaagcgaccgagaggagagagggcagggggatcgccgccatggaatcctgtttgcaaagctatccaggccaaaggaactggccatggaggttcacgggttcccttgggctctggtcagggcctcaccaag

SEQ ID NO: 179019 - DNA, 280 bp, Zea Mays
ccacttaggctctagcttgccctaggactctgtccgagctgtcaggatgagtacgaggtctccttcgctaaattccctcgggatgactgtgtggtcgcgccatgcttttgtttgggcttggtatttgtttagagcctgtagggcgaagacgtggtatccgtcgatgaggtgcttcgaagtaggctcatctacgtcggggacgactgacgtgactgtccgtggtgacccatgttttatttcttgcggggtcatggcctccgatccatacagaagacggaaa

SEQ ID NO: 179020 - DNA, 943 bp, Zea Mays
cgaccataagaagaccagagccggatccttatcctcctctttgcttcatccacgcgtgaacaactctaaccaaaccgagctccgccttagccgtagggaccgagcgaacgaaatccgccgccgacgaacgcgtgaatcgcgggagctcaggcatccgagaggtattccagagctgcgccggggttcctgggtgcttcgtcagcccgcaattccactgtcggtgcctcagggcgcgtgcaattgctcgctggtgttggtgggcagtggcggagcgccgtgcgtcgtggacatccaggctatctccgcgttatcaggtacggaaccgactttcgcattcacctaggtgcgtagatcatatttgtgggcgcaatcggccggtggtgaccggagaccgtgtgaatccctcgccggagttggcaatccgcgccgcgccgtggttagcctctgcggcccctccattcttgataagtgacccacgagtactttcacttttcactgggcatcgcgtagggctagaatcgtctggtttagaccggtaggatgcatgatcgtcgtggccggccatggcgccgtcgtgttgcctggcagcaccgccggtcggagtctggtgaaggggagcggtatcgcggtggctgttgatcaagggatgaatggcacagattagatctcgtataccctttcggctaggaaagagctgggccgtagatctgttgatgagtgctcgggatcgtgtgtcgacgtggctgcttctgggagcgtcggatcaggatccgacgattgcgggggtgatatcaagtcataaaaccacggatctaatcctggcggctgaattccgatcggggggcttcgattggaagataccccttcgcgggtcaactttactaaagagaccctatagttttaagtattcaacccgccgtcctctccactgtttcctgagtct

SEQ ID NO: 179021 - DNA, 1428 bp, Zea Mays
catcgttgttggaaacgaatctgccccactcgtcacctcagtaggtgatgcggtccttccccgccctttccgttaccaacgtccttgtcgcccccaacatcattcaaaatcttctttccgtccgtcagttcactactgacaactcttgttctatagagtttgacccgtttggtctgtctgtgaaggatcttgccaccaggacccttctcgctcggtgtgacagccctggtcccctctacacgcttcgcctgcctgcttcccctacatcgacctctgcccccgcctattcttgtagcggccgcctcctctgtgacttggcatcgtcatctcggtcaccccgggtgtgatgtgatgtccaagctctccagtagtacctctgtttctggttgtaggggtcttttgagcacctctgtcatgcttgtcactttgtcagttaggtcgccatgttaggctcccattccccacctcctcttctagggcagcaggcattttttatctgatacactgtgatgtatggacatcccctgtaatcagcatttctggctataagtactatttactcattctcgatgacttctcgcactatttgtggacttttcctttacgtcagaagtcggacacttatcccaccctgtctcacttcttcgcttgggtatccactcagttcgatcgcaccatccggagtgtccagtgtgacaacgggcgcaagttctataacaatgcgtcccgtgactttttcctctctcgcggcttccacctctgtgtgttgtgcccctacacgtctcctcagaacggcagggctgagcgcatgattcgcacaacgaacgatgtcatgcgctctgctctttcaggcttcccttcctactcactactaggctgaggccctcaccactgccacctacctcctcaatcgtctgcccacaaagacggttgcccaccccactccttacttcgctcttttcggcatccacccctcctatgatcatcttcgtgtcttcgggtgcgcttgctaccctaatctcgcctccactgctcctcataaattagcgccccgctccactcgttgtgtcttcctcagatgctcccccgaccataaggggtaccggtgtctcgacctcacctcacacagagtcctcatttctcgtcacgtcatttttgaggagttggattttcccttttccacttcttccactgcctctctcaccgagctctatgtgttcctcgatctcgaccttgtgtctcctacggtcgccccccttccttgcaggtcagtccaccgcgccaccccgcgcggccccgcctgcgacgccctcccccgcacagcctcgtgcggcctcggcgtcccctgcgtcgcctcgtgcgaccccaccggcgccaccctcccccgcacagccacgtgcggcctcggcgtcccctccgtcgccacgt

SEQ ID NO: 179022 - DNA, 762 bp, Zea Mays
ttgcggtcgctccagtcaccgggctcgcccaatcccgccacggacacccgactggggtaatagcgaaacaccaccgcccagcgccaagtccttaacggagtcaggtccgggaatcaacgacgacgacggacaacacgacactagtctccccgatgcagctggatttgtgcgcaacgagagaggggggagattagggttcgacgcccggtcttatacccacctaggaattggtcaaggcgccagcttcggtccggaacgcggcggattcgtcggaggtcgtttcagcgcgaagggagaagatctacagtgtcctgacaggtgggggcaggttgtcagcgcgcgtaggtgtgagggagaggctatgtcatgggtcccactcgtcggcgcatcagctggccgcactgggctgcgcgcgctgagtgttggttaggtgggtcgaatgcgcgcagagggagaagtctggctaggacgaaatgagtgtcgcagcccatttaggttagaacccttttccattttccattttgttttattttgaattaccttctctaaattcaaacttgctatttgaattcaaaattggtttgcagactgcacaggtcatgagcacagaaaaataaaagaaaataggatttctatttgaataggttatatttatattttcatttctatttgtattttatactctttccccgttttcatttccaaaacctaattttcaatttaggttttaatttaatttccttatcattatattttgattaa

SEQ ID NO: 179023 - DNA, 690 bp, Zea Mays
ggcgaaggtgagcacggggcgaggtgatgcgcgcccggggaggctttataggcgcgggcgagcacggccgagggcggggctctgacaagcgctcgaggcgtgcgcgggcaaacgccagtgcgcgctctggcgcctggcacgacgttgagcacgaggcagcgcagagagaggtcaagttgaagcgcagattggctccaaatctttgagattatggccatgatcccgttgagagatctcttcctctgacattcctttgttgtttgtgtgtggaggcttgcaggttttgctgactggatcaagagatagagaggggataaatcgggtttgtctcactgtcgcgcaaatagagaagatcgagggtttgacgtgtccaaggcacgcgtcccaataccatcttctgatatgaggtagaggggttagttaggcaaaattttgtcaatggggtcattaggatttgagcaagggatcaaagtgaacacgctcggtctttggctcaagggctgaaatttagaattctgaatttcagaaatccctattgaaccctcacttgagaagcttgtttggagtttttatcaaactattttggccaagcttccataatctctattgtagtttatttagtatatttcaatgtttatatttggcctaagccatgattttatatttttcatggtcttttaccccttttct

SEQ ID NO: 179024 - DNA, 491 bp, Zea Mays
aattgtatatcgtctttgactttttcatgtgcatagtttttttaccgtgcacgtaaatatagtgtatgcctccctctctttggtgcgcgcgtgcctgaggagagccagagtagtgatcatagcatgcagtgttgataggtaggtcggcagtaggtggcataggcggcggccgctgcaatgtcgatggtcggagcggtgcaggccagcccgcccatccaacgatccagtgctcgaccgagatgtagcagcaagatatggttgggtatagctagagcgcagttggccagccagaacaatgctaggtgagagagggaagtggtggtgataggaatgtgagaggagagggattgttatctgttaggtcttatgaatatggaggaccggccggcagcaaacaaaaaagtgaacactcatcatagctgctgttgggcagggattcttttccatctcgcgtcctctggttgagagatatatatgtctactgctctcgc

SEQ ID NO: 179025 - DNA, 575 bp, Zea Mays
atgagatagccgttttagagtggttcttgatagttccttgtgtgagtgtattggagaagtgtgtgttgttgcattcttgtgcttttgtgtattgagttgcaatctctcatccttacatggggtcaaatcgtcatgtctcttcgtgtgtttgcttatgttgtgatttgttcttccctctccctacaagttcgtttgttttgatctttgttctaaatcacttgtgttgctccccaagttaattccacattcataaaaccaacaagtgcaagagaactcatctctcttactcaaattatatttcctcctgctctaaccactaatttggggtctagttttgttttaagtgtttatttttcaggtgtcgcctatttacccactccagaagactatcacatagtaagtttgttgtgaagcgatgttgtttgtacaatagacatcacgatggcaatgtcttcacgcaaacgagcgacctcaacatcttgcactgaactatgacaagaactactcgatgaactccatgacctggacactgtgtgtttctcttctcacatctcttgagtcgatcacactagtaa

SEQ ID NO: 179026 - DNA, 412 bp, Zea Mays
cgcctggcatggagtggagatcggagcatgaacacagagagagatcggggaggtagaatgggattcgccgccaccatcaagctcgggtgttgggatccaccgtagttggtcggggtgtctctgcgcggtccctggagtgcatgcgtggatcaattgggcgaaatcgaagctctgcgcaccggtaatcgctcgccagtgggagaactccgtcgtgtgccgccgctgctgcggaccggaagtttcgcgccaccaattcgggtatggtcccctcccacacgttcgcccccgtctctgttgtgatttgcaacaaaccttagacgatttagtgtgatgggtcaccgtaggttgctcaccggaatcctaatcctgctcgggtccgcccaattgcgcggtcggctcctacctgtgcccc

SEQ ID NO: 179027 - DNA, 621 bp, Zea Mays
caagcgtgcgtgggtgctaaaacaagggtgagaagggaaagaacggacctggacacggcggtccacggcgtggcattcacggtggcacggaaacccaatttgggggaagagcaaaattgggaggctacggtggacgatcagaggcgagagttggtgcactgggtgcataataacctagcggagctcactggggcatcaatttatagaatccatcagcggtggcgtccaatttggagatggcgtgctggcgtccggagagaggggaagtccactggtgtgagttaccctggcattcactggagcgtcgcctcggaggacagacaagctatctattgcgacctgcgacaacatggtcagtcctgattcagtgtcaaagtcgactgacaagccaatttcatacctatttttctcctatttccatgtagcactagggcttaatcacttaatcaaatttgtacctctaacatagctctacaagtttgttgtattgacttagggcaaaatcttcctgaattgtggaatacacagctccaaagttgactacaacacactgaaattaagacttaaccactttaggagttcttgggtctttttgcaaataagtccaatttcctccacact

SEQ ID NO: 179028 - DNA, 397 bp, Zea Mays
gttaatctggtgatatgggttagacactgcttcaacaaacataacctaacctaaattaatgtcttataccaactcgtccgtaaacaataatttaaactacatcacaggctgcctagtccatttgttccaaaagcaaaatacaactctgttcaaacctacctacctcgtgtaccccgactatcctaactatatgtccttgactcggatggcaactccaagaagaaaggccaaagaagatcaacctcgttagggaaggagagaagtcaaactcaaccttcagatgcattaccacccagcacggagttcttcctcaccacaaactttttcacctctagctattcatgccctaacctacccatcttttatcctgcataataagtagctgggtacatatgct

SEQ ID NO: 179029 - DNA, 453 bp, Zea Mays
cgagaatgcttgaccaagtgacgtagaggtggtacacgtgaggaattggaaaatggcgcagagatttacccagtccacgttcgccggtgagcggaagaagtccgacgagggtgattcgggggtcttcagcgaggttctgctgggtttgtgggcttggggagcttcacgggtctctcgcgaagctaaccgagctgctatcgtggactaggaatggttggggtgggctggccacggtggctgaagctcgggtggcttggcggacggtggtgcttgctctctacggcgatcgccgatgttctccggcttggacgagagtgagggcgtgcgaggggatacggctaaggccgtgggggcacttataggtgagggcgaggcacaggcgtgcgggggcgcacgctaccgcggccagtccgcgctcggctggcctgacacggtgttgagcacttggctctt

SEQ ID NO: 179030 - DNA, 330 bp, Zea Mays
caacgatggatccgccaatggtcagtcgaatcgatgggtaatcgttgaattgctgagtctgatttggtgcgcattatctctggctaggggtttgcagtggctgtttctgggtcgatggattggtcggttttggatttttggtcactcctgtgccatcacttggggagctaatctttggggagggttttaggtctaaattaaccataataaaaaattcaatccatcagccaagtcgattgatattgatacactatgatacagggatgtttagaagattattaccagctgattcctgtaccacttcagcatgtattcgagctatcatgtttg

SEQ ID NO: 179031 - DNA, 323 bp, Zea Mays
gttaaagaaaaaatttccggaggttgtcaatgttccaggagtgctctaagtcttcgccggaaggcgttactagcctgtacgcgctgggggatgcctttgacttgacgatgaatggaccctcccatttcggctctagcttgccccgtgattctgtccgggtggtccggacgagtacgaggtctcctttgttgaactctcttgggacaaccgcgttgtcgcaccaggccttggtttgagcttgatatttgttgagggcctgtagggcgaggacgcggtctccgtcgatgagatctttggacgttggctcgtcgacatcgggaact

SEQ ID NO: 179032 - DNA, 450 bp, Zea Mays
ttcttctctttcccatgttgcttcatcttcgccatggtgactccattgcactttgcacatctttataaccttattccttgtgacacgagtcagtgtatccagaatcttgatggggtactcgacataagtcaggtcatcttgaacactaaggtcttccattggtagctgctcttcaggtaccctgagacacttcttcagttgagatacatgaaagacatcatgaacatccgcaagatgatccggtaactccaattgatatgcaacctctcccactcgctttaagatcaagaagggtccaataaagcgaggggacaactttcccttgactttaaatctcctcattcaatgaagtggtgacaccttgaggtacacataatcaccttcctccaactccagtggtcttctattatcagcgtagctcttttgcttggtctgagctagcctcaagtt

SEQ ID NO: 179033 - DNA, 731 bp, Zea Mays
gtttgggtacacccattggggtcggcgtcagtaagtccagtcgcaggcacttcttcagcagcaggaactgaggtaccagcatcctcatcaaaactggatactcgccggaggcgtcttcttttcttcttttgctcatcagcagaaggctcaggctgattggttcggctaggacgcctcgggcgagtactaacaggtttctggacatccaaagttgtatcaacctctggaaggggcaccaccgccaacgtaccaacaggagcagcgtcggaggaatcctcagctagcagatcaagcatatcatttatgtccgcatcactagggttcaggggcacttcaaaatgaacctgccgttcatcatcaggaatctccccaagtgaagcaaccaaagtattgatttcttcagcagagggtcacactctaaggcccaaattgccatcagtcacaggcggatttgacacaaaaagggtgaaggctttgggaggaggcaggttccaggccgagtatgccgctggagcaccaacatttgacaccttacccctgagaatcatttcaagtcggcttacgaagtctacagaaggaattctcctattggtaacccgagttgagtcggccagccctcgatacagatatgctggataggccctatctttcagtggctgaatgttcttgaaaacaaagtcagcgaccacagcttcagcagttagacctctctctttcagcagtcccacctc

SEQ ID NO: 179034 - DNA, 471 bp, Zea Mays
tgcctttgtgggtgctgaacactcgagccccgccagtcgggatcttccccaacctcaccgtaggcagctccacgttgttcgcacgtccggttcctggctccacctccgcgtcgttggccgcattttgtggcactagcgggtggatccctctggacagaagatcctttttcctgtccctcgtaacagaacacgcgaaatccccgtaacaaacccccacagaaccgcggcttcggttgtgatccgagcgcctgggatattcgtccggggctgaacctcctcctccccttggtagtataaaatcgatgctcacctcctcctggtcgtccaaactcgtggaccaacccttatccgtgagacaatcaccacgaatctcaagtgcgcgcggaagcatggtggggttgccgcaggggagcaattctcgtgcgccgccatcaatctgggccgaacaggtggtcggggaggcccgccggg

SEQ ID NO: 179035 - DNA, 424 bp, Zea Mays
tatgtgtcctgagggtcgattttacctcatattgctcttgtaatctgagatagactttaacttaaattggactaacctccgccatggtataggtgagttgtatgtccatgctggtcctcttgtctccttacctttggtttgtattttaaggagtggtgttcttattagacataatgcattttttgttgattggatgtgtattgaatttaatgttggaatttgggggtgtgtcgaggtttggatgtacattgaattgcgagttggaactgcagaggtgtgttgagggcagatacatcaatagtggtggagtaacgttaaggggcgaaagtggcagtgggactgctcacttcaaggagtggaatgaaggaacaaaggagcgtcaccatcgagagtgtagtaacagagtgtcgttaatgaacgtcag

SEQ ID NO: 179036 - DNA, 478 bp, Zea Mays
acttctttacgtctcgcatggctcgtgacttgagagtgtttccttacggacggaatattgctgctgttgtgtcggcagtgatgaacaaggaccgtcaagatgctgtgcagaagcgccgggcggtcgtcaggatggtcgatcccgtgcgcgaggcgaagagggcgcggtgaagcgcgaaggctgcagcctccggcagtggcaagctggtgccggctgcgaaaacggctgcgcctgggggcagcaaagcgtcgataggcgagaaggcaacaaagcctcccccgggcgggccttcgcccgcgaagctgcctccgcgggggaagcgtgttgctgacttcggcacgaatatcagtgtcgatgattatctggttggtaagtatatatatatatgttttttttgactggagacgtgttgcagggtcgggcgagggacaattggttgttgtcccaccttcggtggcagccacctcgccatcggcgg

SEQ ID NO: 179037 - DNA, 518 bp, Zea Mays
tttagtaagaagaatatatttgccaaacatctaatgattggaaaagggaacataaaagaatgtcaacggtaacaacaaactgtaacagaaaaataattatgaatctgtaatcaagcatcctatcctcacttatttcgggttgagagtagtcagaaagaagaacgaaaaccagagacagcacttaaaccaatctcaacaaaagaacaacaacgaaatggccatccatagccgaagcttgaaaaattcactcttttcttttccccagcagcttgatgctttctttatggaagtgtaccatcccttagcagtcgagagcacaaaagagcgtggtcgcggacaggaggaggcacccggacaccgggcagagcagcaagaagaggacggacgtgaacgcgtgcgggtctccatgcagccccctgcaccgtctcccgtgggatctccagcgcgttcatcggtggcagacgcaccccgtctctggcgccccgcgtcggcgccatttgtctcggctccttcccccc

SEQ ID NO: 179038 - DNA, 1180 bp, Zea Mays
atagttgcacatacatgtatgctacattcgacaacgttctatgctttataagtttcacaatctgaacagtttatggccagtgttatgtattttcgaacttacatttatgctacatacgacaacgtcatatgctataaaacaagtcgatgtacattcagattgctacataactgttaactgcttatgataactttcacatacgtttatgacagtttgtaagcatatttatgacgctttctgtgcattgtcaattaaacatacgaatcacatttacatccagaatataattttatcataaatcttatggtattctactctctaccagatgaatcattatctccgacatacaccgttcgtttttttgacgttgatgtctcattccactgtggtgctgcacctatgattttgttccttgaaccaggaggccgtcctcgcttacgtccagataggttagccaatcgaaccctattatcctccacagttaaacacgtacggctgttgtgaccatcagctatgccacatttctggcacttcctgctcatcttcttagctcctttcgcccccaatttaagaacttgttgctcactacttttgattgttcttcccttaggcttggccttatctggtcttgctaagtttacaccttccatatgaaactccagtttctacaaatcaaagatactaagtcagttttcatgttcacatattcatcatatactgtagcaatgttattacctttctagcttccacatccgtagcactactatcaaccagacgcatatcagtgttatgttccaatgttaatatcggcatattacattgatcatcgttagcattgcattcatttgtattagaccccattaaaatttcctgtgaaataacgcaaactccagtgaagacacaaattttatagagcagcataaataatacattataaaatttgttccatacctcgttcccatcatctaatttgcgtaaattgtctataactatgtcttctgtttcatacgcttcgacctatatcatcattacatacatggatcattatcgacatgtaattatggtgtattcataataacaggatgtgcatacctggatgtcatcgccagcacttgtgccacaactctcaccagtaactatatcaggctccacacgcatcaataaccctaataattcgtcc

SEQ ID NO: 179039 - DNA, 388 bp, Zea Mays
gtgatgaggaactcgcagggagaggttttggcggcagcagcacagctttatgaacacatccctgatgcgctaaccagcgaagctttggctgctcgtgatggcgtggtgctggcccagatgcttagtatggaaaaagtgattttagaagttgacaactctgttctggtggctcttctccggtcagaggagggaagaaggagtgctatcgcaggtttatggcaagaaatcagagagaggagtgtggttttcagatcttttgatgtatctttcgttaataaagaaggaaatgaggtagctcacatttgtgcaagtaaggctatagagttggcttctgttttattttggctagattgtttccctaattggcttatggaagcagctagcaggg

SEQ ID NO: 179040 - DNA, 630 bp, Zea Mays
gatgaactttagacctgattcaagctcgattgagtaagtgaatgatcaaggttgctatagcaaaattgaagatggattatagatcaataactttgatataggaagattagtgggctatcacataaaaattggagaaaactactcctcaacttgggctgtcagaacgactgaaggtggtggccatggtacagtactaaaaaaatcttcagattcatccccctcgccgttggtgacctccgcgcaaggattcacgctaatcgcggtgatttgtgcaggactcggacaggatagtaccagggggtgaaaagatcggaaggggagtggatttggtcgcggggtgaagcttatcaaccgcacttgtagccatgcgacgtggccggaccgccggtgtcgtcatggtactccagcaacctcagctacgccacgccgtagctctttaccacgtagtagtaatcgtggtgcgcctggacttgccatttcaagagacgttgcaccggcaagcgccacgactgaaccgctagtgatcttccttctctctggccgctagctttcatttccaaaattcggagcctcctcttaattcccctataaattgatggcccggtctgctgcgccatgttgtcatgaagc

SEQ ID NO: 179041 - DNA, 1107 bp, Zea Mays
gtttgaacgagaggatgccacgttgcatgctacccagatcagagagctctttggatttcctgagtcgacgacgaggctccacaacttgtgctacggcacgtcagatcctccctgtcgccctcatggtggagttgctccagctacagctcacgttgctgccctgttcagacctccgtttacagatgggtcacggcgtcctcctgccgacttcactcctgcagcgaagttcctttatgagctgatgaggcggactttgctacccaggatgggatacagggaggccaccacacaattcagctctggctacttggtgccttgatttcacactcagagtttgatgtggtcgactttccgatctgtgagattgaggatacaatgttggatggtctccatgctcgtcgtcagctgccgtatgatcactacctctgtcacatctttgtgcagctgatcaggcctcctcagttctaggccaccctcgaggcctcttgactttagtttggcttatatcgcccagctcctaaggacacagttccagcgccagctccagtaccagatctcagggttgaggatgaggccatcagacagttcgaggctcagggtgccgttgcagatacttcttccgatgatgatgaggacctggggattccgccaccgcctcttgtgccacctcgctcccataatcatgaggtcgttagctctagtgttgctcttgctgcccctctagctattgaccctgccttggctgctattcttcagtcgcttactcagcagcaggctcatatggtcgcagagcaggcccgtcaggcaacagagcaggccagacaggccgctatccagcaacagttgtccaagcggatgctttcgatgtttcagaccattcaggatcgacaggacaccctacaacagcagctcctagcagacagggtcaagcaccgggcattcatgacacatattctccagcataccaacgttcagcttccaccaatgcagtctgctcctcctctggctctttagtatgttgttgttcccgctcttcagtcgggacccccgctccactcttttggtccttctgtctctccgcttaggccagttaccctggatttctcg

SEQ ID NO: 179042 - DNA, 451 bp, Zea Mays
atagttcagctgcaatacaaaacgtaaataagttcgaagtcacaaaaataaaacataaagttaaaaacaattaggcaatacctatccgcctttcgagttctgcagtcttttcagctgcctccgctgcttctctagcatcgtgagaatctttttcgctcttttttattatctcgtgggccatacctcggccgccattctcccagatgtcagtaaagaattttccgccaactaagctcgcttcaaccgaggggtccttcgtgtcatcaatagataaagtagcttcggtttgggccaaagctttcacatgatcgcaacctgacttctccaaaatagccgcaattcccctgacacctgagaaggcgcagacatctccatgaccactcaaaatttcctcaaaagcttcggcttcgttgctgatccagtcaagtgggccctcaggatcgcctcttac

SEQ ID NO: 179043 - DNA, 335 bp, Zea Mays
gcggtaggcgtcatcgtagtgagatggagagtggtcgtcttcgcgtggatgggactggtaagcgagaattgttgtcctcaccgattggggtgagtgtaggtgagggggagctacgaaatctttttgagggtgaggaattgaggataatgctgttcaactacaaggagatggatatcatcccgaaggttgagccaatgtaatatatgatgccctcgctatgtgtatgtaactgtaatttgtatgataaggctgcgcgccttcgttgatccggccacgcccgtaggcgacttctgcacggagagtcttttggaaaagacttcgattttgcgcaccta

SEQ ID NO: 179044 - DNA, 645 bp, Zea Mays
tcatcacaccctgaaatttcgaagggttggcgctggtaaatctgcaatcaaacaatgggacgtgctagtgctgaatagataggactgttagctagctttgcctctagatcgacaagcaagcaactaaaacaaattaaaggacctcgttacgttgtgcagatcacacacatgccgattcttctattgctgctttgccttagaatacgattgtcagtcagaaaaggggaatcctaccaccgtagtccgtagcagtgtgtgtgtcctcaacctgcaacacgtgttgaaatataaagcgtctctgaaacaggtgacaatgcagtgccgtcagaatagatatagaaatcaagtttccatttgactctctgttctgatccatttaactcaattactcatgttactagctacggcctacggcagaatagatatagaaagcgcgtgattacctatcatgaactagtcatgtaggggcgtgataactggtatcatgttggactatagatgttactagccacctatacgatgccataatcttccagttccacatagctggctggttgctaggatttgcaggattgcttttagcttaagctcggacaagcagaacaaactaatggcgatggtttccatcagtggcctctttctttc

SEQ ID NO: 179045 - DNA, 799 bp, Zea Mays
gctcaccggagaggagggcgcaggcacgcgagaacccttaggacgccgagaaaggctctaggaggttcagggaaatgtagcgaatgcggtcatgggcacaacaacggcgtggagacacttcggcgagcaatcgcacccagacgagaacaggaaaggggtaaattggggggcaggacaggttggttacattgagaagaggctttttgacccttgaatggcggcagagacacggtgaaggcttgggtcgacggcggcggctctccggctgcgcaaggaacgctctggtgagcacagacagagggaactagagagggcgagaataaattcaagtgcgtcccatgatgcggacactaaggcagaacttaccgaggcaaagggcacgacgagcgtccaatggtggcgacggaacgggcgtatggacacgatgaacggcggcggccttcctgagcgcgcgcatagggcgagagcgagggcgatagggttcggctgagtgtgcaaatgagtagggggagtgggtgagtgggatgcggactcaaaaggaggtctagtgtgtgtggaggtggccggaaaatgcgcgatgtgggcgcatccgcggagggaggtgagggcaagaggttagggaaacggaggggactgacgggtggggtccgcaggccagcgagaaaggactcgctaatgggcggtcaatgctgacagaaggggtccaccgagcagtgagagaacgggcgcgtgcgcgagggatctgcgccgacaggtcggcaccatcgagcagcgcgagagagagagagagagcatgggc

SEQ ID NO: 179046 - DNA, 1252 bp, Zea Mays
attctggcccagatggcccaagccccagagaaaacgggacgcgcccgcgcccgcgagggaggttttgcgcagaggcccacggcgttttgactaaaccagaacagggtcgcttactgttttcgcaagtcgctgacaaatcacagaaagaccctcgggtttctgtttcttcgcaggggaaggtccccgaccacggcagcgcacggagaggctccggcgagcatctacgccggccgattaaggcaatgaccggcgctcccgagcggtggacaccaaatcggggcttacccgagcatttcccctaactaaattgcacgaatggcgacctattacgctctgtccacgtgaaccgagaacattgcggctagatcgtcgtgttcccggcgactggtggtttcctagtttaaattgaaggctcgacaagcatcacagagcaaccagggtgcttaaacaagggagagagagagatgaactaacctggaaagggctggccgcggtgatgggtggtttacggtggcggagaacagatttgggggcaacgcgaaattcaggcgagctggtgggcaatcggatgtgggacggggtgctaaagcttcacaatttcctggcgcaactagccctgccctcaatttataggctccgagagcggtggctctcaatttgaccgcgcagtgctggcggccggaggtgaagaagaacctgggtgcggtgaattcgtggcaaatggcgtggcgagctccccgtcgacgatgggatggcttagaggagtcacgacggtacggtgtaaagatagagccacgcggcggacgccggtaatggctcaacggcggtgaaatccttatccgaaggatcggtgagcaagggggaatggattacggcgggccgaggtggcatccagcccaccggcggcaaagatttttaccgagcggagcttatccgatggccacgacgcacgaatcacggcgagcggtaatcgacggcggcggtcaccggcgatgggcaagggggggtgaacctgtgatcttcttcagtactgtaccatggcgatcccattcagacagtctgtcagccgaacttggagcattattatctcttaatttctaatgttaacacatgtcgagctctgcagcaaaaatgtagagcaatataccaactacaattcgactataggacttgaacatatttgagcactggattatgctcaaaatctagcttgaagtcgaggtcagctcactgctagtctgaaaattcagac

SEQ ID NO: 179047 - DNA, 390 bp, Zea Mays
gcggcgcctcagccctcgggtggggtatctagggctttgtcgggccacggtgggggctatacacacttgcttcaggaagacatcaaccagagctcggggaatcgctcaccagagtttacctccacgaccgcgctgcggatagcgtcgttgtcggcataatccctggtaatactacattccctagcttcacaatgccctcctcttcatgtagagccatttgggtcatggtttggagccctaccacgcggcttggcgctctccagccatggcgccaccgtgacattggtcgccgccgtgttgggcacagtggatgggagaatatgatgtcaggaccgttgattcgaccatggacggtcctgattagaacgcgaataccccttcgcgcattca

SEQ ID NO: 179048 - DNA, 622 bp, Zea Mays
aactcttcggtggaaaggtcgccgagaagacagacatcagcacaagtcctcccggcaaataccggcacatcctatccaagtaggcggcacaccatgtcgagcacccactcagtctgggcatgctcgagatagacttacaaggccatggtaaactatggcgacacaaaacagaaaccttgaaggcaaaggggcgcagagagctcgaaggcgaaagggcaccgcgagtgggagagaagcaagacatggctgctactcgagggatgaaccccttttttaaaggcagatttccccgctcgcgccccgaagcgtcacgggcaaggtctcccccgatgcgcaccagggttcccatcctatgacacgggggccaggcctcacaggtcatacaagctggcccgaaacgcgaagaaggcgaaccgtcgcacaaggagcgtgcaaccgccccgcggatgtgcgccccttcatcttcgccgcaaccaacggtcaagaaggcgaaccgccgcacaaggagcgtgcaaccgccccgcggttgtgcgcccctttatcttcgccgcaaccaacggtcaagaggatgaaccgccgcacacggagcgtgcaatcgccccgcggttgtgcgccccctcgg

SEQ ID NO: 179049 - DNA, 687 bp, Zea Mays
cgggaggaagggagtgtgtgtcgtgccgttgcgctaggggccaggccacgagtgccttcgtcatcgggttctccggccaccgctgcttgcgatagagaaggattggcgggtgtaattggttggagccgatagaattcctcgccgggcatcgacccatgctgcgaatctgctgtccgccgtgggcactcgtctgtgggtcatctctcgctctggtaagtcctttcttagattcgcggagtccgtagcgtcgtgtagccagcttgggttagggaagtactgtgcccaggcatcgattcgagtttcccagtgattgcgccgctgggcatgcgtgcgccgtcgttttggaccaccaaggttgggggagatgtgttggggtcgtgtgtccgtggatcgacggtggtgatcgagcggtcgtagtgttttggccgaaccaagaaatagtcattgattctcgatccatggggtaggattgaaggctggatatcgcttcaccctgatggattatgaccaaggatcctcgtgtggacggacccgatgcaatcttgtgctaatgaaattggaaccgaagattcccaatcgtgcggtcatcatctcctactggttcgggcttgtgccagatctaatctgggtcgtagcttttaaatccaacgactctcgttcatccataccccttcggcctgaacgttt

SEQ ID NO: 179050 - DNA, 1045 bp, Zea Mays
gctcgatgacgccgttggattgtgggtggtatatcgaggcgaagataggcttggtgccgatggagaggcagaaatccctgaagtcctggctgtcgaactgtttgccgttgttgactgtgagctcagatgggactccgaatcagcaaacaatgttttgccagaagaacttttgggcggtcttcgacgttattgtggatactgccctggcctcgatccacttggtgaagtactcgacggcgacgaaggtgaatttgaggttcccttgagccgtaggtagtggtccgacaatatctagcccccagcgttgaagtggccatgtgtgggcgatcagcttggtgaactgcgaagggttgctcgagcggggggagaacttctggcatgcttcgcaagacctcgtgactcgattcacggtacagattatcgcgggccagtaaaatccttgacagattaccttagcagcgagggccctgggtcctgagtgggacccacaagttccgttgtggacttcacgaaggatttgaatgccttcggtttcggtcacgcattttagcatgggctgattgatcccctttttgtatagctggcccccgactagtacaaagtcccggcttcggtgcttgaggcgtttggcctcattgacgtcacttgggtggtaatatccttgcaaaaacagggttattggggcccgccaatcttcagtcatgatgaggttgatgatgcgatggccttcggcgtcgttagttacttgtaaaccctctgggttgcggacggctggtgtgccaatgacgtggtagaacacgtcggagggcaaggtcttgcctctggccgttgccttagccaatgcgtcggcctcttcattcctagcgcggtccacatgctgtagggtgaagcccttgaactttttctcgagactgcgaacagccgtgagatactgcatgagtgcggggtcttttgctgaatattctttttttgacctggccgacaactactttggaatctgtcttgactatgcaggtggtgacatcgagcgctctcagcttgcgaa

SEQ ID NO: 179051 - DNA, 635 bp, Zea Mays
cgcgattgaaggagtagcgagctcgtccacggtttggggcgggtctgtgacatgaacagagcgccggtgagggattcccttgagctcacgccgccattgagcaccgagggcccatgaacgccataataatgctctggcgagactaccagacccgcaccgcagagctcgaaagtggtgaatcgaagtttttctccccgcggcggacgcatcacgcttttcctctctcgacgacccgatccctctctctctctctctcttgctctcatggcgatggtggctcggttgatgggagggcctgggttttatggtgcgagtgcaatccagatttgacttgatctctagaatcgtgcgcgtggagatcggttgatttggttggagtccgccctgttgggcacggcatccgcgagattcgctccgccgttgtacacaggagaagaacctgtcggagcttgacggggaggaccaagggtggcgagtgggccagggacatggttgggtgcggacaacatccagcaaccggttggtcaacaaccgcagcggccgcggcgaagtatgcgcggagagcacggcgcggaggagatttcggcggtaggtaggtgggagatggcgctgacggcttgggcccgacccggaag

SEQ ID NO: 179052 - DNA, 294 bp, Zea Mays
tacctatccgcctttcaagtttcgcagctttctcagctgccttcgtcgcttcttttgcatcatgagaatctttttcactcttttttattatctcgtgcgccatctctcggccgccattctcccagatgttagtaaagaatttcccgccaactaagcttgcttcggccgaggggtcttttgtatcttcaatagataaggtagcttcggtttgggccaaagctttcacgtgatcacagcctaatttctccaaaatagccacgattcccctggcacctgagaaggcgcagacatccc

SEQ ID NO: 179053 - DNA, 457 bp, Zea Mays
cggagcagttcaagtgacgtcgagcccgtgttgcaactaaactatgaccgcaaagactaaatgtatacctcggtgagcttcaccagtctataaggacactagaacatggatgcatatatgtcgaaccataacgtagtcgcctggccacgtgaggctgaagcgtcggcgacgtggtcactagacacgttgagtcactttaccaaggaagttgggcgcatctagggtaaagtttggggaaaggaaggcaacagaactacgttgaagctacacaccatggttgacaacagaggtatggatctctcctttgctcttgcttcttcccctcggttactcttaaatagttacaaaatccttatggatcaaaagttacaagagcccaaagttgacttagtgtcatttgctcttagggttccaattttggaagcacttgtgaacttttgcattttctccaatttgc

SEQ ID NO: 179054 - DNA, 724 bp, Zea Mays
aacttcctgaggtgttctatgttccatgagttcccaatttccgtgccgtccatcttagtgaggcgatatgatcccggccgagtgacttctgctactatgaatggtccttcccatagaggtgacaacttgtgtcatccctcccccgttagaattcggcggaggacgagatctcctactgcgaaggatcgatgtctcatggtcttatcgtgatagcgcctcagagtttgttggtaccgtgctgattgaattacagtgttcagccgttcttcttcgagtacatcaacatcctccagcctagtagcctcggcttctgctatgttttcaaagatcaaccttggcaccccaaacttgagatcagcaggtagtactgcctctgaaccgtagaccatgaagaaaggagtatttccatgcagagctcgactaggttgagttcttaggctccaaacgacgtagggcaactcccttatccactttcctgcaaactttttatttttatcgaagactttttttcctgagtgcctccaatatcatcctgttagctctttcaacctgcccgttggctcttgggtgtgccaccgaagcatatttgatctgaatgctcttttgctcgcagaaatcgaagaactctaaacttgtgaagttggatcccaggtcagttatgatactattcggtattccgaatctgaatattatgtcttgtatgaattccacgaccttagctgaa

SEQ ID NO: 179055 - DNA, 419 bp, Zea Mays
gggggattttggtggtgtggaggtggagggaggacttggatctcttggtgttgtaggtacatatgattgggttggtgatgtattggttcgttgtggaattgttgttggtggtatcgctggggatggtaagtatgcgcaacaacttgttggttgtcggctggctgatttctgaccattctgtctttggtggccttagttttggggcaatcactagtgggatgtccgcagtcatcaccgtgaaagaggcagtagaaccttcgtgactgtggagcacggcctctgcttctgcctctggtgttagcgttgcggccttgtgtggggtactcctggcgacgagctatgtctccggtgggatgttggttggcgatggtgttcacctgttgctggttgcgatttggcctgctagattcggactgtgc

SEQ ID NO: 179056 - DNA, 329 bp, Zea Mays
ggtctgcaaggtttttcttcttcttcttaaaatcagtgttctgcttggcctttggtttccagttcgtcttgtttttgtttttgccaccagatttgccttcaaccacgttggcattagaggtaccactatccattggaccaaaacggggcacatccttagatctcgccttctcctcaacatcaagagtagcaattagactttcaacagtcattgcctccttcttgtgtttgagagccatggcaaaattcctccaagtaggaggtaatttggcaatgatgccaccaaccacgaacttgttaggcaagacacagtcaaagtgtgcaagttcc

SEQ ID NO: 179057 - DNA, 749 bp, Zea Mays
ccgccatgtaccatccttcttttgcactaaaaggaccagagaagcaaatgggctcacactgggggtgatcagtcctgacttcaataacgcagcaacttgcttctcaatctccgtcttatgatgaggagaatatttgtagggtcgagcgttgaccgggatagatctagggagcaaaggaatatgatggtcaaatggtcaagatggaggcaatcagttggtgtaacaaaaatgtcactgaattcccccaacagcacctgcaattctggatggacctctttgctgttctcctcacgcacctcctccaacaatgcaaacacccatatatcattccctcgcagccatttctccacctgtagagtagaaacttcctccacaacctgctattgtacagtattgcccaccaactgaacttccacacctttgtccacaaagctaataaccttatcatcccaatcacaatgcataggactgtgtcgacgcaaccaatcatagcccaaaatagcatcatatgcgcctagccccaacaccctcatatcactctgatatgtatgcccattagcccaccattccaatgatcataccatcgtgtcactatacataatctccccatttgccaccctcactttagctaaagaacaaggatgcactggcagccccattctatcgaccaactgcttgttaatgaaacttgtggagctccccgaatcaaccaacaccaacagcaactgattttgcaataaggctctcac

SEQ ID NO: 179058 - DNA, 400 bp, Zea Mays
tcagtgcccattgagacgtaggctgccgcgcctgaggataaagctgagcaacaaactccaggtatcggcatggcagcggggcaagatatgatagaaaaagctaaatctcctgccccgaagctccggccgaagatgttgattacattatttgatatgcttcaggggaacaattatccaaagaagaaattttagaagccagacactacgctcagaaactaaaatatccgaagggggcattagtgttcaatgtcactgacgaagatgatttcctatactgtctctgtctcctggacaacaaagaaatatccgtttgtcgggagatagccaaaagtatgggatttccaaagcttgaggaaggcctttcggccatgtcgaaggatgatcttgctgatagccttgc

SEQ ID NO: 179059 - DNA, 532 bp, Zea Mays
tggatgctacctgacagatctgacgcagaacgcgatggatggggcgggggcctcgttgaatacctgttcgctgaacagtggtcctcgatcgtcgtgtgtgtgtcctcctacgttcagctgaccgcattatgcatggctggccgcgcgcaccgaaacgatacgccggagcccggatgcatgtgtgtgtgtggttaatcttcttctccatctgggatttggtacgagaaagaaagaaagaaagaaagaaatgcgatcgacatgcgtgaatggggacagcataaaagggccccgtgcatgatcgggaagatcctgggatgcacacttggcatgcaatcgtaggataccggcaatgcgatggcgccgatcgcatcatgcatgcatgtgatctgccatttcatcaacgaaccttaacgacagctgttcgtgccggtgccgaccatgcgtctatctgactctgactagtcacctgagccgcggatgcatttgcatggcagccgatcgacggccatgcatccatactccactgacctcc

SEQ ID NO: 179060 - DNA, 752 bp, Zea Mays
cgtgaacctgtattacggcgaggacacgtggacggactggggccccgcgcaggacgccgcgtcatggccgccgtcctcgatgccgagaacccaggtacgtgcctgcgcacgctctccttttgcttcccttgaccctttcccttttcctccgaaagaatcaaataactgaaatgcaactccctctctgcctcacggtctctgcggcggcggaatccgatccacgcatcttcgctcggacttggtggtatacctcaacgacctggtgacggccaacaatctctcggtcccgaatgcgagcctgtactgggaccgcgccgtctctgagaaaccaaaatccatcgacggcgaacatggagggaggcgcgagcgaagacagacgggccgcacctattaagcgcatggcgcagtctgggagcaaccacctaaacccgcgagaggaatccgccgccaatcgcgtcacaagagtttggtgaggcagcaagaagcaaggacgactaacggggagggggagaagcatttccttgatactgagaatgccaagcatcacaagatagaacgcacaaggacactggagttctgtctcctctgagtgaaagaactcgactccatcagctcagtggcttccacaggtctcaactctctcatctacctccctaactccgcttttggtcagtaggacagcggggcgcaggtgggatcagaaaaggggcaacgcccggccgcccgaggccggggcgtgccatgggcgacgg

SEQ ID NO: 179061 - DNA, 904 bp, Zea Mays
tggatgggagagtggttttatgttaaaatgatttaaaggcaagagaagacatcaaagaaatcattcagcgacccatatggtctcgcttcggcctccgaaggccgaaggtggaaattgatggcaatgtcgaagcatgccagagggatttcagcactgtgtgtgccttcattggcacaagggatttaattcaagagcatatatccttcagggtatggccacttgtggagagctgggaaatgccaaaggagaccaccgccgattctagtgaaggtggtctagtctgactgaagtataccttcaaatttagggagaagtttgatgagccaaacgatgactggctgaagtgtattgaagctaccagtgatgagctacttggagcatactccaaggccaaagataatgctctgtccgcagcctttggaggtcggggcaagaaaagattaaacagggtatttgatgctattggcttcgtataccctgattaccgctacccgctgcgagggcaagagaaaaaggggaagattgtcgcttcggtcaccccagctgagtcgaagagcaaaaaggtgaaggttctgacccaccggccgcgttatattgaacctgctgtagtacctgaacttggcgtagggtcctcttcagctgtcgaagcaaaacaaactgttccaatcatgcagagcgctgaagagccgactgtagtgccaaaggttcctacagtcgagccaaccttatctaaagatgataaagccgaggagccatagtcagaagaaacaatgaaaatgccagaaattctgagcccttcaacggaggcaaaactgccgaaggcacaaaaagcttctgccgcgactcccaagaggagaagaatggccaacgtgctggacgctgtgttggagactatgaaagcttt

SEQ ID NO: 179062 - DNA, 525 bp, Zea Mays
gcttggttcaattattaccatagcgtcacttcgtctgttgactgttatgcatgtgcctttctgcattttttttcatgtatcccatttcgaacttaacaaaaaaaatttacagcacaatcgaagttagcgggcacaagatccgaatacaaagcttgggtgtttcagtatcgagcagcaggaaaggaagacagttgacatggctcttcgctgcgacaaaatgaatggaaaccaactccaaatcttcagtctaagaccgtggaagagaaagtcatccaaaccaaagctaacaagttcggacggacggtcggatttcatacccagatgaaagatggggccctacaggagtatataaaagaaaaggtggattaaaagtgataagttggcataataaatggatgagcaagctctggatcctgcatttctgcatggcaaggtctttgctcagtccaccgctgtccgtctcctcacgtgacctccagagcccaagaggcatggcctgctgcatctggatttcatatccagagc

SEQ ID NO: 179063 - DNA, 619 bp, Zea Mays
aagacttccgcctcaaccaagcagatgctctgatctcgataagcgtagcagggaatctcgacgtcatcacgtgccaggacgctgacgcaccacctaagcagcctttggcccataccctggcgctgttacaacaactacgacatgggtggcctcttcctcgggggcttaggcgcacggacaacccctcggcctctacctcggctctttatgagaaatcagcaagcgcgaatcaacagtacagttcgtcgtcacatcggcctgtagacgatagggcatcactccttcggatacaacacccggctttattgaggacactccccttcgataaatagggcagtggtccctctagggaggccatccataacacacgcagacgaacgctcactcccccccactttgtcttagatattggcacttgcctcaatcatctctagggacttggggacttctcctctcccaccatgcttataaacccctactacaggcactatggtgcgagtaatataagcctcatcctctctactggaagtagggccttgtgttgcctgaaccaggataactgcttgtgtcacctcgcacatcatctagagtcggccacgcagcacatttgctagttggt

SEQ ID NO: 179064 - DNA, 483 bp, Zea Mays
gcgagatcaccatcgccggacttcggccgcccgccaccgctcgtagaccgggccaccaggtgaaccattcttcgattccttgcacccacgacctctctgacctcccgtgaagctccccgactcactggattgtgctatgccgccctggttaagccagagtcctcgccgccgacgaactcccccgcctgcacacgtggacccgccaacttcggtcacctccgacgacgatccgcacatcgacgtgaccatcgcgacctccctacgccatcgaccaccttgccggagctatctcgccgccggtaagccccgccgcccttttctccccgtgggtactgttccattagggaaaggaccgcgggttagattcaggattaccccagggggttttctgcactgtcagagactcagtgcaataggaaaccgaggacctgcttgtaaggaacccaggaagaaaataccagggaccccagagcaaagtagatt

SEQ ID NO: 179065 - DNA, 458 bp, Zea Mays
aacgctgggggctggatattgtcgggccactacctacggctcaagggaacctcaagttcaccttcgtcgccgtcgaatacttcatcaagtggatcaaggccagagcagtatccacaataacgtcgaagactgcccagaagttcttctggcaaaacattgtttgccgattcggagtcccgtccgagatcacagtcgacaacggcaaacagtttgacagccatgacttcagggacttctgcttctccatcggcaccaagcttgccttcgcctcggtataccacccgcaatccaacggcgtcgtcgagcgcgccaacggcaagattttcactgccattaagaaaaggcttctcgacgacaagaagggtaaatgggccgaccagctacctgaagtagtctaggccctaaacatgaccgaatgtcgggcaaccggattcacaccttttcgtctactatatgga

SEQ ID NO: 179066 - DNA, 1038 bp, Zea Mays
atgacagtgactcctgcacataactgtgaccattcctctttctatgcttcctattgcatcttctgcaggaacttgcacttcacatgactctagcacaagtgcgtccagctgtgctgacgatccaagtatgtcgactgacagcatggttaaatctgtggacatggatggtcagaagcacatgaaaaacgacaaaattaaggtgcacctagcccctcaaccagaaaacgcgtcatttaaggtactattatagtatttgaaacacagccgctgtcatggtagtggagaaggaattatggtggcgaattacatcacagtgttttatatctggctaggaagtcgaagtgcccttcttttcagtttaataatgttaccatttctaaagctcacacatgccaagcatgtctgaggaaaaaaaatatttctaaagcttatttcatagacgctcttgaaaatctaagcaagcaatattgtattgctgaacaaatgtctttgaagaaataacaactgctcgcttcttgcagaaaatgcttttgaggaacctgtcgaggaaactcaggtggtcaaaggcgcaggcagacacgcatcagaccatggcgcctggatcccagggcgcagaagaccctggatatccactggtttctccatcggatgatgatctggaggatagttgggagatcctgtaatatataataaaccgccaagaacctccgtgacttttcttttttgagctaagtttatccatgtcaggttaactggttttgagggaaggcacgtggcgtattttttacagatctccttggttacagacacgtgagatgttgcacgtacgtgcggcacatccatcggcataataactgtaattctagttgaggatacgtaaagctgtttggattctgtttcggaccttaactgcatgcagacaagacaatgagacaagcgtgtgtccacagcttcgactgtcagatctgtcactagctagtcctcttcttggcagtgctcactggtagtagtgatggccagttttccgtactgtggaag

SEQ ID NO: 179067 - DNA, 977 bp, Zea Mays
ctctttgaaattcaactgagttgacacttctcttgtagatggttcgcactctccaaaccacccgcgtcaacaccagctacgcccctcagccccggcagatcccggtctacccagtggtagtcgaggaagttctggcggatctccctcccgtccgagtggagaacgtaatcaacctagaggatagctcggaggagcagctgccgacccccaccccgttggccgagtccctggccttcgcagctgggtcatcgacgtcagcatcgtctgcaccagccttccaagcacctgcacccggaggcgacgaccccgatgactctggagacggcgatgacgaggatgacgacgacaaagacgatggagaagacgaacacgtcaacgaggaagctgactacgcccagcaggacaacttcttggggtttggtcctgttgtcgaacattacacatcaatgttcgagacggggcacttccccaacctgctgcaagaggtgctgcacgcgctaggcacctacgtccgccccctgtacgaaacaaggcgagtgagcgagcctccctgggcttgctattacatcactcgcatccacgtcagggtgatgaatgcaggtgacaggggattcaggactctgtctgctcacgagtccctgacgccactgtccacctacgctgcctcggtcagcgatgctgcctatcggaccctgtggtcgctcagccacacctaccggcagctgctgcagaacacgaggttcaggcatcttcctcagcgtctgcatggagaaagccagaccaacatcgtcccaggtgaacctggtgaggatcgcctcaacaccctagctggtgtagtggccggtctcaacaccgacctggacagtgccaccctggatctctacagggtgcacttggagctggagaatgcccatgccaggattgcagccctggaagcccaactgcaaggaccggatccacccgaagctcaggtcccc

SEQ ID NO: 179068 - DNA, 1062 bp, Zea Mays
acaaagaatctcatcctcgagatttaggaggatttaggaaaaagatggggaaaatctatgcgaagctcttcttctctctcccaagtagcttcatcttcaccatggtgactccattgtactttgcacatctttatcaccttatttcttgtaacccgagtcaatgtatcaagaatcttgatggggtactcagcatgagtcagatcctcttgaacactaaggtcctccagtggtagatgctcttcaggtaccctgagacacttctttagttgcgacacatgaaaaacatcatgtacatccgcaagatgatcgggtagttctaattgatatgccacttctcccactcgctttaaggtcaagaagggtccaatgaagcgaggggacaactttcctttgactttaaatcttcgcataccccagagtggtgacaccttcaaatagacataatcaccctccttaaactctagcagtcttctccgggtatcagcataggttttctgccttgactgtgcagttctcaaattctctcttatttgatggacttgttcctctgcctcttgtataatttcaggcccaaataactgcctttcacccgtttgatcccaatacagtggagtcctgcactttctgtcatacaaagcctcaaacggggacatcttcaaactggcctggtagctattattgtaagagaactccgcatacggtaaactcttatcccaactaccaccatgcttaagagcacaagctcttaacatatcttctagcacttggtttgttctctcagtctgcccatcagtctgaggatggtaagccgaactaaaattcaatcttgtatccaaaggactcatgcaacttcttccagtaccgagaagtaaactgtgatccccagtctgacacaatcttctttggcaccccatgtaagcatacaatccgtgccatgtacaactctgctagcttggctcctgaatatgtggtcttcactggaataaaatgggctactttagttagtctgtccacaatcacccatatagagtcatacccagcagatgtgcggggtattccaac

SEQ ID NO: 179069 - DNA, 633 bp, Zea Mays
cccgcctcagcacctatcgggtccaaaacctatgcggacctgccctgaacccgcctcgctgccatccctataggtgtgcggtctgaatgacagcgcgggagttggtgtgtcaggtcaaaggcgtcatttgccacgacgtggaccttgtcaacagaccaaccaccctgtcataggaaagttaactaatgacgatgagtaatccgctgcatgacaagatggcacataactacaaccataacttcgctacaatactctgacgaaagaaagaaagatcatccacagaagtccttcggttacaagaaacctagaggacaaggagctacgcgacaagacccgacccctcctcccttcgttcaacctctcgggcatacatgaaagtcaacaaaggacgatgggtaatctgctgcaagacaagacgtcacgtaacaacaaccacaatgtcgctattgtactatgatggaaggaagaaagatcatccataggagtccttcgctaagaagccgggaatctagaaccatacggggttccacattttgtggaatgtggttctagatcgaggaatgagaaccatacaaaacgacgacgatcctatggctggaacgtgatttgtgctcgagtggaatgtgataaaga

SEQ ID NO: 179070 - DNA, 1037 bp, Zea Mays
cgggaatgtccagttcgccagatattcttgtatcaagtctctagttctgattgctcagccatgaccctgaactccacttcagctagctggcatggagatcccaactgcatattgcataggggccaagtcatgctgaagtttaatctcagtggactcatcaccatgctcataagtttttcccttttcttctcgtctgctttcacgtaaaaccattcgctcgtccaaccagtcggccacttggtgcggtagcctatcatggggccttcgtatcttttcggtatgcaaagttgtatcatttgaagtttttgtgcaggccgtcagcccttgcctttgtctagtaatgaaactcatatacctggcagaacccttcggcattagcactctttccttggcttcagagagcccagatgtaaacgctgagccagacaatggcattcgagattagctcatgggggtagatctcaaacttctttaaaacttcacctatcatctcataaagagggaaccaaagtcccaccctaaagaagctcttgaataccacaacttcatcttcctttggctctggaattatttcctctccagcaaagcgaaccagttcatcatcattttccccaaaatatcctagcttcttcattagaattagatctttagacttaactgtggacctcccaaattcaacatggctgggcttagttggacatagaatgctattgtcatcttcaattttattattactctcaacttcagtcacgacctgttcagcttcgacattagaggcacctttggtaatagctccttcctacacaatcagccctgatcgtctcatcatttctgagatgggtgttgtctcagtcgtttcagtttcatctccctcacgggatacccttgtagtggatcttactctggccattttgttgttcagcttctctcagatgaagttgttcttaagagatggaatgcttgttcgaaagtgcaatgcagagagcttcggctccagtgaaaattttcaacagcacaacgctgcaatagcaatgaat

SEQ ID NO: 179071 - DNA, 682 bp, Zea Mays
gagttgtatagaatacgattagcaaatgttacttatctatgtcttagtgaacttagtgaacatgaatcttgtctactatatattgttagagggaagataattgtaaaacatattgtcgaggaaatttcggtggtgaatttatagggtgggtcatgaaacgaagaactgaaatgaatgcacaaggacacgaggatttagacagatttaagctctcaatgtacgataatactctatgtcctgtgcgttgcagtgtgacagtgtctattgcctatgcaatatgatcagatgatctaccctagatgggtgttgccactcccctttttgttacagaaagactatctagccgctagctatataaggatagagatcaccctaaccgacccctccaaaaaacaatgagatttatctctatctttacacgcgagctcccttgtgctacatttataaagataccacccttatcatgaatcatcatcttcccttatttgtttcatatagacatgtgggctgagtcccctagcgtctgagttcgagtccctcaccgagtccaagttccccaggacgagtccgagtccgttggtcccactgatcaacattttctttattggaaagttttgagtaccctcggtatatatccttaacagttgcctcccaagtctaacttggtagagttatcaactta

SEQ ID NO: 179072 - DNA, 459 bp, Zea Mays
agaggagctcggcctccaacctcagcacttcacgctccgcttcatcctccaggcatccatcttcgcctacctctacgagatgttcgtgggggcaacgcttcttccgccagcattcagacgaaagggtgttgtgcagcgaccttccgggggtggaaagcgagctgagctgcggctccatctttcgcgtgagcttcaccagcatcccatggtacacctctatgaactagtctagctccaactccatgaggtgggaagcgacctgagctgcagctccatctttcgcgcctccatctctttggctttaatggcctcgacatcgcctccaatggtgaccgttggtccggttgctgatactgaagatgccgcctggaaggttgtacaagatgccatggagacggcggccgcgcgcttccagcgcgaccctactgatgtcgagtagctcatacctgtagaaatgag

SEQ ID NO: 179073 - DNA, 518 bp, Zea Mays
caacgtaataatatctccaagcactgatttacacgttccgtctatccatcaaactgtggatggtacgcagagctcatgcgaagacgaacatctgccagacgaaataactcttgccacaactaactgagaaagattttgtcacgattagagataattgactgaggcaacccatgatgtttgtagatatgatcatgaaacaccctggccacagacagagccgtgaatgggtggtgcaagggcaagaaattagcatattttgtgaaggtatcgaccaccaccaaaatgcatgtataattctgggaccgaggaagagcttcaataaaatccatcgagataatttgccataaagcaatcgggacgggtaatggttgtaacagccccggtaacttggctcgatccgcctttgcctgttggcacatggtacagtgactgacaaactgttgtacaacatgcttcatgccctaccaagcaaagagctgcttaagccgagcatatgtcactggcattctagaatgtcc

SEQ ID NO: 179074 - DNA, 865 bp, Zea Mays
gtaagtttgtagtaagcttggtcactccttgaactcaacgtagtactttctccgtaatacgccgccaagagatcattctttattttttgcaggttgtcaattacgtgccttaatatgagtcattggaagcagccgtcgaaactcgccatgcttgtagtactgctgctgctgctatgtcatgcagtggacaaagtccattgctcgacgcaccataacaacagccaagattttcattccctgcttgagtttcacaagggcatcaccagtgatccgaacgaagccttgagcaattggaaccccagcatccacttctgccattggcatggtgtgaactgcagtttcactcgaccatatcgagtcacggagctcaatctcaccggccaaaacttggctggccaaatcagctcctctcttggaaacctgaccttccttcatacccttgatcttagctacaatagcttcagtggccccctacctcttcttaacaagctccgaaacctggacgtactctttctgggaagcaaccatttgggggatgttattcccgattggcttacaaactcttccaacttagttgatctagatctctctgaaaacaatctcaccggccatattccttcaaacataggcttcctaacgaagctagaaggtatagccctttacaataataatctcaccggtgtcatcccaccaaccttgggaaacatctccacactagaggtagttgatttttcagcgaatcaactaagcggaagcattcctaataaagtttggcaaatctcaaacataacaatgttaaatctaggacaaaataacctatcaggtggaatcccagatactctctctaacttctcttctcttacag

SEQ ID NO: 179075 - DNA, 739 bp, Zea Mays
acaataacacaaaggagagaaatagtgaagggttaaacgctggttgggcctcaaaccgccttcagcccagctccactttcaacccttctggcccaatctgcacacacgccgccatcaccgctgggtggggtaccgcggtcaggtacgtcgtcctcaccatgccgcaaagcagcggactccgcaggaatcgcgcgcgcgcaacaggaacccgggcttcgcggcgggatcaagtcttcggagtccgactccaagctgtatataaccgtaccctcatccagccattagtagccccaagttatccacgcaagaagaaagagagagagagggtggaaagaagcccatcgctggttttgcccaggtcgtgtggtgctctgcggtgcgatctgaatggtcggccaagcgctgtgaacaaatcgaacggagggctggggtgttggctgggcacagccaccttcggtgctcgtgccgccatgggcagcattgtgagcgcggggaaaagagctcgtgcggatctcatctgtaagctacttgcctcgtcggggtcctgttgtcgggttgaggagcttcgcccgtgccctggggaggttgggatagcatcaccgtggttgaagggaccaccgtgtgccctgaatttctcacctggggtcggcatcgtcacggtccgccgcgtgctatgtgcaggacccctgctgctccaatccgaggtatgcttcctaccacgacgatcgccttgttccat

SEQ ID NO: 179076 - DNA, 2856 bp, Zea Mays
gcaaatgcctactccaaatatgcagggcgtgtcacacaaagtcacaaaccaacaaaaagacgaccacaacaagaacactacccagcaagatgaccaaatgtccagggtgagcaaccaaaggagcaattccacaaagtttactttggaccaaaaaatgaagatgaaaggataaataaaaatttgctgaggaaacaacacctacaaaactggaaaacatgccttctaactagtaaaacatagtcagaatgttgcatcctagctcgaccacgtgactgtataaagctgcgtacagttgctgcctgatcaaaacggattatcaagttacaacttggcacatctagtccctcctccaaaatttgtgtggcaataatcagatgcacctacaatgtatcattttatcatcagtacaaatatttatcggacacaacaacagcagggcaacataagcagcagacctttccactccgaaatgaatcaacgatttccacatgcttattcctactctgatgttgcaaaccacaattacgccctgatgccatgtatctaacactccatccagacatttgattaatagttgacagaagggcctccaacacaatgcttgtaataactctttcgacaaaaacaatgcatctcaaatcttgcatatgcctgcaagagggaacgagagattaatcacctatggtaacaatgagagaacaattttcagctccccatatcagttttaggtgttatatattatttggatccccatgtcagttgcttgatttgcgtacaacaattactaagaaagacaatatgtccgacacctactgctctcctgcatttgctgctcaatgcagctgttaaactttttgctgttattaaagcattgtattgactaacttaggagctcatacacaatgtcatcaaacaagccacaagcacttcatcttacttgctgacttctcttgtgcgtgaacaaagcacaacctgaaaggcagtaacagctagctaggtgtagcatgagtttatagaattggtcccctcttgattttatgtcacgctccgccattgccatccagctggacattcgggttcataacactataagatctataggacaagcttgtgtacatttatttggatagacaactttagtggaattagatttgcatgtatggcgaatcgctacttcaaaggcaatgggagtaaactattttctcacctataccccataagagatttgataagaaaataaactttggatgttaataacccatcttgcagatcctcagcgaagtcctcaccaatatgtcctgtatagacggatataaatataaaatatgacaggaagatcaacaaatcatatttaatacacttcagaaattgatactccatacagtcaggtacagtgtgcatgctttcagaagatttaatctttgtatgttttgaccaataattagtcaagaaacgtctggtataaatatcatataagtacatttaataaatgactttgcactatattagttggttttgtagctacaaagtacaaacaacattcttgtttgagaaaacaatattcaactagttttaattttaacaatgtaaaaataaaacacatcatatacatttttggacagtatcatagatagctcaagaacacactaagaacaagtgtgtctctacctaataatgtaaattgccaaatcgtgcaatggctcaatcattagccttcaatcgagaggccgctgaccccagttcaaacccaggtggtcaaaggtcgtgtgtctacataaaggttgtgcaggtgtcatcttcttcccggagttgagtttagtattttatttagtgaactgataaagtgataaatattggcatacacctcataaataacacagtagtaattatagatacacttcttatcaacaaaatgatttataaaccataaaggctgagttaaaaatattgataaacagtggcaaaacagttgcacagagtaattcatgttaaggctgaactttcagaaaaaggtacattaaagaaacaagaaacaagaatgcaattacgttgtacgcccctctttgtcatcttcaatataatttctgaaagatcactatatacatctctgacatagtttctaacaaatccttcaagtttttcatccaattcttcgccccaaaaggacacacagctttccttatttgattgtagaatctcagcagcctgaaaaaaaggtttaaagccatttttaggagtgcatcagaatgataaaaatgtgcacattacatatccccatacctttgctgccagccatactccaagatcagatatgcaatataagaacattgcatttaatttttttattcttttctctgaattttccaaaggtgaaccatgcagtttccccttcaggatttctaaatgctaagataatgtaaccactgttaattcatgtgtatatcaactcagaacatggtgagagaagttattggaagttatataagaaaatatactaaaaaggtccataaccccatcatgagcataaaacgagataaaaagaaatatggatatgtcagtaaagctattgcatttttttgccaagtataaagccatgagaacattgttgcacatgtataacaaagcaaataatgaataatacagatttgttcatcatcccttcaaggttgaatattaatttgaatttgcttggactaaacacccacgaatatccctaactttataatattacttaccaacagcattatgcctatgatatttaatcatattactagtaatgtgtcgttgtctttcctgttaaaccatttgaagtccaagtcttagttatttttatgtgcattattcatgatatcatat

SEQ ID NO: 179077 - DNA, 753 bp, Zea Mays
ctggatctgagtgttttgagtctgatggtgagtctgggagttcgttttcctagacagaggagtcctcggatgaaggcttggattatttttttgcgttagatgtggccgtagcggagtcttcgccgcgtgtggaggtaggcgaggcggctgatcttcctagtgcgagtactgagtacaggcggcgaagggtggtgtcgaaacacagtgtgggtgaggtttcgcgaagtggtaggcgccgtcatatggggatggagtgtggccgtcttcgagtagactggattggtaaacgagaattgttgtcctcgccgattggggcgagcataggtgagggggatctgcggaatctttttgagggtgaggagttgaagataatgttgttcaattatagggaaatgggtataatcccgaaggttgagctgatgtagtatatggtgccctcgctgtgtgtatgtaactgtaacttgtattgtaatgtggcctgatggtcgttttcgcacgcctgtactaatccggctgcacccgtaggtgacttttgcgcggagtgtagattgacgtacttgctgcacttgttcgtcggcacccttaggtgattttggcacgtagtgttttttcggagaaagacttcgattgcgtattttattgtgcctatccggctgcacccttgggcgtcttttgcacggagtgtctttaataaaagacttcgattgacgcacttgttgtgctgctccggctgcacccttaggcgacttttgc

SEQ ID NO: 179078 - DNA, 689 bp, Zea Mays
ggagatgctgcccaagctcgaagtggtcccgcgggggtttttgaggtgaccgttgatgaacgtggcactgtgggactacatgtttcccgaagcaccgcgtcctatctataaaagggcggcacggcctgtgctgtttcttacccttgcgtgcgccggaaaaccctaactttttcaaaccgctcgcccgctcgcctgccctccttgttcttctgcttcgaagatctagctcgcgtcaagcagaccgcgcgccgccgccgacggtacgtagcaatgtcttcttcctcatttgctgcaagtgcgtcaccggtcgatccatcgtccgaggatacctgagcggtttggcggcgatggagttgcagctgggccacacggtggagttcggcacctcgaggatttcctcggttcgtgtgcaggagatgcagcaacttgggtacttcggtgatggtgttgggcgcgttccgggcgttgaggagattcctgagcctgagggaaaattagttgtgttcgaggcattcttcatcgctggccttcgccttccggcacatcattttgtggtggaggtcttgcagaggttcgacgtccaggtccaccagttgacacctaacgtcgtggttgccctggcgaagtatgtctgggtggtgacttcgtacggcggtcagccgttcgtggaggtcttcgctaagaactat

SEQ ID NO: 179079 - DNA, 362 bp, Zea Mays
gtcagcggtgcaggcgacgaggacgacgaggaggaatcgtagaggaagagcgtccggcgaggccatgaggggcacgatggcgccagccaaatggtcgaccggtgggaattcttcgtgtgcagcatgcgtttaaaatcttttccagttatgatatgaatgctactggctttgtttcagcctgaaacaccccttgtgtttaaacttcagtttcctacaaaccgtacgcggaggcattactgagctcactatttgttcaccagagttgcaagtgccggggaagtccacactccataggatccaaatgctcgacagcatgcaacgagagtacgagaccgggcaatccagcttgccccaaccgataa

SEQ ID NO: 179080 - DNA, 645 bp, Zea Mays
gggaggcagataacataactccaccagaaggattccggagagcatgacatcaaggcgttatccatgtgagtgtatcacataggagccaacaagattccgaataatgtgccctacgtacgaacgaatagtggattgtttggcgccaagctcggaggggaacaaccaccgaaagagtcggcacacaatagtagacttagatagagttagatagacctcatggcttgtaaagggatatctctctggtcacctatataaggctagggggtacccctatagaactatctcatctcatcatccctctcatagtaacctcgccaccattagattgatagagagaattcacccaccgccatccattactcatttgtaacctatcagcaaactcaatactcagcgccaacaggacatagggtattagcactccagcggcctaaacctgtataaatctcttgtgttccgacttgcttccgcacataccatcgagtcgtgatcaatgacgtcgtcctgcccaaaagcatcacgtggggtaccccatggtgcgcagtcgggtcacaaacacttttgcatgcctgaacttagaaggaggagatccaaccaacacatctgatgatgctactaatgtaaatgaaataactcttattcgtc

SEQ ID NO: 179081 - DNA, 646 bp, Zea Mays
gattggaacagctataaaaccatgcaatccaatggagaccgtaatgtctttgcaagcgtaaaacattgcattgttcgttgattcatacgcagatgactattctaaaaataaaacatgatttttctaagttttgcatcaaatagtaactatgacccacatagaaacaataatacgatgttacactgaggatccggccaatagggttccgatgctacttgtcagggtaggaggagacaactcgggattgacatggggtagaagcagatgacgaaacgatggccgctccttcgtttacaagagtattctcttcttatcgttagcgggcgttatagcgtttacttgtatatccccactagggatggcaattctacccacgagcacggtatccgcaggttttatagctgatgggcacggatacacgtataaaatctcgttcacggataaggatatgggtaaaaattctcgcacaagggtattgttcggacataaccattcgcttgctggtaagacccgctacccatttaatttggcatcccaaccatatccctaccctaaaacgctaatccctcccctcgccccgtgagttcgtgacccattgactccgtcgctcgccaccctctaacgcattgcgcacgtccgcactccg

SEQ ID NO: 179082 - DNA, 644 bp, Zea Mays
gcggatctaccgcagtgtcactgttccgacagaggacactcatgaatctgtcgtttacgttccatttctcatccgcgggcttgctcttcccatctccccctttttccgcggcctccttgtttttatgagttgaatctgacgcatttgaaccctaactcaattctgcaagttgccattttcgtacatctgtgcgaggcttttcttggaattctcccccacttcggactctggaagtatctttatcactgttggcccgggatggctaggggacaacatcagcttattggcggcacaagtttagagcttcgccgggggaaggaaagtggagtacctcgatattccccttaaggacagtattaaaggatgacaccttgagtggttcatcgtggaaaaccactgcaaatctctccccctcggtcggggaggcaccagatgttcgcacacctagctgggaagaatctcctactttttcaaagataacagaggccaaagtattacttgctgagatctgcttgctgaaagatgggggtctgactgctgaagctgtggttgctgactttgttttaaaaaacattcaacccttgaaggatagaatttaccccgcttacttatatagcggcatcaatgattccacccgggttaca

SEQ ID NO: 179083 - DNA, 774 bp, Zea Mays
aaaatagcctcttgattgaagaaatgttgcattctaagatccattcttattgctcgcatcctatcccacaagaagttgtataagcccaagaaactgtcatcatatgtgtgatccagcaaactaagaagatactccattgtcttctgtaaaattggcagaggccttatcaagtctgcatctctctcagcagtcctattatactgtaaacaatcacataatgtattccatcaaacttcttgttatcagtgattagaaataattcaaatgaaatactgtcatactgccagcttacaaggaatgtagtatgtacctttttaacagcgagaagctcagtagttaggtttctgtctccgtccaatctttcatacctatcaagatctccttttctctcacgctctgccctctcaggttctaaacggaaacaaggatatatatgcaaaagatatattagttctgtatgtttagaggaaggtatatagaaaaggcaatgtgaataactaaatagtatcgtgtgaagacgatctaaggaagaacctgggcacatatcagggcaaagcccaacaattgcagccaaagctgtggaatccatgtcaaccaaagtattgtcatcggtgtcatcatttgttctcaaaggagttcttcccactgatgtggcttgtttggacttatctgcagagcttttaactgttttcacaaaatcattagtattttctactggcctgcttaattcaacatggaaacgagccagacgcttggcttttgcttgttcctccc

SEQ ID NO: 179084 - DNA, 533 bp, Zea Mays
cttcgattctcaggcaggaattagccctcgtggtgaggtcaatcgcgcagtgcatggttgataaccagaggagaagtggtgctgcgattgcgaggttctagtcgtgttgattggaagccggatcgtctatgtgacatctccaccaaatcgatagttatcttcacctgacggaagatcgggcacccccattactatcaagtggtattcaaagactcaggtattaccgtcaggcttaccctagtttagtttaggtttttcatcctataactccagataattgccatacaaaaaaatccgctatcctataaccctgtttagccttgcaatttcgtttcaaattgctttgttgagtttgtgtccgtgtcgagtcttgttgcttgtttaggtcgggtcgtcatcgtagttcaaccgatccgtcgttgttatttagttctgccgctatctcatccacctttcccacattacaagtcgagcaccacattactcgatttgccctcgctagccgccttgtgtgaactctcgccacgctagcc

SEQ ID NO: 179085 - DNA, 521 bp, Zea Mays
gggtgaaggtgatcgagtgctcagaccatcggtacggggcggaaggaccggtggccgccaccagtatctgacgatcgttgagcttttattgtctcttactttcttgcgacccgtgtccaccgaagataacattgacttctctgtcaatgcgcgggaaagctccacctccccctcctcctcctgctggggttgtcgaggttctccaggtcctcctcgtggcgggggaggaggtagaggttggaagggtcggccattccccatggaatgcttgaagtctctgtagttccggagggtgtggcgcgtgtccttgtggtacgggcactgggcgtcgaggatgtcgtccagcgtgcgttcgcctccgcgaggtcctcctcaggcgcgagaggcgggcggtccggcggcgtggacctcttcacgaggcctcttctcccaacgtttgtcgggttgttggttcgtgtcgcgccacggtgctgccggtgtaggctttgctcctccgatgaggtcttgagctcgttcatcgg

SEQ ID NO: 179086 - DNA, 339 bp, Zea Mays
catggtggaagtcaaacacaacgatcgattaaaaggccacgacactataatccttgcccaccaatgcgagcaggtgtattatatgacatatccatcaaagagaaagggtttggttgattggagggtagtgtacaaagttaatcctcgtgaatgactttatgctcctggggatgttggttatgttgaaagtcaaatcgagcaggaagtgggagctgctgagattttccaagacgacgaacttaccaacacatttaatgtacaaactgaaatgttggaagaatctttattaggcgatcaaaatgatgtagaggttcctccaaaaagaaaacgagtgacgag

SEQ ID NO: 179087 - DNA, 531 bp, Zea Mays
gaccaaacacccagacatgactaggcggttaggagtgtagggtatggacagtgaaaccctgctcggttttagataagaaacacaaacagggagagatggtttattgcactggtggtcacagttatagtaaaacaaggagcactcgactggacttgcatttatcggggcaccgacatgtttccgccgagttttgcatgagctagcacgcggcctcaacccctatgtccacgcaagaccagtctacagtgaggcaaagggtaaagctttactggtgtttggacagggaagcacacctacagctgagtcacaagtttctaccggcttccttggactccacctggcttcagatgcagtgcgtccatttttcctgggcaacatagttccttttctttcagcgaccccatctccaaaccatcggctcttcttatccactacagcctagaacacgtaggtagggaaaatggaagaaaagaaaaactcttcagatatatacagacccaatctaacctgtccactacatataaattaagt

SEQ ID NO: 179088 - DNA, 554 bp, Zea Mays
ggatgttagaacaggagagcagggagtacgaatagacctggaacacgctgaccacggtaagggctcttttacggtggcggagaacggatttgggaggaatgagaaattagcgagctctggtgatcgattgagggcactgtttggtggcttggtgctagactaccctacggagctcacggcaggctcaatttatagcaggcaagagcagtggccggtgaatttggattgagacgcgcggcggccggagataacaggggttactggcacagtggattcgtggagtacaccgtggcggactcaccggcgatgattggatggctaacgtgagttatggcggtgcggttaaaggcttgaggcgtggcgcaactacggtgagcatcgcggatttcagtgatggccgtaaggccacgtcgctagcgcagggaaccgagggacagcgtggccgcagtacttgaacccatccgtgatgagatcttttcgccagtgagctcaatccatagcccatacgcacaaatcacggcgagcagtactgatcccggtgaagggtcaccggc

SEQ ID NO: 179089 - DNA, 648 bp, Zea Mays
ccgagaggacgctcggcatggtgcgctgcctgctcggatggagtgcgtcgtcgcacacctggaggatccggtccggcgctaccccctcggtgatcttgccaccggggagtttgtgctctttgtttcctacgtttcgtgcgggttggcgttgccgatctcacccttcttcatgttactgttggaggatcttggtctccagctctagcacctcacaccccactccatccttcaggcggccatcttcgctcatctgtgcgagatgttcgtgggggtggcgtcgtgcacctctctcttccgccattttttcgtgctggtgaagtctgggaaggccaaggaccatctcggtgcgtactacttctagacgagggcggattcggccggcgcctgtatctcctcccttagcggcgcgaggtgggaaaactgacgggtcgaatgggtgatcgccagtaccgaggccagcgaccgcctcgtactaccgagtgatgggccgaggctcgacaagaagcaatggagggccaagccgccgttgacaccagagttcgagcccgtattgggcaggatcaagtccttggggactgacggtctgacgtcgatgcacatggtcggcgacttcttgaagcgccggatcacgctgctgcaggtgagggc

SEQ ID NO: 179090 - DNA, 976 bp, Zea Mays
ccccatattcaccttttctatccccatattgttgtaacatcccaattttcagctatggaataaaacttgttcagaattattgatagctatgatatcctaatccaaactatgcaaaccaatgcctctatgggttatttctcgatattcttctaaattataggctaagcttgcctttcaccgtggtaaattcttgaaaacgtctaatgcccgcccacaatagacagagggagcccacaaccacctgtggcaaaacacatgcgtaaataaatcgtaagcctgcctctagctgccttggcatttgtgcgtcctgacaagccccacctacaccctctgccctgagacagccttgtcatgcacgccaaactgctatattaaaggggcctggttgtagaccttgaagtgatacctcagtgcagaaagtcactccgacaagacctcgtgcacccgcctgaacacacgtcagtcacttgtcgcaatcacaactaaatgaatgccccaccatgagccaagttaccctgccaacctcgggatgttgcgactgcactgtggcaacatcaccaatcatagtacgccggtcgagactccctccattataaactatcgttcctccgcatataaataccgatgcccttgccgcggaacctcacagtccagccaccatctcattgtcaccctcacatacgaacaacgcgtgccttactcttcaaaccagaggacaagctctcaccgtcgatttgagccataggtgagcatgccatgatcttcgacctcttcctcccctgaagtcattcttaaactataaaagttatgaccttagcatcaattatagcagctttttccatggccatcatttgcccattgaaaatatgcaaggaaaacctcgcttaaacaattgtcatataataagcataaccaagtttctagaagcttctacaatattcatgataaaccttaatcataagcaagacaactttct

SEQ ID NO: 179091 - DNA, 689 bp, Zea Mays
tagccgagttatctacgccaaggtgcagccccgagttctaagactcagccttttactattcatagctcaaccaaatcatcggactagcgcgtagagtttatgtgccactttagcttccacataccactttggcttccacgtaccgctttagcttccgccctcggcttgcagcttcaactttatgtgatgcttcgcattccttcgtaagttataaatactcaatttgctagattctagggttaagaaaaccctaattctcgagtgttgttctcccctgttgtcatgtatcttctaaaagtgcctctttcacttctgacgcactctcgtgccagatttttcaaacacctcgcacccacatgaattctagaggtctaccattgaagcaaaggatttgaagatactaatagtgatgaagcttctcccgagaaggattttatctagtggaatctaccaagaaagagtgatttcttccccatgcctaatatcgaccaaattgttgtattttatcaacattccttacatgagttggggattcccacttctaccttaccgaaggatttgctagaatattacaagattgagctaattcatttaacccaaattcaatccttcacattgttatcttcgcccatctgtgtgaggtgtttctagagattcccactttccccttattctagtatctcttcttt

SEQ ID NO: 179092 - DNA, 508 bp, Zea Mays
ttggcaaacaatagaattcttctcgagcatcttgcagacatggtccaggtggccaacaaacttccctatcttgcccccctcaacttctaggatactagaacagatagaatcaattatatgcaacagtgttgattgtctcctcatctcttgaatcgcgtatcgcagagaattcttgatgctaacatgatacttcaaatcaacattgtcctgtaaacaaccaagaaacaagtaccagctacaagggaatacaaacaacacggtgcctgccccgcgaatcataaaacacggtcaccagctatgaggggaaaaatcttgtttacaggccacattgattcgggtgactagaaagaaaataagcataaacagggtcgatctcgagaaaataaacggtgtggagaaatattaccaaagcctcatcactggcattaacatagacaaaggttgagttcttcatgaatcaacagctccttcaaacttttcgtgagaaattcctgcatacttcacagca

SEQ ID NO: 179093 - DNA, 605 bp, Zea Mays
cacatatattatactacctctctgctgctggctctatatatatgcattgcatgcacatggttagctagcatcggatagatcgagtagcaactgctgcatatcatcgatcgatcgtcgacgacgatgccgatgccggagtcacatccgcacgctgttgctgctgctgcggcgggtctggctctggcgtcgacgtctagccgtcggagcctcagcttgggctcctccatctcgcagtcattccggcagatggacacggaagaccccttcggccgggcgcagtcggaccacgacgacgaggagaacctgcgctgggccgcgctcgagaagctacccacctacgaccgcatgcgccagggtatcctccgccgggcgctggacaacgatcaacagcaacaacagcggcagagcgtcgaggtcgtcgacatccacaagctggccgccggcggcgacgggggccgtgcgctcttggaccgcctcttccaggaggacagcgagcgattcctgcgccgcctcagggacagaatcgacatggttggcatcgacctccccaccgtcgaagttcgctaccaccagttgacggtggaggctgacgtcattaccgccgg

SEQ ID NO: 179094 - DNA, 857 bp, Zea Mays
gggaaaggggaaattgtaggtgatggaggagatgtctatgtcagggtatggaactgtactatgctccatgccctatcatgtatatggtcgtcgttgtcttgcctctctcgggggcaaaagcaaaagccaggattgcacttggtggggagaaaaggagggtataaatcatcatctttcatcaaggggggcagcgctgtgacttgctttttgtgcccacactaggtggtttttttgcggtgttttgcaatggcattttttgtttcgaagctccttcacatgtgacatgtgcgagttgtttgattgatctcgtgttaaactcagtctcaggacctgagtccacctttttgcaccttgattggataatacaataaccttttttgttgcgaccctttggcatgtgattaattatgtagaatatgaaactctatttatttttcaagcagtcactgcccttcaacgcatactttttttcttgcgtgatttggtaggtgccgctgaactcatttttttgggtttcttgctttagtatcatttttaggttattattgctatgtttttttggtcgtcgtgtaaacctaatccgaatctgatgtatgtctgttttttctttatttttttatcgcagagtgtgctcatcctctcaacaagcgatcccattactcaaaaactgataagttgggtctctttccacgtacaaggcttttctcacctgtgggtctttttgaccttcaaattacagatgatgaaagtgatcacaatggaaggggcaggaatactgcagctgctatatgtccacacgagccagctggtgttccaattgggctaggccaacttgctcctcctatagccacacatgt

SEQ ID NO: 179095 - DNA, 414 bp, Zea Mays
ttctggttgatcctacgatcagaacacatatccattgtggagatggaattattgcatccaatagtcctgagtttaggaatgaagaggagccttatgcctttgctatgtccgctgattcagatgataaccgttcggttggtgaacttacacatagtgatattgagatgttgaagcgtgttattctagagcaccgggatccaagagtgcatgagttcagcgatctgagtctatctcatgacgcctttgtagaagggagggatgatgagttgctagatgctcctgaggcgggtcctagcatgatgatcgaaatgggtcgggttttcaaggacctaaatgccttgaagatgtggttgcaacattatgtcgtcttacgtaagaggtcgtatagggtgcttcattcatacgagaagcggc

SEQ ID NO: 179096 - DNA, 537 bp, Zea Mays
ttgtcgagctccttacgatgtggctgatccaagctggaccagaggttacagggaggaagatggtgggtgggcttcgttgggcagtcctaagcgtgggacaagaagcttgggaggttcggctgatgggtcaggcgtgcatgaaatggtcttgcgagtgaatataggcgaggtattcgggcacagaggcacggggtggttacggctgcgtccgagtgagactagcacgtgcgaaaaggacaacagtttgaggagatgaagctgacacgcgagctcggaatgacaatgagaggaacaagtgagggaaaatggttgcgcgcacaacacgtgaggcactacgcgacgaggcaaggcaatgtggtaggcgggggtagacgaggtagacccaagcagcacgacgttcgcgaggagaagagaggtttgacgatcccgcaaaaaaagggcaagacccacaacgggatcgacgagaggaatatttatataatattcggttctcgaaataattttggttttagcaactactaactttttagggattaa

SEQ ID NO: 179097 - DNA, 701 bp, Zea Mays
agcgctcaaggcagtaatcgatccaggtggcaacatctacatgaggatatggtggcgctatacgtgatggcgactgttgtctcaacggagatgatgttgtccattgccaacaaggtgacacatccaaggaggcttgggacgtgatcacgaccatgcgggtcaaggatgactatgtcaggaaggcaatatgacgcgaggatcaaagtgtcaaggattactcgatgtgtttgggtggtatagtggcacaattggtgactcacgatgcggaggtggacaaggccacagtggtggggaattttctgtctagtgagtcagaaagggtcaagaagattgtggtggcgattcagacactactcgatatgtcaatactcacattagcagaggcgacagtgcagttgtacgccatggaggaggagctatagccgccatcgatatcggtccatcacaacgacaagctctacctcatagaagcatgcatgcgagtgacagcacacatggtggctctagctgtcatgatggtagaagcagccatacgagaggacacagaggtaactcgaacacatcatcttcttcatctgggcaggaggaggaaccaagatcgataatgaccaatgcatgaagtgtgggaaaattgggcattaggctcgtgaataatggccctggcccaagaccaagaaggagcaaatgaacgtggttcaaga

SEQ ID NO: 179098 - DNA, 760 bp, Zea Mays
ttatcatcgtgcttgtagccgttgcgacgtggtcggaccgccggtgtcgtcgtggacactccggcgatctcaattatgccatgttgtgactctttactacgcggtagtaaccgcgacacacttgagcttaccctctctgaaccactgcaccggtgaacaccacgattgcgccaccagtgacctcttccttctccggccgccaccgcgccaactccaaattcactggccattgcccccaaatcctataaattgagcacaccgtcggggccgtaaggtagtcaagcacccaacccaccaagtcgagcctccaattgctcaccagagctcgccaatttcagatttcccccaaattggtccgaagcacagcgccttgtgacctcgtcgtggccaacgtgtctcaggtccgttcatgtcctctggttcctcgtttcagtatccttggatgctcctgatactctctgacccatccaattgagctagaatccattggatcatcgggaacacctcggtcggtccattcctcgcgctgtcaccgtgaaccgggtgatgtagaactcgaatccagcaattaagtgaggggaattagtcacgtagggttgaattcggtgtccagcaaaggggagggctagccgttgcgtagtttagccagtacaggttcgccggagttcggtctggcgccgctcgtcgtcgtggacctcgggatgtgaaggaatagaagcacgggggtgtatttgcaagtgtcagtgagacaaacaaatag

SEQ ID NO: 179099 - DNA, 533 bp, Zea Mays
ccgtcgcgcccgtaattgctcgccgtcgcacttctggacggcggatctgcacggtgcgagggcagctgtctccgtcgcctggtttctggtgagtcacctcatatccattttgcctcatctcagtgatcaagtagcataaatcagggcgtgtgctggtgcggggtgacgtcggggcgggttgccggagtttcgccgccctagcctacgcacagtcgtgctcagtcgttgtcgggatcgtgtgaggagggagcgcgtgcgccgtcagatcttgatggacggcgtggattaagaatagaataccggttcggcttggacttgtcccggccgttggattgttgacgtatgggcgagatcggatcgtgcgtataatagatcgcaacccttgatcgcggatgcgatgaaccagatcgtgtaccgattcattaaagaccagatctagtctggagcgctggattctaatcgtacggctatcacgggcgcatacccctttgccatacacgctttacagaaaatcccccacaaaatcacgaaac

SEQ ID NO: 179100 - DNA, 356 bp, Zea Mays
atggcgaaatccttcatcatggcggtcaggagtgtagctcagacgtggtactcttcccttcgcctgggaacgatcacgtcatggcaaaacaaggagattgttctgcttattctgtgggtaggataaaggacacaaaacaaggacgtgccaagtcacgatccaaaagaaggagatcactgaagccgaagcacgacagaatcagccgaagaaggtcttacatactgcctcatgctatttgccatatatccctaaatatgtgggcaaccagcaacccacgacatcagttacttcggcaagtcattctcaagcagcatgggcttagttaccaccaccaccaccattagcaccgaccttgg

SEQ ID NO: 179101 - DNA, 747 bp, Zea Mays
ccatgctttaactcttgcggtgtcattgcttcgaatccatacatcaggcgaaagggtgtgatcccagttgctcggcactctgtcgtattcagcgcccatatgacttcgggtaattggtctgcccatttgccctttttgtcgtcaaggagccttttcttaatggcgttgaaaatcttgtcgttggcgcgtaacgacgcgttcgacgatgccgttggattttgggtggtagatagaggcgaagactggctttgtgccaatggaactgcagaattcctggaagtcttagctgttgaactatttgccgttgtcgactagtagctcggacgggactccgaaccggcagacaatgttttgctagaagaatttttgggcggtcttcgttgttatcgtggagactgctctagcctcgatccacttagtaaaatatttgacggcgatgaaggtgaactttaggttcccttgagctgtaggcagtggcccgacgatgtccagcccccaacgctgaagtggccaggtgtgggcgatgagcttggtgaattgcaaaggggcgcctgagtgaggggagaatttttggcatgcttcccatgacctggtgactcgatttgtcgtggatattatcgcgggccagtaaaatccctgatgaatcactttggctgcgagggccctgggccctgagtgtgacccacaggtttcgtcgtggacttcacgaaggatctgaaggccttcggtttcggttatgcattttag

SEQ ID NO: 179102 - DNA, 876 bp, Zea Mays
gtttggtacctccactctttcaggtgcgttcctagcaggaatgaaagactttgttacacctttgtaattagtgaatgcattaggcaggttaattgcaatattttgtagaccaataattttctaaacttggagttcattttctttagtacgaggatctgaggaggagatactcttcgcaacccaatcaatttctcggcattctcctttctggtacttgaaatctcccctaatgccggaaaatgttcctcattaaaaatacaatcaacgaaccgggccgtaaatagatcacctgttaggggttctaaatactttattattgacggagattggtaacccacataaatccctaactttctgtgggggcccataaaggtatgctgtggtggtgatatcagtatataaatggcacacccaaatttatgcaaatggaaaatcctaggagggtcccctcgtactaactgcaagggagaggagtcatgatatgcagttggtcttatttgtagtaggtcggcagcgtgtaaaactgcatgaccccaacatgacgtaggcaaagagcaattcattagtaatggacgtgcaacgagctttattcttttgattaaaaatttggccaaactattttgagtgtagacatatggaactgagtgctgaacatgaattcctaaagccatgcaataatcattaaaggcatgggaagagaattcagcagcactgtccattcggattgattgaatccgatgtttaggataatgtgcctttagctttataatttgtgacattattttaacaaaagcatggtttctagtagacagtaaacacacatgtgaccatcttgtagatgcatcgattaaaaccataaaatatctgaacgatcca

SEQ ID NO: 179103 - DNA, 438 bp, Zea Mays
gcacaattgaccctagtggaggtaatggtggagaggatgatgatagccatggggatggtgaaggtgatgctgaaacatatgctcctaggggtagtgatggtccatggagtgatgttggagggagtggtatgcgggattggagtttcaccaaagagagttagttcacccatgccatccaagatttagattatgtagcacctcattcagaacaggagatgagaagcggtcgatgacgattggtttcccttcctgttgatgatggcagtcgcaactcagttagcttctattataactatctaactcgacgcgatcaaaacctaaacccttatgcatggctagcacctcccattcaagtaacgccatcggtcatgtatgagtatggacaaccacccccctctgccttcatatgcatattcacatccaatacttgatcccaca

SEQ ID NO: 179104 - DNA, 389 bp, Zea Mays
atgacccccaatcaactttagggacctgcgaaacaattattttatgttatgtaaaccattgctctgtgtatgctaaaccctggacacatgaaagaactataataacataaccctaaaccgataggtacaaatgtgctacaaattaaacaactaatggtatggatctaacctcagttccattaatagccgtaggatatgaaaatcccaaattctgacttggagcagaggaatacaaaacaacaacaacatccattgcttcacaatgtgcaccagcaagaacatcagtgccaatcccacccaatcctcgtcagttctaaaattgtcttaaacatcacttcgccacccaatcctcgtcagtccttgccaccaataatattttctcataacag

SEQ ID NO: 179105 - DNA, 422 bp, Zea Mays
gcattacagaggtagtgaggggggagtgatattcctcctccagctctgtcagctcttgttagccttcagggactgttaatatcggattttgatcaggcctttgaggaggtcgtccctgaggatatgctatcggagccaactgctgatgatgtgatggttgtttgttctgaaattccagacgtgggattggaggtatcccgagcagtgtctcgtgcatcgtcgactttggaaggcaatcttcaatgccaagacgttggtccgagttgcccgactcccatggaggtgacaggggagccttcagccttagaggcggctactatagaaaacccagcccccgagggtggtgtacctccatggacgtccatgttgggtcgtctccacctcgatccgatgaggcgacggcgatgcatgctttcatggct

SEQ ID NO: 179106 - DNA, 655 bp, Zea Mays
gagagcttgtgtgtgtgcttcacatgtgccctcccttttatagtgcaagggggcacgtacataggcgttgagtcccaactggtggtccaccgatatagttatggttgatagtcggccttgctgacgtacgtaggagccggccttgctgacgtttgcaggagttatggttgatagccccgagttgtcaccttcgatcggtgatgcgtagagggtgtgttgcccaagtcaactatgggtcatatgatgggcgctgcccatgcacgcggtgccgaggcacaaatgtctacctcggtaacacatggcttactgtgcgacccatgcatgcggcgctgacacacaatgacccgccttggtaacacgtggggcggtcgttcgagcctacccatgccctgtgcacagcagggcacgcctcagccgtttgcattgatgaatgcgagcgacgagcttgcttccagccgaaggcttgtgccacgcgccacgggccacatggtagcaccggacctttacctgagtggagagcagggaccaagagcacatactggcttgcaatcatgggccccttagcaggggctcagatggcatatgtggaggttcaagaccctgcgcgggggcccggatggtacatgtggaagtctgaactcattgcgatagtcct

SEQ ID NO: 179107 - DNA, 1106 bp, Zea Mays
ggaaaattagtttcatatttttaggatttttctgtaattttctacatcttttcaaagttctgctgaaaaagaaaaaaggaaaagcttcaatagtgctgggccaaatctagcccaagcggcccaacaccagagagaaaacacgcccacgcccgcgcgcactggcatttttgcagaagggtcctcggtgttctggctaatctgaaacgagcataagcactattttcaggagtcgctgacatttcgcagaaaggccctcgatcttctatctcttcacaggggaaagtcctcgacaacagcgcgcgttgtggagctccggcgagctaaactggccggagggggccaagatcggcgctcccgagcgacaagaaccagattagactccatccgcgccctttcccccaatcaatttcactagcgatgaactatcatgtactggccacgatgacagcgagctgcgaggacattttctcgcgtttccagtgattcatggcggttcagttcaaataacgaggtcgaggagcttgaggagagcttagggatgctagaacaagcgacggagaggcttgaactaacctgagtcgagctggccacggggaggtgttcatcgcggcggcggaaacctaatttaggggaagtgagcgattctccagctatggtggttaattaagggtgtaggcgggtgctatggcttcgcaatttagagacgaagagttgagctcagttgatttgaacgaagagggtgaggaagcgatgaatttataggcgcagcaagccactatcatgaccatggtgataaccattgccggtctttgctggcgatcaacggcggcgtccagcgatagccattcatacgggcttgccacgtccccgccgcgacagtaacacagtcacatccgcgcggcgtggatgaatggaggggagcggcgccgatgaccggacacggccgggaggagggatggccgcgtggcagccggagttagtgccttccaccgcggcggtcttatccggagtaaagaggtcttcacggggagatgctcgccgcccgatcatctcgaccccggcgcaaatcgcggcgcggataggtcgtcggcggtgagattttctgc

SEQ ID NO: 179108 - DNA, 560 bp, Zea Mays
cactaactcaaaccatttcgcaagtaccgttgatccatattattatgatttaacccactttatcactaaaaatctggaaccaaaatatctacgatttttcggtaaaaaagagaagaaattaaaaaaatctgcagccgtcgttatccttttcttccctttgatttttatccagccaatcctatccatccggctgttgtgcgtggttgaaaaattccccgtgaagacttaccttcttccccagccatctctggcgcttggcttcctgctcgtcgacttctcttcctccgcgcgccaggacctccctctgagctcgcactcagtggagctcgatccctgccacgcgttgctccagattcttccgcgccacggcccttccatagctccctctgcccagcagcttctctctctcctggagtttctctccgctgtcgcgcgctcctccctgcgtcgcgcgccgtgctctgtgcacgcgcccatctccatccgcgccgcgtggccaggtgcctgtgcgcccctctccctaagtccctagccagctcgcgccctgctccctgtgccgg

SEQ ID NO: 179109 - DNA, 658 bp, Zea Mays
cctgcctctgcttatggatatcgagttggaaggggtccctgctcacctctggggggttggaactgctgagctcctattggatggtctgtgcatggttcagggacttcacccagattcaatagacagtatggatatggctgttctcaagctcagagcgtggtgtttctctccggatagcctgccagcggtattagatctacatgtttaggaacctcttgttgttggggaggatggatccattgtccctcgcactttggtttatcccatttctgtgagggtgattactcctggtgattggccggcaggggacatgtctgaggtattgccttctgttatcgaagatgaagatgacaaggatcagtttcagcagaggcgacgcattattgggcatgatctttcagcttggccctcggtgcatttgaggcttgggccacgaacctcttcttcgtcggctgctgaacctgtcgaggacgcattacccccggttgtgttggctgatgagttggctgtgcctgggtctgttgcccctgttgacgcagaatttttcccatgtgcttcagttgaagtgttgttggctcctgggcctgctggaccagttgatgatacaattctcccaaatgacttggatgggtctgctgtaacatttattcctggtgct

SEQ ID NO: 179110 - DNA, 449 bp, Zea Mays
tcagtatcctgatgatccagacttagaacggttcttagaattggagcaattgcatcgtttcaacgagtgcctagttgcttcagcctctagaactggttcacacgttcatggaatagaggactttcatggtggccgtttctgggcacttggaagtacctctgattcagaatctgttgtagacgaacacatcgtttcacctggggattgcgaaactcctgctctcccgatgtcccgttcgtctgatcgtctcccgcctctagttcctgagcctacatctggctcgtactcggatatgggattacctcttggttcttatacggtggagtctggaacaaagaggcggtcagatcaacgtccttggaaggggcggttgccgacacctaggatttctcctcggctgacccttggcgacgccattggtagagcattgatctcctcgcatcgatcgc

SEQ ID NO: 179111 - DNA, 931 bp, Zea Mays
atgcgaagtaacccttagtggttctgcctgacatgatacctaatgcaggatagtcattgattccccatagaatcgctgcacgcagggtgaagtttttgccttcatatgcatcataagtagagacaccattccaaagagtcatcatgtctgctatcataggttgcatgaacacatggaaatctttgcccggtgattttttgcctgttattagtaaagcaagcatgtaattgggttggtctatacacatccaaggtgcaaaattgtatggaaccactatcactggccatatgctatatgaattggtcatctgaccaaatgggttaaatccatcagtagcaatggctaacctcaaactgcgaggatcatctgcaaaagacttgaaactatcatcaaattctttccaagcttctccatcagcaggatgtctcatttcattctcaacctgtaccctcttttccttgtgccatcttgcatactgtgcccgctgctttgagataaagagcctttggaggcgtggaattattggaaagtaacggaggaccttgtgaggcactttctttctgccctccttgttcactttccatcttgtgtacccataaattgggcaatggtcatcctcttcatgatctttccaaaatagagcacagtcatacttgcacacatgaatagattcataaccaaaaccaagcttcagaagtagagatttcagttcattatagaacttagggaggccggtcacattcttcaaagatgacgaaagtaactcaaggattgcatcaaacccagaatttggtatccgattgtacacttttatatgcagtagtttaataatgaaacttagcctagactcctcggtgcaacctggataaagttcacgctttgcctcttccatgatttgctgatataagttgccaccgacaccatggcttgc

SEQ ID NO: 179112 - DNA, 886 bp, Zea Mays
caactttttgtcatatggtacaaaggattttcaagtgttcctacagatgactacgaaaggagattctaaggtcttcttcggtattttagagttagcttcggttcatcgaccttcggtgccatcattctgcagagtagcaaagtacaaggtaatcagaaatctaacaagacaaaatcaaggtaaaaaacaaaaggtagaattccatactgagttaagcagcttccgggcttcgtctccaaccaattcatgcccacctttagcccaaatttgagtaataaatctattatctatacttcgggcttcggttggaacgtcaaccaaatctgatgatgaaagattgaaatttggcctgttcacagctctcgcgtgattacaaccgacttttataaaggcggcagctgtaccacaagaagctaccagcgcatagtagtcttcatggccggttatgacttcgtcgcggacatcaacctccttttcaatacattcgagtgccccgggtatatcttcggcagagaggctggtttcctcggacgcagctccaactgaattgaaaatacttctcatccgagcggtgcattggcttgcaaactcaaagcatctctccttcagagcccttagcgcctcactaagcttcgtatttttctcagtctcaaccttaagtgttgctttcaaagcttcattttcctggttgaatcgatcagagttttccttcaaaagtgcctgagcgtctgacaggtctttgcttaacttcttgttctgagtttgcgcttcagtaagggacccttcggctgaacgtagcgttttgtctttctccttcaaagaatcttcgagttctttgaccttatcctctaaacctttgataataactttgtttttcctatctttg

SEQ ID NO: 179113 - DNA, 1063 bp, Zea Mays
atggggctggactccgtgcggcttaggttatgttcccccgattctagcgtcacaatttgtttgataagtattgttttgctatggacattgttctgttgttcaccctggggggtagccaattatttgtgcctggtctaatttgtagtctttaatctttattgtacagttctgggtctactcttaggaactgcttacattttttggtctataattgcaccatttagagctttcttttgttagattaatgctatgttatctaagtttctacagattgtgcagaagatctgattcgggtgggatattttaagttacatgcatgtgtgttttcagctctattttaaccatgggaacgggactatttggtttcaataaatgtctggatttgaaatgtgggggtgaaaatttctctgatatattcactttattttggcactggctcctgactcctgatttctgaccatgtaaccacacagaggtttagtactaaacatgactaaaccttgattcctacagtcagactgctaatctgctgtattgggctgagactctaagcctgaaaaagcttcacttgcatgggtatttgtgttatctttatagctaatatatctttaatctgttttcaaatttatgtatgcccatagttgattagttagttggtgatttggatggttctggagtatttggcttgtagcatatctgtttttttaatgaaagagaaggtatggtggtgtgtttgggacaattacctgcctttcatgggtgaggattagtttgattcgcaaaattgggtctcttacaaccctatgcaagtgggggtctacattagtgattaaattggacaaaggtgagctgcaaaagtgaaattaaggttaagtaggtggattaatgcaggttaaattctaatgtcataaccttgtaaagcacacatcatggaaaccagacggcatcttgtattcttagttcatcctgcattcctgcatcacacacagctgaccaaacagaacactgacttgtatcttctcttgttcaaaccagtttgggttgaggctgtattttactggag

SEQ ID NO: 179114 - DNA, 577 bp, Zea Mays
gggctcctgatgttcaatgtgcagcaatagaagtctgtgctattgagactcttcctgacaaagatcaaactctggtgcaacagctacctcaggaacttcagcaattattgggcacttatgctgatttgtttgaggtccctcaaggtttaccaacgcagcgagaatgtgaccatcgcattccactcatcgacggagctcgtccggtgcaactgaggccttaccggtatgcgccagctttgaaaactgaaattgaaaaccaggtggcagaaatgcttcagtccgcattatccagcgtagcaaaagtgctttctcatcatcagttattcttgttaagaagaaggacaatacctatcgattttgtgtcgattaccagcatcttaatgcactcactgtgaagaccaagttccctgtaccaattatcgatgaattcctggatgagcttcacggagcagcatggttttcctcattggaccttcgcgctggatttcatcagatccgcatggcaccggaagatcgccacaaaacagcctttcaaacccaccacggccatttcgagttcaatgttatggcttttggg

SEQ ID NO: 179115 - DNA, 662 bp, Zea Mays
gaaactctcaaaacgaggggctggctcacatatatccattcaaaaaggcaccgttgacatccacctggaaaaagcttaaaatcctttgaagcatcaaaggctaaaaggatcctaatggcctctaaacgggaaatggggcaaaggtctccccataatcaataccctctttctttctggcaaaacccttgggcaaccaacctcgtctcgtatgtcactaccaacccatcctcacattgtttatttttgaaaactcattttgtacctatgtggtggcagtttgaaggaggtggcaccaaaacccaaacctgatttctcttaaaattttcgagctcctcgtgcataacattgaccgagttaggatctgtcaggtgtgataattaggggtatccagattatccctctaaaacgcgctcaggaaaggtcaagacataaccccgaaggaaaccaaccaagacaccttctagcccgaggcccactgcggatgtcttccctacaggtaccgagtcccctccccgagggtctcctacctcaggtaaatctctgtctcgcccgaagtcaccaccgctccatccatctcgcccgagccgttctcaggcatataggacaaaggcacccgcaagccggtgagggacactcgcatttaatgcgtacacctaccccac

SEQ ID NO: 179116 - DNA, 652 bp, Zea Mays
cccgtttagtttatgtttagatactgaagctaaccgctagctagctaaaagttctctctagacctctagtacatcgaaacagaagggttaatagatagtctaattttttagtcaagtctttaaaactagttaactagtcagataaccatggctaatttaagctatttttttagctccaaaacaggcccttagtatagctagagtcaactgacaggagcggtggtgtgttatgagatcatcatccagtggattttgtgtcgatgatccattcattctatcaacatgtgcttatatgatcgatcgatatgagagatcaactcatcatgtttctgacgcacgaaagaaataaggacgaaaattaggaacgagatgatctgtctcaaccagttcactagtgaaagaaaccaacagcatgaacatatatataccccatgcaccacatctcgaacgaaattccaacttaactcatcactgcatgcatgcgttgctaagctgacaatgatggctgccagtgcccagcagatgacttacagcatccataatatatataccaatgtttcgcactgacagagaagtcaaagaacgatgaaggaggagtgcccggcattctgcgagcaactggagaagatcgtcaggaagaaagcaggggcgt

SEQ ID NO: 179117 - DNA, 503 bp, Zea Mays
gtcacagaaggcctaaaaggttgtagtgattgaagtgaagtcgatcgtccctcatgcaatgacaactcgtcacacaaccgatgaactcaagcacgttctaacgaagatctcataaatgggtggttggttggacaaggtgtccatcttgtgctctgatgctgtcaaacatgcccccaagctatttcagacatcactcttgaagagcttgaagccgcccgtgaaatggatgaacatcacgaactagatgagctatagtacaaaatgaatccacccaaaagccttgaggaattctgcgaaaaatggggattagtgggattaaataaaatgtagatgttgccttcgtgcaactttacccttgtagaatctatgtgggacagaccaagtccaagtccaataatgtatgttatcactgcagtaaaatgacgcacattcgacggccacttaaccttcgacggcttcctacgcgaccgtcagacataagcttatgtccgacggaatctgat

SEQ ID NO: 179118 - DNA, 715 bp, Zea Mays
gtttagtatgatgtagcttttgtactcgataatacttcatggcgcacttcacgtgcatatgcgtggctataggattgatgcacatgccatatagtggtctcaagtaccacgtggtctaggtcctggcaacaacacgcttgttaggcctataatatcgcataccaaacatttaatgtgttgtgcccgagacttatttgataagctagtggtatggacttgccattagggctttagatgtggggccatgaccttggggttgtaatgccatcagtgggcctaggcacattctcctatcttgagataggattacacttagttgcattaagccccttgtgcgagggttttggggcccaacgattcttgcaatacgaggttgggcaccttaaggacctcgaggccaatataagcctcatactaactaagtgtcgttgattgttgaaagtcacctagaggggtgaataggtgaaacctaaagttataacttttaacacaaacttcaaccccgtttaggcattagaacaagaataagaacaatcagagtgagggagagagagagagagagagagagagttcttcttgcacaagttgctcaaatgattgcagaattactttgggagcaacttagttgatatagaatcaagcgcaagtaagagaactcgagagaggggagaggaagaaacaaatcataaacgaggatcaaacacatagaacacag

SEQ ID NO: 179119 - DNA, 632 bp, Zea Mays
cttgaggatgaacttaggccactgttcaaccccggccaccgtgtccgcctgactcacggccggttcagataagatcaccggagttggccacctatcgacagcgcgccacgtgcctaggtgccttaccacgtcgtagtaactcgtattacgcatgtccgttgattgccggtgagctcgccacggtgaaagccaccaattccttgcgacagtgctctcccctctctccggctgccaccgcgccatctcaaattcatgggccaccgccctcgagccctataaattgagcgtgccattggctccgctaggtagtcacgcacctaatccaccaactcgtgcctcaaatcgtccaccagagctcaccaatttgggatttcccccaaatcggtcaagaacaccgtgtgtgtgagctcgtcacggtcagcgctccacaggttcgatcatgttcttctcgctcttgttctagcattcctgtatgcccttgaagctcatcggcccaaccaattgcactaaaccggagtagatcgacgagaacactttgaattttccccggattgcgcggtcaccgtgagcagagaaattgggggctagaaccttgcaattgatcgaggggaaatgattgttaggggttaaat

SEQ ID NO: 179120 - DNA, 784 bp, Zea Mays
tacctctccgctctcctctcatctcttttgcgccacacataaacattagagcgccgccgcagggaaaacatcgccgtcgcacctctgtaccggtgccactgccgttcgggcctcgatttggcagggtaaagtactaacgacacgcgtgtgatctagccatagcttcgcgtagtgtgtggtcggccgaacaccaccgcaatttctcgccagtggtgaagttgcaccaccgtcagcctggtgtcgtggccaggaggaaccactccaaggattccggtgaggaccatctgcactgctaatccatatcctcaatttcgtgttgcgtcgtttaatttgagtatgggggtgtggagcgccggtttgagctccctccggcggggtcgccaccatggccagcgtggtgccgtcgcggtgttgggagggaagaaaaccttggcaccgttgatttgcaagggggcggtcacgattagatctgggttgtggccggttggccccttcgatccgcgccgttggttcatgatcctagggatggggccaactcgtgtcgtgggcggatttcagaccactgatccacgatcctgcgatcacaattccttgccgtttcgttttaaataacaatctaatttgagcccttgatttggaatctaacggccagggtcgcccgataccccttgggccttggtcgtctttcaaaagagtccctagattttattagattcaacccgcggtccacggcgtgggtaaactgtgtcttggaacaatttacaccgagacccctgcactttct

SEQ ID NO: 179121 - DNA, 390 bp, Zea Mays
catgagagaggcggtgatggtgaaggagacctgcagggctggggaggcggagacggcaacagagaataggatggtgtggatgagcatggagtaggcgtcggctagttggtcgaggttgggagacgcacatcggcggcgcagaagaatgatggggccaccgctctgagtttgccggtgacaacttattctctggctgctatctttccttcgcctgcgtcgtttgctttgctgccccggatgtccagccccatgggtgttgccgacggtggtctgtgtgggttcaggatggagactgatactggcggcgggtactggcgacgacaaccgcagccaggccatggtcaccggcctgggacttagctccacagctgcatggagaatcaatcaccg

SEQ ID NO: 179122 - DNA, 305 bp, Zea Mays
accaagatcacattggataaccgagaggagcttgtggtcgacttgtcgcaagaaatggtcgaaaaagatttgcaagtggagcagctgtctggtgagattcatgagttggaggagctagtgggcaccagggagaacaccattgaggtcctagaggatcagctcctcaacactcagcagcagcttgctgaagtaaatgagcacctggacatgcaccaccaggagatccaggaccaagagggcgacgaggacgtcgacattgagggaggagatgagcctgcctccagtgtggacactgctggctcggg

SEQ ID NO: 179123 - DNA, 436 bp, Zea Mays
gggagagagagagagagagagaagggtgtcggagggagagagaagggtgaagaagggagagaagggagctgccggtcctgggaagcagaaatgtcatccagggtccaggtctccagggaaatggaagagttagggcggctagccggctatattaattatgggtccaacacgcctgttggactaccttgagtattattccctgttgatcgactgaccgtccatcagcccgattaatcgctccatgttgctaactagtccaacgatatggacgatcaactcaactgatcgaattgagccctctaatcgtgattagttggacaatatgaaaacagagtcctctagtcatgaaaacatgtgtcacaacccttcttgggggagggggctgcggatgctcttgctggtgtgggcaggagagagggcggtggctagggcaggg

SEQ ID NO: 179124 - DNA, 715 bp, Zea Mays
cgaatagattggacttcaattccccttaagcttaggactctattattttggtccttgaccatatagttggtgtgcgtgtcctcatcactataggaggatatctccatggtatcagcggcgacatctacgacgacatctgtggcggcagccagaacttacccgacttagcaggtccctaaggcatcacttggcctcctatcgaaactgaaacaggaatttgttcttgataaccagttctgtaaccctgtaacaagagaatcagttgcttgttcacgaattagaactctaacttgaatggaatacatgagtttatctgtgatgcatcaacttgtgatggcaaggggttcactggctggctagactacgtcagttatcgaacgttggacaatgctggtggaatcggaggcatgccaaactaaggtccagcactatcgcacgcctgcaagcaaattaatcatcacttatccatttaaaattatttggaaacttgacaaatgctcgatgaccaaattgaagttgagctattacctgctacatccacatcatgcaccatctattgtgattgtagcagttgcttctgcggttatatttggtgcatctgatgttgcatctgcctctactggtcaagtagttcttcctcccgtgcatatgttcgttgggcctggctactcctaatagagggagattattgcctactaaatagaataataatata

SEQ ID NO: 179125 - DNA, 840 bp, Zea Mays
gctgaggtggagacttctccgcgtgttatggatgctattcccggtccgagtgctgggtgtaggcggcgaagggtggtggcgaagcgtagggtgagtgaggttgagggtggtcgtcttcgtgtggacagggctagcaagcgggaattgttggcctcgccggctggggtgagcgtaggtgagggggagttgcgaaatctttttgagggtgaagagctgaggataatgctgtttaactatagggagatgggtatcatcccgaaagttgaaccaatgtaatgtgtggtgccctcgatgcacgtatgtaactgtaatttgtatgatgagtctgtgtgccttcgctgatccagccgtgcctgtgggggacttgtgcatttgatctagcgcgtttattatgccggtccggctgcacctgtaatcggtctttgcgcggatagtttttcgacgaagattttcgcacggatgtgccttcgattttgcgcacttgttgtgctagtccggctgcacccttgggtgacttttgcacggatagtcttttgaagaagacttcgattttgcgcacttgttgtgctagtccggctgcacccttaggcgactttagcacggatagtcttttgatgaagacttcaattttgcgcacttgttgtgctagtccggctgcacccttaggcgacttttgcacggatagtcttttgaagaagacttcgattttgcgcacttgttgtgctagtccggctgcacctttaggcgacttttgcgcggagtgtcgcacgcgagggtagccagcgctgcccctcgcggtgactttgtattggtcgaatgccgaagacagtcgatgcggtc

SEQ ID NO: 179126 - DNA, 340 bp, Zea Mays
tgcgagtgttggtgtagtgggctagtgcgtagtggttgtaggcttagcgcttaagcatgtggttatttctttatttgaagggtccagtagtaatgcaagtgtcgtgggggtgctggctaagcatgagatgctgctaggtgtttgtgtgtattgattaattagtgaaatgcaagtgctaagtgcaccggtgtgtggtgacaaaaattccttagtatcttctgtgcctgagcatttagaggagtaatacaacatttcatatattttataagaatttgtctttgacaatagatcattttaagcttgcacaacattacacaaagagtgtaaaataattttggaa

SEQ ID NO: 179127 - DNA, 598 bp, Zea Mays
agctggctctctaaatttgagaagaaatgcgatgagggtttccttcttaggtattcatcaaatagcaaggcatataggtttttcaacaagactcgtggtattatggaagaatcctacgatgttgagtttgatgaaacaaatgggtctcaagatgaaaaagaaaatcttaatgatgttagtggagttctgttgggaaatgcaattgatactatggctatttgtgaagtaaagccaagagaagatgatgatgatagcatggttctcattccatcctttgtaactttaaatgaggagaatcaccaaaatcaacaaaataatgtcgctagttgttgctcgctgttgttatggatgatgtctactttacaggattttgtcttggattttcattaggtgcctatgctttgtgatagcatgagagccataagtgttgccaagaatcatgtgttgcattcgaggaccaagcacgttgatgtttgttttcactttcttcatgaccattctgagaaaggcgacatcaatttgtgccacgttgatacccattggcagctggctaacattttcaccaaaccccttgatcagtcgacttttgcacatttga

SEQ ID NO: 179128 - DNA, 413 bp, Zea Mays
gttcaaggagggtgatcacgtgtatctgaaggtgtcaccgatccggggtatgaggaggtttaaagttaaaggtaagttgtcccccttgctttattggacccttcatgatcctaaagcgagtggaggaagttgcctaccaactagaattacctgaccatcttacagatgtgcacgatgtcttctatgtatcccagttgaagaagtgtctcagggtgcccgaagagcaactgcctatggaggaattgactgttcaagatgacctgacttatactgagtatcctatcaagattcttgatactttgacccatgtcatgaggaataaagtgattaaaatttgcaaagtgcaatggagtcatcatggagaaaacgaagctacttgggagagagaagaagagctacgaatagaattttcc

SEQ ID NO: 179129 - DNA, 535 bp, Zea Mays
ggataatgatcacggggtgaaagatcttgccgcagatgagctgggatgtactgtgtgcttgatggttcatcagtgcacaccggcgacgtggccgatcggctatcaccggcgtgttcgccattcaccatgagggcgccacgccttaggaagtttatcgcgtcggtatgagccgtagtgaccatccagtgaccgtcatagttcagtcgctctacgattgccacgatagatcgatgtgactcattcccttctcggccgccagcacaattcgtccaaattaaagaccaccgctcaagcacactaaattgagcacaccgacgggtccgtagggtaatcaagcactaatccaccaagtcgtgcccccaattactcaccagcaagccccaatttcggttttcccccaattcggtccgaaatcccgcaccttacaaccccgccgtggtcatcctactccaggttcgctcatgccctctgctctttcatttcagtgtccttgtgtgtcccttatgctccccgacctagccgattaggttaggac

SEQ ID NO: 179130 - DNA, 2868 bp, Zea Mays
caaaaaggctctaaagaagactttcaagaaactagaccacgatgtaaatattcaagactttctaggctcgcggtaattctgtcattttaaaaaaatagaatgctcgtagcaacatatagatgactagttcgaaagaaatcgctaacatattgtttctaaatccactgcagggttcagacagtcgaggtagaatatgatgagtcgacaactgaaagcgagttatgtgatttcatttttccccccccttcatgtttctaatgctatttggatttcaataatttgacaggagctatcagcagagcttgtctcgttgcagggtcaggtggcggagcttcaaaagcgtgtcaggtgaataacatcagctcataacatattcagcataaggaactatattgataaatgctgtaggaatgcatatctcttttgaaatctttccacttagtgtcgctgtgattttcctttcatgacacatgatcctgttaaatgttctccacgttgtgaatctatggcattgattagcctgtcacagaaataatgggcaaaccaaaaaaaatttgagagaagtgtaacggcaaggcgatttgttttgttcttcagtgattggagcgatcctgagaaagttgacaatatcgacaatataagagcaatggagcaatctctcaaagaaactattaatcatatccaaatccataaggtacacatctgtaaccttatggttaactactttataatctcaatatctagttaacattattatctgaattttcaatatcaaatcagattagttctgacctttgcatctgtttgggtctctgcctctccaggggaacttcggaaagcaacatctaatcgggctacagtatgctgctacccaggtaactaactaactaacctaccacagcttcaggtgcatgtgacatgagacgttaattttgttcagattaagatgttgctttcctgtcatgccatgtttcagttccagaccgacatgcagttgcctctaggactgcccggcgagtcaggcccttcgtcgtggttccaaaacggcggcgctgatgggcaacaagccatgatgctaacggacgagtccggcctgctccatcagaggtgaattcaagctccgagttgtgcattgctctgacgaacaaactgcccttcgtcgttaactgacgacgagcaaactgatcttggcgcagagacattgcgcagggctatccaagctacttcagcacggtcaagcaggatcccgacaccggtggtagcagcagtgatcacgggcaggtggtgcttcaccatccgcagccgcccgacttcagccagaccgagtgcctgacgtcgctgcacctgccgtcgcagcagttcccgtacccacccttcgaccaccacggcctttacagcgaccgaattttcaggccagacgcagttgagctgcacgccggcggcgtcgccagtatggactttctcagcggtcagtacgacttgccgaggcctggcgatgatgccagcttccataactgggcgtcagctgcagcatgtagtgcaaccatgttcgaccagcaacagcaacagcagcatcagcatcaccagcaaccacaatcttcacctgcacaagtgagtgcataattacaaaaccaatctttcgactgttcgttctgccgcatgtgaacttgcttatctatctatttgctgtcacaagtttatagctccgctgaaacattttccgatacatatttttttttctcatctcacattagttgacccatttttatccatgtttattaagacttaattcaatccacagtccatatcaaactgatttaagttctgagcaattctatgggcgatgagagctttccaatcattgtttaaattcatttattaaaatttaaaatcatgcagaaagaatgtgcagttatgatttttttttttttttttgcctttggcattatatgttttactgatttcggtatctcttgtggaccatgactgaatctctaaccatcagcttcctgcagcaacaactctagcaactgcctcgttcgatcacgccgtttatcacagttcatctcagcaccaacaagtcatgatcggttgatcctatatatggtaaaaaaatcggagataatattgccctccaaaaggtgctaccctaaactaatcatcaatgcaaaatgtgtataggcaacactgtcgatgtaaaatatatatttattgtagctaattctttcttgtaagtatctatctgtctcctgtatactactggtatagctttcataaaaggattgggcacttaactattagttcataggcattcatctttgcatgaatgaatatatttgaaattttggccaccatgcatggcctttcctttattgtactggttcacttgaatctctctttttaatataatgatgatatgcagttctcctgcatgttcgagaaacaattaccatggttaaaaatgatattgtggttttctaactcatttctatacgtatggaaactaatcattgtattcatttgtcagaacagtcagttgcatcttggaaaaaaaggagaccaactagaatataatgctactatagtatactatgaggttctacggcatagaccaatgcaactcgaatcaaatatcaccaggagtgtgcggtcaacgagttagctagtgtacactgtacactcgtaaacaacaagttccttggatttactacacccgtaggaagctcaaatattcagggacaagagttttttttattattttggttttttattctttttggttgggttgttttcaccattttttgtaaactatagctaagtggttttaggtgtttactagattatgagaaaactgactcccaaatattc

SEQ ID NO: 179131 - DNA, 643 bp, Zea Mays
aggccgaagataatgctttgtccgcagccttcggaggccgggggaagaaaagactgaacagggtctttgatgcgattggcttcatatacctcgattatcgcttcccgctgcgagggcaaggaaaaaaagaggaaggctgccgctttggccaccacagttgtgccgaagagcaaaaaggtgaaggttctgacccaccggtcgcgttatattgaaccaaccgtggtgcctgaatttgccgaaggagcctcttcaactgctgaagcacaacaggctgcttcaattacacagagcgttgaagaaccaactgtaatgccgaagacgcctacagtcgagccagtcaaagctaaagttgataagactgaagagccaaaggttgaagaaatgaaaatgccagaaattctgagccttccaacagaggcaaaactgcctaaggtgcaaaaggcttctgccgtgactcccaagaggaggaggatggccaacgtgctggatgctgtgctagagactacaaaggccttgagccctgctcctacaaagaaaattgctgaagctgccaaagcgcaagccgaagacgaaactgggcaagcagaagccgaagctacgaaagctcaggctgaagccgaagctgggccttcagcacccgccg

SEQ ID NO: 179132 - DNA, 1055 bp, Zea Mays
gagctccggcgagctgtctgcgccggccgattgggacaaggactagtgcccagctttggattaaaccaaattcgagttctaaggaccatttccccccaatcaatttcatatttggtgatctatttcgctctgcccacgaggacagcacgtactacggctaacccagcgtgttcctggtgattggtgacggtttatttcaattgggcgggtctatgagcatcacgggtatgtgagatcactcaaacgagggagcagaaggtttgaactgacctcaattgcacaggccacggcgaggtcgggttcacggcggcggaaactgtgattgggggaagtaagcgattctccggctatagtggctaattgagggtgtaggcgggtgctacagcttcgcaatttagagacgaagagttgtgctcagttgatttgaacggagagggtgaggaggcgatgaatttataggcgcagtaagccactgccatggccatggtgataaccattgccggtctttgctggcgatcaacggcggcgtcaagcaatagccattcttacgggcttgccacgtccctgccgcgacagtaacgcagtcacatcagtgcggtgtggatgaacggaggggagcggcgccgatgaccggacacggccgggaggagagatggtcgcgtggcagccggagttagtgccctccaccacgacgatcttacccggagcaaaaagatcttcgcccagagatgctcgccgtccgatcatcacaaccccggcgcaaatcgcggcgcggacaggtcgtcggcggtgaggacagccgcgctggcggtctgatccagtgtagacactgtaccatcagaattttattctgtgcacttgacaatcaagatttagggcaggttttctccaaatgtttcatggcaactcacccaaagctctgcatcaaagttgtagtgctacataccagctacaattcgactatagagattgaactcatttgggcactggatcaaggtttaattcacactcaaagtcgaccctgttacactgaaaagctgaatttcagaatgaaa

SEQ ID NO: 179133 - DNA, 402 bp, Zea Mays
tgtggacatatttctcgtattggttggagttttgttaggattttctcaaatgaactcaaaacgagatcaactcggatcacgacttaaaatgcaccaagagggcgtatgtagtgatccaaagagtgtatctcttcaccaaacaatccccaacaacaccccacaatataagaacttaaaggttcttccataaatcaagaaaccagagagagggagaagcgaagtaaaaaacgaatcgaaaactgcatcacatacaaactgaacttgattcaaacaatgctggcttgtgcgtggttatggccacccttcttcacaaaatcttgagaacacagacacagaagacaggaaacaaaatcgcatgtggatctcagctagactagagaatggaaaactagagtttctaaa

SEQ ID NO: 179134 - DNA, 540 bp, Zea Mays
tcccttcaccggagctgctcattgtctgccattcaagtttggtcgcgtcttcatcaacttgttagacgcaccggtgcagaccacatccatcctagtagatacctagtgcacagctggttccatcgataaagggatatactgttagtctgatatactggttccatcaataagggaacttggagaaaaggtgattaaaaagaaatcgagcccaaacccgcctccgtgtccctcctttactccccaaacagaaagcccaaacccgcctccggagcaggatcgggccgggaagcacggagcagatagaagtgcactttccaatgcagttagacagagaaggcatgtctgtgatgttataatgctgaaggaccccaagaagagattatggcatgtcgtccaccaccactgcccgttatttgtgggcttcaccgagggctggaaacatttggtgacagcaaacgaccttcagactagggacgtctgcgagattgttaaggggccagacgatggtgagccggtgtactctgtccggatgtgtggtcc

SEQ ID NO: 179135 - DNA, 691 bp, Zea Mays
ttttctgtttctttgagttccttaggcttttgttatcttgtgccttggactcttgcatgatgttggtaagtcttcaatgtgtcttctaatatcttctttgaggtgctgctccctcaatgtctcgatccaagtccactctgtatcatttgaactataaatacaaacactagcaaacacattagtacaaagggttatattgatcataaaaactaaaatcactaagcaaataggtcgtagtctattttccttacggtgtgcttattccaatctctctattctattcatcatctcaccaaacgtgggatggtggtcttcttgttgctactacatggtcagggttaatcatgttttaaaaggtcatttatgtttatgaattatgcatggggtatccatatttgttccacgtccaaaataaagaaaaatgaacatgatcagtagtttgaacaacattctttaagcaataacacgtcattccactatttgaggttgttcatttttagagcatgtttgatagtacaattttatatactatagttttgagatagatagtttacagtattcagaatattgcttaaagatggggcctgtttggttacattggaaaaccaacgtatggatcgctcccccttgctggcgcctctcatcgctgaccccattttcaccgctagcggccccactcctacatgccggc

SEQ ID NO: 179136 - DNA, 799 bp, Zea Mays
ccggcccgggagcttctctgggacgcttgagtgctggggcgacccccaatttggcgtgggtggccatagtgatcggtgaattcctcgccaacgtttgctttcaccgcaatgccgccctccaccgtggacagtactcctgcgcgcgtaacgcgtggtaagtgctctctcatcccatgcgccatcatcccatgtgcgcgtagcacccgttagttcacggattagggaacctatgcttcggtcgtggttacgccggcgagctcgtcgtctgggactgctcgggcgctgccgctctgagcgctcgatggggaagactggggatggccctagacttcgagatatccggccaagattaggtccggggagtaatcagcgtgggtcgttgatttgtctgcgtgcggttgggattgggcttgggtaaggatgcctcggggcctttggatctcgatctggcgaccgcttgtacactagccgtgggattgtctgtgaatggctacgatcaaattgtgtcttcactgaatctagaccgtgtgatcgtaatggacggaccggattagatctcactcgtatcgcttcagccttataatctcaagccttgatttctgatcgggcggtcccgagctgacctaatctaattagaatctccaccgttgaatctagatctagggtccagcattgcttaccgactcgcctaagccgcgatctgatctcgtgcgtttgatttggatcgggcggcacatatcagcccataccccttcgccatgccatttcgctaaagagcccccgcagatctaggaattca

SEQ ID NO: 179137 - DNA, 390 bp, Zea Mays
cggggttggtaggcgagaattgttgtcttcgccgaatggggcgggtataggcgaaggggatcttcgggagctttttgagggtgaggaattgaggataatgttgtttaattacagggagatgggtatcagtccgaaggttgagccgatgtgataggcgattccctcgccgtgtgtgtgtaataggcgatgccctcgccgtgtgtatgtaattgtaatggtgatgtgacctgttggccatattcgtacacttgtattgttccggctgcgtacatgggcggctttgtgcggagtatctttgtaatgatagacttcgattaacattattccgggtgcgcccttaagtaactgttgcgctatcttttgaataaaagacttcgattaatgctcctg

SEQ ID NO: 179138 - DNA, 511 bp, Zea Mays
cttatcttcatacccccagtatttgtttaagacatttcaacttacatgttcttgaccacccttgtttattaatgatccatgagtgatcatttcatttcacacacctgtggtaatctcgctgtttccttgtaacttccttcagtggtgaatttttacttcaactcttctgtcggaacctcacttatcttatccttgattgttttctccaccttgccatttggtgagtcttgccttgactctgtccatggattatgcttttcatcattatcacatttacccttatcacctctatcttaccttgatgtttatcttatactggccctttaaaatatcctcttttccatctcaatctaagcattgtactttacctacttttccctttgtcgtatcatcttctttcccacctgcgagtttttaactctatcctttgttttgttttgtttgttatttcctttacccttctcatcactctatcctaccttgtgattacattatgtctgttatctaaaat

SEQ ID NO: 179139 - DNA, 344 bp, Zea Mays
atttcactcggggtctctttagcaaaattctcgggcgaaggggtatcgactcaccagaaccatccgattgaaaatcaggggctcggattagattacatgaaaggggaaccctgcgttcgtttgatatcgcatcaatggccagcacataccctggtcgaataggtaaactctactgaatcctagtcgtccatttcttatcccgcggtatagccacgataaaatcccgtacgtccatattaagatcgatggcaccctggcttcttctacctccggccagagccgaagtggcgcacaggcctacgcgccacaccgactgcctgacaccctccccgacggcgaaccgc

SEQ ID NO: 179140 - DNA, 302 bp, Zea Mays
ggtggctgctgtggccaagaccatggctgctcgggaagagctcctcgcggatgtccgctatcggatggagcaagctcaagccgtacagaagaagttctacgactggctgcaccgcccggtctcctatgccgtgggcgacttggtgctttcctaccgcagctgtctaggggcaagctcaagccgcgtttcgtcgagctgtaccgcatcaccgagtgcatcaacgaggctgctgtccgcctcgccctgcctctgcgtgccaagctgcacgatgtcttccatgtggggtttcttaagaagttcat

SEQ ID NO: 179141 - DNA, 614 bp, Zea Mays
caaagtgacaaaggggaaggaaacgaacaagagcaggatagggaaaataacactctcagattgaaatggaataagtgaggctaagaaataggtaaacatcatggtaaatatggggagaggtcaagggtcaaaggtgataataggcaaggatataaaggaagaggtaaatgtgcataaaaacaggaatctagatacaaccaagaatagagttaagataagtcttgcaagtggtaaagtataggatataaccacgggtgcgataagtaagagaccatgcttgaactaaggtgggagattggaggttttagataacgaacatagcgtaatcaccaaggtaagattgagagatcggaaaggtcaaggcaacgctaaacagaggcacaaccaaggatggagttgaagactcacaagcgatgaggaagaggatacgaccaagggaaaagtaggtaaagtacaacactcagattgagatggaaaagaggaggttttaaagggccagtataagataaacatcaaggtaagatatagaggtgataagggtaaatgtgataaggatgaaaagcataatccatggacagagtcaaggcaagactcaccaaatggtaaggtgaaga

SEQ ID NO: 179142 - DNA, 461 bp, Zea Mays
cagggcagcggaatatcttattataccgataaaaaaaacgcggcatgcgaggaggtgatgccacgccatgaaaccaggcttgcctagctccagtccggttcgtttcttgccgtgaggtttttttgaccgtgggcaggaggtggtggaactgtggaagcgggtggggtgggtactgctggtgctgggcaggcaggcaggagcagatgcgcttgcttgggagaacggccttgctgccggtggcggccggcgggcgggcggcaaaccgaacctgcctgccacacataccgcacgccgttggggatcgacgaccgccacgatccctttcttcagtgcccagtgctgtggcggtgctttcattcggcgagccaaaaaaaagaggcacgtctgccacaaaaggctagagctgctagctgttgatggtactggtgccttcgactccaagtgcccgttgtgttcttcgg

SEQ ID NO: 179143 - DNA, 464 bp, Zea Mays
gtcctacgaagaaagagtctcgaactagacaataagcacacgaacataggttgcatctgaaaatagaatatgtcccatgagcaaacaattccgtgaatctactctaaaatgactctagtcctgggcttatatgtacgatacttgcaagatatgaaatcaaaaaagcgagagatagtcgcagttgccccgagcttgaatgcacaggctctggcagccaccgaaggccaaagggcatgtatagacggacgacgaacgagaagcaggggtccgagaaggcgtcgtagcaggtggctgagcacaccttggacgagctcatggacggtgaacaatggaggacatgtcgttgccgctaaggctcgccgctctgtgcaggggccgagccaggcctcaggccacacaacgtggatcacgtcggagagcacaagcacaacaacgatgtcgccccaacccttaccgtccttgag

SEQ ID NO: 179144 - DNA, 590 bp, Zea Mays
cttaaacatttccgtttatatgcccatgaccttctggtctttggaaatcctttcctcttctgttgttaagtcgctatctttcggcaattccttgtctcttggtattggtatgctcatcttcttgaaatctttcatactctcatctttttatgcttacctttataccccaaggtctgtttaagatatttcatttttacatgcccttgaccacccttgtttttcaatgatccatgagcggttattttattttgcacatccttggtgatctcgttgttcctttgtaacatccctcggtaatgaaatttaacttcaactcttctgttggaacctcacttatcttatccttgattgttttctccaccttgccatttggtgagtcgtcccttgactctgtccatggattatgcttttcatcgttctcacattttcccttatcgcttttatatcttaccttgatgtttatcaccttttcctcttcctcgtcgcttgcgagttctcaactccatacttcgttgcgctttcgtttgttgtcgcctttacctttcccatttctcgaccacaccttgttgattacatcatatctgttatct

SEQ ID NO: 179145 - DNA, 754 bp, Zea Mays
cgctgctaccgttcgagacaagtctcgccgcccacaccgccactaggaaaccttcttctctcctcgccgcccgcggccggccccttctccagaaccttctagaacccatcggggctccgggatggagcccagaagacgagagcgcagggtcatcgccatcgccggtgcggcagcgctcgttgccgtgggcctcaatatcgccttctccgccgtcgtcgcccaccgtcggaggaagcgacgaggtgagcgccgcaaaaccctcggtcttcgcgtttgaactcaaagtccatctgattctctgacattgagcaaccttgcattgacccgtgcagtgttttggctcaatctcgtatcaatgcagcatataaatatagcgattgatgtttgcttaacacggttctgctttgtcctttagctctacatatacttgccgcgtgaactttgtattcatgcttctattgttttaaatggtacaatttaagctaaatgttaactcttaggtatggaattttgaaaggttatcgatgtatgcttttttcaattttgagtggttgcagagcttccagggtttactgctcaagtcaacctatcagcagctgcgattaaaagaacgaccgaccgtatcatctctaagtcaagggaaacttatgattcagtggctgcagtgcccctagataaagtatgtgtgcaactctttatggtactatattttactaactgttttgtggaatgtggtagtcgtagaagcccgtac

SEQ ID NO: 179146 - DNA, 482 bp, Zea Mays
gctaaactcaaataagaattcaaatttgagttcaaagggaaaataaaaaaaaagagaaaacctacgcttgggctgattttctcctcggcccagaattcctccgtgtctgccacactgcgttctccccgtgcggcccatcttccctggcgtgcgcgctcctcagccttgccttgctccttctctgcccgtgggacccaccggtcggggccggacgacaccaacagcaatccatcaaataccagccagggcctctgtagatttaggtggggcctcgcggtcagatccgccctcttcccctgttgtcgcagtcaatgtcgtgcccgccggaatagctagacggttgaaacaacccggctcggactcctcgtccccgagcataaaaccctccgcggaaccccgttcgttgcgtagccaaaatcgagatcttcgtgacgaatcgcacgtccatctctccctattccccatggcgagctctctccatg

SEQ ID NO: 179147 - DNA, 343 bp, Zea Mays
cgtggtagtggatacgggtccttgggacaggccttattcaggctggtgtagtcgatgcacatccgaagcttcccattcgccttggggacgatgactgggttggccagccatattgggtgatgaacctctttgatgaagccagcgtctagcagcttctggacctcctttcggatgaagtcctgtcgctcaatagactgtctgcgaggcttctgactcaccagcctagtgtcggggttgatcttcaggcgatgctcgatcacctccctggggatcctaggcatctgcgacggctcccatgcgaacacgtcggcatttgcctggaggaaggtgacgagcgcgagta

SEQ ID NO: 179148 - DNA, 1353 bp, Zea Mays
ggtgagtggtcaaaattttggaaaaaagtcgacggtgtcatatatttgtgaacggaggtagtataagctttacatatgaatttatcgatgcgcccttttctctttcttccctcactgaccaacttatcctatattctctatcatttagtaggtaagcaaagatatcaaggtcattttatctcatcgttttggttttcaccttgttaatctttgtggctatgttgcacaagaatgcaggcaaggtagaaatggccagatgcattcctgtaactatgtatgtaggtttttcttgagttttttttcccgattgggtaatctggatgcaccactgatcagtagtcaaccttttgttttgtttttatttatttctctggtttgaaggacagacctggtgtagtggtgagagttgtctcactgagtcaccaagttgtgggttcgaagcaatatctttgcatttacattttatagagggaagacttgcctcggtttatcccttctccagatcctactcatgtgggagcctctggcctaggtctgccccctcccccctttatatttctttccctggtttgctttaatcacgttttgttgaatgaatgctatctctcctgctgactaagttaggataaggtattaaaccctgcttgtaacttaagagtgactagatagatctaaggttccaaagcagaaagtgatgggttgagataagcttaactatgtgtagcctggaacaatcatattactgattactcacacatagatgtctacaacttcacactgtagatgcactaggcaaatggttcgatcaaggcgttcgttgtgcatatccgaaataggaacaattttatatttttcacattttacagagttcatatgcttgtgttgatctttgcacatgagcatacaactagaaatcaagagtaatgcatcatgactgataagaggctatatgtttgtcagagaactgttgtgacttgtgacaaccattgattcaaattgaaataaagtgcttcaccatgttatttaatcctcatcaaagcaaccataggttttaagtgattaagtccacttgtctaaagaaaagtgctttcttcaatttcatttttaatgggggtactgtggttatatgttaaatcatattaacaaattagctccatagtccctgggaacgtgaaaccatgccagattccttgtccaaaaatgtttttcctgttcgaagaacacagaagcaatctcgtccccaccgtgtggcctgtcaaaaccttcctgggaacttggtgactgtgatcaatccgttccatgctacaccagcaaatgagttctcaatatgtaattgactttgctatcggctga

SEQ ID NO: 179149 - DNA, 510 bp, Zea Mays
ggaagggtgagctgtaccatgctccccttggtggttgagatcatggtgctcggtgcgcctcgatcggctaatccgaatgagcccttctttctgtggagcgaggcatcgagtccactgttcgctacaagggatctatctaggggcacgccctatctttttaatactccttcatgtgcattctgtttgctagaaggggatgggtgagtcataccatgcttccctcgatggtcgagattatggtgcttagtgagcttcaaacgggtgatccaagtgaggccctggttcccttcgtaggatctaggcactgggtccgctggtgaccgtcctcatactcctagtttctgactcatatagttgttggccccgtccgaccgcgtccgatgactcgttgccgttcttcgtgataaaccatgagtcagatgttccctatgactcaaacatgatttagaaatgtcgttagtgctcatgcgctagagtactggctgctacggtgcccactttgtaatcgcc

SEQ ID NO: 179150 - DNA, 707 bp, Zea Mays
gtggctatggcttcgcaatttggagacgaaggtcggagctcggttgatttgagcgaagagagcgaggacggggtgaatttataggcgtggtgaagcacagccgtggccacagtgataaccattgccggccatagctgacgattaacggcaatgtcaagcgctaccctttccttacggcttgccacgtcccagctgcgacagtaacacggccgagtcgatgcggcgtggaggaacgaaggtgagcggcgccgatgatcggacacggtcgggaggagggatggtcgcgtggcagctggagttagtgccctccaccgcggcggtcttacccggagcaaaaggatcttcgctcggagatgctcgccgcccgatcatctcgaccccggcgcaaatcacggcgcggataggtcgtcggcggtgagatttttctgccgcggcgatctgatccaccatagggcactgtaccatggcaagtgcttcatcagtacgcctgacagccatagtttagggctggatttcttccaaatttctatggcagcatccctgagtctctgcatcaaagttgtagtgctacataccagctacaaatcgactataggaattaaactcggttgagcactggatcatgctcagaattgagcttgaagttgatgtcagtccactgttagtctgaaaattcagaccttaacagcctgacagccagattttga

SEQ ID NO: 179151 - DNA, 1073 bp, Zea Mays
ggccgccaccgcggcgagaaattgccgcccttccgatcacccacgggcttggcggcatcatcgaacacactcggggttcaccagcgaacgcccccgaacgcgccgtgcgtgcccaaccagtatgaagatgagggacgccggtggcgaatcccgtgccgtctacagcagacaatgcacatagcatcgcacgggcgcccgcgatgaggagcagcaccgttgcgaaccagcaaccccagtgagcaaatcgaagagctttggcgcacaatcccaactaggatggcaaggatcaccatcccctggatgacctgaagcacacggaccagcgcacaagccccaaatgtcaccatgggcgagtgtccacgacagcgtgcggatccaggccgagcaccacaccggtgaggaatctccaagcgtcggagaccccatctcacccccggtcgtcttccttgcctggacaaggcgatggtggctcgagcacccgcgcagctccgaggcgagcacgccagcgcgagctaggcagggacgcgcaaaagcagaggctactggaggttagggctgggcgaccgccgcgcaggagcagtcgcacgagccgccctacgccaatgcccagtgtcgagctcggatctctgttcttcccttctcgccaggtgaggctcccaatgactcagtgcagcttcgaattggtggacggaggggagggggtcgcagtgctacgacttttatgcaccacagcgaagtccgactgagggcgatgttgccagaattttcgggcggaacatgccgaccaatacgcaccataatcagaacagaggttggtgggatctggaggggataaatacgacagcttgggcccatgaatcagtgagcagaggtgaatgacacaggacccgcgcggtcagtcagtggagagctgcgaggacgtgaggtgcgcgcggcgaggtcagctgacggcaggggccccctgatcagtgagaccgcgcgcaggtggtctggccgaggcaacatgcgaagtgggccgttttcaggcgatttggcccaagagcgcataatttctttttttatttttgttttct

SEQ ID NO: 179152 - DNA, 533 bp, Zea Mays
cccttctgttcctgctgctgaagaagtacccgtggaactttttactggggctgaccccaatgggtgtgaccttgatgatgctgatcccaatgggtgtgaccctgctgatgctgaccccaatgggtgtgaccatgatgatgctgatcctaatgggtgtgatctggccagagctgaccccaatgggtgtgttgttcgtattgttgatgatgaggaggaggaagaggaggaaatccccttaattcggaagaacagtcggtgtcacctagtcagtggggagagtagtgatattccttctctagctttgtctgctctcgttggtctacaagagttgtccatagcaaattttgatcaggctctcgaggatatggttcctgaagatctgctgtccgagccaacagatggtggtatgatggacgtttgctctgacattctggatgtggggttagagttatcccgagcagcgtctcgtgcctcgtcgaccttggagtgtggtcttcggagtcaagaagctggtctaggttgctccattccca

SEQ ID NO: 179153 - DNA, 458 bp, Zea Mays
tgcatacaggaaaggatagtcttcacacacacaaaacagcaaaggtcaacctgcttccaatcatttgacttccacgtgttcaaaacacaacctgtgcagatgtgctccgcgttcaactgctcctaacgaagtaacgagatgcacacatagcttcatcaaccatacaaattcactcaaaacagtggttgacataagctacgggcagacgatgttaattcttgcctaatatatgctctttctcgttgttttgaaaaaggaaagaaacaaaaacttacacgactggcactttatttctggggagatatgggcaataatactataatgtccatattagttttcatataaaacattactacaggactgtaagatttctccactgatggccacttgtgacttgtctattaagaatttgaatacgctaaaccaggcggaaaaataaataacttctgagaagatcc

SEQ ID NO: 179154 - DNA, 271 bp, Zea Mays
agttcgttccactgctagggttgatcgtgagcgagatgagaccgaagctactgagactgttccgatttccgaagcaatgaagcggtctgggctgataacatcggaggatgtccctgccgctgaagcagagcaagctgatgttgaggaccgagtctgaagatgattatagcagcgcggtgtcgagcaaacccagcccatctggatttcggaaaatccaccatctccgaaggtgacttacctaagatgttgaagttgggctatttaagtgaag

SEQ ID NO: 179155 - DNA, 292 bp, Zea Mays
actctcaaaaccaaaagcgttgttagacctcatgcaaatgcaaacacttgatgctctatgaggcattaagttttacacaaaccagagtcattgacccctcttaatagtatgaccatctagcctactaatccggtcaaatgtcttctctaaactcctggagaccggcaaaaacaaaaacctatgttatacctttgccttcacttgatccacaaccaatgcttataaatctccaagattttctgttctctgtggtccaacctgcattcttatttctctaagaactgttagtcca

SEQ ID NO: 179156 - DNA, 645 bp, Zea Mays
ctcctgcgaaagacattgccaaatagagatgttttgctgtgtttagaagatactgaatgtatttgtgaactatatgtgtgtgtgatcagtgcgcttgaatacttggtaggatattagaatgtgttcttggtgctgaaagctataacattttgtttctgttgttaaaattcaacagtcgctatgaacatttgcagaagtaagtgtggcatgctggtttttggaatcttttcttaatttatgccaattgatcagctggtagggcatagagatcgccctatgacgagtaagcgtgagcatgttgcaccatcttaagtctttgccggcttaagtcgattgctccgttagtagggtatagtggtcaccctaagtcgagtaagcgcgagcatgttgcaccgtcttaagtcattgccgacttaagccgattgctccgttagtagggtatagtggtcaccctaagtcgagtaagcgcgagcatgttgcaccgtcttaagtcattgccgacttaagccgattgctccgttagtagggtatagtggtcaccctcggttgagtaagtgctctgattccaagtttaatcaagtcgaagtcgatggataaccaatagtttgaatgcttttgagaatgaaatcttttattgatgacgta

SEQ ID NO: 179157 - DNA, 431 bp, Zea Mays
gaaatttaaggtaaatagaaattaaataataataatcagctcgtgggccaacttctccttattggcccagtcttctccactgcccttcttccgcctgggccaaaaccccgctcgacccacttgcctcagcggtgccaacccatctatccacttgacacctaccgatggggcccggtggccagcccctgaaaccgcgctagcttgcccagctcgggcatgtgaccacaccgacacgtggggccactatgtcattctctctcttggtatgccagctgaccaatgggacccatcattcatccctatactcccgaccatatcaaaattgaatgcgctccaaccgggctcgcaatcaacgcagggttggaacggactccacatttctatggggctccgtgtggctggcatgggggctaatcccgacctcgtttccc

SEQ ID NO: 179158 - DNA, 1129 bp, Zea Mays
cacaatgcctcctctgtcctcgccgcgctagcgccatccctgggcttcaacaaaatgtatgttagacacaccatccacgcatctcaccgactattgatggcgtaacacatgtccggtgccggatgggcgagggaagaagatggttcactacctgggtgaggatctgtcggtagccttccgcgtccggggtactaggtaggccattagcgatttgagccagaaccccaccgactcactcagcgtgtttagggctcgagcgaagtcgggcagtagattttagggaaggagtgggttttcgcatcggagcctagcatcatgctctgctcattcccgctcacgcttctgggtgtggcgacgatcgtggcgtcgagaattgcggtgctcgcggagtgccctattgtcaggattctctcctgcttcagatgcctcgtcccgagatacgagctaagcgagatcccgttgctcggcctcgtgatgacaccgagtgttacgacacctgttccgacgttggcatgcctcgcgctgcagggctcctcccgcagtgcattgggctcatagttgaagatgggagcatcctctactcttccctggataaagagaacatctagtaataaagagctcgaggctgtgtcccgcgttcctgctctctctcatgtgagcgaagcggcagaggcagtcgttggtcttgttcccacggccacgctggtgcaggggctatccatccttttcgacgagtgatccaggtccacattcaggtgggtgacgtggatagaggggtccaccgcgataggggtgcagccttagttggtcgagccacaggtgttgttatggccctaggcccactcgacgtggacacaatcctacgcgaggcggaagttggttgaggtttttgcgccttggagcttgttggagtgaggtgggacgagcctgcctccacaattggtgccatcagagaagtcttcggatggattcacgatgcggtgtaggacaccttcttgatcagtgatgcaggagaggatccaaagcggaacacctccctggcgttgaaggtggttggggtgttgaagacgatagctatggagtcctcatggatcaacgtcgcacccctacctggtgcgccaactatcag

SEQ ID NO: 179159 - DNA, 645 bp, Zea Mays
gttctcggaacactgcccaggattgttcgccaacgcctgggaaggttgtctgcggccgcaattgataggagagcgtcggcgggtttggtgaattgctcgtcagagcagtgtgtgcgccgtccttccacctctcaccgtggcacgtcgcctccacctcgccattgccggtattaagcactctcacttgtctgccgcaccctcaatttggcttagcacctaggtaatcgtggtatggcgcccggaatcgctaggaagggttcgctggcaagctctgtcgccggggagttgtgtggcgccgccgcgtccacgctcgggacggggacgatttcgctcggccgttggatggctagcggacgacggtgatcgtaacgtaggatacccccttgcttgattaaaccatggctgtcgatatccgatctggtggtcgcgtggcatgttgcgcgggttcattaaaccgagacccttggatttggatccgatggcatagatcggataccggttcgatgtaatatagagctaatcttcgcccttcaaatctaatcggacggccgcgatcggcccatacctctttggcctatcaatttagcaattaagcccctacagaaaatagaaaccaacccgccatccgcctccatgcgctctgtg

SEQ ID NO: 179160 - DNA, 611 bp, Zea Mays
gatgaaggcttggattattttgttgcgttggatgtggctgcggcggagacttcgtcgcgtatggagtgtgccgaggatcttcctagtgcggatggagggcgtaggcggcgaagggtggtggggaaacatagtgtgggtgagttttcgcggagtggcagtcgccgtcgtatggggatggagcgtggccgtctctgtgtaaaccgggttgataaacgagaattgttgtccttgacggctagggcgagcatatgcgagggggatcttcgaaagctttttgagggtgaggaattgaggataatgctgtttaattacagggagatgggtatcattctgaaggttgagccgatgtaataggcgatggcctcggcgtgtgtgtaataggcgatgccctcgctgtgtgtatgtaattgtaatttgtatggtgatgtggcctattggtcgtattcgtacatttgtattggttcggctgcatacgtgggcgactttatgtggagtgtctttgtaatgagagacttcgattaacgttattccggctgcgcccttaagcaactgttgcgctgagtgtcttttgaataaaagacttcaattaacgctcttgttgtgctgttacg

SEQ ID NO: 179161 - DNA, 771 bp, Zea Mays
gagggctcgctaggctacacacaacaaggtatcgtgattgaggggtgggggcgcactgcacactgctactgatgtagggatgcgagcgttgtgtgtaggtgcatagctggccatgtgggtggcacacatgagcaaggaagaggggaggaaagcataagggttgcggggtagggctcgtgcgctaggcgtggtagggccaaggggcgcgcagggaaggggcgtgagggagctcggctatggcatggaggttactatgcatgcgagaggaaaaagaaaggtccagggagagagaaaagagagagaagagaaaaattggaggaatttggggtacgggaaaatccgaccccaagattgtgattagagtgtcgttcttatgatccggtgatccagcgagggagggacatgaattgagtcaccaattctacgctaccagacgagtagagacgatgcaccgatgaaatagagaaggccaagggagttttctcagtgagggaaaaggtaggagggttggtgaagcatggtcggtggtgatcgtcattgctggggacacctcctcgcctcgggttctactcgcctggggaagggaaatggcacaggtgtgagaaaatgtgtgtgaataaggaggggaaaagcggagatcgagcaacagacggggacacgcgatggaggggctatgaaggggttacggagtggaggtttcgcttgcgaacgcgggaggggcggtttatgaaggcttcattctttcccaacgtgcacacgcatgggtagggt

SEQ ID NO: 179162 - DNA, 759 bp, Zea Mays
gaccctaatgggtgtaatcttgcaccaactgacctcaacgagtgtatccgtgcgccagctgatcccaatgggtgtgatcttgttgaagctgaccccaatgggtgtgatcctgcaccatctattgtccgcattttttacgaggacgaagaagaggaagaagaagttccgctaattcgcaagaatagccggcgttacagaggtagtaaggggatagtgatattccttctccagctctgtctgctcttgttagccttcaagatttatccataacagattttgatcaggcccttgaggacgtcattcctgaagatatgctattggaaccgactattgataatatgatgaatgtttgctctaacgctccagacgtgggattagaggtatcccgggtggtatctcgtgcatcgtcgactttggaaggcaatcttcggtgtcaagaggttggtcaagattgcccgactcccatggaggtgactgaggatccttcagcctcagaggtggccgttgcagaaaacctagcccctaagggtgatgctggcggttacccaacccccgagggtgtcgccggtaatgatccggctctagtgggtagcgcaagctgcaacccaacccccgagggtgttgccggtagtgatccggctccaatgggtagtgcgagctgccacccagcccccgaggttgtccgagcgagctctccttcccacacctccatggacgtccacgtcgggtcatctccaccacaatctgatggagtgatag

SEQ ID NO: 179163 - DNA, 971 bp, Zea Mays
atttacttcaaaaattgtcgcgttctagagactcaaaccattctaacactttaccctttgttagtgttaaattaatcaaatgaggactaataataataagtagacttactaattttatacaagttatttcacgtgttagaattaccgtacacaatcaacaagcacattcaccacaataatcaaacccggtataaatgtgtatatcgattgcgcccttcacacactaatttgcattttaacttatacatcacatgaacacccctaattttacccgcgaccataaccatgcgcatttaggccataacaagcaaatcatcgtgattacgagcttaactaaagccgtccaacaattcggctaactagagtaacgacatagcccgctaaataacatacacgtcggctagtccattattatcgcaatccgagacacaacatacactacagcaattttataaacaccatattcacaagtattttcgcacatcgaccaatctatacgaatcgtaaaccactagtctataattcgcaaacactatgcatttacttcccgaatttacgaacacatacatatttatcatacgaaccgagtattttcaatatttatcctaagacaactaactccattacacacttgtatctacttgacttacttgaagcgtctactcgaaatcgtgaacacaatcatacactatatgcgaagcctaatttattaaacgcacaatacgcatcgtcacgactcgccttataaatatagagaaagcgacgactaccttggcatgtcaccacctctctatataagctaaaataatttctacctaaaacgaccaaacattcatgtcgagcacactttattttaccgtgtctcgcatatagtcatatggtggcgtgtactcgagacacttcaatcaacgtggcgcgaccactaatatatgaactccgacactcatgtcttaacaatacatcctccacgc

SEQ ID NO: 179164 - DNA, 807 bp, Zea Mays
ctcttttcactcaaacttggttttagtttgcactaacccaattattagaccaagttttcaggatcacctattcgccccccccccccctaggtgctctcagtacctccacaagaactctgatccataccacagatcatccactatggcttgtgtagtgatatgaaaccgagctctgtaaagacttttttaccaaatggagcatgacatacgtgttttattgatatagcggaaaaatacaagactgtccttgtgaaaccataatcagacaaaaacaaagaaaactacaaaatagctaacacttggagggttggattggagcatcgacatcgcaccatacaaacaactccaaaaggttggattcaagcaacacacaaccaaatcactccatgtcaccatagctcaagtatcataaatgcatcaccatcaccaggacaacacccatggagaatcaaccattgtcatgcctgcatcatcattaccaacgatgtcccacaccaagctagccattctcatatagtgttcgatttcgcttgcacctctttacgaagttgccctacaccgagccaacacccgccaagtagggttggccactgtagatcgctgcaagccatcaaaacgatgaatgaatgccttgttgaagaagcaaaaatggttgtacactttggagttcatccatctttggacatccatctaccacatatcgtccaccaagatgtggttgtacactttggagttcaagcaacctagttgccttgttgaagaaacaaaaatgtcgcacgaaacctccgacaaccaatataacaccac

SEQ ID NO: 179165 - DNA, 519 bp, Zea Mays
attttcgtactacggtggagcaggccttgggtgtggagatgcaacatcagtacaccatggagtatcaaaagtcttcgggtgttgatcagcctcgtggccaggacacgaggaggggcaacactgggggtccagcccacaagaggggaaagtcacagcactagcgccaccacccctaccgtggcaaaccctctaaattgggaacttcaggagggagtactcagaggtatcgggttgttcctaagcccagcctggggctggtgtgtttctgttgtggtgaaacgcatcgctgtgccgaatgtcagtggagtgacaggtgctctatctacagccaagatcacaaggatgtggtgtgtaggaggaatcccaatgggaagctcagatgggagccagtgacttcttcctcttctcagggcactgtaaacatgatgtcaagcaccgagcagcaattttcagtaccaccccctccgcagcagttttatgtgcccgagacttctcagttcttgcttatgcagggtttcc

SEQ ID NO: 179166 - DNA, 1524 bp, Zea Mays
gcaagctattcagaatttgctaggttatagtttctgctgactcggcggtgtctgcattgaccttttaattttagctatgcaaattgatttctagactatatttctgaagtatgtggattaaattatgatcataccccccccccccgaggatttgaaaccataacagtatcacccaatcacatcccatgtattttcctgcaaacactgctagtagtttctgtttatttacaggggtgaaagagagagtatgcatttaataagggtaaactatgctgatacctaagatgtcactttacttttccgttatgtgtatatggagcgaaaacaatatttaatttggatcatgtatagtgtgtaagtaggctatcatatagatagaagtacattgtacaagcgtgttgatatggtcgaacttcactgtgattcgggtggtctaaataacatctaacttatttttactatggtgcagatcaattatctagtgttcccgatcagtgcgcagcaatccaatggctcaaggtaacttgtcagtgacctgtgttatactgattgtagctcaaaagtctaacatatgcttgattgcttctagaatatgctgttgtactttactattttacatgcctatacttggtgttccatattcctagagcccttggtggtcatctatcttaccattttgcttttgtagggttgtaccagcagaaggttactgttccatgtacgacatttgtgcacaacgaagcgacgggaaggtcttaaactgtgcaaatgcaaccaaagctgttaaggtgacaaactgacaatatgatccttggaccttgatttgaatataacatagttaaagaaacccttatctttgaaaaaatatttatgattattcaaatgtggcctgtttagcaagtgttttattgtttttccagccagacacattgttttcttcaaggatccaaagtttgtgcccaacaatcactggcgatgtctgttgtaatgtagatcagtttgacacattacaccaacaagtccaacaggtaaatgtgctgatttctgaagatgtacatggaccgggtaaatgtgctgatttctgaagatgtacatggaccgtgcacttttaataagcaaaccacattggtaaaattatcaacttttctgtttgatataggtcaaattatcaaccagaaaaggcacattaatgagtgcttatcattcaccgatcgcagttaatcttcagtacagttgtctttgcagtgtatgaatatatatgtatatatattttgtttggtgaatctgtaaccagctaacctgaaccttcttattttgttagtgacaagttccctttattttacatgaggttcatgtttgcttcataggttatatcctccactcctttcgtgctaatgcatacttctatctaccatcatgtagagcctctgtcaacaaatacatttacctaattgttgattatttgtttgttgctggtctttgtcataacattcacactgtatttcctaatagacagtgctacag

SEQ ID NO: 179167 - DNA, 353 bp, Zea Mays
ttgacataggagatggtaaaactccaaggccgacttttgtaaacaagaccctggagaccgatcctagaaatgagatgatcggtctattgaaggaatattcagattgctttgcttggaattacactgagatgcctagattaagccgagagatcgtagagcatcggctgcctattaggtccggtttcagacctttcaagcagaaagctagaacatttcgtccagatcttctcccacgaatcaaggacgaaatccaccggctgctagaagctgattttattagaccttgcagatacgcagaatgggtctccaatattgtgtcggtggagaaggagtcaggtaagcttagagtatgc

SEQ ID NO: 179168 - DNA, 370 bp, Zea Mays
taagaacgttgcgaagacgaaaaggactagggagaatcaagacgtcgatggaggcgaccggaagaagagaaccattgccaacaatggaggaaggatatgtaggatggggaggatgggaagaagagaggataccagcgttcagagtggtatggaacgaggcaccgaagccagccacccaatcgatgatgtccgtaggaggggccaaggtcatcgtgctaaaccaattagcaagagacagctggtcccatgccccaacgcacgacagagccatgtggggcgacaacggtggttgagggagaagtggtgccagcggcaacatcggtggagccaaaggctagggcccaaaaggacactctggaccattaaagga

SEQ ID NO: 179169 - DNA, 893 bp, Zea Mays
agtcgcaccattgaagataatatcattcctgtgtttccacaaggtccaggcccctaatatgatgagagaatttaatcccttcttcaaagctttatcgtcacagacactgcctgcagccaccactccaagaaggactccgacccgggttgaggtgagagcacagacagacccagcctttgtagaaagtagaaccaaaattgcctagcaaaaacacagccagctagaaggtggttaatagtttccttttcctgatcgcatagcacacaaagagtggggtgggggagattccttttagccaaccggtctgctgtcttgtgagcaacaagccacatgaagaaggaacattttgggggagtccaccctttccacactaggtcagctgccccaaataaggttgaacctagaaaaaaggcatcataggctgatttggccgtgtattgtcctgaattagagagcctccacaggtgtttgtcaggaattccttgctgcaggattattccctctaactgctccaagataagaaagaactcctgaaggatttgcaaagtaagggttccatgaatgtccctcaaccatctccaatcagccaaggcctcggcttcttttattgataattctcttggaaaccgatctgagtagatgaggagcccaatcttgtaaacgtttgccccacaaccacctatctttccaaaatagcattgacttaccatcacctagctcagttaccatggccaaagagaagaaattgtggaccgtggaatctgcatgtagtttgaaaacagcccaaggcttgtcccgctcagttttcctgagccacagccatcttagtctgagagaccagttaaggcattgaagatccgaaatcccaagacccccaactccttaggcctttt

SEQ ID NO: 179170 - DNA, 680 bp, Zea Mays
agcttcaaaaaattcttcttcggataatctctttcccgaagcgtgtcgaataatataatcaaggacttcggaaggcgcttcgggagtaggagcggcagctttttcaggcaacatctgttctatagcttcttcctccgctgtcttttctccaattttcgaggatttctccttggtgggctctgaaggcccagcctcggcgtcagcctggctcattgtagcttcggcttcggtcagctttgtctcggtttcaatctgcgctttcgaagccttggcaattttccttggagtagagcttgaagcttttattgtctctagcacatctagtacactagccatcctttttctcttgggggtcgctgctagacctttttgtgtcttcggcacctccactcctgccgaagggcttagaacttctaatgttttcgtcccttcgattctcggttcttcaattttgtcagtctttggcattgcagtcggctcttcaatcctctgcgtaagagcaggtcctttggcttcaatagctgaagaagtctcaccgctaaattcaggcactatggccggttcaatgtagcgcggtcggtgagtaaggaccttcaatttttttcctcttcggcgcaggctcgcttggagcagccgaagcggcaacctttccagaggttgcaccctttcttttctgccct

SEQ ID NO: 179171 - DNA, 487 bp, Zea Mays
ggagaatgtactttgatggctcactaaagctacaaggaccaggtgctaggattctctttattgcccctaaaggcgaacaactcaagtatgcactccagctactgtttctggcatcaattaatccggtaaagtatgaggcactggtccacgggctgagcattacaatatcactcggcatcaagaagctgatggtatatggtgactcgttggtggtcataagccagataaacaaggattgggactgctcgaccgattcaatgggcaagtactgcgcagctgtgtgaaaactagaagacaagttcaagggattagagttccatcacgtggaaagagatcacaatgcagcagcagatgcgttgtcaaagctgggatccagtcgggcccaggctccacctggaatcttcgtccaagaaatatcacagccaagcatcctcatggatcaagtggagcagtgcaatgccttgagttagccagaggcagaccccaa

SEQ ID NO: 179172 - DNA, 751 bp, Zea Mays
catggaagtaatttctttgcgaacagcttggggacaagggagtccaaatcatcaaggaaatgctcacctagaaagtagaaaaatataagtatttccgtctggatagcaagggtatattatggttcgaggaccgacttgttgttcccaaggatcaaaacctaaggaagaagattttggatgaggctcatctctccaaattctccatgcaccccggaagcagcaagatgttcaaaatcaccttcgtgtgccatcttgtgcatgtcccaaatctattttgccgtttgcaacatgttcaccttgttgtatcttcccaacacaaagagactagaaatactacggtggcttgcgagttgcggcaaatgatttgggctgccttgtccgagtcatagtcctcattactgatcttcaaaatcttcattcctaattcatcaacatcttaaatgttagggtggagagaatataagtgacttttctttttttacactgccccatgaataattttcacaatcaaattgtggtggttttcctaaaggtaccgaaagcaagggaatatgtttaggaatgcaaggataacaaaaaggaatttggttaacaggtttgcgctctttgcgcttggagtttgttgactcggtgccagatgtggaaggtgatgaagatgtgttggtctcgtagtagaccacctttcttatcctcttcttctttccatccttgttatgcgacttgaaggagccttgggattcttccttcttgc

SEQ ID NO: 179173 - DNA, 739 bp, Zea Mays
aagttttagaaaaatatgtgccagcatctacaagtttgaaaagatgcactagcaggacatatttcatggagtggttaacaaaaaaggtattgtagacgttgaagcatttcatggagaggtattgtttgactactaagacacatgttactgttactctataatacaagaagtcctggctgtcaagtaaatcagaccaaatttgctttggttgcattattttcgtgccagctatttgctgcaaaattccagaaccttgtgtatcgaaccacagttgtacatctccaaattactactagtactctgcaacaacgcggtgcaatctccaaagatgggcatttgtcctaagtggccgctaagctccaagatttttgcttttacaaagcttcgtcgcaaccaatggtgagagagacatgcagtggctacacaaggcaggcgcgcgacagtcgtgagagaggcatcgtcacacgcgtgtttacctcaggctcaaacaccggccggccgccggccatgtgccccgacgcgtcaacgccggcgaccaaagatgccgatgccggcaccgacaccactattgttcttgcgaagcttcatgcttcgcgagccgccatcgtctcggtgctttccgccgcggctgaggctgaggtcgaaatcgacgccatcggtgaccgccttgatgagctcctgtccagcgcctcgccgtcgtcctcccaccacctccagtcccaagccgtggcggcacgcg

SEQ ID NO: 179174 - DNA, 389 bp, Zea Mays
cccaggacaagcaccagaagttcatgagccataagccaccgacgttcgccagttctcctgatccactggacgctgatgattggctgaagtctgtggagaagatgttgattattgcccaatgttctgaccaggagaaggttctctatgcttctggtcgtcttactggtcctgctactcattggtgggattcatacactgctgcccacgatgctgctgatactatcacatgggcagagtttgctactcagttcagaaactaccatattcctgctggactgatgaagattaagaaggaatttctgtcgctgaagcaggggagcatgtcagtcagtgagtatcgcgataagttcattcagctatccagatatgcaccgaatgaagttgctgaa

SEQ ID NO: 179175 - DNA, 491 bp, Zea Mays
gcaatttgacagccaagacttcagggatttctgcttctccattggcaccaagcttgccttcgcctcagtgtaccacccacaatccaacggcgtcgtggagcgcgccaatggcaagattttcacggcgatcaagaaaatgctcctcgacgacaagaagggcaaatgggccgacctgctacctgaagcagtctgggcactgaacacgaccgagtgtcgggcgaccggtttcaccccctttcacctgctatacggatcggaggccatgaccccgcaggaaatcaaacatgggtccccgcggacaagcacttcagcagtacccgacgtcgacgagccaacttccaaagacctcattgacggagaccgtgtcttcgccctgcaggccctcgacaaatatcaagcacaaacgaaggcctggcgcgaccacgcagtcgtcccaagagaattcaacgaaggggacctcgtacttgtccgcacaacccggacagagtcac

SEQ ID NO: 179176 - DNA, 1177 bp, Zea Mays
ccgaatggtgccacgagagacaaccttacatctcgaattgtccccgaatgtaatgtactccttaccaatcatggggtaaatgctagagaaccatctagagtttccggtcatgtggcacgaacaactaaaatccatgagccatgtgttctccaggcctctaacctatgtcaatagaaagacacatggtgaacaaatggcacaacgttggggttagtaaactatgaagagtaccagtgttgcagcatttacccctaaaaagtgtcaggaaaaacaccaaacatccccgctcccataggtaggtagcgatcaccacaagacaaaaatcaaggtctgcaaaagctattggtaccaaaacttcaaatctttggtcatatggcacttgaccaacatctcgtcgggcacgactaccatatgatctcactacttgaggcctaacaacctgaggaaaagctcctctaggcctagcagtgcatatctgagtaggaggatcacacacaccatgagaagggtggtacatgtctttactgctcacctcaaaccctgcctctcatttctcttcctcctaaaacaaaatgcaaccaagtgaccatctctcttgcaatattcatagtggtagctcacctctctcttaggtggagtcttattgtgggaatgggtcatcttgggtggctatggtgctctaggaaggggatcactagagatgtcaagaaaggtgtcaagtgggttcttgagatgattaggttttgatactagacttgtttttgaggtggggcccttggaggctccacaaacactccatctctcacatctggggaggcagatatgggtggagtgaatttgataggctgggagatggctggagatttctagaaaggtgtaaaaccattgcactcaccaaccttactataaccagcatcactcccaaatctagcagcaaagcctaaccctggtccgccagttccgctcttatactgaccatcatgcctaacttgggctcactgctagacaaatacctcaagactaatcaaaggtatgtgttttcgtcctcgatcctagtcctgatgtgtctataggactcaagctctaactacaagtataggtgcactcacagaggtagccttctcaataagcaaggctatcctagcattcttctttgctagctcagtctagaagccag

SEQ ID NO: 179177 - DNA, 575 bp, Zea Mays
gagagggtcggcggccagggagaaggaggtggattgcgggtccggcgagctcgcatcgacgaggggcgatggttgccaggagctgggcgccggatggggaagagaggtgggggatggcggcagctggggagatgggccgaagatgggcctcccagggacggcgacgcagaagcaggtgcccagcggctggcagctagcatattggaggagccggcgatggctgctagttgggagaagaggaaaacctagctgataccatgttggaatgggaaacccttgattgtattgcatagagctggtggttacatatatagacacatgacggtcggcagcccaacagtggtgcccgcctatacgcacagtctaacactatgcctctagatcccccaatatgatagttttatggcgatgagaagtcatattgggagacttgttggagatgctcttaggaggcgccttgtcagagtattctatctctctgcagccaaatctcgcagaatgccatcccaagataacatgctcgttgaagatcagtttcatgttaaaaattgtcccatcttcaatctttgaatgat

SEQ ID NO: 179178 - DNA, 602 bp, Zea Mays
ctccgaattccgcacgatcaatacatctagagttgtaaatatgaaaacccacagcctttgaagaaaccgaaaaccagaaaacccgatcagcgagctggcgcacctcaaagccagccacaaacccacccagggcggcctggagaagatgaccaacagaatccgagttcaacttgaaaatgcatgtgccgaaagaaaccaccaaccagaaggacgacagaagactgtggcgagcaggacaaaccgaagaggccaaattaagccagagggaatcctcgaaggccaactccgactgaaagtccaggcgggcgagttccatgcttgaggaaacaagaagaccagaaggcagaggcgagaggacctgaacttggtggccgacgagaggaaaggggaggaggaagccaccaccgccatggtcagatcaccggacgggagacgccacccggcatcaccggttccttcccgttagcttgccctggaggagcggcttgggggccatcaaactccctagtgtggtgtgggaaacattctcaagcatgtgactggtgacatttagtttgactaatctctactactaattatgttagtatcgtaggcgtccacat

SEQ ID NO: 179179 - DNA, 712 bp, Zea Mays
gccctcgcttgtatatgtgtgaaggcttgtatgatgaggttgtgtgcccttgcttgtatatgcctgcgaaggcgttgtgtacttggtctggcatgttttgttatgttgtgctggtgcgcgtatagtcggtctcggcgcggacggtttgatgttgtcgtttctgccttcgttgtgctagtccggctgcacccgtaggcgtcttctgcacggatagtctacgcggtagacttcgatttctttgcacttgttgtgctagtccggctgcacccttgggcgacttctgcgcggatagtcttcgcggtagactttggttttttcgcacttgttatgctagtccggctgcacccgtgggcgacttctgcgcggatagtcttcgcggtagactttggtttttttcgcacttgttgtgctagtccggctgcacccgtgggcgacttctgcacagatagtcttcgcggtagacttcggtttttttcgcacttgttgtgctagtccggctgcacccgtgggcgacttctgcgcggatagtcttcgcggtagacttcggttttttcgcacttgttgtgctagtccggctgcacccgtaggcgacttctgcgcggatagtcttcgcggtagacttcggtttttttcgcacttgttgtgctagtccggctgcacccgtgggcgacttctgcgcggatagtctttgcggtagacttcggtttttttt

SEQ ID NO: 179180 - DNA, 552 bp, Zea Mays
gtgatgtcggcgttttagaggtaacatccgagtgattgatggtgatgtcggtgttttagaggtaacagccgagtgattgatggtgatgtcggtgttttagaggtaacggccgagttagaatgggccgcgtcggccgttttggaaataatagccgagggatgacatggcatgccagcttttttaggaatagcggctgagtgatgacatggcaagccagcattttctaaaaataaccatcgagtgatgactgggtgctttctagaaacggtatctagcccaggaaaaccccatatgtacttcattgtagcgcgcctctgctttctgtgccctagttcttgcttttctgcatccaagctttctttgcgcccgtgcgatattgcttccgttccgcccgccagcaagatagagatggcgcccaagcggaaagcatcaagttcatccgttgctgttattccccccatcgatcccaacaaccagttgcctttcgcaggtaaccatatgtctgttgtttctgagtctgatcttctccatctcgtgtctatcggagttctt

SEQ ID NO: 179181 - DNA, 405 bp, Zea Mays
ggcatgcactatggctgccaattccaaatcatgggtgggataattctgctcatgtggcttgagtaggcgcgatgcataagcaatgactttctcgttttgcatcagaacacaccctaagccttgccttgaggcatcacagaagacgacgaattcctggtgtatatccggtagtgttaaaacgggtgcggtcgtgagcttcttctttatgatctggaaactttcttcacacttcggggtccacacaaacttattgtctttcttgaggagctcggtcataggtcttgctatgctggaggatcccttgataaagcgacgataatatcctgccattcccagaaagcttcgaacttcactgacgttggatggctgcttccattttgatactgcttctaccttggacgggtc

SEQ ID NO: 179182 - DNA, 498 bp, Zea Mays
gatcgcatgttcgcgagtctgctctcgttgcccacggaccccacctatcagctgcctccctttccctaacctcccgcccgcgcactccaccgtgaacgcgcccacgtcgtgcgtttcttggccactccccatgcgcccaacctatttctggagcccgcactcccttgctcactcccgtcgctcaggtgcacccctagcagaccccctcacacctctctctcgcgccacgcgcacacccgtgaagcaccaccatggtctgccgtccgttccgtggccgtcgtcaagctcctgtcgcgattgttgccccagtgagctccgcctcctcgtcagcaacccgagacaccccctggttcactcatttcccctttgtttctctcggaccatgctcacctgcctttttgcaccacagcagctctgccgccgtcgacccaagaccccaccgtgcctcagccgccgttcgagggtccctaagtcttctctcgaggtaaccaacctaac

SEQ ID NO: 179183 - DNA, 360 bp, Zea Mays
cctgctacgaataagaagatacagtatgtgatgagataaagatcacactgccagatgtccctcacaggtacaaatccctcgagagctaaaccgatcgatgatatttgtcaaacatgttattatacgacccttaagatttgtttaattttgatcaaacaaaatatggtgaaacccactttaaaactaacagctacagctacgtgcaatgaatttggtactgtcggcaaatgccggggcttgagatattttcccgctggattgagatctttttatccttttggaccaccgctggtcggattttttccctccatcttcttccatcaccacggcgacaagtacgcagcgatggcgcgcagccac

SEQ ID NO: 179184 - DNA, 501 bp, Zea Mays
gtgctggagcattcttgaggccattcaccaagttggagtaggtaggcacggatgtcttcaactgaggacaattattcttgtagtgactggggtctccgcagtgccaacaagcattggctggaggttggttgcttgcaacagatggggtatggagggaactttgaccctgctggacgaaacgtgacggagcggaccctgctgtcttgttgaagcttggtcctttgggaggaaacccaaaagatcaaattctctggtgcctgtcctgctgctgagctcggagaacttgaaactccctcttgaggtgacccttttcttcttctctagccctttccacttgtatggccttgtttgagaggtgcgagaagctgagaaaatcttggctagcgaggatagtcttgagttctggtctcagcccctagaagaaacaggacatcttcttggcttctgtgctgacatcatcaggcgcatagcgagccaattctgtgaacttgtggacgtatt

SEQ ID NO: 179185 - DNA, 635 bp, Zea Mays
aacaaaagaatcccaccgccggtgacccctccgccgtgattcgtgtcgccggccttaagattcgtgtgcggggtggattgataacgttgcggggtaagaatcctcgccgacggtgagctggaggtcactccggtgacatcaccgtggctttcttatcctctttgcggctgagcggattaacacgccggtgaccgccacctcccggccatgcgccgcgtggctctcgctttccaccgcaccaccgcgacttaccctcgctctccgtggctcaccggagtaactgccacggcagtagacaccaagcggctgcgccagtgttcttctttccctccggccgccgcgcgtcttgctcaaaattcgcggccaccgcccgctggcactataaattgacctcgcccgtagctgcgccatgtcatcgtgaagctgtagcacccgctcccaccctcgatcatccaccagcacgcgcgaatttccaattccccccaaatccattctccgccaccgtgaaacgagcttcaccgtcgccagccgtactccggtcagtccccgtcctctgctcccttgtttaagcattctgatgcggctgtgatactcgccaacccatccaattgaattaggagcccactagtcgccag

SEQ ID NO: 179186 - DNA, 371 bp, Zea Mays
aacagattctcgaggggcgggggatacggatgggcggacgagtggacggccggtagagtagaagattcttgggatcggacagacgtgtgcgcggcgcgacaaaagcgagccaagacaagtgtcaagtgacagacggacggccagagcttggggagagagggggagggacagaacacgcgctctagtttaacttggcttgccttgcctcccatggataatgctaaacaggagcgaggtgcctaatcccattcccatcccgggtctccggtagtgcccggcacacggcgtgtttaattaggcttgcgctctgccagatgtccggtttgcgagctaatcactacccgatccgtgctcctttgtggtgcttttcc

SEQ ID NO: 179187 - DNA, 617 bp, Zea Mays
gttgtgataagaggacaatcaagttggtgtccccactaggagaagaagtggtgaccgagttagtcccgcctgagccgaagaaaggaagttgttatcagatggctgtcgatagcagtgaagtagacccaattgagaggatcaagattgtgtctgagtttccagatgtgtttccaaaggatttaccaggtatgccaccagagcggaaagttgaatttgccatagagcttcttcctggaaccgcccctatatttaagagagcttacagaatatccggaccagagttggttgaacttaagaagcagattgatgagctgtcagagaaaggttacatctggccaagcacctcgccttgggccgcccctgtcctattcgtggagaagaaagatggcaccaaaagaatgtgcaccgattatcgagctctgaatgaggtcaccatcaagaacaagtaccctttgcccagaatagaagatctattcgaccagttgagaggagccagtgtgttctccaagattgatctgaggtcaggttaccatcagctcaggatcccaccttcggatattccgaagacggcattcattaccaagtatgggttgtatgagttcactgtgatgtctttt

SEQ ID NO: 179188 - DNA, 568 bp, Zea Mays
tttggccaaaatagtttgttaaaaattccaaacaagccattcaagtggagatttaatggggaaatctgaaattcagatttctgaattttcagcccttgaaccaaaaccgagcgcgttcaccttgatccttagctctaatcctaaagctcccattaacaaaaacgtgtctaactaacccctctatcacatatctgaagatggcatcaggacatgagccctagacacgacaaaactgaagatttgcctcgggctcgggctgggagacaaaccagacttcagagctccaaatctttgaaaccagtaggccaaatcctatgacccctgcacaagatcggtagcttatagggaggagaagaggttttgtgcacagaccaaggcaagagcaggctcggatgaatgaccacacgcgtcagaactcgggcagaatgaacgcgcacacgtgttcgaccctggtcggcacgccggcattcacccaacctgcgcgcgtgctcgccccagcgtccggtcaagtccgccgcgcgccctcgccctcgctgtgcctataaagcagccaaggcctcggtcgtac

SEQ ID NO: 179189 - DNA, 345 bp, Zea Mays
actttggaaggcagtcttcaatgccgaggcgttggtccggattgcccgactcacatggaggtgacagaggatcgttcagccttagaggtggctgctatagaagacccagcccccgagggtgttcaggtgagctctccttcccacacctccatggatgtccatgtcgggttgtctccgccacgatcggatggagcgatggcgatgcatgcttcttcggcttcgagcaaacaagtcaccttggaggtcggcgagtcggatgcaagaagtctggtatccgctggtgaggctgagctcacccctgacaacgttcttcaaattgttctggttgatcttccttcgtcgagc

SEQ ID NO: 179190 - DNA, 716 bp, Zea Mays
catcgtcaggcgtgtccgacgatgattccaacgggagcccatcccttgcttgcctccaacgacgcttctccaaggcctcccgagctcgcatcttctcgcgagctcgggccttttccgcgtccttcctctccttatccttctccgcggcgagcctatgcgcggttcggcccgctgcgtcctccaggacctataacatcccaaaaccccacccaagatttgaaaccctaacctcctaaattccttcccccccttattttacctttctcccttaaccctacccttagaacccctcttcatgtgcatacacttgaaataattagagcacctcacatagactatgtttctcactcaagatcatttagaaaatatttttggtctccaaagaaaaagaataaaaagaaacaaaaatagaaaaaggagaagaaagggattagaattagaaaaagaaaaagaaaagggaaaacctcaccccctccctcggctgggccgaattccagcccaacccacgcgcgcttgcacctctcccccctctctgcccggcccaggcggcccaaccgcgcgcggctcccttccgctgacacccgggccccgcctgtcagcgcctcaccccctctctctcacgccgcttcctctcgctggcagccagggcccacttgtcagttccatccccctcgcccatccctcaccggcgcatccaccgccgagcaccccctcgc

SEQ ID NO: 179191 - DNA, 1353 bp, Zea Mays
aaattgttgttcgacgatgaaaacatgtgtcgcgggaggccaaaaatagccttaccggcctccaaggccaaaaatgtgtacaatggttcggacactagtgtactatggtttggacactaaattggttgttcggccatgaaaacttgtgttgtagctcacgcgaggcccaaaacagccttactttactttttagggttgtgttttagggtttggagtttggggtttggagtttagggtttacagtgacactagtgtactatggtttggacactaaattggttgttcggccatgaaaacgtgtgttgtagctcaagcgaggccaaaaacagccttactttactgtttagtgttgtgtttttgggtttggagttgtgttttggtgttcgggttttcgttttagggtttggggtatagggttcacaatttagggttcagggttcagggttcgggctttagggtttggggctctgtgtttagagtttgggcgggaggcatgaaatcgttgttcgacgacgaaaacatgtgtcgcgggaggccaaaaatagccttaccggcctccggggccaaatgcgtgtacaatggttcggacactagtgtactatggtttggacactaaattggttgttcggccatgaaaacgtgtgttgtagctcacgcgaggccaaaaacagccttacattactttttagggttgtgttttagggtttgaagtttggggtttggagttttgtgttttggtggtcgggtctttgatttagggttcgaggtatagggttcacaaattagggtttggggttcaatgttcaggccttagcgtttggggctcgaggtttagagcttaggcttttgggattcgagatttcgggtttcgatttgagggttagcgtttggggtttaatgtttagggtttggagtttgggatttgtgattttgtgttttgggggtcgggttttagtctaagggttcgcggttacgggttcatggtttagggtttggggctcggggtttaggatttaagtgttttgtgtgatgtagctcaatagatgctaaaaacaacctttcccatgccagtagccaaaacatgtttggcgggcgggaggcatgaaattgttgttcgacgaagaaaacatgtgtcgcgggacgccaaaaatagccttacaggcctccggggacaaaaatgtgtactatggttttaacactagtgtactatggttggacactaaattggttgttcggccatgaaaacatgtgttgtagctcacgcgaggccaaaaacagccttacctgtcttagtggccaaaacaagggtggcgaacgggtggcatcaaattgttgttcaacgacaaaaacatg

SEQ ID NO: 179192 - DNA, 499 bp, Zea Mays
gattgttattatgaccaatgtttgttttgcttctttgattgagtgtgacgcattgtagaattatgtccataatgacatcttactaatgcatagtaaaatatagattagttagttgaattgggctctacttccatccaaatccactataccttaacctagtgtcctaaactaaaactcagtcatctacaattatctaaactctaacccagatgatcggaggagcagaccaacctacttagcttcgacaagaaagatgcaaatagatagttggatactaacatgccaacttcttacacgtcatcggggagaagatgtgcgacgtgcgtaaaatcgtcacgtcggacgaaaactgctgttgcagacgaagcaacactttttctgcattcagtagatatgtgagagaaaaataaacagttcataaaatgggcctttggaaaaatcggtaagaatccacaacagcataatcaagaaatcattgaagttttacagtctagcccag

SEQ ID NO: 179193 - DNA, 702 bp, Zea Mays
cggcttccagggtcttgttcacaaaagtcggccttggagttttaccatctcctatgtcaatttcctccaaaggatcgggcgatgtaaatctctatcctaacttgtcaagatccctaaattcctctattatgctcacttaagaggagttagatgctctctgcgtagctgtggactgtccagcttcagagaccggactgtccgcgacatcaaactcgtgctacatcactccctggcaaaattcagattgtccggcctcaggggctggactgtccgcgatagggctgaaccctgcgactcttcttattctaccttggaccatccagcctcgggagccagactgttcgcgacctggggtatgctcgtttttggatgtactcattatttaacctttacttgggatttagccgattctccatcggctctagcatgacaggaatgaagcctttcctatctatacttatgaattgacaattggaaaaatcaactcctgtgagacatgtggcagtctcataggtccaaagtataggggcatcgaccatggcaatacaggccgatgcatcagcatgtacttgttctatatcatcgcctacccattgcaacaacattgatgtaaagtagaaggtacacattgatttacatggatccaatctctacctaagattatactataatttccttatacgtcggcgacgaagaaagcga

SEQ ID NO: 179194 - DNA, 592 bp, Zea Mays
gtgcgcagcaagtggcacaagacggggcagtggaaccgaaccgcagtgggtcctgttgcgctcaagagttggctgccattcctgaaatgctggcgggcagcaagtccacccggtctagcaaaagaaggggcgcgtcaatggacgaatcaactctggagcgggcggaaaggcttaaggcgcgactgaatgaaggtaattctaagtatttttttgctttaacttcaaggcaagttgcgtcttacttaaacactattgggtttttgttgagtgatgatagtcatggggttgacattgttatgtctaaactgcgggctagccatgtgggatctgtccgggaccatggggtggctcgggactgtttcgaggaggccttagaaacggaagagagggaaatggcagtggaggaaacgcttgataggttgcttctgaaagacctatgtggtgagctcactgaggaagttttggaaccgatcttagataaagataagattgaagttccatctgccttatctaccaggaaatctaaaactgggggtgggggtgcatgggttaggggtaaaggaagaaggaaaaaccactatattaataattc

SEQ ID NO: 179195 - DNA, 276 bp, Zea Mays
cccggcgttctaggatctgctggacatggacaggacggtggcggtgatgccatttgtcaggcataattgaattggagctaagcatctacaacgatgagtttgcatgtcccatgcaacgatgctatgcttgctcacatgaattgtacacaacaatctcaggctcaagaacatgattcatttgcatgctctcgactagcagtgtttctacccaccggctaccgccaatttcgcctacagaaacagacacgagataccgaagactgcagatcgccaaaa

SEQ ID NO: 179196 - DNA, 718 bp, Zea Mays
gttgctccattatgaatctagcacgcatgaagcaaattgcttgctgtcaccactagtacatcatgtcgtcttcttcctcgttgtcatctaacggggttgtgcgaacacaaggttgacttatcccttatggtttgagttgatgatgagtgattgttgttatgggtagtactttggtgtgagtcttggactaactagagtatgagtcttatgttgtgcaaccatgtctcctggcttgtggtgtgcaagtgtgcagtatagggacagtggttgacaacgaaggtaaagattatgcgagtttgtgtcaatgggttgagagcgacgaaggacaagcgctaggccttgatcgagggaatgtagaaaccaggtgactagatgatgataacatgacaccaactaatacaactattgattataagtcgtatttttagttcatcaacagcccgactgcaatatcatgttagcaagtgttaatacatcgtcatgggtgcgtcatacatccttgggatctaggcccaatttggagcataccaaaaatagatgcatttcatgaaaatggagttcttggacgtcctcctccctggccaccacctttggaagctatcaattacattcaaggcaagttggaatcacaatccttaccaattttgaggcaattttggaatcaagtaccagcctgcaataaaatgaacgactaggatgcatacagacccaggtttgg

SEQ ID NO: 179197 - DNA, 293 bp, Zea Mays
ccccacatcctatcatacagcgccccagcagatcgctttagcaccgggtcttcgacctggaagatttcgcgttcgaagtcttcgtccgatcggtcaaagacttcgaagtgcctgcatccctcacgagaaaaggcattcatggccccttcgcaggtgacgagcgaggcgaaggacatgagacccgtcacaattgtcggcagcacctctagttcctcctgcaaccacccgagaaagcggagacccacttctttaccagacgcatcaaagggggcggtacgcgcaccaagctgccg

SEQ ID NO: 179198 - DNA, 372 bp, Zea Mays
ccgggagtagtgctcgatgagttccttgttgaatttactcccgctactgtactttttgattcaggagcatcccattcttttatagccactagttttgtggaaaagcatggcatcccctctacccctctagagattcccttggtcactcgaaccccagggtcagaccttctatgccagctcaaatgctcccaagtcagaattcttttaagtggggtagtgttcttggcagacttaaccgtcttgctatcccaagggattgatgtgatcctaggaatggattggttgaccaagcacaaaggtatcataagttgcacaaacaagacagtccttctcacagaccaccaaggaaagtcagtctcttgtcagacttag

SEQ ID NO: 179199 - DNA, 276 bp, Zea Mays
gcttgtttctgtcgcgtagactgctcgcggtgcggccgtgctgctggtgcactgtgcttcgttcgtcgcgttcagggaatttggggacgggagaacacctgcatcacgtgtttgactcgttgcctgtgctagtcgccacgttttctgttggattcagcttagtacgtgattttggagctcgtgccggatggttgacttgtgctttggcctttcggcttttggcagcgcgaccgagctttttggaagagtgagagaccgttttcctagttctgttgc

SEQ ID NO: 179200 - DNA, 645 bp, Zea Mays
ctaggggtgagtaacatgggtatggcgtggatcgagattaacatgcattgatgggttagcaaatgaagaaatttcgtctgaacccaacgagaacaacacattttatttgatccccatgaaaagtcccgactcacggctctacctcaaccgacccaacctgtcaaatccgaaattcttgtgatcatacgataaccattcatagtattgggtatgcacgagtcagctttgacacgggcgtgcggatggaatgacatcacattggttggtatgtcaacataaaggctcctcccatcgcagagtggtccatagtgctagttcaactactccctaggatagcaggacagtcactagttcactacaatgttatgatagaagtcattcggtcgacacaaatcctagaggacaagaaacaacacaacaaaacctagtctccgcccatctcacccaaccccacttatataacaagacattccctctccttggtctaaaagaaggggatgatcacgatatgaggacaagcaaacataagtggccaacacacttgcaacacatagcacctcactcgttcaccagacttggaaattcttccctcacctggacgtagggacattccaaccagaccaatataaaactcttgtatgctca

SEQ ID NO: 179201 - DNA, 778 bp, Zea Mays
actagagaaactttagagaaatttggacctaaaatcgttctgtcagttcaactgaatggaacttgccatggtacagtagtctgatatagatcagatcgccagcccaacgacctcaccgccggtgacctccctgcgcgaagattcgtgccatcgtcgccgtgattcgcgacctgatcgactggataacatctaaaggtcaccgccgtggataactccgaccattaaacaactccggccactgtaccatggtcaccgcggcggaattggataagaacgccggtgatcaccgtcgcacggccttgtgccgcatgtccgagcctttccaccgcgtcgccgtgactccctatagttgtcccatcgtcgccggggaggttgccacgacggtggacacgaattcacagcgcccaggttcttcttcatctccggccgccagcacagctcggccaaattgatcaccaccgctcgctccttctataaattgagcccccgggcagctgcgctacctcatcgtgaaaccagagtcccactcccaccctcaatcatcctccagagctcactaatttcgaacttcccccaaagtcagtctccaccaccgtggaaacagcctcactgcggccaacgcgattcaggtcagcccacaccttctactcccttgtttgagtattctcataaccctgtgatgcttgccaaaccaccgaattgaactaggagcccgccaatcgctaggaacacgagcacatgtccgcgccgttcactgtcctcgcgggcagagctaggc

SEQ ID NO: 179202 - DNA, 793 bp, Zea Mays
tagcatcatcatgtacataaagaacatagaggatataaaaaacaaggtaacaaaagttacttggttagaagcttatccctataattaactcttcatcgaaggttaattcaagagagaatattaagggcatctgaataggtcaatgagagcagcatgtaaattacgaagagtaagacacattactcttctaaatgtgcatgcacattatttcattcctttcaatacatcaaatgattacaagtataccttcgacttcacatgaatgagagatcgaaggtatcttcaaggctgagcaaatcaatgttccatgctccaaaaaggtccccatatgcatgaaaatgttcctctatttatagtcatgaggaacatcttcgtgtgaaattacaaatatgcccatgaattttacacgggatttacaaatctaatagggacaaggatgtcttttctcttctcctttcatgctgaacaaaccttccgagtcttctttttctcccttgcttcgtacgcctccgaagccgaagctacttcatccgacacatgtcttcggaatcccagcatgcagacgaaacttcatagcttctccttttgattcgttggctgcttttgacaaaggttagcttcgttggttctttgcattgtacctgaaacacaccttcacaatttcgtaataagggggttcgaggatatttggcaatataagtccccaatagtagccccttgcataattagttcgttttctcattatgagcttaggccgcaaaaatgtgattgtgaggccttgcgtcgaagatcc

SEQ ID NO: 179203 - DNA, 769 bp, Zea Mays
tttcttcgagcaccctctcttgtcgacaaccttgttatatttcagaggttatttgtttgacatccatccatccatcttctctccaaatttaggtcggatgtacgagctctatcgacgttatagttgtgcctccgcgagtccgagctgacccagcagcgagtcaggtaccagcagtagagttgtttgttttgtcgtcccatactgaaaatttatcatctatgcacatctcttgcctgatcccccttttgccttctgtatcgtggttcagaatccagcagttgttgccaggaggatggttctgaagtcaccacgcctaaggatcaaaaggcctgtcgtagtggcacagctgatgaagggcagccaccgcaagcggcccgcagccaggaaaacaagaactggggacaaggcttcgagtagcacccgccagggaacgccgaatgacagcaatatcacgggtgaggtagatattggagatcttatcgacttccttcgggaggagtacggatgtcgaggaacgtcgacaaggagctatcaggcgcggcaaatgacggtgatgagcggattctcatgtatgaacttattctgctagcgtcgtgtcgtgtataggcagagtcattgaaaaaaatgcaaacgtgaaggcggctcaagacggcttcgccaaaatgcccactgagccatgtaactcgtcaaaatacccatgtcaacatgaaaacattgatgtaatgctcatacctctttatatattatgttttgtagacttgtatagacc

SEQ ID NO: 179204 - DNA, 323 bp, Zea Mays
aagaggaccagccaaagtggagggcgacgacggcagtacggtggagagcttcggcgacacttaccactgctgcaagaggaccagccaaagtggagggcgacgacggcagtacggtggagagcttcggcgacaggatgcagtcagcggcgcaatccctgctattgtgggcatggagaacggatagcacgggcgtgggttggaccaaggtggcgggtgatgagcttggtgggcgaggagcttggcggaggcgaggagcttggctgccgccatggggccacggtcgcggtctccagggagagagaagaaaatgaaaagagtcaagc

SEQ ID NO: 179205 - DNA, 701 bp, Zea Mays
tcctagctttcctattaagacctctgacattccaaatgaggatttttgacagattcattgataacagaaatacaaccaacacaatgtgaggctacagcaggccatcaagcacacgtttcaatgcttaactccctaagcaaaggaacatccaagcattcttgcacattatctgggaccggccatccaaacaaagctgccagggccttgatgtgagagttggaaaggggtttgtcaaacagctgtccaaattcctctagcatttcatcagtaacagccacctgtgagtttgtgacgttcaacttcaacatgagctccgcctggacttgtctgactgttgaatttaagccttcccttttctttgacaagcgactactgcgacgtgggacaaaatctggcggaagctgtttagttcttcttttttgaattggaggttgcggaagcaagcagtcaatgtccctggtgatataagccaccagcttcataatgggggtcgcctcctccaactgagaagaaacaccagcaggtaccagatccaaaactggtgccgacacctccatctgggatgataccgatgcaggtatctatagtctgccctttttcaatcttgagtacaccttcagtctggggctctcaaggacctgagcatcaagtgacattccagcgggagagtttttgtccgcctccgacgtcccaaccaaaga

SEQ ID NO: 179206 - DNA, 510 bp, Zea Mays
tcgcatcaacggttactggttgtcttcttcctccccgctaaggcccaaggcggcaccgttcccaggcaaccatgccagagtacatgcgctggcgttcccagtgccccaaacccacaatctcaaatcctataggttctgtacggagagaagttggcaacgaaattcacggtcggatccataccactggttgggcgaggatggttctgtggttctgcccatggcgcaaagtaaatcggaggaggtggtgacgtcgcggcgagaaatccttgctcctccagttacagttttcgccccaccaggatccgattcaacctagcatgctcctgcgaccccccctgttctcatcatgaggccggatcggcggcctgggcacgaatcgcccatggcggcggtcggattctctttccctgctccgctccgtggtggagttcatgcttgcttctcgtttctctctctcgtctaccctcacaccggccatgaagcacggcggccagggacgtcgacgacagg

SEQ ID NO: 179207 - DNA, 965 bp, Zea Mays
ttcttcttgagaaagtccttttcccgaagcatgccgaatgatgtaatcaatgctctcttttaaagcttcgggagtaagagttgcaaccttttcagacgaaatttgctctgtggccttttcttctgttgccttttcttcaatttccacaggctttttctcagtgggctctaaaggcctagctttggtttcagtttgaactattgtagcttcaacttctgcctgtttcgtttcagcttcaggttgcaccttagaagcttcgacaatttttctggcaggagcagaactcaaggttttggttgtttctagtacatcctgtacatttaccattctcctcctcttaggagttacgacagaacccatttgtaccttcggtgctgttaccttttctggagggctcaaaacctttagcactttcgttattacttcaatttctggtttttcagccttatcaaccttcgtttcaaccaccttgactgaaggtaccttcggcattatagccggctcttcagtcctctgcgcaggaggaacagtttcttttgattcagcagctgaagaggcttccccgccaaactcaggcaccacggccagttcaatatagcccggctggtgggtaagaacctttaactttttgcccttcggcacaggctcgtctggagtggccgaagtagcagcttttctcttctttccctgtcctcgcagcggatagaggtagtcggggtaaatgaagccaatggcatcaaaaactatatttaatctcctctttccctagcctccgaaggatgtggataatgcattatcttctgccttggaatatgatccaagcagttcatcacttgtagcttcgatacatttcagctagtcgtcgtttggttcatcaaacttattcacatacctgaatgtatacttcagccggaccaggtcaccttcgctagacttggtgacggtctccttcggcatttccgagc

SEQ ID NO: 179208 - DNA, 505 bp, Zea Mays
gttgtcttgccattgtatagctcaagggtagattttaaagtgagaactcgtattcttccagggaggagtttggcatgttgtctttggttgccttagccctcgtggcgtcgtccgtaggggcgcgcactgttgtattcttaatgtggcattccgtcttgtctacccagcatttgtgtccctatagcttgtctgatgccaacgtagcggtacccagcggatccaacagagtggcctcacgacgaggttcaaggttgtattcagtacaacttcatcttccgtcatgacccttgcgtcacctttcgatacgcatcggcatacacccggtatggcgtactaccccattctttcaggtattccggtcactgtagaggctttgatgttgaggtccctatgatcagggttgactggtcccaccggtcagcgagggaacatctgagaacgtattggggtcatgtttgacagaggcccttcgacactgttcccctggtacggacgtggtttggtg

SEQ ID NO: 179209 - DNA, 576 bp, Zea Mays
cgatgcacatagggtgtgttggtgttatgcttgtgtcattccggtgcagtattctgttctcgttgaaatagcttctgtttcggccaactgctacaacgacagggatctgtgatcttggcacgcacacattgacagacacaacaaggcaaatcaatcagaggccagccaaggttattagttgtaatgtatgggattgcatcatggactggctgcaatgctccaactgctaagactgaaagatctagcctgaaatcaggtgctgtacgcaatcatggcttagtatttgccatatgcttgatagatgtcctttttgacttgcggtcttggccgaactttttttagttggtgtgtggatcatgcccacctctgattggatagggtgaccttaaacctacatcagacctcctttataattccccatggccagctgttggggtctctgagtatttgccattgttaatgtgggggcattcagggatcatgcaagaaatcatctaagcattagaacacggtccaccaccaagttgctgattggttctcatacaccaagatattagatgtatacatcatcatcat

SEQ ID NO: 179210 - DNA, 369 bp, Zea Mays
atgctcatctatactacttattaaggctacaataataatcggttattctgtgttctgccacaattccctgttctgcctttctgattctctcctcctcgcgcatagtccattcccaccattcacactctatgctcatctatactacttattaaggctacaacaataatcggttattctgtgttctgccacaattccctgttctgcctttctgattctctcctcctcgcgcacagtccattcccaccattcacactctatgctcatctatactacttattaaggctacaataataatcggttattctgtgttctgccacaattccctgttctgcctttctgattctctccttctcgcgcacagtctattcc

SEQ ID NO: 179211 - DNA, 778 bp, Zea Mays
ccctggcgtcttgaataaacacagaagaaaccctcgcactatttcggggagtcactgacattttcagaaaggcccctgcgttcttattcttttacacgccgacaccctcgacggcggacggcgtcgtgcagagctccgacgagcacgcgcatcggacaaattgctcaaagactggcgcccttctttggccgaacccaaattcaagatctagtgagcgtttcccctccactaattccaagaatggctactcggtttgctttggccacggtgaccgcgggcatcggggaagaacacgggcgttcacggcaacccagggtggtctagctccattaggtgggtcgtagagcttgaggagggtctagggacactagaacaagcaacagagacactggaactaacctgagttgggttggccacggggaggtgttcatcgcggcggcggaaaccgaattggggggaatcaaaaattcgagctctcgggtgaacgattgaggacgatatctggtggctgggtgcgtgatgaccctgcggagctcacggtggcttcaatttatagggggcgatagcggtggccgagaatttgggttgagcgcggtggcggtcagaggaagtgagtcaccggcatggtgattcgtggcctccctaccgtgacggccctcccggcggtcatcagaccagtatggcccccagggttgcgacgtggtaactacggaggcacgtggcgttcggtcgtcggacagccaactccggtgaggataacttcgaccgaccgcacggc

SEQ ID NO: 179212 - DNA, 538 bp, Zea Mays
cgctcgtattcacgctggccgtcacgatttgtgccgctggcgagtggattcagctcgacggtgaaaagatcgcgccacggatgagttcggactactatggcctccttgtttctgataacttgcgtcggcgacgtggccttacggccatcgccggagtccgcgttgttcatcgcaactgcgccacgtctcatgcctttaaccacgtcgttatgactcaggaaatcgatatccggtgatcgccggtgcatctgccaccattaaagacactaagcgtttgcaccagtactcctcttcttctccgaccgccaccgcgccagcttcaattcacacgccaccgcccccggagcctataaattgagtgtgccatcggcttcgctatgtattcaggcatctagcgcacccacccgtacctcagatcctccactagagagctccaatttgggatttcccccaaatcaaccaagaacaccgtgccttgttacctcgccgtggctagctcaattcaggtccaatcctgccctctgctttcttgtttcag

SEQ ID NO: 179213 - DNA, 470 bp, Zea Mays
aagcaatatacaatcatcattactttcagaagatagaaaaacatgtaaacagaaagaaaccaaggctgaacgcagtctccatgacatgtatttgcttttagctggccccttagattttaaggccagactagactagtaaaaaaacacaggaggaacaggataaataactgacatgactatagaagacctaaacaaactggcttacctttaaggaagagggatcatattctaatttccaggttactgccaggaaactgatccatcagattctaatttccaggttccttccaggaaactgatcttttcctcaagggattccagacgggagaacgtactcagattttgatagtctttaagtaacttattggctatacaaaattttaaagtaccacctaagatgccatggtctttaagatatttcattgcatcctcgtgggtcatgccattttgtaatgactgagccacatgaa

SEQ ID NO: 179214 - DNA, 857 bp, Zea Mays
tgggattagatccagcccccacgaatcgatacgtaatggtagccgcgaaatcggagatcgacgatccgtatttaacgaaggccagtccattcctacccatccgatcccgatcggacggatcgccacaaccccggttgaaccgttaccctttatctaatcgtcacccttcattagagaatcgacggccagaggctttcccccccattcaacatcgacacacgacggcgccgcctcacccattgcacggcggagcacgccgacgaggaagtcccctggcttccacggtgccctatttcgcatgagactacacacagaataagtaggggagtatggcaaactcaggtgggcaatccttaccgtgaatcgtcgagaggtgtcaatgatctgcggtaggaagcggatctatggcggcggcaaggttcggcaagaaatttcgaccgccccgagacacgatcccctaaccgcgcctgcaagcagcttcaccaagtccctgcaacgctacacaatctggtttcgatgccctgacgacactgatagcaggtcgacgacgcggcggcccggttcccacggtggctagttcctccctgtttgcttggccagcgaggttatgaacaaggcgccgatgatgcggatccaggtaacgggctcgattttatagtgctacgggcgaagtccgaccggtggtgcccgaccggtgaggttctgcggattaagcgcgcattcacggttttctgttgcggcattaccgcaaacacgagtggtgcgcgatggtgttccagcctaatgcgagggaaggggcaaacctgtcgacgtggccccacacgacagtaagccggagcatgcaagcgcacgagcag

SEQ ID NO: 179215 - DNA, 593 bp, Zea Mays
cctagacccaaaactccctgctgatggactgcgggttgaataaatagaatgtcaggggttctttagcaaacattacactgtgaagaggtataggggatttctggccgctggattagaaatcaagggcccatattagatctggcgctacaacgaactggtaagcgataatggccacgcgctcagagatcaagggtccagatcgacccaacgagtcgtttccccccatctaatctcatccgtcactggtcagatcaatggcacagattcacccactgaatcggtacccatccaatctaatccgagtcgttcctccgatatcagacgccccatgctagttcaaatctaaaccgtccgctaagatctaacggcaaccgctcatcctccccatggtggctcccaatgacggagcacgagctgcccgcggcggccgccattaccgagctggccgaatcggcgcccccggtgacccgaatcctaacctaacgggagctacacgattcaggggcaagggtttacgcgtggaggaggttctcaccatagatggtgcccagcagagctccatcgacgaggggggcacggccacggcggaagcc

SEQ ID NO: 179216 - DNA, 613 bp, Zea Mays
agcttccaaatcataaagaagaagctcacaaccgtgcccgttttgacactgccagacatccatcaggatttcatcatcttctgtgatgcttcaaggcaaggctttgggtgtgtacttatgcaaaatgagaaagtcattgcctatgcatcgtgcttactaaagctgcacgagcagaattatcccacccatgacttggaattggcagccatagtgcatgccctaaaaatatggaggcactatctaattgggaacaaatgtcacatcttcaccgatcacaagagtctgaagtatattttcactcagccagacctcaacctccatcatgaagatggctagaattgatcaaagattatgaccttgagatccactaccaccccgggaagggcaacgtggtagcagacgccctcagccgaaaacctttcgggaagaaaggaaccaacttcttggaagattggaagaaggaatcagctcagctgcatgcatgtctgggagacaatggcagtctagaagtcaagccaatgctagaagacctcatacgcaaggctcaacacttggacagtgagacagcaggtctcatagaaaaagctcgcaaagaacaacttccggacttcag

SEQ ID NO: 179217 - DNA, 705 bp, Zea Mays
aacaccaacagcagtgtatccacgatatccatacgtgcggagatgaaacactgcaacgttggtgtgtgaacaagagaaacgccgcgcgacataaaattatcactcaagcatgctagatcactccgtatatagactcatgctggtgtgtttttaccctaaaagtatgttagtattgtcctagatcatgattgtctcttggattcataagcaacaaaaagtattgtcctcagcgtgatggcgtgatcaaacagatcatgttcattgtatatgcttgtgttgatattattactctgggcctatactcgcctccatatatatagctacgatgtgatttccatttgtttgattccactctaattcgagaatcgtgttgctcgaactagtaggcaattggtggatcttaggtaggttatatatatgggtgcggatctttagggcatatggtaagatatccaataggattcagcaattatataagataggacatggttagtaaggactggacgattagttgattgtaatatcttgtttccatctttctttattaccgctgggcggggatcatatccaaacaaaccatgcatatacacatacgagcctgtcacctgtcagtgcacaagcaatccaatattcggaatgtttcagcaataagcaatacacagttacgcaatcatctctgctgaaatttattcgttacaaaggaac

SEQ ID NO: 179218 - DNA, 627 bp, Zea Mays
aatatttatgcttgtatataaccatggttcattaatattatggcatataactggaaaaggtagtttaagatacgtaactccatttcgtattatgtagtatgtattgtagacagttatatgcaatattcgaattgtttttggcatatatttatgcataaatcattttacttgaatccaatcatttttttcaacagttatattgcttgctgaatcatgaggtccgttgatcgcccaccatctaatgcaaaaatattaacgattgagtcaagtcaggaggtgttttctattgacatttcaagacgcacacgatctagcagctcagcccaacatgttgataatccccataaccaacagcagattgatcctcagccagcaccagttactcgtgtccgtagaaagacactagcttgttgggtcaaaaaatcctcctacagctccatctgcattgtctgacgatgatttcatggatgctccaacattgaagcgcaatttcagatcagctgcaccctccacttcagtaaataaccgttcaaaaaagaagtctcgtgtattgaaaatagacatccctcccccacaagtccccattgtgtcaagcagatcaaagtctgatattgatgtcaagtcaaa

SEQ ID NO: 179219 - DNA, 311 bp, Zea Mays
agatcatggtgtggggtgctcctggacgtttgatcaaaatcggacggctggaactgcataccggttcggtagggtttgaaactaatctgatccgctcgatcgtaatccaacggcccatattaatcgatacctcttcgcaggctacattttgttaaagagaccctggattctttcatattaaacccgcagtccatcgaccgtatgcctgagtcttaggtgttcttgcgtaatagaccctgagtttctctgtttttgacacgcagtccataccttgaataaaaccagagaaaattatctaggaaatgattttc

SEQ ID NO: 179220 - DNA, 1227 bp, Zea Mays
caatttagggactaattcaaacaaatgagaaaaaaatgcatcatgttggagtttgtatgtttgtgcattaaataaaatgataagtataaaaatagtaataataaaaaaaggggggttgacataatttaaaacttggaaatttgggaaaagagagtatataaaacataaataaactttatattatccaaattggcactccttaaattcacaataggatttgagcacaaattctgcacagtgtttggaagtaaatttgaattcaaatttggatttgcaagtagaaaaaaaagaataaaacaaacctagcctaagtgggccgaccgcgacccttctggcccaaccggccttctcagccgtgcggccgaccaagcctccacgagcgcttgtcgcagctggacattggggcccacgtgtcactggctcgtgctcgcttacacatgggccccgcaggtcagggccgtcaacaaccttccgttcgaggcgcggctcgtacggtcctgctcgaatcttcctccgcgatgtgcgccgatgaccgagaccaaccaggggattaaaaccccaatcgaccccgccgcaaccctattctctaacaccttagcacctcaccgccctcttcactggtccgtgcgcgccgtgtgctcgacaccataaggagagagagagtgaaattggggcgccgtgtggccaaccgggtgcctgcgtcgctggtgattcggatccgggtcggtgggcatcgcgggagcttggtggtgctgctcgcgggcgtgtcgaggaggatcgaacgtcggggcacgggaattcgtcgccggagtcccaggatccgccgcgggccgcactgcttgtggtcgggtgctctccacgccacgacaatcggtgagacctccttctttgcgcttgcaatcgccagtacttcgtgtattcgttatcggggtaggaaatagcgcagcgggaccgtggatggcttggctccggcgagtgcgccaccgtgctctgtgggttgcgccgccgtctcgggttaaggtgagagagaggtgcgatggccgtcggatgtggagcggacggtcccgattagatcaggcttacctcttcgtcccagtgaaccctggccgtccatccgcgaacgagcggatacagttcaatgtcagttatttaaaatccgagccgttgatgcgagatcctgcggctgtgtgagcgtaccgattcggtattaagtagatctaatcctgg

SEQ ID NO: 179221 - DNA, 679 bp, Zea Mays
actttctaagatgctctatattccatgaattccccacttccgttccatccatttgagtaagccggtatgatcccggccgggtgacttctaacacaacgaatggcccttcccatagtggtgacaacttatgtcgtccttcccccgttagaattcggtaaaggaccaggtctcccactacaaaggatcggtgttgtatggctttatcgtgatagcgcctcaaggtctgctggtatctggctgactgaattactgtgttcaatcgctcttcctctagcacatcaatatcctctagcctggtagcttcggctttagctatgctttcgaatactagccttggtgccccaaacctaaggtcggcaggtagcactgcctccgaaccatagaccatgaagaagggggtatttccatgcagagctcgactaggttgagttctcaagctccaaaccacatagggcaactctctgatccactttcctgcgaacttttcatttttgtcgaacactttcttcctgagtgcttccagtatcattctattagccctttccacctaaccattggctcttgggtgtgctactgatgtgtacttgatctggatacttcgttgttcgcagaaatcaaagaattcagagctagtgaagttggatcccaggtcggttatgatgctattcggtatcccaaa

SEQ ID NO: 179222 - DNA, 793 bp, Zea Mays
atcctcagcacacaacagttgtgtgtcatctgtttcagctgatgttaaccctcacaagccaaccggagcagtggagcactagaaaggaaaaaaaaaactaaatactgtaaaaatgccttctgctcttttctatttgaatcagtttttttatcagttgtttcagcatttatcttgatgatggaatagatagagacctccagatcatcatccaaccatggtgagtctttgaaaacataacggtaagagaaggtttcagcatttttgaatcagttttttttatcagttgtttcagtatttatccatgatttaaggagcagaaacggagttccccaaaagggtaggcctatcagaaaaaacaggtagcttttggcgatccgtcttctattctagtatttagcttgtctttctttcttcaacacagaaccattcaagtttgtatcaaggggtccaccatttgcaccatccaaatcttgaaatttcagggaactagattggtcatacatattgctcgacccagcatcttgcagaacaggtttctttggcatagagttactactagcattcagagtaacatactgatgctgttttggagatggaggagctattatattaagctgctcaagtatcttcacagtcatcatgtttgattgtgctagtatgggtggaatactatcgttggagtcccccatttttttgggattctaggggtcgcaaagattgactagtcccaaccggtagcctttttgagcttggagactgaatggatgtgccgtcttttagagcctgttaccac

SEQ ID NO: 179223 - DNA, 502 bp, Zea Mays
gccatgttacgggtatggtctgtagttgctgtgctggtaagtgctgcttctttgacaagaattggcaagcttcacacctctggactaactcgactgcatcactttttgctgtcggccagtagaaaccagacctgaagaccttcccaaccagagtcctggatgctgcgtgtatcccacactgtccggcatggatctcatctaatagttgcttcccagtagccgaaagaatgcacttcatgaggactcctgttgcgccccttctgtacagtgcctccccaatgagggtgtagtgagctgactgccttgcgatgcgttctgctgcagttttgtcatccggctcctcttcattctttatatatctgatgattggctccctccagtcattagagtctgactctggctggctcagaacattgcactcttctgcccgatctaaggaaatactcgggcgtggtacttcttggatgaaaactccaggtgggacctgggtccgactggatcc

SEQ ID NO: 179224 - DNA, 407 bp, Zea Mays
ttgccaaggcaggattcaaaacagcaatcagtagtactaaaatttgtggagtctatttggagtatgttgtgtagtccttatgtatgtgactgaattgtatccttggttatgtgtgttgtgagaacttgcttatgtatccctggttatatgtgatgaatttatatccctgctgtttctattgcacttcattatgtttggttgatcatgaacctacagtttgaggtcatattcatgattttgtatccttgcctatttttgttttcatgaacctacagtttgaggtcgcataaaaacttggagtttgaggtcacttaactagctccaccgcctgcagtttgaggtcaccttgcaacaacaacagttttggtttcacaattattttcacacatgttcaaacacacaatgac

SEQ ID NO: 179225 - DNA, 492 bp, Zea Mays
aggatgggaagatagaggtcaagtttcttatgtttcagtccaaaatggaactaaatctaaaatctgtggagcaaaccactcaatccagatctctatttaatcaaacatttttttgttatgatgcagttccacgtgaaatagccatatggatatgtaacaacacaaatatgttcagtgggaaataagtttctataatacatttatatgcacccaggtgacaagaaaaaaatattttgtcatttctataaaaacatgatgcattttttctcaattcatagtgtgatgttattcctcttttgcctttagagaagcccataatacaaagggataagaagtcaccaaacatgtctaaatcactggtcttcatccagtgacaacagaaataactaagaggctccaccatgtatgtggtgggaggcaaactcaagagctagaaagttggatggtacttgctctgtctcgtttctctcctctacttgcctttgcatcccc

SEQ ID NO: 179226 - DNA, 943 bp, Zea Mays
aacagaagcagcttagatggagtgtgtgtgtgtgtcatgtacttgtcagaagtgtttttttattgactggtctgcacatgagcctgcactattatgcgggtcaaccgatatcatccatcccgtacagatttcactgcaagtggctatgattttaacatcagtgttcagcgcacaaccccagaaaaggttcctcaggagagtaaaaccaacctaatctgccaaaaaatcggtctgcagaattccccactgccttaccaagtgacatcccagactaacgtaggatagcaaggcaataggatagaaacaaatgagcattaagggtgtgtcttttaggtcagggcttctggaaatcaccacttcagtcctgagaagctaaacctttggaaaccctttctttaggtaggctaccctacaaaatgaaatctgcaaggtgatgcaatcaggctaacaaaaccagttccacctgaggagcagtttttttgcccaccggaagctcacagattggcaggaaaaacactctaaagaagtgaagatagtagcaatgaaagaaaccatgccatactgtagccatatgagatcatgcattagttgtccatcttgtatttaaaataaagtagttcttaatccatacatgtcgaccagtattagcaacagaatattcccatcaagcaaaatatttgcaacttgataacttcacgcgttgatgtaggattcgatttcttttcaaggaacctgcactccagacatgctctattgaaatatttccaaaacccgtgactaggttacctcaagaaagtactcatgccagctaaattctgctactagaaaatgcagagtaacagaattccttactgggcaagcttattagtgacccttccaaagatcttaaaggcgattgttcatgaaaagataattgtgtaatcttataagaatggatgagaca

SEQ ID NO: 179227 - DNA, 698 bp, Zea Mays
gactttgttaactctttctgtctgcccatctgtctgagggtgataagcggtgctgaaatctagcttggtgcccatagctttctgaaggcttgtccagaatttggaggtgatttgggttcccctgtctgacactatctttcttgggatgccatggagtctgactatctctttgagataaattcgggcaagggtggctcctccaaaggtagttttcactggaatgaaatgggctaccttggtgaggcgatctattactacccagatagagtcattccctttttgcgtctggggtagtccggttacaaaatccatgcctatttcttcccacttccactcaggtacggggaggggttgcaataggcctgcaggtttttggtgctcggccttcgttcgttggccggtgtcacactgggccacatactgtgctatctctttcttcatccctctccaccagtatctggttttgaggtctaggtacatcttggtagttcctgggtggatggagtaggctgagttgtgagcttccttgagcaggacttctcgtgcctccccttttggtacacacagacgatttttgaaccaaagggctccttgttcatctgtcctgaggtccgggagttgttccttgcgggctttctccacaagtcttgttgtctttgagtctaggcgttgagctttgccaatgaggtcttctagca

SEQ ID NO: 179228 - DNA, 692 bp, Zea Mays
cgcaaaaggatccaagactcagcctaacccgaggggtcctgcgggttgattcttaaatactacgggggctcttatgcaaagtgctatggccgaaggggtatggaatactactggccgctcgatccaaaatgggtgcacaggattagatccctgtcattatacactagcatgcgaattcaaccgtcggatgcccgatcaacggattggattaaaaatgaccgagacgcactaacacccgaccgatccccatctgatggctctgattaacttcgcgaaggggtacgcatataatctaatcgcagccgtcgctggtcatccaacggtccacgatcttcgccccaacagggcacgcacgcacggtggcgccgccccgcacgctcggcggagcacgccgacgaggcctccaatcggctgaacccaaacgccaaatccaaattggaccgagctacacgtaaaagacgacttggcgagcacggtgcagggatccataccgagtattatgcggcgcagggggccaatccacgacgcgctgtgctccacggcgcatgaagaaggacggcgagcaattcctcggccatcgcttgcagattccgcccggcacgagagccaggcactgtgtccgccatggccacatggccgaggccccagacgaagctccacatcgacgcgtagcaggaggactcccctgcggc

SEQ ID NO: 179229 - DNA, 458 bp, Zea Mays
ggcttgctgctgtcgggttgcgctaacaccggtgttgtggtcagatgttgcctcaattcatgaaagacatcttcgcacttctgaccccaaacaaacttggcttctttcttcaaaaattcagttatggggttcacaattcgagagaaatccggaatgaatcttcggtaataaccagctaatcccaaaaaacttcgaatctgacggacaatcgttggtggcttctagttcatcacctcctgcaccttataaggatcaacaagtattcctgcctgagagatagtgtgacccaaaattttgatctcctttagccaaaaatcacattttgacaattcggcataaagacggtgctctcgcagacgttgaagcactaaatgcaaatgcccggcatgctcttcttcgttcttcgagtacaccaaaatatcatcaatgaaaaccactacgaacttgtccaattcagg

SEQ ID NO: 179230 - DNA, 753 bp, Zea Mays
tggataatcacctttatgtcctccctttcaatcatattattcttaacataaaaccattcctccatccaggacctgggccaccttttctgaaatgttggaaccaggtagcttgcattagaacgagcaatgaatccataacaaccgaagttgttgtgatactgctctttgccagtggccttcgtctcgtacaacagttcgtgcatattgcaaaaacactttgcgctcggttctagcacttggcttcccacagcccaaacaaacaaacccattctgattatagcttcgagagtaatttgatgaagaaagatctgaaatatcttcaacacttcaaccaaaaatttgctcaatgggaaccgaagacccgccttcataaagcttctgtagacaacaacctcattttcttttggggcaggggcggtgctgtcccctccaaccctcacaatagacatgtcatgaaagtatcttcccttcatggcatcaatttgactttgtttaatggtcgactttccgaagatggtatggcttggccgccagggccggtcttcagaatcttcatcccactttccacatcatagtcatcgctatcgtcagaatctacaaacaaatccgccattatttccgttgtaatcttctctgtatttgtttttgccatagattcataaaacccaagaaaagggtccacaactttcttctcctcagacatcttcttctcttcagacatcttcttctcttcagacatgcaacaagcacttg

SEQ ID NO: 179231 - DNA, 735 bp, Zea Mays
ggtagtaaggtatttttatgattttactgtagcacaatggtatttgataaaattatcgtattctagctccttaggtgttgggttggactttgtaataccgtgttttgaatacaatgaatttagcaaaaccaaagttttttgagcattggatactacactctgcaaagaagttctctcccaagtggttatcactactcctacatgtatattttcccatactcatatgcagacatgctttccccagtctattcatgtgccatcaatattccaccactgctaccaaagtcgaaaccattaatgatgatatcgacaccgcccataaacaacatataatgagacgtcaaggagacaaagatcggtacatatgccttccttgcatataaaattgattctccaatccatctcaacaaccctagtatgtgaaggatatcttgtgacagctctctcctctaccaacctagtttcccatgctactccatcttctctgctctctatttacaccgcatcgacctcctcacctcgtgtgcctctcgggttagcatcacctctcaaccttttgacgctgattgtctacctctaggactaatgccacctccttgacttccacgcctctcgtacctcacatgctagtgctacctcctcgcctctcgtggctcccgagccaacactaaatccctttgtcttatgcctcttggtcgatttaagacaaccccacccctcatcctcttgcacgtg

SEQ ID NO: 179232 - DNA, 421 bp, Zea Mays
gatagtgtacatgtagtgaatattttagggtactatgaagttgtagcatcgacattcataggtatgcgattgaatatttccttgtaaactatgttccttgtctcattgcttgatcgaccatcttcgtcttcaattaaaatgtgtaaacctgattttgaagttactcgagaaacaacaacataaagctggccatgagtaaatacaggctttttgaggtagatgccaacctgtgagagtgtttgtccttgacttttgttgattgtcatagcataacatatttttataggatattgccttctttcgagtacaaatggatttttgtttgttttaagcaccagacatattctgggaatgagaactttctttccagcatgtgtaccagttaaaatctgagcttccaaaaccatgtctcctagagcag

SEQ ID NO: 179233 - DNA, 769 bp, Zea Mays
ctgactggttcggctagggcatctcgggcgagtactgacaggtttcgggacatccaaagttgtatcaacctctggaaggggcaccactgccaacgtaccatcaggagcagcatcggacgaatcttcagctaacagatcaagcatgtcatttatgtctgcatcactagggttcagaggcacttcaaaataaacatgccgttcatcatcaggaatttccccgagcgaagcaaccaaagtattgacttcttcagcagagggtcgcactctaaggcccaaattgctctcagtcacaggcggatttgacacaaaaagagtgaaagctttgggaggaggtaggttccaggccgagtatgccactggagcaccaacgtttgaaaccttacccctgaggatcatttcaagtcggcttaccaagtctgcagaaggaattctcctattggtaacccgagtcgagtcggctagccctctatacagatatgccggataggccctgtctttcagtggctgaatgttcttgaaaacaaagtcagtgaccacagcttcagcagtcagacctctctctttcagcaatccaacttcagtcagcaacacacctgcctcggccacttcctgatctgtgggagactcagtccaactcagagcgcgaacgtctggctgtcttcccgaccgggaggggagagaatttccataattatcaactataaaccactctagacgccaccccttaatgctatctttgaggggaatctcaagatactcagtcttccgc

SEQ ID NO: 179234 - DNA, 505 bp, Zea Mays
attacgagcttaactaaggccatctaacaagttgattaaccagagcaacaacctaggacgctatacaacatactcgtcggctagcctattattatcgaaatccgagacacaacatatatttaacaatcacttaacgaaatcgactcctacttaacatgagttggttaatcgcagtattggacttagagaaccattttagacatcacaactcaaaaacatgggttggagcagattaatcagcttttcctaatcattgcttaacttaaagttgttaatacacaggtcacttaaaatggcacatttttgggatctaacatagaggcaattacacatggcgtaaaactccataagactacatttgctactgaaggacctaaatcacttatgtgcatatcttagcggattgttcttcaattttaacaaggaccgacttatgaatgctactcgcctccaataattatcgggctgcgataacgctcatacaagatttctaattgatcaacaa

SEQ ID NO: 179235 - DNA, 611 bp, Zea Mays
caccgggtcgatgagtacgggcaggttttcacccatactcatcacccggtcaagggtaagcacgataccccactccctcgattcactgcaaattatgatcccccacccaatcaattccgaggcgagtcagctacaccccatccgggagctctagatgctcacgacaaccttcccaaaatgtcgttccctcatttcaatggtgagaaccctaaactatggcgatcccgttgtgagtcgtactttgagatgtactccgtagactctaccatttgggttaaggtcgccaaaatgtacttacaaggtcccgctgctcgctggttccaatccattgagcggaaactcatccatctctcctggtccagattttgtgccctccttgacgatcgttttggccgcgatgagcatgccattatgatccgcaaactattccacattcgccaaacccaatcagtagcggagtacatagctgaattttctgaactggttgataacctccatgcttatgagtcggccccagatcccctatattacaccactcgtttcattgacggccttaagggtccgatccgctctgctgttcttcttcagcgccctcccgatttcgatactgc

SEQ ID NO: 179236 - DNA, 525 bp, Zea Mays
ctttatgaaccggtaggcgacggagatcgacgatccagagatcaacagctgtgaggcagccacgaattgacacctttctgcaccctccatccatcgatcaacggccacaattctaactggcgcgatctaatctctcccgtccacatcagatcagatggccagagcgcttcttcaacctctgactaaccagaaacggcgacggcgccagataccgagcggcagagcaacaccggtgccccaaacaaccatcccgacctctctcaagcacacgggggcacgatttctaccatggataggctctacgcgatgtggaggaagaggcgaatagcagagacctgatcgtaccggcggtggaggcgacagaaggccgtcgaacgcacgcggactcgaaagcgcccatgatgcagacaatgcaatccagcagcatgtggcgcggggtggagtatggcgaggaattggaacgaccatgggctacacgcgggtaacccccgtcgagccacttcggacgagcagagacagggctat

SEQ ID NO: 179237 - DNA, 1458 bp, Zea Mays
gagtttctttgggatatcccacaagaacgtgcagccttgtggggtcactgtcaatctctctttatgagatattctttccctcctttaaaggtattcttttcgataagtaaaatgcacagaaaagctgtactccctccatttgaatgcaaggtgtcctagttctatgcacatatatcaaggaggcattaagactcagtaggtagcagtgagaaaagacgagaatagagttccgctttctacctaagaaacaaccatgaaatgatcaatgccatctagctgctgcatttgttgagaacatctttcttacattctatgtttgaccactttattggaggcaccttttcagttctattgaaagctaaccaattaataagagcacattaggaacactcatagatgcatgcttgaagaatgtagtatgcctagtaaaaaaactgtctcaaatcctaaacgccttgtattatgaaatggagatcactaagttttatattcattttctgtacatgcaggctggattatttttccttaagcatgccgaagcagtaggaaaagagataccagcacaagagcttcatgaaatattattgctctctttacaatggctaagtggaactatgactaaatcctctccgtaagcttaatctttttatttatgttcacattgtgctcaatcttatcttctccttgccgattagcacttccgttttgcagggtctatcctcttcatcttttgcgggaaattgagactagggtgtggctcctggctgttgagtcagagagtcaatccaaggttgatggtgaatttgccacttctgctgttgctcataacaaagctgttggaaacagtagcagtattatagaacatactgctgatatcatcacaaaaatagacagtaacatgagcttgccgcacatgaaaattacagaaaggaatagcacacgggacagtttatcataccaacatgtgcaactctttgagtctaacagtgaagcatcttcaacaacaataaataacacgcgagcaaagcgaaggatgaaaacaaattcaccacttaaacgaggtgtcaatgacaatattgaaagtagagctaatgagctggataacaattctaacactttacatagttcaaagattggtgaacaagctagaaatttgctctctgaagaggaatttgtaaagatggaagcatctttatctggttgggaacaaaatgttaggcctgtagatatggagaaggctgtgctctctttactggaatttgggcaaataactgctgctaagcaactccaacaaaagctgtctccatcatatattcctgaagaacttgtccttgttgatgttgctttaagaattgccaaaaacagcagtaatggagagatcaatttgtcatgctttgacacacaggctcttcggatacttcagtcactgagagtagcaaatagctgcgatatgattag

SEQ ID NO: 179238 - DNA, 331 bp, Zea Mays
atacatttatagataaaaaatagagaaggaccagtagacatacaaccgtgcaggagagaagcaagcagtgggagagaagcaaacatgagaggagagaagcaggggttcggcgtcagccgtgctggagagaagctgcagccgcatctccggcgtccggcggagctgcagccgcgtctctggcgtcagcgtgcaggagagaagggagaagcaagcgtcgaaaggggaagaactgaagaagcaagcatgcacttttcaaccgcaaaccctatcccgcgcgcgcacccttttcccgcgcgctatttctcgctcgcgcgcgcgcgcctagctcgcc

SEQ ID NO: 179239 - DNA, 445 bp, Zea Mays
atcaagttcttgggtcaaaacctttctcagaatgggatagcagttgtccctgagaaagtacaagaagtgatggattggaagcctcctaccggggtttggcagattcagagtttcctaggattggcgggatactatcggtgattcattccggatttctctaggattgctaaaccaatgactgagttgttgaagaaaggagtgaaatttgattggagtaaaaaatgtgaagatgcctttcacaccttgaggcggcatctgacgacagcacccgtgctagcacagcctgacaacaccaaatcatttgatgtatattgtgatgcttcgggcactggactagtttgtgttttgatgcaagacaaccaagttattgcctacgcatctagagcactcaggcctcatgagcagaattatcccacacatgatctggagttagcagcggtagttc

SEQ ID NO: 179240 - DNA, 578 bp, Zea Mays
cagaccgtcgcgtaaatcgtggcttgcgcgatggagttagggttgaagttatgaaactccaccacgtagtagtgcggtagcgcccacatgaagcggctcgccggcaccctgaacccatgctcatggaacgagacgaagctgacgacatagcccgcgggtggagtcggttcatcttcgtccccgggcgcaattcattcggggcgtgccgcgtcggtggaagggcggagcaggccgttggagacgaggccctgaagctcctccgtggtgacggtggagaagagccacgggttgcatggtgcaaggacagttaccttctcagccatggcaaagcaaggggatggcgacgacggcggcgaggtacgcaaagctctctcctttctttgtccctggtcgcagccgaaaaagcagggaggctaatggctagaaggcaaaggcaaggtgagaacccagggtatcctctcctccccaaatatataggggcgccggtgagtccgccgagatattttctgagccccccgcattcagaaatcaaatctgaaacggatttccgttcctcgaaattctcacgcacgcgcgcc

SEQ ID NO: 179241 - DNA, 512 bp, Zea Mays
gtggtgacatgcccaagtagtcactgcttccctatgtttataagccgagtcaatacccattaggcgttcattaatttttacgtcgcgcatagtgtatggttgtactcgtgacaaggaggtgtaggtcttactcaattagaagtttggttggatgtgataagtagattggaagtgtgggtttgttgagcactgtgttattggacgtgtatgtcgaagtacgttgtagtagtaattgtgttaacttgaataagagtctcaagtgcatgccgtgctatggttgtatttgaggtagtaaattataagagttgcacgatatgaggttcgatcgatgtagttaatatggattggactgtagagaggtggtgacatgctgaagtagtcatcgccttctctgcggttaagtcgaggtcatgtgtgatgacgctatttacgtggtgaatgtgtttgttaaatgaatgtggtaattttagcgcactaaatgatttggataaaatttgtaagtctacttgttg

SEQ ID NO: 179242 - DNA, 684 bp, Zea Mays
aggagattttaaatgactgtgggaacgtttgtgccttctctggcgcgaggggaattgcagctattttggagaaggcaggttgcgaacatgtgaaaactttggtgcaggccgaagctgctttatttattgatgatacgaaggacccctcgaccgaagcaagcttacttagtggaaaattctttactgacatctaggagaatggcggccgagggatggcacacgaaatgataaagaagagtgaaaaagatactcacgatgctagggaagcaacaaaggcagctgaaaaagccgcgaaatttgaaaggcggataggtattgcttagtagcttttaactttattgtttatttttgtgacttcaaacttatttatgttttctaccgcagccgaactatctcctcccctagagcccttcgagtcattggtcgacccagaggcaaaagaatcaacagaaattattaagatggccgaaaccattatggacgaagtcgttactcaactgttgaccgaagctgcagacaaagttttgaaagaagaagaacagatattgtaaaaatattgctagaataataatgtaacatttgctagactatgcttgtaatatttggtgctcatgggttcttgatgtaatgtataaatggctttgcaattcatttctttgcgatgcatgaaacttttatgtacat

SEQ ID NO: 179243 - DNA, 561 bp, Zea Mays
gccaagctacatgtggcacaagggccttgacaacccaaagctcaatttcaatgaactcatgaccatagtcatcagcttctcccttctcttctcgtctgcctttatgtaaaaccattcgcttttccaaccggttggccacttggtacgatagctgagaaccgaggccttcgtatccttccgatacgcaaagttgtaacaactgaagttcttatgaagaccatctgctctggccttcatttgatagtgcagctcgtgcacccggcagaaagcttcggcattgggactcataccctggcttcggagagcccatatttagacacttagtctaacaattgcattgggtgtcagctgatgaaagtatatctcaatttttttaaaacttctccaatcatctcatgcaaggggaaacgaagtcccgccctgaagaagcttttaaagattacgacttcatcatcttttggttctagatcacctcttccccaacaaaccggacaagcttgctttcggcctccccaaagtagcccaatttcttcatcataaccatgttgtctgccttcatag

SEQ ID NO: 179244 - DNA, 549 bp, Zea Mays
cttctcaccgttcgactagcttcgtgtagccccgttcaatttggtagtggtgcttggggatggccgattggtgtctcggtcgtgttctccaccgtgtagacatggtggtggcgccgctacttgggtaggtggggaagaaatggcgcggatcgtcgatttcctgatggatggtcgcgattaggtgaggtgtggtatgattagttaccgtgggatcgtggatgtgcggtagagatttaatctttcttacctccctggcgattcaatcgggaccatatggatctgatcggacggttcggggcgaatcagacttcataaaatcataacccttgaattccgatctaagggtgccagtcacatactgattcataacgcgataaaatctaatatcagccataagacttggatctaacgaccaggaatacaggacaccccttcgcggatgtagttttccacataggccgtccagggcggatgtagcttagtctgggtgaatcttgagagttagcccctagacttttaggtattattgcgcgcaacccaggaacagag

SEQ ID NO: 179245 - DNA, 768 bp, Zea Mays
ggggctaaccgcaagatttacgcagacccagaaatccctgagttggacggcgggtttattataaaataccctagggtctcttatgaaaaactacgcagccgaaggggtatcatcgatattgagccattagatcaatgattgacgtccaagattagaagcccccccaatccaaaccggtatgcgctcggatcccttggatcataagtgaacggttcggattttatgaggcgacccagtgcgcatgcgtcaatctcgcccgtgaacactagatcagatgattcacgacgcctaagacaaaggggtacgtggcaatataaccacagccgtcaatctagatctaacagccacggcatcgtcatcaccctccgttggtcggatgcggcgctgctgccatacctacgcggcggcgccatgactggtgcatgctgagtgacgatccaagcgccaaagctcaccctcgaatgatgtaaaaccgaattggagatgacactaagctaatgagaaggtacttacctaggattcagcgcttaatcacactggccacggcgcacaacgattcacagcgacatacaaccccggtgagcaattcccctagcttggcttggcctcccagcgtgacgacgttgcacacacacccaatggtatctgggagaccgctaggattgggcttcaaggcaggatcggtgatgacgctgagatattcatgcggcggtcggcagcggcgcaggggccccatcacgacgacgacacaaaatcttcacgccgggg

SEQ ID NO: 179246 - DNA, 556 bp, Zea Mays
ggattagatcggtcatggttaacccacccgctacgctctcagtcgttggatccaaaatccgcgctcaagatctagccacgtatcactctcacccgagccatcggatcggtttgcaacgattgcaacttaatattctgaaacattatctcgcttctaatcgagaccatcgccgtagggatcaatggtcctggattcacgcatcagtttcacaacacctcacggcggcgccatgacggacgtgacggtgcatcgacggggctaaccgaaacccagtccccaatgccccaaaatccaattaatacccttctactcgatgccaggcaaaaagtgagacgtggggagggagtattactgactggtgcggcgcgaagctcactgcgcgcagtgagtagggtaacacggcgatcgtcccagtgtcggcgaggaattacgccaagcaccgcagtcatccccggtcgtgggtgtcatggctacttccggctgtccccgcagaggccgctgaccaatttttagaggctggatggcggagtgcgcggtttaagctggcgacgaagca

SEQ ID NO: 179247 - DNA, 298 bp, Zea Mays
ggatcatgggggtaggtccaatttggtcggagggtggccggtccatggtgtggtggcgggcgctcgcggcggtgaagtcgccgacgaagcttccgggcgcaataagcgaagaggaggtgtgtgctaggcttgcgacagagaggcggagcttaagagctaaagcaatttgaccataagccactagagagaggagggcggagctcaccggagaggggagggacgacggcgccgagctcgattgggcccgagggagggaggtggagtggctgaggcctggtgtggtggaacaaggggctcg

SEQ ID NO: 179248 - DNA, 593 bp, Zea Mays
gtcgcccaagggtgcagccggaccctccgcgcaaaagacgcccacgggtgccgccggactagcataataagcacacaaaatcgaagtattttccaaaaggttccccgtgtaaaagtcgcctacgagcacgaacggatcaacgaaggcacacagcttcatataaattacggttacagcgagggcatcgcactttacattggctcaacctttgggatgatacccatctccatgtagttaaacaacattatcctcaactcctcaccctcaaaaagatttcgcaactccccctcacctacactcgccccagccagcgaggacaacgattcccgtttgctagccctgtccacacgaagacgaccaccctccacctcactcaccctccgtttcgccacagccgttcgccgcctacgcccagcactcggaccaggaagaacttcagcacccatcacacgcagagaagtctccaccgcagccacatccaaggccgcaaaataatccaaatcctcatccgaagactcttccgaccacacaaccgaactcccagaatcatcagactcaaaaaacttagacacggaatcatcagaatcattttc

SEQ ID NO: 179249 - DNA, 672 bp, Zea Mays
ctttagaccacctgatgcatataaggaagaagggtccacatgcaccattctctgtagcatagcaaaatcgagcttgatgtccttgaagattgatcgagataatattagttagtactgaatttaattttaatgacaagtttgtaatgggtaggataataagggatatgttacaggttgttggtttcttagatgaatatgctgctgcatagggttaggcctgaaaggagaaacagaacaggattggtttttgtagctctcctcccctcatctctccatgggattggaatatatataactttatgagtttatatggaaagcaatagatatttgtttatttcctctcttctctgctctcctctcctctttatgccatattactgcttttaaactaaggcgacactgctagaggcactattatatgtcaagttcatatattaagaatttgaactctagcctattgatgatgatagttgttcattgtctaaaattcctctatttgacctctatatatgtctgaaattcctaaacaacattatatccatgtttgtgtgttaatattttttggtcattatgtcatgagtttgtgttaataatctgaatactaaagcatgttgtaggcaccattatgtctaaaattcctatacacattgcttatgattgtttgaggattac

SEQ ID NO: 179250 - DNA, 1141 bp, Zea Mays
tcgccgcgctccgatcacccaagcgaaaaaattgggcggcgaagatctacggcttggtgccccgcgcccatctgataccccgcaggaccgcaatttcaacggatgtgcactttcatggacttgctcctctccctggctttacggtaatggtgcaggtatggtggggagtttgcgggtagacgagaggggcagggaggcgcgggtcaaatagcctcggacgcggccccgtaggcagtcccccccccattccatccgcacgaggatcccggtagagttgttagtagtgcgctgcgagctggccgcggaggggaaacgaccgcgacattgacccgatggtcccacctaatcagtctgagcgtgaggctacctgggaacttgaggagctgatgcggcagaagtaccccaaacttttcgttatgggtgagtttttgtcttcgctgatctctcttttgtcgttctgatagaagcgttggaattcgagatcgaattctttttaaggggggtagagtgtgatacccaattttctgaaaaaaagtaaaatttcatttttctcttttttcgtgctccgtgccattgggttttggagttttaggaggcacataccttagttgaacggtagtttttcgggcattatttgctagggtcgggagtccagtggggagcaggggttgtgagtcgtcgatccgcatctagtggttgggagtccctcctagttttcccccctccctactccccttgcaaccgccgccccgcccttcccacctattcttgcaaccgactcctccctctccccctctcttccccattgttgcagccgccccccatctcaccaaaccctagccgcctctcaccatttcctcatccccaaggtgcagccacctcttcccctttggatctccttcgagttggtacaagcctctaattggagaattggtgagaggaagaagaaaggggtgaaggaagaactcaaggtgatcttgtgttttattttgtatttgtgctgcaattacatttggttatctgttcaactaggcgaattggtagtagtgttgtcctaatttttggtggcgagcggacagcagtagtgttggtagtttctgggatttttgtgggggcaattagctgtaatcactgtaaaaat

SEQ ID NO: 179251 - DNA, 796 bp, Zea Mays
tcggagcaggggaaggaattgagtcgccgcgcgattcatcgttcacacggtcgattggcgactctgcgagtgtgcgggcagtgcggggtagaagcgggtagctcgtcgaggaagccgcgggtgcaggggtgctggattcggcgggaattcctcaccgaggatctgcggaccgcgcaaccacgtggcggagtcgctatcgtctcaaatccgaggtaaaacaacctccccactctctgccctactctcctcttcgtgtagtgctcttcgtattaggtttttggacaccaaatcgtggtgacagcgctcggcggcgaagcgccgtcacgaagtcctatgtcgctgccatgcctgggcgctggtcggcgaggaagaaagcgtgggcgccgtccgatccctttcggatggcttggattagacgccgtgtaccgattcgtagaatggatatgggccgttagttttcgatcgtgtggcaggtgttaggttggggaaaatcgtagcctagaaccgtggatcttggatccggtggtggggatccgatctggatttcattaaacaccgaccgttggatcgggatccagtggccctgattacgtaccaattcacaaccacaccggtttaatctggttcgcttatatctaatccaacaaccagtattgatccataccccttcgcgggtactatttgctaaagagccctcgggaaaaatacgaatcaacccgcagtccttccctggtttagcctgagtctggggaattcttgtagaatagtccccgcacttctcagtattcgctgcccg

SEQ ID NO: 179252 - DNA, 466 bp, Zea Mays
gcaggagattgttatggcgaggtttttacttgtatgttatctgttgagtacttgagtcgcgatgtcaagattagtctaggcgggttcaaggaccagtgggttgctgcacaagcgcataggggcttttgtgctgtgaatttggtatgaggagattggtgctgctagagatgtcacagtttcaggggcaagcacagattggttcgtgtctctaggggaggaatatctgtggatcaaatatttggtgccgtgagggaaactgggtgagctgtgacttgtgagttcatatgattgggctaagctgacttactggaccatcctacctgtgtggtcacccatggacatcgagatgtaccaacaggcgccatagccgccgcccgtcgacgtcaagatgtgcgattatcggttgcagccatggcccctcagggtggttgtgtctgtcccggtgactcataaggatggtggtggc

SEQ ID NO: 179253 - DNA, 306 bp, Zea Mays
gaagaagaggaagtcccattgattcggaagaacagtcggcgttacagagtcagtggggggaatagcgatattccttctccagctttgtctgcccttgttagcctgcaagaattatccatagcaaattttgatcaggctctcgaggatgttgttcctgaagatatgctgtcagagccaactgatggtgatatgatggacgtctgctctgacactccagatgtgggattagaggtatcccgggcagcatcttgtgcatcatcgaccttggaaggcggtcttcggagccaagaggttggtcaaggtcgc

SEQ ID NO: 179254 - DNA, 443 bp, Zea Mays
tctagggagaatctgaaattcagaattctgaatttcagccttcacctagaacttgagcgcgttcaccttaatccctagctcaaatccttaagcccccattgacaaatttgttctaaactaaaccctctgcaacgtgtgtgaagatggcatcgagatgcgtgtcatagacatgtcaaacccgggattttctctcgtagtttagtagtgagacaaacccaacttcatccctacatatctcttgttccagtcagcgaaacccataagcctccaaacacaaacaacaaaggaatgtcaggggaagagatctcccacgggatcatggccataatcgcgaagatttggagccaatccgcacttgaacatgacctctctctctgttgcctcgtgctcgacgccgtgcccaggcgccagagcgcgcactggcgctcgcccgcgcacacccc

SEQ ID NO: 179255 - DNA, 1006 bp, Zea Mays
gccaatgtggcgggctgacacttgcgctatgtaaagtcggtttcgcatgataagctgtaaaatgttgttgtgcattatttattttttggcttttatagttggtggtcttcgccgatcacgtgagctctcgtcaatgctatgactttgcagctagaagctgagaagaaggcgttggagtggaggattgagcgtgttctctctgaccccgtcgatgagctgcatgtgcacaaggtgggtgcaggatgaggagtgtgctgcagcagcggtgaaagaggtggaggggccaaggcgaagtgctgagtaatcacagacagcactcgcgaaaacattagggtggcacataatcagttctgcgacgcctatcgcgccttaagcgtgaaagctaagccatttgacgagtccggtgaagacgttaggaaccgtttcttggggtgactccagataaagtttgtcaatttccgtcatcgttgagtggctcatggcatactctgcattggtgtctcctaggggcaggttgaatgccctcacgcacgaaggctgttgccacttcgagcgctttgggtctttggattattgtactggctgtgacatctatgatattgaggagagcctaaagatgccgagtggagtgctgtttgaccggatgtggagcccttcagccctaatattgtgcgcgactgagcaaggtagagatgtaagaggtatgttttaccttcactctctttatatctttactactctataagggtgtaacgcgggtgtccacatgcttcaccgtggctccgccccaacgcccctccgcgcacaccctgcctccgtgaccccgcgtccccccgacaatctcgctctgtgaccccgccccactcctccggcagtccccactcctccaacgaaaccctagctgctatcttcgaccacctcaagccccacaccgtggctccgccgccgcctccgtgaccctagcgatcgcgcctccctccgcgccatcctcgcccgagcacgcccc

SEQ ID NO: 179256 - DNA, 677 bp, Zea Mays
acaacagacatgtggttacctgcgaaaggcaactggctgttcggatcgatgggaggaatggttgcggcagatgaactctgagtcttccgcttaggcgccatctcaatcttgttggcaagaggaacggaaacgatatcacaagaaagcagagaaggtctggatgcagaaaagcaagactagggctcagaatacagaggcatgtgacggcgcagtacaaatggggtttttcccgggccagatgccatctctaaaaagtgcccagtcatcacccggtagttatttctaaaacatcggcgtgccctatcatcgctcggccgttatttccaaaacggccgacgtgacccaatatagcttagctgttatttctaaaaacgctaaccagtcttcactcggccgttgtttccaaagcggccgacatggcccgttatcactcggttgttttctctaaaatgccgacgtcactagtaactgctcggtcgttatttctaaaacgccgatgtggcccgttatcgctcgactgttatttctaaaccgccgacatcaccagtagtcattcaaccgttgttcctaaagtgacgacgtggctccaagggacccagctgttacctctaaaacgccgacgtcgcaaaaaaggaaaaactgctcggttaccacctctgaaaatactaacagtaaat

SEQ ID NO: 179257 - DNA, 296 bp, Zea Mays
taaaaaagccagcctatttccctaagtttgcacctattaatatctattagctggaaatacttaaaaagatagtgtgtcttctgttgtacttgagcttctaatttgcatatgctaagcttcttcttagttttctgagttagctccttttggcaggctgagttggaggaaaaggtggcaactgtacatacagacatagttaatcatgtaagtgcacctagcagttcagtgaatgccattggtttgctacttcatgcttgtgtatgttggaagggaaatgtatgcagatagatataaat

SEQ ID NO: 179258 - DNA, 665 bp, Zea Mays
caaatcctcggtagtgagggcatgtaactgcatctggactttgtttggacagtgagcttgatggccaggttcaaacttgtcgccacaagtatatcacagaccattctgtctcctatactccttcaccagtctctctttagacagcttgggtaaggaagcaatccctctagtgtcggacctgtacacagcacccccaatcgaccctgattgactatcttgaatgatttctatcgttgtttgtccaaaataccttgttggatcctggctaacaacgctgctcgttccatcgaagttggcagatgagacttaaccggtccttgcagctcttgcttcaaccccttaattaaatgggccacatacaaagtctcatctaaatcatgattatggacagaagttgcataccgcgcctcatcaaacacctttttgtactcctccacagatccagtctgcctaatctccaataaggaccgcatagcctgtgaatactcctctgacccaaacttcagcatcacagcttcacaaaattcctcccatgaacatggaccatactgaattttaaaaatctgaaaccatctcttagcattcccctccatgttcaatgatgctgacatcacccaaaccgactcaggtacccgatacaaagtgaaataatccacacactgatc

SEQ ID NO: 179259 - DNA, 698 bp, Zea Mays
tgcgctccaagagcgaggtctccgcctagacctttgcagctatggcgccatcatgggcaagcgagagcttccatgcctcgtcctctgccactgccttcgcctctttcgccaccttcttggcatcccgggcttgagaaaacatcttttggagctctacgaaagaaagggactaaagtaacctagagtgccagataacgaagatagaagggctgacctccagctgcgttgcctctcttaagagctctgagtttgcctcccccagacgagtgttaacctcactaagggtcaagtcaacctcctcggtccagagattcgcctcacggaggaccccttggagttgggcccgctcctcctaaagcaataagcaaagagagacaaccaaaaaggaacactcacctagccataggggatcaaatcccgtgtcatcgacgtgcaggcaattgaaaccacctcaccaaagttaccaagcattcgctctatggtctctaggctcatgtcgccccgagatgaggtcgatttgatctgctgccactccttcgcctccatcccctatccttccgagcccttgaggacgaagggaggaaggttcttatggccttctataggagtatgtagcgtagcccccatggaatgtggaagccacgacggtcgatggtggctgtgactgggacccggcgacctccacgggcaatgatgac

SEQ ID NO: 179260 - DNA, 972 bp, Zea Mays
gtgtgaccatggcaaataaatggttggccatttttcaatgacggtgtacaatataaaatcactagcacaatatgtggctgacaagaggacaacatgaccttcgcacctgcagagacaacctcacttctgcatttgcaacactgcagatatgtctgttgtctacacaaaacaaacaccatttatgagccattctgagcacaccagaaatttaaatctgagaatttttaacaaactgagaatttctaaatggacaaaacttaagtacaaacttatagaccctgcaaggttattgaaaaaagacctgatgtgcaagctagacgggcaaggtagtaaattatccatatcatttcatcaaaacaaagaatccaaaattcataccattgacaaatgagttgctagtgttcgcatgttcaaaggttgttgacaggtcgtcactgcaagggaacgggactgtcgaaaggggatctgaatgctcgtcaccaagggctgccagatgaggatggtctagtacataaccttccatgagaccatgaaaggatgcatctactcgtcgctgttgatccatcgggtgtgctggacgccgacggacgacacatgatacatttgctcgtagtcgcgtcatccttgcccctgtcgggccgggccaactgacctcggtggctgcatctcaaattcatcaggccgccgctgccgcaacctcaagccgcgaccaccgcacagaggacctccgactgggggagaggcttgtggaaaagggaaacacgcaagaatagtttgatggcgcgcaggagaagacgcaaggggagattgggggcgcatcacgaccgcgaagatatgcgtagctcgtcacgaaggattagcgtcgctaaaatttggggcagatttatggtatctgttggacctcagtttttatgtttcccttcctaaaaaacatattagcggtcagattaacaaccttttggagatgctaag

SEQ ID NO: 179261 - DNA, 1030 bp, Zea Mays
ttggagaacacaccttctgctcaatcatagatgtatcttcgacagatgttgtgtcgaagagcacactgaaaccaaggccacccttttgcccattttcggcgtttttcaggtagctagcttcggcttcggctccttgctcactagagggacttcatcttgaatgggaacttacactacttatccattctttttcacctctttttcccaccaaaatagaaaccattcaatatccgttggaatgagccctattccctaaaaataagcaaatcaacacctttaccttcatagcctctctagtgccagcaactagagctgtggtggtttttgggttggtaggcagcaacggtatagccttagtctcaactattgaaatcccctttgaagacatagcgccctcggtctctttgggcgcctgtggcgctttgtaaaaacctttggccttttcaatttctgggcatcagaggcagtctcccagttgctttttattttctccccgccttacgccagtcgggggtagtctgggtaaaagaaatcgatatcatcgaatccacaatttagcctcctcttctcccgggcctaaaggtagcagtcagggcttcatcctccttcttcacgaaattcctgagaactttgttgcattttgcttcaacgacatccagccatccgtcgcatggctttccaaattcatctctaaatttgtatgtacacttcaaccttacaagacttccacttccacttctttctttgttgaatcatcatcctttggctccgacgttgcccattcggcctgaagtggctagatgttgaaggtcaggtgctcttggacaaggtccttggttctaataaagctgcatacaacattaaaggtggctagggcagcctgagcttcatcgttcatatagcatgttggcctcttaatgccgaagttaggcttggtaggcctctgaataatgtcttcgatgccttccctcttatctaaatcattcttcacaaagaatcactacatccagaagtttggccacttgctatg

SEQ ID NO: 179262 - DNA, 816 bp, Zea Mays
aattacaggaaagtgcagggtctctagagtaaaatttcctaatacacaaagcaatcccacagtggactgcgggttattaacctaaaaactgaggggcctaattgataacgcgactggccgaaggggtatcgcgggatccaagtcgttcgatctgaaactactggctccgattagatctgcggcccgcacgaatcagtattctacgaggtccctcaaatccagatccgacgcccatgatttaatgaaacccagtgtgagtaaccatcatccgatctcacgattcaattgatcaaagcgatattcccttacccgatcatagccatcgatgaatagatcaacgaccagtgctcatctcccccaaacgaacccgacggcggcggtgctgccaggcaacacggtggcgccatggccggacacgacattctcgcaccctagcggtccaaaccacacgagtctagccctacgcgatgtccagcgaaaagcgagacgcggaagggagtattaccggcaattaatggtcgagtagagacgtccgcggcgcgcggcggagtccgtcaacgacgaggaattccgggcacgagaacgctcccccgggcttaatacttcacgccaacaatccgcacacaccgacgaaggccccgacacctcgccagtacccaatcgtcggtacaagcacgagctcccggtggtggacggtagactacccttgcagcacggttttcacgatgacagggaggggtggcagggcatgtgagggcgttggagctttagggtcgcggacgcccgcatttgtactagctgacccggagttcgtgc

SEQ ID NO: 179263 - DNA, 711 bp, Zea Mays
cgtcatcgtcgaggacaagagaagcagaggttgatgcaaggttttcctaatttgcttcgtgattcttacattaggaatcgcaacaagtagaaacatgagaatgctaagtacattcccagaattaaaagacaaagtagtagatttgaagtggacaagagagcaaagacatggaggaagattgatgcataggaggttgtaatgtagagaattaatgatcttgttagtggccttcctagaatggatggtgattttttctgtaatgaattttagattcatgtgttgctcatttgtgtacattcaagaacttatcttatcttccatgtaggtgaacaataccgtactagtgaccacgccactaaggtcgcataagcgagactagggaaatggaacatggatgagcagctagagggaggtggtttgtcgatcctatcacaactcatagatgccatcaagtaatcatggaactatctaacatggccatttgtggctaacatgaggcatatatcttatctttaaatagcataacctcattcttcttgcaaaccttatcaaataacttgaaattctcttttgtgctatcatgtcatataagattttgagaaaggtgtctcaagaaccatcggtgatgtatttggccacccaagagtgtcttcttgcataacatttagactcccgacatgcatgttttatatgacacagacttcatgttcc

SEQ ID NO: 179264 - DNA, 901 bp, Zea Mays
ggaagatctgctggaaacacgtcagcaaagtcacacaccacacggatgtcctgcacccgcaaggcagcctcaccctccaccaccgtaccatggagaaaaagattcccgacttccttgaccgacgatccggaagcaattgcgacaacaaggataacgtgaactttggagaacttcccaagagcaccacctccctacccaacagcgcctgcaataacactgtcttccaaaacaggatataactgcgcgatactgagataaccaatccataaccaaaataacatcaaatgcccccagggaaatcacaacaagattagctgaaaagacctcattggcaagaatgacggaacaaccctgacaaactaaacagctactaatgaagccattagcagaactaaccataattgggtgacccaacctctgcaccgaaagaccagcccgcgacacaaaattctccgaaacaaacgaatagctagcgtcagagtcaaaacgagcatgggccaaaacgaatcaactgagatcataccggtcaccatgtctccctgctctatgccatctgcagagggtagcacatatgctccagaaatacccacagaagaggaagctcccggagtgaagttaacagaagaaccccactgagtcgtcggatgaggcagacacggagctcaaaattgagatggtataggagtagtcggtgcaggagtaggcgcggccagatactaaggaaaaccctgcataggcacgaactgaggagtcccgggcacataaaactgctgcagagggggtggtactgaaaattgctgctcagcgctagacatcatgttgacagtgccctgagaatatgaagaagtcactggctcccatctaagcttcccattgcgattcctcctacacaccacatcct

SEQ ID NO: 179265 - DNA, 358 bp, Zea Mays
ggtgcctgaaaaattcgggttcaattggagcaagtttggctggtttgggcatttcaccgagcacatggtgtgtggggagttagggttttaggaaaatggtcatttgaggtatgaaaaccctctcgaaggagctaggatcctgcagggatacataatggggacaaagggacacattccaccaactggattcattggatttcacagaaattggatttttgcacaagggagtggtgacttgaatgccacagagcctttcaaaccgagagcagggagatagagggaaggagaggggggatgactgctcaccggagagggaagggtcacggagagcaccaggtcgccggagagacgccggtgg

SEQ ID NO: 179266 - DNA, 745 bp, Zea Mays
agggtttcatacacacaaacaagccatttcaccctcgttccaaaaccccgcacgccacttgctcggtgaaatgcccaagccacacaaacttgctcaaatcaatcccagatttttccagcactttcatgacaccttaagtaacatattcgccaaatttcacgccaatctgatatcccagacaatgattttccacaaattcccatttatagcgattgattctgagccgagtgcgcaaacttcattttctccaccaaatttgaaaccaagcgcacacttcactcatattcactcatatatacttactcgttaagtatcggctcaatttcaagtcatttcatgccctatttcgaatttcaaaccttctatggcacaattccttgctcaaacgtcgttctcacgtcctttgacctttgtttctccaaatcactttgttttcgtgtcataaatatatgtgtatgtatttattcacatttcatatacttatgactatgtgactaatacgtgctcacctcttctgtcatttcagcgatctcgcctgcccgtgtgcttgtctcatatcctgcctggattctgtctctctcgtgaggtttccaggtacttatcacttcagttatgatcttatcagctgctatctactcgtgcttagcctttcactcacttatgcagcactcaagctaggatggtgcacacgaagaatgtgtcagcgctagggagaggagacgatgagaaccctcctcgccccttc

SEQ ID NO: 179267 - DNA, 553 bp, Zea Mays
cgtacgccgagggagagccgccatggacggagtagggcagcgaccttagggactgcctcggcaaggattggggtaagacacccatgcgaccaagctagtttccccacttcatattttgactaatagcgctgggttgtgggcatcgaggctcttgctgccctcaccggcaaggcaccaccataactggatagcaccgccacaggattgtttcacgtcatagctggtatttcccccctatagcgatccactagatcgctctctcccatgttagttgcttcctcaactccggatgtattggttcgacttgacggtggggattctggggcgtcggtcgctgttgcaccagcgagctcaccgaagggtagggtggagctctggcacctgggtgcttcggttaggaagaaacatcgtgggaccttgattcgtgagtgggcggtccagattgctctagggataacccttcgcagggttaatttggtccgaaggaatgtgatcggacgactacgatctgtcggtcgcgtaccacttcgatgtgatcgaccctatcccttgg

SEQ ID NO: 179268 - DNA, 891 bp, Zea Mays
ggcaggggcaccggaggggggcggcccacggcgaagcggctcggcggtggcgctaaaggactccggcgagcaattaaacgcggcgggggcaataaaaaggacgggagagggcgggagaggttccttacctcgaggcgaactccggggacccctcgatggcgacggagacgcggcggcagcccgagtcgacggtggcggacctcggcgactgcgcagagaacggcgggtgagcgcaggcagaggaattcggggagggagaggggagattggggcgtgtcccgggttgcggacgtcggggcaaagctcaccgtggcagagggcacggcggggctccaacggcgacggagaaacgagctcgggcggcggcggttaatggcggcggcgctttggcgtgcgagcagcgtgggcgaggtggaagggaggcctgcaggtgcgcaaatgagggaggggggagagggtgggctaggctccaggctcaagtggccgagggcgaggtagttgcgagctccacgcgcgacgtgggcgcggagtccgcggcacgcgcggcggttacgcggagacggaagagctgacagctcgggcccgcgagcagagagagcggggaaagcgggcgcgggcgcggggaagacggtcgcgctgacgggcgggcccgccagggcagagagaggagaggggggaaggaaggcgcgcgcgggatgggcctgatggccgaaagactgaggggcgggggaagtgggcttctttcctttttcttttattctggcatttgttttcccttttctttttatttactctatttgattcaaatccaaataagccacaaattcaaattagcatttctaagaattatgcaccaaacaaaagtagaatttagggtttgacatgatgcca

SEQ ID NO: 179269 - DNA, 609 bp, Zea Mays
gggatatggaggtggtattggtggatggtggcaggggctgatcacagcacaacaacgtcgttgggaggcgtagacgggggcgtagcgcgccggaggatagatcgatgtgggagtccaacgactggagaacacgccgacgccggagaacacgccggagtgggggggcgaggggagccacaacgaaagatggggccgctacttctcacctggtggtgtcggtaggggatatggaggtggtattggtggatggtggcaggggctgatcacagcacaacaacgtcgttgggaggcgtagacgggggcgtagcgcgccggaggatagatcgatgtgggagtccaacgactggagaacacgccgacgccggagaacacgccggagtggggggcgaggagaacactaaggatgatatctttaattccaaatgagattacaacattcaaaataaatgaaaccaacactatttcagaatttgagaaatacataagcacaacaaaagatggggccgctacttctcacctggtggtgtcggtaggggatatggaggtggtattggtggatggtggcaggggctgatcacagcacaacaacgtcgttgggaggcgtagacg

SEQ ID NO: 179270 - DNA, 384 bp, Zea Mays
catagctgaggcagaagctactagagtggaggatattgatatattggaagaagaacgattgaatacggtaattcagtcagctaggtaccagcaaaccctgaggcgctatcatgataaggccatacgacatcgatccttcgcagtgggagacttggtccttcgccgaattctaacgggggaaggacgacacaaattgtcgccactatgggaagggccattcatggtagcagaagtcactcggccaggatcatatcgactcactcaaatggatggcacagaaatagggaattcatggaatatagagcatctcaggaagttttacccctagctagatttcaaaagctatcggggcagcattgtattctgtaatcagaaaatacatca

SEQ ID NO: 179271 - DNA, 438 bp, Zea Mays
aggctggcaatgagacaatatgccatagacaaagagttcgagttaggtattgaggcaagtacaacgaagaaatatagaggctattgtcgtggaggcggctgtccttggagcataaatgcaagaattgagagggatggttcgccgaccataattgtatgtttttgtttatgtcaagaacttatcttatttatattgttgtggccttcgaagtaatacaatgagagtgttattgttgttgctatttttgtaggtgatagtgttaaatgatcatcacacttgtacttcaagtggacggaggaggactagcacaccaacaagtgcttgggttgcttcaaaagctcttcctattattgttaagaaaccacatattggtgctaaggaattacaagccacacttcaagatacctacaaatgcacaattgcttatgacacagtttg

SEQ ID NO: 179272 - DNA, 420 bp, Zea Mays
gaggaaaataagtccccctcgaccgatttctcccctctacaccctgtcttcgacctcttatgccagttcttgcgcttgctgcagttacatttgatgggatttggtgctgttggaccagatccctaatgttcctcggcttcactttgtagattatggaccacgaatattgcgcagctgacactaagtgcatagacgctagatgttgtcacaatcacaaatgatttgcgcttgtggtagttttacccaatgattgtgcgattagatcacatcaggttggtcctggtgcttcttgcaaagatatttcatttgtcttgtataagtgctggggttggtggctggaactttgttccgttatctaaaaaatgctggggttggaattggatggcctggcatgtcgtggttaatttgtggatggtagaa

SEQ ID NO: 179273 - DNA, 882 bp, Zea Mays
aatgcccaatgctcatatgactcttctaactaagaggaccatgtcacctgctcgcggtgctcgcttgcgcaatgaccgcatgatgcattagacattgtttgtatatgtataaatattacacttgagatcaatataaagtgttgttgatccaatcactcttacaacatcaattcgcctggtcccattcttcctgacgtcgctcgagccagtccgcctcgatgccaccacccctcatcaatgcgcaacatcagccccttctcgatgctcttgtttcgctcgttgtcatcgtcatcggtgagcttggcgaactaacgagccctggctctcagccagagacatcacctgtcacatctttcccagtgccctcgcccttcaatgagattgacaatcgtcaaggtacatatggttttgattcgatcagcaaaaatttataagtatatttgtttcttttatttatatgttttttatttaaacttgtatcatatattgatataaacttgaattttatgcaatactagttttttacgaccttattgattctgtcaattattcttcttggctccatgaatttccgtcctgcattcgccactgtatggaagtatggaacattagcatgtaagatgatgatttaatcaaacatatatggcaagggaatcatcaagtctacaacgaaaaccgaggtttcaagtttgtatgaaaaaaccttgtaggcccacagttatccgatcacacatgtactctttggtcgagagtcaagacctcttgctgtttctaggtcacgtcgctttaggtgaggtgacaagtcgaggtacagtacagtgacactggagtcatccatacaaaggaggggctaaattatgggggtgtttaaatgcactaaaa

SEQ ID NO: 179274 - DNA, 660 bp, Zea Mays
caccaacaacatagcagaatacgaagctgtcatcctgggtcttcacaaactacgagcctcggcgtcaccacatgcatcatgagaacagatttcaaggtcgtcgctggtcagatcgaaaatgagtactcagcaaaggagcctgtgctgatgcaatacctcaccgctgtctgcggcctcgaaaaacaattcaagggtttcaccttacaacatgtctagcgaaacaagaatgaagaggctaatgcattggccaaagcaacagccaagggcgaggccctgccctctgacgtgttttaccatgtcatcggcacaccagctgtgcgtaatcccgaaggtctacaaataacgcaagacgccgatggccaccgaatcgtcaacctcataatggccaaagattggcgggccccaataacactatacctccagagccattaccatccatccgatcgcaacgaggccaaaaggctgaaacacaggagcagggacttcgcaatagtcgagggccagctttacaaaaagggtatcagccagcctatgctgaaatgcataaccgaaaccgaaggcctacagatcctccacgaagtccacgacggaacctgcgggtcacactcaggacacagggccctcgtagccaaggtgattcgttagggattttattggccc

SEQ ID NO: 179275 - DNA, 351 bp, Zea Mays
ggagactttgcccgtgacgctttggggcgcgagtggggaaatctgcctttaaaaaggggttcatccctcgagtagcagccatgtcttgcttctctcccactcgcggtgccctttcgccttcgagctctctgcgccctttgtcttcaaggtttctgctttgtgtcgccatagtttaccatggccttgtgacttcatcccgagcacgcccagactgagtgagtgctcgaaatggtataccgcctgcttggatgggatgcgccgacgcttggtggaaagatttgcgccggcgtcatccactcctatgagcttgccgctagagagttcgtgccttttgttttccctagcgggccg

SEQ ID NO: 179276 - DNA, 950 bp, Zea Mays
acatttctccaacaactcatcaatttgcttcttgtgttccaccaactctggtccggacactcgataggctctcttggaaattggggtggtgcctgggataagctctatggcaaattcaactttcctttcaggtggcatgcctggtaacccctcagggaatacatcggggaattctgacacaattctaattgcctcaatcggattggactctttgtcatctactgataaatggtgacatgctccttcttctagttcaggtaagtatagcttggttactacttcctttccggatggggacaccagcttaactgttctcttgtcacaactgacagtggcttgatttctgtgtagccaattcatccgtagaatgacatttaacccttgagttcccattactactaggctagcggggaagtctatcccccttatttcaatccttagaatcggaaaaatcctatcggtctgaactttccccccaactgaattaactcttaaaggcaggatcattggttctatggggatgttatgtgattctacccaagatgcagaaacaaaagaatgcgtggcaccagtatcaaatagtacttttgctgggtaggattcgactggaaacatacctactgccacgtatcctggattgcctcggcctctaggtggttcacctttccacggttgtaggcctgaccatggactcctggtgcttgctgtggtgctccttgtcttgttggggcattgactgctggcggctgctgagctgctttctttggacagttcttcgcccagtggttttgttctccacagtagaagcatgcacgacctcctacttgtgctggggctgcttggccagcttggccattctagttgggtatagtggcaggaaggcgagctccctagttgttttgacgctggtactgatttcctccaggttgggtgctctaacggtactgctg

SEQ ID NO: 179277 - DNA, 1051 bp, Zea Mays
cttcagcctttgagtaggctccaagcaatacattgccggttgcttctatggcgtttaactagtcatcatttggctcatcaaactgactcctgtatttgaaggtgtacttcaggtagattaaaccaccttggctagagccagcagtagcctccttcggcatctcccacccatttgcaagtggccatactctataagcaatgtgctcctagaccaagtcccttgtgcctatgtaagtgcatactgtattaaaagccgcctggcatgcttgtatatcattcccatcctccctttcactcagatcattcttcacatagaaccattcttgtatccaggcccccggccatctcttccgttatgtgggaacctgatagcttgcctcagagcgaggcacgaagctgtaacaaccgaagttgttgtgatactgctcctttctagtagccttcatctcataagataactcatggatgttgcagaagcattttgcatttggctccagtctctggctcctcatggcccatataaaaatacccaccttgataatagctttgggagtaagttcatgaaggtaaattttgaaggctctcagcacttcgaccaacaatttatccagagggaaccgaagccatgccttcatgaaacttctataaactaccacttcatcagcttcgggcagagggacattattctcccctccaattctcacaattgaaatatcacaaaagtacctccccctcatcgcatcaatcttcccttgcttaatagttgatttcccgaagacaacatagcctggtcttcaaggccgatcttcggcatcttcattcccactttctacattgaaactttcactgtcgctggaatgctcagatatcccagccagcatctcgtttgcaatcttctctgcgttggcttttttcatagctcataaaacccaaacagcgccagatcaataattttcttttcttcatctattaagtcgatgattgttgaaatgccaaagcttgaagtccaattaaattcgacaaaacaagaaagtttaaaatgacaagcgctg

SEQ ID NO: 179278 - DNA, 1085 bp, Zea Mays
cacaggaggatacacaagttatcacataaaaatttgagatctgggccctaaaacttgctctgtcagacgctctgatggtgatcaccatggtacagtgaccctcgcgccgtgatctgcgctgtctccacgattcgtgctctctggtgaggagattatcacggcagggtaaaaatcttggcaccggatagactcggacccggtcgatggtgagctcgccgtacccacttgggctgcggtcgggcaaagtggtcctcgccggagttggccgcctaccgaccgtgcgccacgtgccttagggcgttaccacgtcgtagtaaaccactgaagcgtgtctggtcatcgccgatgaccttgccacggtgaaagccacgaatcctttgcgccagtgctctcccctctctccggccgctagcacgccatgcccaaattaggagccatcgcacttgggccctataaattaagtgtgccatcaactccgctaggtaatcacacacccaacacaccagcccgtgcctcagattatccaaaagagcgctcgaattttgaatttcccccaaatctgtcaagaacaccgcagtgtgtgagctcgccgtggccagctctccacaggtccgatcatgccctcctcactcttgtttcagctctcttatatgctcttgatgcttctcgacccggccaattgaattagactgcgttagatcgtcgggaatgcctcgggttatcctcagtttgcgccatcaccgtggacagcacgatttagagttagaactctgcaattgatggaggggaaatggtcgttaagggtagaattaggtgttgagcaacggagaagcatagccgttgcgttttctggccggtacgggctcgccggagccgctgctccgccgtccatggtcgggggtctcgacgtgtgaagaaatagaaaagggaaggggctatctgcaaaagtcagtgacacataggaattgtgcggaggagtctttacgagttatttaaaagagtagggtcctctgcgcaaagcgaacaccgcgggcacgcttccgcctgtgtgagggccggcttgggctagtttctgcccagtatta

SEQ ID NO: 179279 - DNA, 444 bp, Zea Mays
tacttgacgaagagaggaactgttcgaagctaggtcgatgatccgtgaccaggcagctaaccggcgcagcttcagcgccacggatcttcccggccggcagttggttcatactacacttccctaatcatgcgacacggagtcaccaccctccgatccagctctagtcgctatcctcactggctccggctatcccttggcatttaaggatacgtctggaaccctgcagaaattgtgatccacaacaggggccacttggtgtcgcctctgacctttttttgctccgggggcagctggaattcaaccactcctgatttgaacacattattatatatctctggtgtgtgtgaggccgggggtaggtgaagcaagtatatgcccagccaaagccaaattgcctggtgaaaatagcctgtgcttgtgttgcgtgtgtggggttacctcaac

SEQ ID NO: 179280 - DNA, 436 bp, Zea Mays
ccttaacaagaatctcgtccttgagatttaggaaggactagagaaaagatggggaaaatctatgtgaagctcttcttctctctcccaagtagcttcatcttcaccatgatggctccattgcactttgcacatcttaataactttatttcttgtaactcaagtcaaagtgtcaagaatcttgataggatattccgtataagtcagatcatcttgaacactaagatcctccatcggtagctgctcttcaggtaccctgaggcacttcttcagttgtgacacgtggaagacatcatgtacatccgcaagatgactgggtagctttagttgatatgcaacttctcccactcgctttaagatcaagaaaggtccaatgaagcgaggggacaatttccctttaactttaaatcttcgcataccccggatcggtgacaccttc

SEQ ID NO: 179281 - DNA, 459 bp, Zea Mays
ttttttttgaaaatggacacggcaagagctttgccatggccaaaaatttattagaaagagacacttacaaacaccggaaaggaaagacaacactaggggagagggggggcaaagaaaaaaaaagaagcactagcaaaacagtccactataaacccagcacgccacacaaacaaaacgctaaaactaactagaagctctttgcgggttgaaatcttctttgacgaaattggccacttctcgctcgctcttctcaagaccatgaaagattcttcgatttctttctttacaaatctcccaccaaaagtaaatacagagaccatcgaattccttgtgagccgcagttttctctacttttagtctgcacttcctccaccatccatagaccgacgagcactggtccaactttggcagagaggagaggttgtaccacgagctgagccaactccaacacgattttgt

SEQ ID NO: 179282 - DNA, 800 bp, Zea Mays
tcatcctagtctacgacgtcccgtggccaaggatggatacgaccaaggcaaagccctctcgagccttcattgccgccttcaaaccccgcatccatttatgcgaaggctagcatatgactgatagtagtcatccggcatgatagaggtctagtttctcattctctccaacagtagctccctagggtgtggctcaacctgatgagccaatccctaagtctagggaatgactcgaatgttgccctcgatcatcggttgatcggtttcaggggtcatgaaatttgtaattattagtcgactaacatatttgattgattttactttacaactaatgtttttattgttttattatttttggtttcgtgacctatagaaggcattgctctaggtaagatttcactttcagtctttgctttcaccaagcctgtttttttctttgtgttgcttgcgcccactgttattgtcaccttgcatctgcatgccattgtcgtcgtcgatctttgaccgtttccttgcccactctagcatgcatcaaacggatcgctcgccgcgccgttggtacaacatggcttcatcttcttcatttggttctagtagtgacttgctgaatccgccactgcgatccgtcgtcattcttttggtcggttttccctcctcgaggtctgggccttccaccgcatcgccgactggagatgtatcgggaagtcgaaacaatgcaggggaagatgttttgagtttgggcgcccgcacgttggattggaccatgtaacataggtggagcgactaggttattttcctgtgga

SEQ ID NO: 179283 - DNA, 588 bp, Zea Mays
cggcggcccggaagctccggtgagcaatcaacgacggttcggtcatcgatcccgcatgccagcgccacgggcggcttcccaatggctcggtgcaagatccagacccgatcttaggttctaggcgaccgtgggggaagggattcgcggcggcgcggggcggcttgatgcaagatctcgttttccctctccctctctttctagtggttgatggtaaaccgatggtgcagcccagctttataatctccagggagcggcgccacgacatgccccaacgacctccccccagctgggcgagtccgcgaccaaggcgtcaagcgcggatctcgggtgtgttcgttgtgtcggaggggacgagtccgtgccacggatgtcggtaggaggttggcacagaatcacggaggttcggagaggtcattgcgcggttcggttgcaacgacccgccagatccgtggcgagatggaggcgatgactgctgcttctctgagaccgagcgggacctgcggtgagttggggaaggatctgaccgcgagggcccaccggccggtgaccaccaaggcaatacacgcaacaaggagaacggacagggag

SEQ ID NO: 179284 - DNA, 592 bp, Zea Mays
ggcccctccaagcacgtttggcgcgctgggcactagtaatcgctcaccggtgtgttgctccgcggcgggcccgctgtgctacgtgggaagcgtcctgtgcgtcgccatcaccggtaagaccttgctccctggactcaccccaaccccctctacgcgtagcaccgtagatatccaagttagttgtgcgggtcgcacgatctgggcaccgcggcaatggcgctgccatggtccgctcggactcggttgctggcgtagggtggaagaagacgacacgggagccctcgatctacgaatgaacggctcagattgatgcattcctatcgcagcgcgtcagccataggatctgaatccatgggttagtaaacgtccgggcttcataaaatctggggcgcagattgataatccaacggctgtgggcgtaccggttcgcttaaatttcaggatctaatctagaccgttcgtttataatcggacggctctggctggccaataccccttcactttaccagtttgcagaagagaccctagaaaatttaagaatcaacccgccgtccaatacaacagccctctgagtctcgggaatctttttaag

SEQ ID NO: 179285 - DNA, 407 bp, Zea Mays
catgatgaaagagattatacaatttgtacaccctctgtcctccaatgcattactgtgggaaaaagtgagaaatgtgttgatattgtttacaggcatttttaattcactgcctaagttatcgcattttgactaacttattcggacaccaaccaaacaggcgccttgcacacaaataaaattttgcacgccacacccctacaccgatgcaagtagctaaataactctccgaaaatgcatttcctcgccgcgtccttttcgggaatcatcagccgtccctgtccctcgcaagtggcaagcaaaagcaaactataccccggctgaacgaagcggcaatcaaggaaaggaactgatattcacttaaagaaataggagaacatatctgatatacatgaaaatttagtgtatat

SEQ ID NO: 179286 - DNA, 572 bp, Zea Mays
ctatcgcgagccgatgcgcgttagattccttgctccggcctcgcgcgtcatcgacgcacaccgcgtctgattctcttctctgcctcacgtggtgggacccaacgacatgagcgaactgcttacggcttctcgttttttgcactctttctcacgcggccaccgctatctccattctcctcctttcgcaccctctctctaaaaatcccaaaccctaaacgacagtgattcctcctcctccaacccccgcggtggcgacttgggcggaggtgccgtccgattcttgtggacgccctgacatcgtctcgcacctggcgaatggcgcgggcgacaggatcacaacaccaccacgacctcctacatcgtcgaggttgccggcgcgcgcgtcatcctgctcatctacgacggaccccaagaccgcctcctcgaggtgcacgtctttcgcacgctcgcctccattggtttctatcctctcctcttttccctgtccgcgtcttggactcctggataggcaatgcgtcgtcgagttcttgcaggagggacattagcttcttcgatgtgttcgcaagtacgac

SEQ ID NO: 179287 - DNA, 871 bp, Zea Mays
actggcgcagcaggaactgtttccatagccaaggggataactttggcactttcaacaaacttcaccttctctgtcgtaggcgctacaaccgtcttttctagagaatgtagcttcggcctatgactcgggaccttagctctctttggctttggtgcaccggaagaggtcgaagtagcaatttttctcttccctccttgttttcgagtaggaaaaccatagtcaggataaataaatccgatcacatcaaaaactctattcagtctctttttcctcgagcaccgaaggcaatggtcatggcttcgtcctccgccttcgtgtaggctcccagcagctcatcactagttgcctcgacaacctctagccaatagtcattcagctcgtcaaattggcttctataccggaaggtgtatcttagataaaccaaaccaccttcgctggagccaacaatagtttctttcggcatctcccagtcattcacatgaggccacaccttgtaagcaatgtgttcttgttccaaatccctggtatcgatgtaagtgcacacggtgttgaaagccattaaacacgcttgcacttcgttcccaattgcaatggacgaccttctaatgcagaagcgtgaccatatgggacgttgaataatgcacctcacatcttccctcactcagatcattcttcacatagaaccattgtttcatccaagagcccagccatttctttcgaaatgttggcacgagatatcttgcatcagagcggggcacgaagctatagcacccgaagttgttatggtactattccttcctagtttcctttgtctggtaatataattcatgaatattacagaagcacctagcacctggctctagcccttggc

SEQ ID NO: 179288 - DNA, 370 bp, Zea Mays
aaggcctttagcactgtgtgtgctttcattggcacgagggatttaattcaagagcatatagccttcagggtatggccacttgtggagagctaggatatgccgaaggagaccaccgccgattccagtgagggtggtctggtccgattgaagtataccttcagatttagggagaagtttgatgagccagacgattactgactgaagtgtattgaagctaccaatgatgagctactcgcggcatactccaaggtcgaatataaggctttgtccgcaactttcgggggtcggggcaagaaaagattgaacagggtatttgatgcgattggcttcgtataccctgattaccactacccgctacgagggcaaggga

SEQ ID NO: 179289 - DNA, 415 bp, Zea Mays
cttctcccacctttcaagcatttcctccttgaaggcgagatccttctcccacctggcaaggtccgtctcccgcctggtgaggttcgtctcccgcctgtccaaggactcttcttccgctttaagcttctcctcggcgagggcagcgtcgcgggccttgccctcgagctcttgctgcagcttttgcagtgtctccacagtcacggtctgctggatccgctgctcttccagtatcttgtccatggcactcatcttgtcccggagctctgtgacgacctcctccctctggttcaaggcctcctccttcttagccaacctcttctccttccggcccacctccagctcccaggcaaacaccttctggaggtcctttttgtaatccttgcggtcctgctcgagctcggactgctcggaggcg

SEQ ID NO: 179290 - DNA, 653 bp, Zea Mays
cgggtttctttacccatgcgggtatgggtattggtacaatttcatacccgtgagcgggtacgaggtttttgacgggtatgattttatcacgtgtgtacgggtatgtgtaaacattatccaccaagtatgtacccgttgccataggcaggtaggctgggcacctgttcgggcatcaccgctggccacgatgaacgtggtgcgtaaggccttacaaggagcacgacattgttacttaatacgaggtgatgagcctataactcctcaccgttcgtcgtcgtcgttgcagctattccctaaccctactagcctatgagcttgggggcatcatgctttggcgcacacgtggtgctctcccatagcacgacgacgtgcgtggactaagaggagcggtgtgtgaggactaggaggagaccgatgaccttcaagttggcgcacaaggagcaaacttttccaagcaacgatttgcttcaaatcaaatagaaactacctagatagtatcgtttgattcaatttatcttcctattcaagccggtaaaaacaatctgacatagtaacaatgatgcccaggcttcgaatgcgggctggctccgccattgtatactagaagacaacaccacacaacctactaagagtactagcattctagcaacact

SEQ ID NO: 179291 - DNA, 861 bp, Zea Mays
taaacatggcacctatgtaaatatcttatgaccatgctaagttgtaaactccgcattttgcaatgcacgagaaattggcataaaccaaacggttaccaaaaaatccaaatttttgcaacatatgaatacatgggaggggcaaaactatcatatatgtaaatttattttaactgtatggataagggaacatgagatagtcctataatttatgagagaaggaacatgaggccgaaggagtataaacctaacggttaccaaaactatccagtatgtcaatgtcaatatgtgacagacaaaactatcttatatgtagatttatattaaaggaacacgagatcaaaggagtataaacggaaatgtgcacaatacatgacaataaattctcgccgtcagcttccctcgtctatttgccacagccggtgcggggctccgggctcgactgggctggtgggtgagggccgaggggctttccctgctgccgcacgcacgtgagagccggatagggagggagaacgggatggggggcaataattgtggcgggcgcgtacgcatggaaccgtggggcttccccccgttacactttgaatgcaaccatgatgatgatgattgatgatggcgagacccgatccacgctctcgtgtactcgtcgtgtgtgtgtgtgaccaccggctcccggactggagttgtggcttggattgggttggttggatttggatggatgtgccctccccaccacctgcctccgttacggttccgctttttcgggcagcgaatcacgcatcgcggtttccggccatgattacgcctcgctcgctgaccttaacctacatcgttatttgttgattattactaggcactagc

SEQ ID NO: 179292 - DNA, 563 bp, Zea Mays
ttgctaaccaaaattgcatttgcgcactgcacattactcaaaatcaagctcatcaagtcacaaattaataagaattcatcagtgttcagtcttcagtggtgctcacctagcctgatgtttgccggactgccgtctgccggtgcctgatgcagtgatgccctgatagccggagtgccggccgccgggatgcacgatgtgctatatttgtagatgagttcagaaagttgatcacatgtgcaagaaaatgctaagcggaatcatgcctcaagcgcgtgctattctaagatacaggatgtgctattacataaaactggacgtgctagttgtatgtcatggcatttgcgacgtcctagatgcacgatgtgctatttcgtaaacctggcgtgctagctgtacaactcagatgatagggaaatcgtgctcccaccgcgtgctattcatagatacagatgtgctcttttgtaaacccggacgtgctagccgtatactctagtgctaagatacaggatgtgctattacataacccgctggccaattattgggcattacctagctgccatggc

SEQ ID NO: 179293 - DNA, 944 bp, Zea Mays
taaaaatcccccagactcagtttgatacagcaatggaccgcgggttaattcgaatattgttcagggtctcttatgtaactttaccagacgaagaggtatcggctgatatgagccacacaaaccacgatccacggtgaggatcagatctgcaatcaggtaaatcagtacgacttctccaccctcggatcaacttcaacgtcccagattctaaatagcctagattcatttactaacgaccgatccgaatcggacggtgcacgatcccctcacccgaagcagtacgcatcagattcaatcgcggccgcaaactcctgatccaacggctggttcgttttctcctctcctcccggctcaacatggcgccgccgcccgaaatcgcggtgacccacggctggagttcggccaaatccagtgctagggcccctaatccctcaatcctgacgacctacgcagtgccacaagtacgaccaagagggtggatgactcaacagggtaagagatggccacagggaagctacccgcagtgagaggcgatatttcggcacccgtaatgtccgttgagaaattgtgccatgcactgtgaccctttccgcccacggtcgatgttgcacccttctagagaacatggagacgctcgccgaccaatcaccgggaacccgacgacggtgcccactcacttggacacggtggtacagagctctgtcccctcccaatgtcgcgctcctcatagctgaacagaggtggtcgcgaaggcaggaaagaaggaggaaaggtcggagccgggaacactagtctttccctcccctttattggcgctaggatggcccaggcgccgcaacagaccccgcgggaatggcgtgggtgcctgctggattcggtctatttgttgagaggagataaaatgacaaagcaggcctagataccaatcacatggttgcgcatcc

SEQ ID NO: 179294 - DNA, 812 bp, Zea Mays
gggcgcccgacctagacccccacttcctaggggtcccacccgctagcctagtgtaatccatttatagatgtccaaatgggtcgtgtctgacgggccgacccgaagcacgtcccattttattgtatcgggctgggtcgggactgcaggcgaggcagtcccactggagttctacgggttagcttcgttcatgcatgtagcgtctcccagccttggtccatgagggcacgagttagaaccccctctcacgctggatttttgctattttcctgatttaatcagatagcctggacagattacgggccggtccaacacagctagcaggtcggcatgccgtgcctggaccacgactgcgacatgcgggccagtcgggcacgccccgattagctatcggacgtaacaggcccgtgtcgggtcggaccggacggcccgtttggcaactataagtccataccatactggaggccatgagccaggctgcatgaaggacgcaacattgaaaaacgctagggcttagtcgtcgcaccctgctacacacgcgtgactcgatcgtcgatcactcgatcgttcaccaggctcagctactcaggcatcaaggcgccatcacgccaggctcaccgctcacacctcacggatagggcggtggccagtggcacgacgcaaggcacgaggccagcacaggcaacaggcgcgaggctactaggatcaccgacggttggataagaaccatggataaatttctcgagagtgatatgcgagattccagaaacatattttaggtgttctctatacttttagtaatgatcttacttctt

SEQ ID NO: 179295 - DNA, 1218 bp, Zea Mays
ccccgagggtgttggggcaggttccccttctgttgtttccatggatgtccacgttggatcgccaccagtccagtccaaggaggttgtggtgacgcacctttctacggctcttgctggtctggtcactttagaggccagtgatctagatgtcgggagtctgccgcctgctaacgaggttgaggtccctctgattcacgccttggatattgttgctgctgatctcccctcatcaagtaatgtatcaactctccctgctttgggtcttcctatgttcctttccaatcttcaggtgagttgatttgctttttactgttcccgctggcaaaatagctttttttgcttatcttttcacaatcgtaggatgttcttggtggcgtatctgctcaactgaggtcctacggtgctcctgtccccgatcaagtttcatctctgatgcagtggaaccctctactgcttcaaaaacagatagatgatctaagggcgtcaaatactggttagtaggctcatagcttcctcatttattttcattacttggctcattttgaatcttgcgcttttcttctgctgctttgtcatatttggctcgacggtgctctgacatcaaagagaagtattcccagagccaggtcgacttaatccaaacttctgctttcttagacggtgcacgctccctgaattcctctctaaatgcgcagctcgactctgagaaaatggcacatgaggtaaactctcttggctactcctgctttgctccccttgcttcactgcttagtgttgttcttgcttgctggaggaaaaatgagcactcgttgcatctcgcgatagtttggacaggctgtatcatgatgctagctcctccttgaccattttggagaggagccattgttttaccatgtttgtcctagaccatcatcgcaacgagctgtgggcatctcaagatgaagtctcctgactcggcaagctgttgtccaccaaggattccaccatcaaggagttgtgtgcttccaaaaagcttgcaatgcaggagctggaggccgctcatctcactatcaaggtcttgggggatgactgtgtcgtcttgaaggcctaacgcgacaaggccatggataaggtcattcgtgctgagcggatcttgatgaggagacctagcgtcgtggtgcctgacacattgttgctgatgtcatggttgcgcctaacgctgcaagccgtccatcttcc

SEQ ID NO: 179296 - DNA, 473 bp, Zea Mays
tgttcaaggtgatccagagcggtctagttcaattgaatgattctgtgagcaacaggggacatgagggaagctagaacatcaatcaaagaggctcgagctaacctgcagaaggctggccacgatgcggtagttcacggtgtgcggaaaaccaatttgggggaaaagagaaattggagctctctggtggctaatcggaggtaggagcgggtgcactggcttcgtgattacctaatggagcttatggcacgcttaatttatagggcccgagggcgatggctcttgaatttggaatggcgcgctggcggctggagaaaggggtggtcactggcgcagggttaccgtggcacttcaccttggcaagactaccggcgatgaccggacacgctagggtgagtcactgcgaggaagtactgcgtttaggcacgtggcactcgagcggcaggcggctaactccggcgaggttatctggaccg

SEQ ID NO: 179297 - DNA, 926 bp, Zea Mays
gtccagggcctttgtggaattacttttacacagcagtgggtcgcgggttgttttctaattttcagaagggctctttagcaaaaagacaacggcgaagaggtataaatagatttcagccgttggatcctagttcaagcgctcagatcagatcttacttaaaacgaaccggatttcttcaggagcccttggatctgtatccaacggtccatagcctatctgcgggttggatgggagggactgatccatccgtcggtccccagatcaacagttctgattcactgcaaccacacgacgccccagcttctaatcccaaacgtccagcagggatccaacggcccaggtaccttctcctacctccagcttcccaggcacagacaccgcgtcctccccagtgctctctctctctcccccgttgatccaccggtgctggccaagacccgacaggggtaccccggcgactcgccggcccctaggaccgcctccttaccatgaccgccacacccacacccgaactcccgatgcgcacctaacataacgcagagaaaaaaaaggaggctcaccagcgatggtgtccggcgttaaccgccgatgttccgccgcccgcgcagctcccaatgaaagcgttgtgccgatggagcggaggaacggcaaccgcagtgccctaggattcgacgggtgaagtgcagtggcctgcgctagagccctcggctggacgagcgaccacgccgaagcctatgaccgccgtcgtcgctcccatgcccgaattccagacgccagcaccattgtcgagtgactgcacatccaccatggccaccacctgggactccacggcgaccttgtgcagcttcatggcgtggtctaggtgccgtcgcgatctccggagctccctcggtgcgcatgaaatggcaggaatccccgtggctgca

SEQ ID NO: 179298 - DNA, 647 bp, Zea Mays
aacgcgatcgttcgcctggaggtgcagtcgcgccctggtcaagaagtcaaccgggggttccggccaggattcatgtgcgctcggctgctgggaaggtcacgcgtcgcggtgaggagcaggacggaggtgccgcacatgctggtggcctatcctgagcgcacaggtcgtcgctaccgcgagcttaggggtctgcgaggaagagagggagaaggagaggggtcctgcgtacctggtaaccgctgcccttcacgcctgtgatctggatccggggcgagacgaggagctttgcgacggctagggatgcatttatagaaaagagaggatgtagaaggcggttgtaaaatttgtcgcagatcgcgtcatggccgagtgaaaaaagacggtcacgcgacgagttgcgcaatacagtgtacgacagaggctgagtcagacggatggtagaaagggttagataaaattagacgaaaatggttagagctggctcgcggaccagagatcacggggtggaaggcgaaggggtagacgaggatagacaaggattatgtcgacgacgcgagcagcatgccgttcgcgggaagaagtggttcgatgatctcgtgaaaaagagcacgagatcgggaacggatcaacgagagaaagagatatat

SEQ ID NO: 179299 - DNA, 410 bp, Zea Mays
ctgaacttcaataccaagaaaataatgtatctggccaagatctttcaaggcaaaatcagatctcagatcattgagcattgcatctatagcttcttgagaggaactagcaacaatgatgtcatctacataaacaagcataaaaatagtatcagatttggaagcctgaaaacccagtttcaccaacttttcactgagtcttgaataccaagcccttggtgcttgtttgagtccataaatggctttatcgagtttacaaacatgatttggtctcaacttatcttcaaatcccgacggttgtttcatgtaaacatcctcctctagaatgccatgaaggaacacattctgtacatctagctgcctcaatgaccaacctctggatactgctaaggataagatgactctgatagttg

SEQ ID NO: 179300 - DNA, 578 bp, Zea Mays
gggcagacctataccagggcttggtggatagcatgttagatggagatatcagagcagaaaaggttgggaagcgaactgtgctgtctacatcatttattggcggtccttgtgacatgaaacatcggtatatggatgctatggctctggtgcggaagtttggtaaaccgaacatctttcttaccatgacatgtaaccccaactgggatgagataaggagggagcttctccctaggcaaacaccgcaagattgtcccgatcttgtagtgcgtgtctttcatgcgaagctacaggagttaaagcataggctgactaaacaggatattctcggtaaggtccgggcctacgtctatgtcgtggagtttcaaaagcggggtttgccacatgcccattttctactcatcatgcagaggaagtacaagctaacgtgccctgagcagtatgaccttttgatctcagccaagatcccacacaacaagtaccctgaactacgaaagatggttatcaagcatatgatgcatggcccgtgtgggtcgttaaaccctaactgcccatgcactaagggccatgcatcgtgcaag

SEQ ID NO: 179301 - DNA, 300 bp, Zea Mays
agcctcatcagtgcgcactgagctaggttgtgaatatattccattcacaggataatcaatatcctttaggtgtccaccaacactaggttctttaccaacgaatagatgatctgcatttactatctgagaaggcctagccttcagctgcttgcaagcgtcttaatcccaatttgtggccatacttctcccctcttatttacaacaacgttgcaatagggagttaagtggttttccatgtaaccactctttctggcacttcctcataggattaatttgagtgacacctcatagtaaatgcac

SEQ ID NO: 179302 - DNA, 605 bp, Zea Mays
cttgaacccgatacgcgcaacagggtgcggagaagacatcaagcccatgcataccgccatccacccggggaatcgaccctcatccccctgcccacggcgcgcagcgacaccgctatggaaactccaaatccgatgagagattccggcccctatgctggccattaacgtattacactacacgggtgatcaggaatggtccaggggcttcttaccaataacggtgttgcggtgatgccgtcccacagcacgtcggccacggagcggcaccgatgaactcgcgacggtggtcccagccgagctactgaccgcgtgtatgactccctgcccgattactgaagctctagagaggtgggataggaggaggagcaaacggcgcccagcttatagcccttcccccaggtgcggacggacctcaacgacacccgaggtccacggaggcggttgtgtacggtgccgatttgagggggatgggatcactgccagcccggcctacgcgccagagaaacagtcggcggagcagacgcgcttgcggccccagtcgttagtgtcacacgacgcgaggcgtaggtgaggctgaccaattggacccacatgtcggcctccca

SEQ ID NO: 179303 - DNA, 530 bp, Zea Mays
agatagaaatgcaaactcccattgacaactcttggtattcttaccgaggtatcgagaagctcactctttgtatgagtccttattagggcccctcgcacggatgtccttgaaagggccaagctcccggttggtaactccgtgtatagcctagagcctttttcatgtgcaagtcggtcttcaagatggcttctcttggaccgcccccatcgtcttcactatcaagtatttggtcaaaccgtcatcggtctcatttattccgatacacgatggtagccacaccacaatgattgatgtggtctcacaagactacaagcccctccatgtataacaatggtgaacataagcattgagtggtaagagatatgcaaacatccctaaaaactaggcctaaacctagagcaaaccataagcagtggtctaactaacctacaaacttcgtaaaacgcctacactaatcacctaatattgtcctaagcacttttgatggctagagcataaatatatgagcattatctcttcacacacttccc

SEQ ID NO: 179304 - DNA, 706 bp, Zea Mays
ctgcaccagctcctcaagttcccatgtagcctcgcgctcagaatgattagtccacaagactttaacatacttaattgatctccttctcatgacacgctccgaggactccaagatacgcaccggacgacactccagagtcagatcatgctgcacagcaatcggttccaactcgatttgatggtccggatcctgcaaaaactttctcaacatagagacatgaaataccgggtgtacccctgccatggaatccggcaattgcaagcgataagccaagctaccaacccgggccaagatagtgaatggtccaatgtatctcaggctaagctttccggagacaccgaaccgaacaactcctttagtaggtgataccctgagaaggacttgatcacccactgcaaattccaagtcccgcctcctcacattagcataactcttctaacggctctgagcggccaaaatattctgacgaatttcctgaaccttctcagatgtctgctgaacccaatcaggaccaactagagatctctctcccaaagtctcccagcacaaaggggagatacatcgcctgccatataaggcctcatatggtgccatcttgatgctagcctggtagctgttgttataagcgaactcggccaaggcgagatgatcatcccagctacccttccaagacagaacacaagcacgcaacatatcttccaaggtt

SEQ ID NO: 179305 - DNA, 483 bp, Zea Mays
gggtgcgtttggtgcgtcgaactgcttggattgtgtcggctatttcttcttttgaggagtttattaattccatttttggatgcttgaattggagaaccgagcggagttagagtcgcgtaacggtttccccgcgtttcttggccgctgcaaggtgatatgtcttggtactgtagttctgtgctcgaatttaagcattttcgcgaaaacccttttcagaaagttcaccccgtggatcatgggtctcttcttcaattgttttctaagaacaagtatcagttgttgggtttcttgtcggtagtattggtatcacttgtcagtagcctgatatctgaaaaaagaataggtttcataattgctctggtgaagcgaactgaattgttagtgctggtttcatagcgtaattagtgaatcgatcagggtcccgatatgaatctagtaggatttgttcagcgtcaataactgtccagatgacgtaattttgct

SEQ ID NO: 179306 - DNA, 659 bp, Zea Mays
tcccaccaaggatgaagccaaggatcttcacatctctgagtctgatgaatattggaaatccaccaatctgcacaagtactacatgtacatcaattccctccacagaatgactctcatccccaaaggggaaatcagatgaatatcctgggagagagcaaagtcctgctctcattcatgaagccaaacagttcagaaagcttaaatgtttttgatatgatttggcaagagatcatccatgctgcctgcttccctctcaagggatgtcttcatgcccccttcatcatgaaaatgattgaagtggtgacacagtttcgatttgaaaaagggacaagacatctctgctatacccccttctagattgacccaaacaatccagcagggcgattgaggaaagcccctgccagctctcgtgggcaagctgctgctggtacctcgcgtccctctcctggtcgcggatctcccacaccacgtggtcgtggtcgtggtcgaggtcgtggtcccgggatgggagctcgattggctcatggcattgcagctttcttttctatgtgcaggaacatctcttctgatgttcatgagctagcgaggcggcagcgggagactgacgacaacctctgtcgtcaggcctcttccatgggtatgccttttgctccccgctc

SEQ ID NO: 179307 - DNA, 441 bp, Zea Mays
caattggtatcaaaggctcttctcttccttggcgtgggttgtgtttgatcttgcgaatctcggcaagggcgcagaggttggagtcgtgtgttgcagagatcacgtacatccctggttggaggagcggcaacagccttcggtgtggaggagcggctgcgacttcagtgttacgacagcgtcaccaagccttcaccgacgactcgctctgtcttcaacacctagggatttcgcgaccgcgcgcggtctttcgacaaccatcacggttctgcgtcaaaccctcgtcgtcttcgatttctgggccgacgagctgtgttggctagggtgtctggtggcgtgtggtggcggtgattggatttcaggcggcgtgtggtggcagtagacttggggtatctcagctgttcgacacaaggcatcactggttttcttcaatccggttcgtcg

SEQ ID NO: 179308 - DNA, 362 bp, Zea Mays
ctcaaacgaaggagagtgagggatgaactgacctggaaagggctggccgtggcgagcttggttctacggtggcggaaacagttttgggggaaacaaggaattcgggcaccctgatgatcgattgctagcaattcttggtggctggttagctgatgaccttgcggagctggtggagggctcaatttatagattccagaggcggtggccgtgaattttgggcaagacgcacggcggtcggaggtggagaagaatactggcgtgcgtgaattggtgtcccatgtcgtggcaacctcaccggcgttgattagacagcagtggggagttacggcgatgcggtggcgtagttaagacacgcggcgcag

SEQ ID NO: 179309 - DNA, 418 bp, Zea Mays
gccacgacgaatggcggcaccgcaattacgacgagaaattccggaggcgcgatcaaggatttccgaccggcgcggcgtcggacacactcccacaggccagaggaagcgccgaggcactatgcaagggctcggtcaggacgcggcgaagatatcacggcggcgatgttatgcggtggtcaggacccgatttccccccaaattacacggtggtaatcggcttctttgttcgatttgttaaggggcgagttgcagatgtatttatagagctagggatggggcatggtcgagaatcccggcggcttccacggcgagagcacggaacagactcaaggttatggatgcgttgatacggtgggtccacgatgaggaggtccgagtccggtggtgagggtttcaggcggtgataacggtgggcgag

SEQ ID NO: 179310 - DNA, 385 bp, Zea Mays
gaatcgaaatgggaagacaaacctcttggagaggtggattcatcgtttggtctccatcggtcattttcttcttcttccttgcaagggttagtatcacaaagatcaaaggaagtagaagcacaaaatgaactatcatgtttggactcatcaaatttgatcttaattctagtccaaatatcatgcgcatcatgaatggattcatcataatttgatatgaaggcatgataatcttcattgctaagagaattacttaagatgtcataagctaggtagtttaagcgaaaacatctttgatcttcctcggaaatattttttctattataactagaagggaagatactcttgtctataatttgttctaattgtggatctatggttctaaaag

SEQ ID NO: 179311 - DNA, 1184 bp, Zea Mays
tgaaaaaggaatggaaaatgaaaaaaataaaacaaaacccagctaaatgggcctcgtatcagatttcggcccaccagtggatgtccaccgcgcggccctgtcaccttttctcacgaattggtcaccgttgtggcgggcccacgcgtcggtcacctgccaccgtgcgcgcgccctctgaccagtggaccccgaccctcacggctcagtcagcgctcgtcttccacctccgcagcggacgccggacttagcggaagctcgcgccgagtcgtagggccgttgggaccgattccgtgctttcctgcgcataaagcctctactgtggccctaaccttcgccgccatagcttagaaaccatcacggcagccgccgagagaaagagagaacaaatgcctgggcgctcccatcgcgtggaggaccttcggactgtgagcgtcagtcccgtcttcaccccctccgcgacggtatgttccgtgccccttctctgtagtatgataggaagtgcgagacgtcttagcctaggcactggcgtggatgcggtagggcaatgctccaggcgctgtcgaggggatggcttgccactggatggcacgtagtctcgagcagtctgtagatgaaggcttggtgccgagctagatgggtagtgggaggcgaagaacgttccgcgccttataacggggactcgaatggcggactcgggtcatcgctgccagatccttggcgctcggccgcggcgaagtggactggagagagaaaagagagaagggagagaaccggtgatgaagacgcccgacatcacttgatcatgcgttggacggtaaggattaaagggatagggatgaagaaaccgggaccgtaggatggtgagtggagggggtagattaatctcgcgtacccgccgttcatcactaatcgcacggctttgattagaagcaggaaataccccttcatcccaaccgttatccaccgtagaccggcaatctgacgactaaagcgaaatagtggggatcgtgcgctgtgagtcgtcgatctcagatccgacgatgactcgggaatcaggatttatacccatcgccggtctaatccggaccctcggttctggatctagcggccgagatctctctgtacctcttcggcctgcaccttttgctaaagaaaccctagggacttaataaactaacccgccg

SEQ ID NO: 179312 - DNA, 702 bp, Zea Mays
acgatgcacaagaaaaagggaagagttcggatagctgctcaccgacaatcgcgacccgtagtgccttggccacgaagaggtgctgttctccgccgcggatgcgttccggtgaaaaattcgccggtgccagacgctcccaacccgatgccgataccgcggaaacaattgccgagttgaggcggagctccccgaccaactcgctccatgcacaacacttatcccagcgagatcccacacgtccactcacgacagcaatggtggtggcgattcccttgcgaagtggtgaactacgaacgtagggggtgttaggttaggaaaggggataggtcgtggcggctcaactcctttatggtcacgagatggtgcgcaggttcaggtaacggagctccgaggcccgcggccgcttccaccatggtcgggattccgttgggacgaacgtgcagagcggatgggcagctgacaacactggcccacgcggcagtgagatggtgaacgggcccgcatgacagccacgcgcgcgactgagcgaagggaacagggtggctgacagggggcccggcttgtcggcgcggagtggaggtaacaggttgcgtggtgtaaattgcgtgttgggccgaattagaatccgcggcccaggttggcttctccccccttttcctttttcttttctattttcctcctatttgagtctcaatttaaatt

SEQ ID NO: 179313 - DNA, 529 bp, Zea Mays
gaagcgatagatggcgttgacattgttgtagtacacaagcatacttcgggcgagggagttatgaagattttagaggagctgacgaactagcttgcatcagctaccccattagcaacaacacagtactcaacctcagcaatgaagcgggagacaatgggctaacgcttgaaggaccaaaccgtgtaggcagagatagaccgccaagtgtccaggcacccgacctatttagcatcggtatagacaaccaactcatgcatggaggagtgccaaagagctcgtagtcaacattaccttaaagatagtaaaggatctgcttgaccagacttatgccagtgcccctaggtacgggtacttgaggcgttacaacgaaactaggcatgtgcggagagggtaggctacggggcccaccttcaaggtaggctaggtcaacaagaccccctgaagggatggagtacatgatcgggaccctggctacgcatcaacctagggggtccctcaccacatatacctttgccatgcttccttcaat

SEQ ID NO: 179314 - DNA, 2468 bp, Zea Mays
agacaatagagactttctttgtccagacttcatctagaccaatatggagtatgaatcctaatctaaacaggttcctcagatcatgagtactctaaaattgaacccatatataataatcaaatagaaaaggtaagagtcgttctgctatttattttgctcgactttctttatttagttctctatcaagagggagacaaaaaaatcatgtccatgtgttccttattttatattctccgtccgtttacaaagcaagcgaactcccaatttttatctccttttttattcaagcttgtagagttcaaatattttacagaaacgtgatggcaatctttctaaatatttttgtacaaatattatgtagtagtaacatgttcgggcttgaactccgggtgaagaacgacagagatatatggtatatagcctgagacaccatacatacatgtatataatgaataaatacatatatattacgccgtaccattattgttattctttagtttgatttgattgagtgaagctcttcagtagattcagatgcaatgaactgcggtgtggtgtactggtatgacctcgtgacattgaaaaggcggcgggcacgaggacgaccatgaccaacacagcatcgtggtgcacatgctagacaacaagcgtggcatgagtcggacgtaggtggctagaccgaggtcgtcacgggagtctctaggcacttgacctggttcgctttgacgacagacgacgttggcaataagttgtcatgtcaaggccatcggagtagctccaatatgacaggatgttcgttttgggcaactttaggtgcactctaccctatgactccgcaatttctagccacctcgccgtggtcgtatctcggatgtggctagacctttaagtttaattccgcaattatttcggtcagccaacgttaagttttagaaaagactattcgccccctctagtccaccatatagaccctacagcagcgaccgatgacacccataagtaatggttataactagtgcttcatatatattgtatgcatctcgttcattttttattaatcatatcctagaaatgatgttcgtacctaggacgatcggatcaaaagttgctgcggcattaatccatgatcggaatgctcgacaccaatattgggaaccatccacaagtgtgtcaagtattgctcaccaatttctaaaatataattgcgcctaaaaataaaggactaataaatacatcaccgaacatacatcactcgtcaacacaagacatctcattgtttattattcaatatattgagtaggacactatatatagattcaacacatacacttaaatgtatgaaatcaaccatgaaagcaagatcagacatcacactcgcattattcaattgatgcttgcctttcatatatcaaggcataaaaaggtataaaggtagcctttgctagtaggcaatctagcctattagcaaagggtctttatacctttttatgccttgatatatggagtttcttcaacgatttcctcattagtgtttgggtccacgctgaagtagatgacaacacgtatagttccgggtgcgagttggtctgaaggcctcggggtctcgttcaaatccacatctagtgactcaaagaatgttacatctggccgctcttgttctattacttcaattgcatcattaatctccttgccaatcaactcgggccaactggtcttgtcctgcgtagccatgatcacgtactatccttagcttttctctcttttgaaactgttataatatcaataagaatcaataatcgagcaacgtcagtgtaatgaatagaaacataatatgttgttttgtgctaatgctatcatactttcatagtaagcatgtcttaatcgaatgcactacataactaccgagctgcaaacagtctattaaaatgctaaaaagatacttttttcaaagcaattactaataaagaaatacatgataacctgtgtggaagaagaacacggtagcctttggtgatgataagtgctctatgtataggtgtgtatatatacatgatgacatttgtattgttgcttggatgctgtcggtgaaaacaatgcaaatattttgtccactattaattaggaaacatgatcatattgcccttttgctaccaataactgtagttatctaccataacaatgcatgctttgacttagtaaacatcatcatatctccttgttcacagggggacagctgaatgtacatactgtacacagcccgtgactcaaacaatatacgtgtaatccaaacgaaacataaaaaagccctagaaatagtggcaacccgctaattcatgtcgttgttgtccagctaaaatttttgaccccacatgcatcgttttctaacctcactcaaatccaacagatgccagacttttgtggtttctcatgttttgttatttttattttttttcatatatttaaatgcc

SEQ ID NO: 179315 - DNA, 594 bp, Zea Mays
ctccggacactgggggtgatgtagtaggcacgtccagctccaaccctccgccttctccggaggagatggaggtggtgttcgagtggtgcctccggtcaggtgtcgagcaagaagcggcgcaagtcccgctccctcgcatgctgtcccgagcccaccaggtccttagtgacactgggcggcaatcttgcgggagtgggaggcgctagaggctgagcaccaacgccttagcgactggcgcacccaactggaggagcgcaccaagtcggcgtctcgacagttcctctccgagcggtcccaactcgagcgggaccgcaaggagtacaagagggacctctagaaggtgtgtgccagggagctggaggcgtcccggagggagaagaaggtggccaggagggaggaggccgtgtctcagcgggaggccctcacaacagagttccgagccaagctgagtgccgtagtccaaaccctggaagcccagcgggtctagcagaccaaagctgtggagaggctgcaaaagtggcagcaagagctcaagggcaaggccagcgacgccgccctcgccgaggagaaactcaaggcgaaggagcagtcctt

SEQ ID NO: 179316 - DNA, 551 bp, Zea Mays
cgccgtagtcgtagaccgcgaacagcgacatagcccgcgccggagtcgtctgcgcgcgcgcgcccgccgtgtaagcgcatccgctccctctcccgtttctctgtccccaatttttggatttgttttgttatcttcggtaatagactggtaaaccccattttccccccaagtgttgcaactagtattattcgttgattgcaattattaattattgtattttatgcggatacatttcatttgaataagcagtttgtgttctagattatcaactcagatgtttccactttttttgcaactgcagtgtaccttttgttgcaactggtccatcacataatttgcaactgtataattttaactttcaacccacatacatcatcactgtcttttataaatgttctcgtatacaactagttatttgtttaaattcactgttgcaactgtcccagtagtaattattttagcagtcttgttgcaactggcttatggcgcatgtggcaattctgtcccagtactaatgtgtgttgcagcattagtgtgtattgcaactattt

SEQ ID NO: 179317 - DNA, 628 bp, Zea Mays
ttgcgctccacctattcgccgacatgcgcaatctcctcggtgtgcccaacacgctcaacgtgctcaccgcctacccgcttctactcgtcggggttccgggcctcgtcctctgcctctacgacagcgggtgcttcggcgtcaggtgccccccttagcacttaccctacctttgtttgatgaaatgtctaaagaagttcgtcttatgtcctagtcctagtttagtaatttgcttacacttgagtcaagtgaacagatcgatgatccttacattgaataaattttttggctaaccaatgttttttggcatagtagttgtaaaatagtccgatcttttgagtcatgcttgaaagcttcagaactcagaagaggtcaagaggaggcaataggtgattaattgttttttgctattatgtccgaatgaggttccactaatcctgtggatttttaagttaaacgagatggcactcatgaatcatgttgagaacctttgcttatatgtcttctagccatctgcttgcttgcttgaggaaatgctttgcttcaaaatgtgcaatttaatcttgccatagtatagaatggctgggtaatggggatttgagtcatgggcgttcaattaaaagtaggttga

SEQ ID NO: 179318 - DNA, 454 bp, Zea Mays
gtccaattggttggcttgggaggcttgaccaggtgacatagaggcggtacacggaaggaatttgagaatggtgcagggacttacccggttcacgtttgtcggtgagcggaagaagtccgacgaggtgattcgggtcctccggtgaggctctgctgggtctgagggcttagggagcttcgcgggtttctagcgaaggtagccgagctgatatcgcgggctgggaatggctggggtgagctggccatggtggccaaagctcgggtggcgtggcgggcggtggcgcgtcatgcttagggaaaagtccggcgaagtcgggcttgggcgggactgtgagcgtgcgggggagtacgaccgaggccttggtgctgctttataggcgtggcgcgcggcggacttgaccgtgcactggggcgagcgcgcacgcgggttgggcgaacgctggcgtgccaactag

SEQ ID NO: 179319 - DNA, 622 bp, Zea Mays
ttcttcacaacaaagaaactattagaaggatagctaagtgggcgtgcgagcttggggctcatgacatagagttccggtcccgcacggcgataaagactcaggcactggttgacttcatatcggaatggactgagcaccaggtcccggaaatcccagaagtcgctgaagtatggagaatgtactatgatggctcgttgaagctacaaggagcgggcgcagggattctctttattgctcccggaggtgaacaacttaagtatgcactccaacttttgtttccaacatccaataacacagcggagtacgaagcactagtccatgggctgagcatcgccatttcactcggcatcaagaagctaatggtgtatggcgattcactggtagtcataaatcaaataaacaaagattgggactgctcgaccgattcaatgggcaaatactgtgcagccgtaggtaagttggaggacaagttcgaaggattggagttccatcacgtggaaagggatcgcaacgcggcggctgatgcattatcgaaactgggatccagtcgggcccaagctccacctgggattttcatccaagaaatacaacaaccaagcatcatcacggacaagatggaaga

SEQ ID NO: 179320 - DNA, 549 bp, Zea Mays
agacttgagttgatgcttatcccttccttgatgaagttgatcatgttctccggtcttgtctcattgattaggagttagtgtatattatcgggctggggaatatggttaagatagatatggatgagatagactacatgatgtcgatcaaaaacttgtttgatgtttaggtggggatagatagattatgtaatctatcatgacactattggttgggttagctcttatgttcacggttgagttgcactaatttaggttttaagtgcatgaggggagaacaaggtttataggagtaggatcaagtttatttcactagtgttaacttgttaagtgattgtccttaggttagctcaacttgaggttagaatttgtttagattaacttattaggttggatcagatctagaataaattgatatgactattttagactagataagatccaattaatttgggttagatcatgatcatggtgggataaatcatgtggttttagtcacacaaatataacttagatctgatatcattattttggattagatcctagttgtta

SEQ ID NO: 179321 - DNA, 761 bp, Zea Mays
gtttagtccatgttcacatgattaccttgtcttggtactctgtgtataccaaaacaagaaatccatgtttgtgtctccaatgcaccctcttaagctatgaggtgcatgagcaaaaggagccctaaattggagacaacaggtgctctcactccacactacctaaaagaatggatctcatggcattcaggtaaaaggcaaaggtatggagaatagaactatgcaatttcattaaatatcttgaagttccattgattgtgatcacagctatgttcttgcctctgaattggtagtatcctggcttaggtgctccttactttagaatgttgtttcttttggtgtacctaagaaaccttcttaatcatggtgtgcttagacattgtgctttttatgcatgatcttgtcgttttcaattggtatatgtggtgcaatgatcatcatgtgtgaagcatgcctaggttacttgtaaaatattatactccttgaggcatgcattgttgtattaagtcaactattcaattggtatctttttgtaatgcaattgatatattatgcctagaccaaggtatgctgtgatcccctctagttctgaggacgctagaatgtgcaaagggcaagtcattcaaatacttgatgcacaactttagggggagcacacataacttgtgtcttttgagactaactatttctggagtgatcctatatagtctcaaggtggaaaagggaggatgagcgagaaatggagcaatcaggacttgagtacc

SEQ ID NO: 179322 - DNA, 1146 bp, Zea Mays
gacatgctcacgcttacacgatttaaggtgatcactatactgtactaacggagcaatcgacttaagtcaaaaacgcattaagtcgatgcgacatgctcatgcttacacgacttagggtgatcactataccctactaacaaaacagtcagctcaagccacaaacacctcaaaacaatacaatatgcttacatattcgagggtgacctcggcgccctgctaatggaacaatcggtccaagcatagcgtgatcacacgcacgtgaatttcatgatacattgtcttgctaagaatactaactcaatgaaaagtatttttcatctgaacaaatcactatgcaggagcatccttgcagggaacctcgccagtaggattaccagaggaagaaggtttgttcacaccagcagaaacgacgagaatgtcagcaacgatgtcctcggacaccacaacaccaggtcttctcatcagaattcgcccggcgtgaacagccttttccatcgctttgtcacacatcgctttcataacgacacggtcatcctctaagtctttgatgttgtgacgagcgacttccaactcttgcatgacaagtttcttcgaggcgcagaactccttgatgatagaatctttcgaagacagtagcttaccaagtcatgacacttaagtctaggaagcccttaactcatccctgtgattgtccaagtccgacatagtaaagcgatggctcctctccaagatagtgagggaattgctagcatcccgatataatctatccagattaccactagaatcaagaagcgttcgcctctcctcgtacaagaaaaaaggacactgagcattgaagcaaaggggtgaaatagaagcagttaaggaaatctacctcatgagccatcttctctgagtcgagttgggcattcaatgaagagtttagggtctaagagctgtctaaaaatgcagaaacctagttcagatcagcctagccctgggcatacctctcctcagcatcagagcaccgctgagtcaaagctggtgaagcaataggaaaagaatacaagatgtgaaatgagagaaacaataaacagcaaaaggaaactgcagacccactaaccaaagtttgaggcctttagatcatctatttgcctctgaagcagt

SEQ ID NO: 179323 - DNA, 623 bp, Zea Mays
gcactaacgaagaaacaaatctagctaccacgttaggtggcatcgtcgaagacttggccatgacatgcctggacgtcgatgataccatgtcgcccgccagtatttagatggcaaaagtgagggccttcgcggttaccgagggtgggtggcctatgggtggaaaattcctagggtgctggtgaagactttgaattgagtatgctagtttggacccttaaatattttccctatggttgtctcattgaggatattttaccagtgctcatgcagaaagaccaaagggaggcctcgaagaaaagaaaggcgccaaccggaccgatggatctgtgacaggccacagaggccctgctcgtaaaggtgagtggggcgaagatgagtgcccatagtgttggaggcacagaggcaagtggccaagtggtggccctgaaattggggtgtcccaatcttctcctgtgacaatcaccattgaaaagacgaagactaccacaccacaactggtgtaatgggttaaagttgatgaggtggttgctacgacggttgcagacatatcagtggatgattaaatgatcaagggggagaccgagtttgagcctcaactctggaattggatgattacataacca

SEQ ID NO: 179324 - DNA, 562 bp, Zea Mays
gatggtgctacacgtattcgagacaaagacgaaacgatggaagcagttcttaccaagcttggcggtgcggaattccttggccacagagaaggcgggtctgcggcggagttacagctccggcgagtgattcacaaactcagaagaggttatgcgcctgcccctgcccacaagcaagccccaccagttcacgcggtgatctccgagcagttgccaaggccagaaacaacccacacccgagatggtcaacggcgacggcaacctcaattcgcttttcactaaactcttcttttgccgatgggtgagtttcaagcgtgagggtcagggttcaatgcgatggtccgcgacccggccttaaatagtcgaaggtgggagcgaagtccgcgcgtttgttacaccgacctccacataattcgcggtggttggttctatcgttgccgcacgaggtggaggacggttctggcctccctgacccaccagtaagagactaaggcgggcgcgacatgaaaccgtgacgctgatcagaggggcccaccagtcagcgaaacaagaaggaaggagcgtg

SEQ ID NO: 179325 - DNA, 381 bp, Zea Mays
taggagattaatctcagccccataggtgcgcaccagctttagcatgcaactcggtgaaagtgaaatctgcttcatcgaaaaccacaacacgagaaatatagatgtgccctatggacacttcaaggcacttatagcctttgtgcattgtaatgtacccgaaattcttgatcggcatagagagtgcgagtggtgtggttcccaaggaattgggattcgatggcgagctagatcatgcgggcggatgtgcggcgctcggagacggtgtcggcgaggtcgccggagatggcaccaagaagccaggttctgacgacacaattcatccgcacctaggaaggagaagccgaggcgatggagtcggagaggacatgctgttccagtgag

SEQ ID NO: 179326 - DNA, 1000 bp, Zea Mays
gcgccgtgggaggaagactgactatcttgaaattcctctcaaggatagtatcaagggatggcgcttggagtggtttattgttgagaaccatggaagttctctccccccacggtcggggagacagctggatgttcgcactctaagttggaccgagtcccccacttatcaggaggtggctgaggcaggggctttgctagctgaagtttgactgttgaaggacaggggtctgactgcagaggttgtggttgttgattttgtcttcaagaacattcagccattgaaggacatggcatacccggcttatctgtacctaggtctagctgattcaactcgggttaccaacagaagaattcccgctgtagatttggtgaaccgacttgagatgattcttagaggcaaggtatcaaatgttggtgccccagtggcatactcagcctggaacctgcccccttccaaggccttcactctttttgtgtcgaatacacctgtcgctgatggcgggttgggccttagaatgtgaccctctgctgaagaagttagcgctttggttgcctcgctcggggaaattcctgatgatgaacggcaggtccactttgaggtgcctttggatcctagtgatgcagagataagtgttatgcttgatatgctggctgaggactcttctgatgctgctcctgctgggacattgatggtggcgcctctcccagaagctggtacaaccttggatattcagaaacctgtcaatgttcgcccgagacgcccttgccgagccaatcaacttgattctcctgctgatgagcagaaaaagaaaaagagacgccttcggcgagtatctagtttggatcgggacgttggtccttcggttcctgctgctgaggaagtgcatgtgcctgaatttactgacgctgaccccagtgggtgtgctccatctgatgctgatcccaatgggtgtgctccatctgctgttgatcccaatgggtgtgttgtttgcgttgctgat

SEQ ID NO: 179327 - DNA, 396 bp, Zea Mays
tacactagcaagacagggcgaaggagaagttggtcagaaaatctgcacgacgaccaagagaagatctctgtctgcgacgacattacttgtttcatgtagaatgttttattactatattctcgggctcacctgttggggctcaacttccttgtatgtgccccatttggattataaaagagagggcatgcaatgttataatggaactacacaaagactcacagacaatacaactcacagtggatatagggtattacgatccagcggtccgaaccactctaacccttatattcttgtatccttctggctaatcaggtgatctttaggcttcctcctcatcttagtatcggagcaggtgcactccgccacccgaccggaggatttttctctccgacagtg

SEQ ID NO: 179328 - DNA, 356 bp, Zea Mays
aggcaccacacagctccaaagtcaagctaatcactgaaattcagcactggccactattccctatctgaaaatttccaaagtctgccagccttccttctaacaccatttactccaccttttcatgtagtaccaagaccatatcccttaaacaaacttgtaccctaatagctactctacaactttgttacaaggagtatggcttaatacttcataaatcagacacaaaggagctcccaaagttgctaaaaacacataacttcaggctttgaaaataaactaagtccagaattctagagtaaggcatagtaccattgaaccaatttttctaccaattccacacagctttagggttgaac

SEQ ID NO: 179329 - DNA, 504 bp, Zea Mays
tgacaaaccaacgattgggacatgcagataagatgatcgagaagtgacgtggtaaggcgtctcctcagtagcacatgcctgtccagaccacacatccaaagaggtagatgtcggtatagttgatgtcagtgttggagtagatatgtgcggggttgatgaatgttgggcgactcaaccccgatagattgggcaaatgatataagcaacaacaggtgagaaccaatgttaatggagggcgacagggtaggtcatcaagaggtgtcttttggttacacatgcaacatggcccacatgtgggctcaccatgcggattagacaaatctcgtcgacgcgggagggagcggtagtgtagactgtagagacgacatggatcggcggtggggcaggttggcgactgtggaggacgccgaagcgcatggttggggcgtgacctggctcggccgccaacatgacagcacaaggacagttcacaactaagcgtggccgcaccacgatagcacgggg

SEQ ID NO: 179330 - DNA, 701 bp, Zea Mays
acccgcgtcaacaccagctacgcccctcagccccggcagatcccggtctacccagtggtagtcgaggatgctccagcgaatctccctcccgtccgagtggagaacgtgatcaacctggaggacagctcggaggagcaactgccgacccccaccccgttggccgagtccctagccttcgcagctgggtcatcgacgtcagcatcgtcgacaccagccttccaagcacctgcacctagaggcgacgaccccgacgactccggagacggcgatgacgaggatgacgacgacgaagacgatggagaagacggacacgtcaacgaggaagctgactacgcccagcaggactacttcatggggattggtccagttgtcgaacattacacatcaatgtttgagacagggcacttccccaacctgctgcaagcagtgctgcacgagctaggagcctacgtccgccccctgtacgagacgaggcgagtgagcgagcctccccgggcttgctattacatcactcgcatccatgttagggtaatggatgcaggtgacaggggattcaggactctgtctgctcacgagtccctgataccgctgtccacctacgttgcctcggtcagcgatgctgcccgtcggaccctgtggtcgctcagccacacctaccggcagcagctgcagaacacgaggttcaggcaccttcctcagcg

SEQ ID NO: 179331 - DNA, 626 bp, Zea Mays
ctgtctagctagcatctccaactggaaatgctttagtttccgatccacagaatgcttttgaatttaacaacacgtcagtctgatgttgaaggcgcaagcaaatggtcagacttgtacgcgggaacattcccttaacactgaactgaaaactagaagccgtgcgctggtgccagtgctgctactataaaatcagacacgcacatccccattcaccagcagcttcgccatcataccaaaactagtaccaaaagggaaaaacgatggagtcctccgaggcgggctggcactcgtttgatccgtcagtcgccgtggaggactccgaggcaatggcccagctgctcggggtgcagtactctggcaacgagcagaagcagccaacaacgccgacggccatggccatgtgctggcctggccaagaagctgacgaccagcactacagctcggccgcggcgtacccgtactgcacgcagatgcagcaacccgacccgggtgcaagtgcaagctgctacgactatgactactactatggcagcaacacgttcacgatcaccggcgacttcttcgtgccggaggagcaggtggcggaccccagcttcatgctcgatctgaacctcgacttcgagtac

SEQ ID NO: 179332 - DNA, 519 bp, Zea Mays
caccgtcacattatagaaactgctcgcactttgttgatatcttcttttgtcccttcacatttttggggtgaagcagtttctactgcagtttatctcatcaatagacaactgtcatccaaactctctggcaaaacacctggtgaagttctttttggaactcctccatgatatgaccaccttcgagtttttggatgtatgtgttatgtactattatcacctcgtgaacgtactaaattgacaactcaatctgttgagtgtgtttttcttggatacagccttcacattgctcatattgctcatgtgaaggcgtatctgagtaaggaatttcaaatgtctgacttggggcactcagttatttcttaggcattgaggttttgcagactcaaaatggtatttatctttttcaggccaagtacatacaagaccttcttgatcgttttggtcttagtgatacttgcagtattgccacgcctatgtatcttcacttatctcttcgtccgactcatggcacacctttgg

SEQ ID NO: 179333 - DNA, 1237 bp, Zea Mays
gaaggtctactcccaatggctgtggactgcaatcttcggcttcacagccaacaatgtttcctctggaacctccagggatgaaagattctctgtctgatatgttctcaggtttaaatgtgtctcctttggaaacaattcgagcttcttgggatgaagagtccaactgcatttatcaagcgaaaaactgaacgaacaaaagcatccatcctccaaggaaaagaagcagggccctgcatcaatttcattatccatgtatttcaccgggagcatagtgatggataagttaggagcacgatcattgtcagtagtagtgacactgatgcaataagcattgatggatccatttccctctgacaagccaaggaataaagagccatgtggggtggcgcgaccaacgaatggtagccccttggtgtcaattttgtgccactcgactgaattggtgtcaaatgcatatgtgccccaaagttgattgaatgataccagtatgtaggtgtcgaccaccacataagacgtgataagtacaactggcagcatggtataaacaaatggggtaatcttccaagggaagcaaggtggatgtggtagctcaatccaggagcatccctccaggtgggagcggtcgtcaacaatgacaactttggctttggaaagatcgagtacctcgaaccagggtgggaaatcggggtctgtgaaccagcagagagtcttgcacagagcataaaccttgtcccccattgttgttaggacagggcaccactttgtagaattgagagtcggcccgtgaatgaccttcttcgtcttggtgtcgaagatgacggtgtcacccggatcacccccgaccctaatgatccacgcgcggtgcactgaccgtagggacgtgaaggtcataccgccagcaacggtggtcagacgggtaactcggtgcaggctcttccgcttcacccgcgaaggaaaggaagtggcgacgcccatcttgtacacgacgtagggcatggaattcctagaccaatcccagtggcatgccacaaggtaggcagatcagacctggccttcatacaactcatcgctgacgatcctcgtcgggtcgagatgttctgtttcttgcatcagcggatcgccgtcaccgccgcacacgatctctagatcccccatctgaatctgatccggatcttcgcttccttccagctccactgatggcttgacccttccatgacggtcgcccgtctttctcttc

SEQ ID NO: 179334 - DNA, 514 bp, Zea Mays
cggagtcttgcacccggtgcaggcggacgataggcagtgcggttagccgcgacagtcctggtctatgatggtccagactcaaaagcgcgcttacggttcttggatgcagcatagatattgttgttgtttccttgggtcaagcaatcgctaatgaactcattgaacacagtcctagaagacgtgcccatgctcttcagcatcttagggttgagacccctcttaaagcttgcaatcttcttggcttcagtgtcaacgaactctggtgcataacgtgacagattattgaaggagtgtaggtactcagtcatggtctttgtaccttgggtgagtctcatgaactctgctaccttcatcgccatcagactagggggaatgtaattctcacggaatgctgtagtgaatagttgccaagtgatgggagtgttagcggggaaagtggtgcgatgatgtgaccaccatatccctgccgacccttgtagttgatgtgctgcatactctgtttttagttcttcag

SEQ ID NO: 179335 - DNA, 348 bp, Zea Mays
ggaggtagggctggaggggcttattccttctgatcagtttggcatccttggcttctggtattctttcggattttcctcgcgggggcgagcttctttagcttcttgtcgtaatccatcttcagggttcggtaggcttcccgagtgttggtttcctcgccttccgctatttcgagactctcttggagggacgccttttcccttttaagcttcttgacctgttgctccaggctttctactcgggagtttaggtgagtgcagcgggaggcaaggtcatcatattggttatcgagagtgtggaggtatccagcaatgtagacaatggtggggtcatcctcggtaggatctatt

SEQ ID NO: 179336 - DNA, 396 bp, Zea Mays
taaatgttgtgggttgctgttgttgcgcaggaacggcgagacggctgatggagcaaactgggatgaccgtggacgaggtgatgagacgtatccaggtcgaggatgcattggagcagggttacggtccggtgcacatggcggcgtcttatgggaacttaaaggtctgcaagttcctgctcaaggagctcaagctcgatgtcaacgctactgccagggatggttcgtatctattttctatttttgctttttgcatgacgttcgttgggtcagcaccaggagggatgggatggttagacagttggatcaagtttctgagcatgggaagggagactttgatctgatttatgggatatgtcgagggttcagtttatttgttcgcttctttgttttggataa

SEQ ID NO: 179337 - DNA, 731 bp, Zea Mays
gcggctttgcagaagggtcctcggtgttctggctaatctgaaatgagcataagcactgttttcgggagtcgatgacacttcgtagaaaggccctcgatcttctatctcttcacaggggaaggtcctcgacaacggcgcacgctgtggagctccggcgagcaccaagaccggccaaacggaacaagggctggttccaagctttggccgaaaccgaattcatgccccaaccattgattcccctaagttaattgcacaaatggctaccaaatgtccctggccacggacgcagcggaagtaatcaatagaaccgtgcgttcccagtgatctacggcggtttagttaaaactaaagggccgaggagtttgaggagagcttagggatgttagaacaagactagagacaacatgatcggacctgatttgcactgaccacggcaaagtgttcttgcggcttgtttgaaccgatttgggggaattgtaagattcgcgctcgttggggatcaactgagggtaattcttggtggcggggttcttgactaccctacggagctagtggcgcactcaatttataggcgcatcgagcgacggggaagaatttggccgaggggtgctggcggccggagaggggaggcgagctcagtacgaggaaaagtggctttcaccgtggcagtggctccggtgatcgccgggcatgcaaccggtgagtcacggcgatgcggtggcgaggtttgg

SEQ ID NO: 179338 - DNA, 495 bp, Zea Mays
ccggcaatggtgccgcggcggcgctcggatttctgtcgcccgccgccggtgaacgagggtgtagggtagaagccgtgctggctgttgatccgttaacggacggccggattagaatcgggcgattactcctgggcgatttgattaggaccgttggatcggatcggacgatcgacacgtgcattggacatcattaaatcgtaaacgtagatccaggatctgagggcccagagtgaataccggttcgtttgaacagacttctaatcctcatcgtcggatgttgatcggacgactgttagcgcgagataccccttcggcttgcgctttgcaaataggaccctctggttaaatgaaataaacccgtcgtccatcctcggggtttctgggtctgggaaagtcttttgggaaagcccctgaccttttcagaaattgacgcccagtcctgaggataataaaaaccgatatatgattagagaatttagtttttaatacaaaaac

SEQ ID NO: 179339 - DNA, 788 bp, Zea Mays
ctgtagatgagtgctttagcttttggttgtaacacctgtggtgctcctataattttttgcatgggctgaagaagaagtttagctgtagatgtgtgacaaatataccacacactttctagtcatgccaacagaggagtttagccaaacaccagctgatgatgtaaagtcgtgattggcactctttcagagctttgataaaccttccttttcttaccttttttcactctctgtttcatgtattgggctagttatgaaacttacaatgctatggaagagttgaaagcagagcacgctgcaagttattgatattagagtttgtgtagatttggtcagcatgatgaggcttacagagctaaaacgatgagctcaaccctcacattcaaatgttcatcaaagttgcctaaatcgagcgcaatttggggctttgggcgacaaagctgcatgtttttatggactatttaatgtcttagattctgggagatccgtatttgcaatgtaatctgaaaattgtatcatagctgaaggggctttaatagcaagtttaatggtagactcaactgctggctgcaaggatccttgtagcctgctatttagcccaccgaaatagtggttagctcttcagtattaatgagtaccccacttgtctctctcacaaagcttcttatatcttgtgtcgaaaccggttgtaaatttatagtctccatctcctctctctctcttccacttcagcatttagccaacttatagcatgttattgtacttgctctaagcgataccatgcatcaggc

SEQ ID NO: 179340 - DNA, 708 bp, Zea Mays
gtgatatacaaggtgggtttaccatggagagggagatattgatgttcaagaagatgatgacggcacactcgctgttggttatgaatatatgtcatgggatggaaataaacaggctccacttgatgatgaaggacaagctaaagatgtcattttagatgatagtgaacggggagttcaaggtttgattcaagatctgtacaccgcagcaagccatggtgtcggtggcaacttatatcagcgaatcatggaagaggcaaagcgtgaactttatccaggttgcaccgaggagtctaggctaagtttcattattaaactattgcatataaaagtgtacaatcggataccaaattatgggtttgatgcaatccttgagttgctttcgtcatctttgaagaatgtgaccggcctccctaagtcctataatgaactgaaatctgtacttcggaagcttggttttggttatgaatctattaatgtgtgcaagtatgactgtgctctattttggaaagatcatgaagaggatgaccattgcccaatttgtgggtacacaagatggaaagtgaacaaggagggcagaaagaaagtgcctcacaaggtcctccattactttccaataattccacgcctccaaaggctctttatctcaaagcagcgggcacagtatgcaagatggcacaaggaaaagagggtaccggttgagaatgaaat

SEQ ID NO: 179341 - DNA, 563 bp, Zea Mays
ggcggactcggctctcggccgtcatcacccttgatctagtacgcattagcctcccgttgcattggcagtccactcccacccaacccaacggtcagttcagcggaccccgcgccccaccacgtccgtcgccaggggacccgggcccgcacgccagccgcaccgacggaccagctcaaacgtcaggaccgctggacctcggcggcgaggcgagagtgcgagaccgaccgagtcagtttcgttacgcaataataaaagcccgcacggttcgacccgtcccggatcttgcaggtcggctcacccaacacccataatttctctgattcgcctcctccactaccactagggcgctcgcctctcctcctctggctctgatccactcttctctccacgaaagtacgagaccaaccagaccagtccagccgcagcacgcagccagccagccatggccgtggcttgcgcgtcgcttgcggttgcgggcaggtgggagatcgggggcctgttcacggaggcggagctggcggtggcggaccagctcgtgcaactcagcggcagcggcggagggg

SEQ ID NO: 179342 - DNA, 332 bp, Zea Mays
gaaaagcataaccatggacagagttaaggcaagactgacgatgtggagaaaacaagcaatggtaagataggtaagattccaacaaaatggttgaagtatccgaaattattaccgagggaagttataaagaaatgatgagatcatcaaggatgtgcgaaatagaatggacgttcatggatcaccaagaaataagggtggtcaaaagcatgttaaccggaatgtcttaaacaagcattgagatataaaggtaagcatgtataaaaataatagtatgcaagattcaaatggtacgagcgtaccaagaccaagagaatagaaaaagccaacaggtg

SEQ ID NO: 179343 - DNA, 816 bp, Zea Mays
ccagtgcaattgtatgaacatggatgcaagagtcaccaccctatgtgatgagttgtgcaagctaaacctagaggttgtttcctctggtgccttgagttatatctcagtggagcccaccttacaagagcaaatagtcgtggcacagattggtgacaagggtgttcaggtcattaaggaaatgatcaagcagaaggcagaaaaatacaaatgcttccgtcaggacagcaaggggatcctatggtttggagaccgattggttgttcccaagaactccgagctcagaaagaagatattggatgaagctcacctttcaaaattctccatgcaccccggcagcaataagatgtatcatgacctcagatctttatactggtggaccagaatgaggagggaaatagctaagtatatatctgaatgtgacacctgccagagagtcaaggccagtcacttgaaggtagcaggcactctacggccccttcccatcccatcttggaaatgggaggatatttgcatagattttatcgtgggattgcccaatacctcccggcaccatgattctatttgggtcatcgtggataggctgaccaagacggctcatttcttgccagtgcataccacccacaagacagagaaatatgcagaaatctatgttgatcaaatagtgcgtttgcatggaattccgaagacgattgtatctaacagaggagcactgtttgtggcaggcttttgggagcagctccaagaatcacttgggacccatgtaataagaagctcagcataccaccctcaaatagatggtcagacaaaaagagtgaa

SEQ ID NO: 179344 - DNA, 981 bp, Zea Mays
agtagcctcatcttcaccatggtgactccattgcactttgcacatttttataactttattccttgtaacccgagtcaatgtatcgataatcttgataggatactccgtgtaagttagatcaccctgcacactaagttcttccattggtaactgttcctcggggacacagagacatttcttgagttgagacacgtggaatacatcgtgtacatcagacaaatgatcaggtagctcaagttggtaggccatatccccaacctgcctaaagattctgaagggtccaataaagcgaggggataacttgcctttaattttgaatcttctcatcccacgaattggtgacacctttaggtacacgtgatcaccctcctcaaactctagggatcatcttcgattatcagcatagctcttctatcgagtttgtgctaccctcaagttctcccagattgtacggacttgttcttccgcctcttgaatattctcaggcccaaagaactgcctttctccagtctgatcccaatttggaggagttctgcactttataccatatagagcttcaaatggtgacatcttcagactggcctggtaactattattataagataactcaacatatggtaggctcttgtcccaactgcctccatgcttaagggtacaaggtcttaacatgtccttgaccacttggttagtcctctcagtctggccatcagtttgaggatgataggccgaaatgaagttcaacctcgtacccatgttctcatgaaggctcttccaaaaccttgaggtgaattgggatccacgatcagaaacaatcttcttcggtaccccatgtaaacacacaattcgagccatgtataactctgccagctgagaacctttataagtagtattgaccggaatgaagtgagccactttggtcaatctgtccacgatcacccatatagaatcataacccttcaaggtgcgagacaacccggtaat

SEQ ID NO: 179345 - DNA, 2096 bp, Zea Mays
cgacgccgaacccaacctgtaacccaccgccgccgccgccgccgccgctggccatcggtggtcatgccgttgcttctggctgccatcacctagggagtcatgcggggagagctaacggggtgagcgggtggtggacatacactgtatatataagcggggatttttctctggctggcgggtgggaccctcttacgtcacgtacacgagaaggagcgatacgccacgcgtgtccgaggaacacgttagaccgctccactctagtgggtaggctaacaggtggtccacctatctaccccgttacccctccgtcccctcgtttttagttcctccttggcaacactaaacacctgatgttaaaattagcacctcatgatgaaattacatgggaaaaagtgtccccgttattagttttatatttacataggtaagttttgatcgatcgtcgtctgtcttctccatcgggtaggtacgttatgactatcaaatccgctcacgtacgtcatatgattttcttcttgttcaatcgattcaccggtcatcacattcccacgaaattgctagaacaatacctcttgtctccgaacagttcttacagtgtcttattttggtcttgttgtagtgtctccgaacaatcccgtgaaaatgaaaatcgtcaccatcacgtccaaatgcttacctggtcgcgtatttaaattgtataaaaaatgatcagattttatcgatttgtttgaagcatgtaattaagatgctggagggcgaggaatttgctggcctgcgcgcacgttgcgatcatggaggtaaacaattgaggaatgcggtggccgcgtacgtgctttgatatgatgctataatacgcctgatctgattcgtagaaggacggcggcggcgggcgcgggctgccggcggcgatggtggacggcggcgggcgggagatggactccccgcggttccgcgcgatcctgcgcgccaccagcgggcgccggaagcgcgcacccgaggtgaagagtttctcgcacgagctgagctcgaggggcggcggcggcggcgtgccggcgatgcgcaagatggtgcgcggcggcgggctcggcagcaccaccccggaggagttcatcggcgccatccggaccaagttcatccgcctcaaggaggaggtggacagcgagctgggcgtcttcgcgggggacctcgtcgacatgctggcgcggtcgggcgaccaccgggacgactgtcgcgtcgcgctggaggacctgctggtggtggcacagcggtgcgcggagatgagccccgaggagctgtggacccgctgcgagggcgtagtgcagggcctcgacgaccgccggcaggacctccccgcaggcctcccgaagcaggcgcacacgcgcatcctcttcatcctcacgcgcttcacccgcctcctgcagttccgcaagggcgccgccgcggggtgccgctacgccgccgacgccgacgacgacgacaggcacaacgtgctcggcctgcacaacctcagcgacctcggcctctacccgatccacgtcgacggcggggatctcggccccaagagcacctccagcctcaccgagctcaaggagcgcctcatcaggcggcgaatgttggagcacaggcagctcaccgtcgacttctccccggctaggatcttttcgccgttcggggacgggtcggccgttgacggccactccccgagcagcaagatggcgtcgtggaagaagctcccttcccccgccgagaagaacaagaccgccgccgccgccggggatgccacggccgccgccgccaagggagacgacagcccgtcgaagaagaagcccatcacccggcacggcaaggcgacggtggacgagatcgtggagcgcgtggacgcggcgagcatccacatccgcccggatgggctggcgtgcttgggcggcgacgaggccattagcctggagatcccgtcccggtacccggaggcgcagcagatcatggtggacgggaagccccggatgatctgccgcatctgcgacttcgagatccccatggcgtgcgccgagggccacttcgtggtgtgcacgctcgccgatcgctgcgacgccaaa

SEQ ID NO: 179346 - DNA, 562 bp, Zea Mays
gcacctgggtagcaacaagatgtaccatgatctcagatctttatattggtggactagaatgaaaagagaaattgccaagtacatatccgagtgtgacacttgccagaggataaaggctagtcacttgaaggcagcaggccctttgcaaccccttcccgtaccatcttggaaatgggaggacatttgcatggacttcatagtgggattacccaatacctccaggcaccatgattctatttgggttatcgtggacaggttgacgaagactgcgcatttcttgccagtgcacaccacccacaggacagaaaaatatgcagagatctacattgatcaaataattcgtctgcatgggatacctaagactatagtctcggacagaggagcaccattcgtggcacgattttgggaacaactgcaagaatcacttgggacccatatgattcgaagctcagcataccacccccaaacagatggccagacagaaagggtgaatcagattttggaagatatgttgcgagcatgtgccctacactatggaaaggaatgggacaagtgtctgtct

SEQ ID NO: 179347 - DNA, 563 bp, Zea Mays
ccggggctgctcgaccaacgaaaacggaggggaagagtgtacggggaaaggaaacgcacctgagagctggcacgtgggctgctgctgccgcgagcgcgcagggggtctgtgaggggcacgtcgccatgtccagggagagggatgtgagaagaacgtgtggggagggagaggaagaggaagagggatacatgtgtacctggtaaccgctgtccttctcgcctgcgatctggatttggggcgaaacgaggggttatgcgacgatgggggtgtttgtatatatatacaaaggaggtagcgtgggaggcggttgccaagttcgtcgcggaatcacgtcacgaccgagcgagagagaggcagttgcacgcacgatgagggtagacacgagcagcacgacgtttgcgaggaaagacattttaacgatcccgcgaaaaggacacgatatctaaaacgggctcgatgataggaagatatatatatatatatatatatatattatcgagtttccaagattttgtagttttttttgcaaatactgaattttagagattaaaataatattagaa

SEQ ID NO: 179348 - DNA, 598 bp, Zea Mays
gagcgagtgaatggcggtgcttaacgagcttcccatggccgccccttttttgcatgcttttggatcccctctctctctcctgcctgtgcctgaccgaacaaattccttattagcctgttgccgatgacaggacgccgctacgttatctttcttagccgttagccctagccctcccttttggtctttggctagcaacaacagatacaatggagaatctatctttctatccatccatccatccttgagcgcatgcagccccagctcgcccatccatcgcctcaataatgctatgctatgctatctatccatcactaccctgtctcgttgcttgcacaacagtgtcactcatcacgtcacaaaccagcgatcttgggatggtacacacagcatatcctgcctcgacgtgttaccgcctgtctgattgtatattgcattgcttggattcagtggtctctggtctcatgcacacgtcaacaacgaacgttgttctctatgtcagcagttgttgttcatcgatctggccggacatgcatgcaattgccacttcttctcgtagtttctatatatatacacgttcgttctagtctgctagctctag

SEQ ID NO: 179349 - DNA, 965 bp, Zea Mays
attcattacaccaatacattacaagcatatggctactacaagttgtactacacgcgagcgttccctgaggtactactgaattccttttctagagtgtccccaaattccttgagaagatcatcaaggctagcgagggacatgtcctcgatatcggacaaattctctatcctggcgggagctggtgccgggggagctttcttcttcctctccgtctggcatccttggctcgtggttttcttccagattttctttgtgggggcgagcttcttaggcttcttatcatagtccatctttaaggttcgataggcttcacgggtgttggcctcctcgccttccactatgtcgagacactcttggagagatgccttctccttcttaagctctttgacttgctgctctaggctttccacccgagagtttaggtgggtgcagtgggaggagagatcatcatagtgggtatcgagggtgtggaggtatccgaccatgtagacaatggtggggtcatcctcggtggggtctctccctgacagagcctgaagtcttttcctccaggtgggggtatttttgttgctgggtgggaaataacgaaggggggtttcaaagatctctctgctgtagttttggcatagctgtttaagggcctttcgggcaacactttggcaagtgtctgggaagcggtgcccgatgaaggtgacttggaagggggtggtttgggtagcttcggctttctcccaggtagactgccatagagcacttctctattccatttttgcggtattccttctagacatattcgggcttcttgcggatccccatgcgcagtccgcaactccgtagaaggtgaggaaagccttcctcctctgagcagtatgatgtcctaatgacccaagggccttccatctggtagaagaaaagaagggtctgttaatatcggggaaaggagagaaggtgtttcttgggggtaa

SEQ ID NO: 179350 - DNA, 489 bp, Zea Mays
caacccatgatcttgaattagccgtggtggtttttgctctaaagtcgtggaggcattatctttatggcgagtcttgtgacatttacaccgatcataaagtctcaagtataatttcactcagaaggagctgaatttgaggcagcgttggtggctcgaattgattaaagattatgatttgtccattcattattaccctaggatggcaaatgtggtggttgttgcccttagcaggtccggggttccaaaagtggccttgtcgttgatcgctgatctggaccgtttgagaatcgctttgtgctatgtcggcaccgctagtgaggagactcggatgcttattcaatcttccctcatggagagagtgcgtgcggctcagtagcaggatcgtttattgcaggaagctcgaaagagggttggcgatggtaaacctcaggagttcaccattgatgagaatgatttggttcgtttcaagggccgcctttgtgtgcctca

SEQ ID NO: 179351 - DNA, 793 bp, Zea Mays
tagcggaatgcacccgtctaatcctaagaataggggcagcctagggtttgcctgatcaggcggacgaacacaggagcacacaaggatttatagtggttcaggctaccagagagtaacgccctactccaatgtgagtcgtgttgctgagagcttgagaaaccttgggcttggatggagaagtctccggggagttcaagtgaagatgtaccccggaggttctagtcccaagggagcttgagacaagaacctcgtgttagtgtgtgtcctcgagtctatggatgggctcaagtccatcccttgcaacgcatgtgccctcccttttatatcctaaggggagcacatacaaggaagctaggccccgacatatgggcctaggaatactaaaatatgaagcgtggagcatcggatagagatggtggaccaaagtcttcttcctacgatgggcatgtatcttctcttggtcaccgtgcgggccctctatctagactcgcctttgtcctgtcttgtcagcatgtgtgtgaaggctatggttaggctgcgacgtagattggcttgtcgacttgtgtaggtgagtaggtggtcggtgttgtcctgacccatgcgcctgtctctttgcctgcctctaaagcgggaatagtagaaatcgtgatgagagttgcccacatgtggcgtagtcggtcaatggtctttacctaagagtaacgcgtaggttactagcgcgacccaggcattatggactgcacacaccacctgcattttatatgggacacatgacgcctgccactgttgtgga

SEQ ID NO: 179352 - DNA, 514 bp, Zea Mays
gccccgcaaaccaattcgccgtgagctggcccccacctagggcccttcctgtgaaccccatgccgactcgtcgtcgtatactcgtatgggtgttgctcaggagccaccatcgtggttgtgtgctttcaccatcgtcggggaccctctgtcgggtcagggagactcgcctatcctggctgatgcatccgttgcgtcgtcgggcggttagggtcactagctctgactgaattgctcactggttcttggacatcaccgtcgggccgcactccgccatgggcgttattctccacgctacaatccctggtatggaccctccccgtggattcgctttgaccacaacgtcgtgtataagcagttgtcgtggagaatcgggcgccatgccgctgtggacaccttcttcagtgggtatcgccgtcgcggcttgtgggagctacgtgggccctggccgtcgtgtggatggaaggtgtgcgagccgctagatcgtgattgaacgatcacgatttgttgcaaaata

SEQ ID NO: 179353 - DNA, 517 bp, Zea Mays
gtgagtatttacagaagagttttcaatagcaatagttaatacatgttgatagataagtaatccatgtgttcttcatcgtagtctatcccttggacttgagcatacccctttgcaaccagcctagccttatgtttcacaattttccctgatggatctttctttaccttgaatacccacttcagtcctattgcctttttaccctttggcagatcatcagccacccaggttccattttgatgaatggactccatttcttcctccatggcctttctccagcatgcctcttctatagcttgttctatgttcattggctcatcagctgctaacatacacaccccactatattcaaaatgaagtacttcatttgttgagtcatacaaatctggaattgttttgtatctctgtggtacccctgctgaaaactgaggactctgctcaggaggagatacccaacctgtagctgtacttgacccctgactttgaggtgaatttggagcatgagagggtcctgcttcac

SEQ ID NO: 179354 - DNA, 468 bp, Zea Mays
gccggcgtcggcgatcacaggggcctgtgcgacggcataagggcagcggtgtggcgggaagaaggcgtcagggttggtttggtcgcgctggttgacggtggggtggtgcccaagacgacgtcgggcaagttacgccgtggggcggcgagggagatgctggccgccggaaagctctcactggtctttgaaacacgatacgacgactgtgatggatcggtggctggggtgagaggcgaagaggaggagacagcggcgaagtccggagctagttggctggaaggagagggcggagagaccggcatggctaccgaagccttcgggagcgcgagccgtcgtcttcgcttgcagtcatttctttagcatgagtgttgggtacccctaattatggtacgcgacaacgacggttcggacatccttcggtgtccaactcctccgatccggtggtctcgacagcgtccttcagcgacg

SEQ ID NO: 179355 - DNA, 564 bp, Zea Mays
cgcaaacctccctggctccgcttctgcctctgcctctctcttccgtttccactttgtcttgatggtgacatcctcaggaaggggcaaaagacaaggcaccatgggcctaatccactacaaaaccctgctcgctcgttaccaaaatgttaataggggcgaaagaagatgagggaaaaggatctcatcaaaccgcttgaaacatctttggacaaaggaaggggcgaatcctcatccatgaaggatcttgacgataatgtcgtgatgactgtgactcgagtttcgatctcgaacagcgagagcaacttggcggaatgacaatcagggtcatgaacgctggagtacttttacattggcctctgatgggccatcaagggctgaacccgacagtgcatgaaattgtgcaccagccgagcgccagtgagtccctgttgcttcaaccgtagcaaccgccttaaaaagatgctccaccttgctcttgaatcgtgcctccacgccatagtgcacttctccatcgacaccagctcccctccggtgaaaggcggcgcactgctggccacattcctg

SEQ ID NO: 179356 - DNA, 903 bp, Zea Mays
gctgaagcctgccgccgtcaacaaggccgtgtccatgagctgaagccactcgatgagtacaactcctacaaactcttccgtcggatcatcttgagtgctcctgatgtaccctctaatggtgcaagagctcttctgaagaaatgcggaggtttgcccctggccataattctagtcgcagggctagtggctagtaagctgagatcagcgtcagatgttgcccctaaagagaagaaggaccattcgactcaagtggactgggatgtaagtgaaaagttggatgaattcatggtaaaagtggagaagcaggacgttgttagtacccatatagaacaggacaatgagattattagtgaacggttggacaaattcatggtccaagtgggcgaggatttaagtgaggatctagagaaaaatctctccacagaaggagtcacagagatagtgaaccactgctatacccaattgcctgcagaccttaagacctgcctactctacctgagcatgtttcccaagggttgtttcatcagtagaaagcgtctgatcagaagatggatcgccgaagggttcatcgctgagaagcacgggaagacagtggaggaagtagccgaggactgcttcaacgagctcatcagcaggaacctaatccgagcggtcaacaacagcagcaacggcagggtgaagagctgccaggtccacgacatggtcctcgagcacatcgtcgtcaaatcaaacgacgagaacttcatcacggtggttggcggccactggcacacaccgttcccaagctacaaggtgcgccggctgtccgtccagaagagcgatcagccagagaaggagacggtggagaggatgaagctgtcgcacgtccggtctctgacggctctgggcagtttcaaagctctc

SEQ ID NO: 179357 - DNA, 1094 bp, Zea Mays
ttcaaattcaaatttgaattcaaaataattatgaataagaaaaacagaaaataaggaaaacaaaagaaaaagaaaagaaccctaactgggctcgctctctcaattccggcccattcactcattcactcccgcgcggcccatactccctccacccagcctcaccttaccttctctgtgtgtaggaccccagccaccaggcagcctcgctcgtcgcggtcaacttcttaccgacacgagggacccaccgggcagtcgctcgtctcgcgctcgcacgcacctcacactggttggtgggccacgatgtcaggcgcccacctctccccctttcttcgctcgccgttgcgcaacgcccgccgcgaaatcgccggggttggccgtcctcggacttcgccgcgctgtataacagcacgcccgtgaccgttcctttccccttctcccctctcgacctcgaaatacctcggaaggattgagcgccgccactttcgtctgtagacctgccgtcgccggtgaactccctcggtgcgggaggttttgtttcgctgcgtggccatgtgtggtcgtaatcatccaaggaagacgcccgcgccttctattggtgtcgtgcgtcggtgtggagggcgaattgctcgccgccgtgtcaactgcgggcgattttccgcttcgtgccgtggtaggcttctccgccgtggccgtctgccgtaaggtaccttctacatgatcgcctcgtcctcaatttcgttttgcgcatgaagtcaaccgcatccagtagccggaacggtggaattcgggtggccggcgaagagctccgccgagcggaggtgtctctgcgcgcgccgccgggggggagctggctgctggcgtaggattgatgacggaccgatggtcgttggatgggaaaggagcgcccgagattagatcgtgtgaaccgttgattcctaacccttggatcataatcggacgataggcgcgtagctctgtattcattaaaccgcggccgttgatcttggatccggtgatcagaatggatgcgggttattagccggcccagatctaatctggtccgtccatttcagatcgggcggccagaacctctc

SEQ ID NO: 179358 - DNA, 560 bp, Zea Mays
gttgagttgagggcaccagggccgccagggcactgcacgccagcgtgggctccgccgttggccggggagcgtcgctgcgtggtggggagaaatttggggaagctagggggtctctagtgaccgttgatcaagcaaggaatggatgcgactagatgtatccatacctgtttgtcgaggatcagggtggtcgagcgatttacattggatggttgggatcaggcgaggcaggccgattcgtagagtagatctaggccatctaattcgaattgggcgtctgtcgttacataccagttcgttatggggtcgatctagttggggcagtcagatgttgatcggtcggttggaatccctgcatacccccttcaacgtgtaattttagcaaaagagcccctgtcttttctttgtataaacacgtcgtccaccctaatgctattagtgttgcagttcggtcctcatatttatgagttggaccctggattttctgatattagcgtcagcagtccagaacccataggaaattcatattaaattcattttaactcctttttaatccattctag

SEQ ID NO: 179359 - DNA, 455 bp, Zea Mays
tgaggatttcaccaagaaccaagttagagagtttgggagcatgaatagaggtgggaaggcttgtctgcttgtaggttgaaggtgaataaggaagatgaccattaggggaggagagatatagtcaactggccaagtatggaggttccacacttgagctgtggagttccactcaaatacgtgaaggttctatgccaccaaaaacaaatgggaagtaatattgtactgtgtatttgggtttgataagtttttatcgatctttgcatatagaaattgagcactttattcactttagcatactggtggtctccccttgataatatgatttttctatacttatttttgaaatataaaatgaattaaacacttcaaatgccttcaagccatatccttttgaattgggatgtctcctttccttgtcatgcacccatgatcccttataagatgtcactaactca

SEQ ID NO: 179360 - DNA, 588 bp, Zea Mays
tctgaagcatgcactgctattatgtcatcagaatgtggtggagaagacccagcatggacatccatggaggtgcgagaaggggaattcgctcggacaccctcgggggctgggtcgtagctcgcactgtccatcggagccggatcaccaccggcaacaccctcgggggctgggttgcagtttgcgctacccacctgagccggatcattaccggcaacaccctcgggggctgggcaatcgccagcaccacccttggggattgagttctctgcaatagccacctctaaggctgaaggattctcagccacctccatgggaattgagcaatcttgaccaacctctgggcaccgaagaccgccttccaaggtcgacgatgcatgagatgctgcctgagatacgtctaacaccacacctggagtgtcagaacagacatccatcatatcaccaccagtgggttcggatagcagatcttcaggaacgacatcttcgagagcctgatcaaaatttgctatggataattcttgcagaccaacaagagcagacaaagctggagaaggaatatcgctactccccccactgactctgtaacgc

SEQ ID NO: 179361 - DNA, 578 bp, Zea Mays
tggtcgcggtaaagctccttggtgtcgtggcaaaaagttaccgaggtggcgaactctggttaagcggcgaccccgtgccctcaccggaaaccgccgcgcggaaagcttgccagtgcctccgcggttcgcgcttcttctccaactccagtcgacggcctataaattgagccccccctcggcttcgccatgtattctaccagctattgcacccacctgcatcccaaaccccccaccagagaacttggatttgggatttcccccaaaccgggttgaagaacaccgtgaacccaagttcaccgtggaaagctctcctcaggtgcgatcctgttgtctttagtcttgttctagcatcctcatgtgcccttgatgcttaccgagcttccaattcgaactaagaaaccaccactcgtcgggaacacaaccaaacgatcatggccttcgcggttctcgtgggcaggctagaataggtcaccaattgtgcgattaacttgggggaattactcggggtagcttggatttggtatccgccgcttgggcgcgccggtcgttgccccaatcggccggtacagtggctcgcc

SEQ ID NO: 179362 - DNA, 835 bp, Zea Mays
ctcaacgacaacattaaagggtggcgccttgagtggtttattgtggaaaaccatggcaagttcctcccccatcggtcggggagacagccagatgtgcgcactccgagttgggttgagtctcctactgccttgaaggtaatagaagctagggttctacttgctgaaatctgtctgctgaaggagagaggtttaaccgccgaggctgtggttgctgactttgtttttaagaatatccagcccttgaaggacaaagcatacccagcttatttgtacagtggtgtttgtgactcgactcgggttaccaataggagaattcctgctgaggatttggtgagccgactagacatgatcttgagaggcaaagtgtcaaatgttggtgctcgtgttgcctactctacttggaatctgccacctcctaagtcctttttcaatttcgtgtccaatcctcctgctggtgatagtggtctgggtcttagagtgcgaccctctcctgaagatattgaggctctggttgcttctctttgtgatcttcccaatgatgagaggcaagttcattttgagatgccagcgagtccggatgatgcagaaatagatgctgtgctcaatatgttggctggagaatcttctgactcggcccctgctaaaacaatggttgttacggttataccagagcttgacaaaacagtggacacccgaaagcctgagggtattcgcccaaagcgtcctcgccaagtcagccgcccaactgcgcctattgaggagaagaagaagaagagacgacttcggcgactgtcatgcttggaccaggatgctggcccttctgctcctgtttgtg

SEQ ID NO: 179363 - DNA, 973 bp, Zea Mays
gtttttaactgtacgcctgcacgcatggagatgtaggtagggaggttccctgtccacccccggcgtccttgagcccacctaccaatcacgtgataaaaaaaattgagtctttgttgagtatcaagtgatttgcgagtgttttttcgacactcggcaaaagaactctttaccaagtgtaaaaaaaagcactcggcaacgcttctttgccgattgtatttttttaacatccgataaagagtttttttgctgagtgttttttttcgacactagacaaatgacttctttacccagtgttatttccactcgagagccagcggccatgctccgcaagcaacaaactctttcaccaggtccccgccgctgctcaaccaggctgcgtcgcgaagggcctcctcgttctgatccactttcttcactttaaattgtgagaaggccacataacaatgcgagcacaaaatggccgggggcaagacagacaacccttcgacatcccccggtgccacaaaaaaccaaaagtcctaccagttgctccacacttattctttgcacaacgaacaatatcaatcacttcggcccaagtctttctggtcctcagcgtgaatgtacaggacccaaattgcgcaatcaaaccacctatcttcttctgccaatgtgagcaataattcttggcgaagacctcaacagacggctctccgccatacgacgacaccgcccaaacatacttcgccaatgccaccatagcgttcgacgtcaactgatgaatttgaatttcgaacttccacataacttcaactacgcgccggcaagcgaaggccaacagcgaaaaacgtctcgaacacaaccaactcccccttcggctctaggacatcttcagcgcccacccaactccatttccaaaacaacccagacgctgcatctcgagcatgcgacccgagtaaatcctcgatgtaccaaactccaccgtgtgctcgtg

SEQ ID NO: 179364 - DNA, 388 bp, Zea Mays
gtgaggagttagtgcaggagagtggagcattgttgatagagtttgtggttgaggactcactagagctagtggaaaactagatgttggataggcaagcttgatgaagtgatgctttgctagcccccctcccatctcccttgaagttgatatagtcgatgatggactagttgaccattgatgtcaagccatcgtccaccatcttgccccatgtctagcctcgctcttcatcgaacatgatgtcgtgcatgatgtgcatgtgctttatcgtaggtcgtggatgaggtatgccttgacgccatcaacatagtcgatgaagacccctagcatactctatccatcaagctagttggcatggttgagcttcttggcaaacaccaaacaacaaaac

SEQ ID NO: 179365 - DNA, 337 bp, Zea Mays
gagcaactgaagcatcaccttttccagaagttgcgctttttctcttttgccctttcagcgggtagcggtaatcagggtacataaacccaatagcatcgaaaactctattcaacctcttcttcttccggcctccgaaggtcgcagatagcgcgttatcttctgtctttgaatatggtccaagcagttcgtcgcttgtagcttcgatgcacttcagccaatcatcatttggctcaataaacttaccctcgtatctgaaggtgtattttaacctaaccagtccgccttcgtcaggcttgctgatagttttctttggcatttcccattgctctacaagcgg

SEQ ID NO: 179366 - DNA, 736 bp, Zea Mays
ccaccaacttcccggtttcagtccctgcacctgaaacacgggttagcataaacacacatcctcatgcacaatccacaaacaaacaccctacttactagcaggcggtagccccgtctgggcgccaaacatggtgacgcctcctaccaggtagtcatcaacagacaactcctggtcggtccctccagtctctgaaaccgccgcttcagcagcgcatggtggcgaatacaccctctcggatgccactggcgccgcaggaggggggcatcactgcagccggagcagccccttcgcgctggggcgcaacaccttagcgtcacggtgtgggtccaccagccaaagcgaggccttctgcttcttccgcagggcctcctggcggtcctaatccatcactgttgacacaacaacaccaatgtttcttccgtaaggaaagatttttaactcacgagccatacgagacgtaaagtagtcatcgccagtggcccgaggtccttcatatgccaccgacccccggtcaccttcaacattcacgaagatgttttccggagatcgggcacagtcataacctcctcaggcctagcacatgttctcgcgagttcctcaacaaaaaaatctagaggccctcggcctcgccattttcctttttgtacctttcgcctctatcttcctgtttcgactcgatgcaatcacaacctttccctacaaggtgtcctcttccgaccaggccttaaccttcttc

SEQ ID NO: 179367 - DNA, 330 bp, Zea Mays
ttcggagttaagctaagcattgaaagaagaattcaaagatcgcatcgtccagagaagcaaaaacccgagccaggtcggtttgaccttgaaaatacttctcctcaagatcagagtaccgttgggttgagtcggcttgactttgaagatgtttttcctcaagctcggagcaccgccgagccatatctgacaaggcagccgaaaagggatacatggttaaaaacaagttgatcaatcaaaatagctaaggaagaaacgatgtcactaaccagcgttcaacaccttcaagtcagcaatctgtttctgaagcagcaatgggttccactgcattag

SEQ ID NO: 179368 - DNA, 790 bp, Zea Mays
tgtcaccaacttcttgaagatgtggacttagggaggcttcttgcgatctatggtaaatgggctgcgaacggaagcgcttccaccaaaagttgcccccgaagctgagcgtttgatccggattctagcttcttgcggccaaaagctgcgcataagctgaaccaaataggggctatttttctcgactaccaaaagcagcagccatgagctgatcttctttcttagtataattcccgataattttgttgcacattatttcggtcatctccaaccattcagtgtaggggccgctgaaggtatcttgaaatttgaagcgatacggcagcctcactagctctagcttgttcccttcgtcttttagcttcggcattccccacccatgttgtgttggaagaactttgttcgctaaatattcttgaaccaaatctcaagtgcttatttgttctgccataactctgaattgcacttcggctacctggcatggggagcctatcttcatgaaacataacggcctcgtcatgccgaagctcaactttagagggctcatcaccatattcataatttgttcccttttcttcttgtcagctttcacgtaaaaccactcgctagtccagccagtatgccacttggtgcggtatccaattacaagagccttcatatcttttcggtatgcaaaattgtagcatccgaagtttttgtgcagactatctactcttgccttggtctagtagtgaagttcatggactcttcagaacccttcatcgttagcactcattccttggcttcgcagagt

SEQ ID NO: 179369 - DNA, 438 bp, Zea Mays
gcgccccttgggtcggttcaatcgcctggtggtcagactgacagtcagtctgccagtaaggaggtcagactgatcaggtgaccctaacaccggttgaaacctgcctggacaccggttgaacttgtcctggacaccatttgaacctgcttgtaccccggatgaacttgtcttggaccccgtttgaacttgtcctggaccctggttagaacttgtcctggaccttggttgaacctgcctggaccacagttgaagttaagttcaactcagctgaaaaagttcaacttagctgaaaaagctcaactcaactgagaaagttcaactcagctgaaaaagatcaactaagctgaagaagatcaactcagctaagaaagttcaattcaactgaagcaggtcaactcaactgaaaagctcaactcatctgaagaagttcaactcagc

SEQ ID NO: 179370 - DNA, 585 bp, Zea Mays
tcgaggtctagaaggaaccattagaaaaatggtggtgtatggaagaagtagaggaggcggtaacgtgggttgatgctttcacgagggaggtatttgtagcactagtgcatggaccctactttggagaggagaggcatgctagagaaggtgtggacataagcgagttcaatacctaggcgaaggtaatcatcccgataatgggctctatttttaggtcaagtcatgggggaggcacaagagttttgtaattgagggtgggcaacaaggcgattttctagttgtcgagctcgttgctaagatctatggcaccaaacttgaagttgtggactacaacgccatattaatcgatgatgcaagtagatctataaagtctgacactaagtctcttaatgacgaggcatattaccttagtatcaaagatcacaatgatgacctctgagttaaaatggaaataagacactgcaattctaaatatgaatatttttaaacaaaaaatggccaattcatagcatagaaattactacaatgttccaacaagtcatcatgttttcctaggccattgccataagacaagcctagtcatcc

SEQ ID NO: 179371 - DNA, 1093 bp, Zea Mays
ctcctcctaatctctccaccttgatcaacatggtccacacgaggtccttctggttgtgcgtcacttgagccctcaacatggggttcatgctggacgtcctcctgcctagaagttgcatgaacacgccttgtgagtcctagactcgcccgactacggttggtgtgaacagggtcatcacgttgcccgcgcccaacaatgaaaccaactccacgccctcgaccagaccaagcctaccacgaacacgacctgctactgcatctgtcgatggattactcatttgttttcaacacaacaagaattcatatggatttcagattttgggaacgccaagcttactttgtgtgtgtgtatggccaccgacgttatgtgttgtgtttgtgtggccggcgtcaacattttgaccttctccatgttcatcgtggactgcacgagatcaaacgaattgttcatttgagtagcaaaagacaactagagagcggtcaagaaatgtagcaaacgtaattggattgacctaccttcatccactatgacgtgaagatcttcacctagaccaagacacgccaggagcagcatgcatcgtgcaaagagggccatgaggtagtgactagtgaaacaggaagcgaatagtgcaacgttcttcatgggtatttagcgctaatttttccctccaaaattttcaccggccgccaccacgcgcacgcaattcctttgcccgccaccgcataatgagtcaggaagcaaatgaacgcgcccaaaattccttcggccggcaaaataatctattccttgcatgcatggtgctaatatatttccatccatgcagtttcctgtatgtgcatgtccataattatctgcccacgattctctctcacgcccacaaatttctcctccacgcttgcagccaggggcaaccagggaataaacaaagttacactaattttcgtgcaaagcctttggacgccttgtttcatgggaaggagggagtatttattaagctattcctgtttcctggaacctgaaaaattgtttaatgatgcaaataggatccttttcaaaaagttaatgtatgtttctattttgttttggatagtcc

SEQ ID NO: 179372 - DNA, 978 bp, Zea Mays
ttgtctctctatataaagatagcatccacaacagagcagagaaagctaagagatgtgagatgagggtgatttttttccagtcatccattcaatgcaactggtatgcccacaaattgtcttttgatctacacgaatttctaatgtttcaggttgctcagctgggaacaaaaaaagcaaatattgtaatagtagtagatcagtaagtcgtacatcatatcgagcattccggagcaaaaggagtctggcaccatgggcagcgtcaacgtacaacacaggctttccatttctttagggagcaccaaaaaactgcattagcggtgagtctcacgaagaagacaacataggcttttaatttcttcttcgtgcacccttccgtcgttgctttcctttggcatcagcggctgttctcccggcgtcggtcgtcgacgcgccagatccagtggatctgtccggcagcacacacctgcagttccttgcggtcgctgctcgcctcgcttaatctgaggaagcatgatggagaaggatagttagtaactatgggaagcggcgagacaaagaagaagactgcgtggggactagagagggaagaagggggagggggtcgtcactgtcctcgaacgtgacggtggcgactgccttctacttctagtgccgacggcgaggcgccaacacgacttctctttttcaaatcgaccattcgtctactgtctagaaccctcgttgtctggaaccctcgcgtcgtatcggtggaccgttcgagcatgatcgtgtggctgaataaaaaatgcgcgaaatctccagaagctttctgggatatatttggtgttggccactgatgtacgatccaacgacggaaacgaaaaaaggtgacgtggcagcatggttggcgagctttccgtccgtctttcatatatagaaatttagaacagcagctagccggagaatgtctaatgtaacgtggcacactcttgagtcttg

SEQ ID NO: 179373 - DNA, 426 bp, Zea Mays
aaagtcgagcaattgtaagagtggagcatgggttaacttatcttttgaagtgttgaacgcctcttcttgtgggggtcccaagcaaaagacacacctttctttgtgagttcgtgcaaaggggcagtgatggagctaaaatcacgcacaaaacggcggtaaaatcctggaagtccaagaaaactccaaatttgggtgaccgtcgttggtgtaggccagtcctgaatggcttcaaccttgctgctatccacctcaatgccctgtggagtaaccacataaccaagaaacgagacacgttgcgtgcaaaatgtgcacttttccatgttaccaaacaagcaagcagcacgcaaagcatcaaaaatagcacacaaatgttctaaatgctcctctatggacttgctgtaaataaggatatcatcgaaataaaca

SEQ ID NO: 179374 - DNA, 479 bp, Zea Mays
gctaccagtattggtagggacacaaggtgctgcttcaactcttggaaggcttgctctgcctccttggtccaagagaatgggccggacttccgtaatagcttgaagaagggtagcaccctctcagccagccttgagatgaagcggctaagggcggccagtgaccctgtaagcttctggacatccttgatttgggctggaggcctcattgcctcaactgctttgatcttcttcgggtttgcttcaatgccccggtgcgaaactaggaatcccaacaacttccctgcggagacaccaaagatgcacttttctaggtttagcttcatgcacgttgaccgcagcttgtcaaagaccagggtcaagtcttccactagggtcgaccctctcttagtcttgaccacgatgtcatcgacgtatatctctatcatgtccctaatcaggtccccaaaggtcttactcatcgcccgtacaaatgtcggcaa

SEQ ID NO: 179375 - DNA, 659 bp, Zea Mays
cggaacaggccgaggcatcaatttatagaggacggtcatgaggagggcgaatttggacggggaagagtgcgcggtgagaagggggaagagtcaccgaagtttgctaatgtggcgttcactggtttacggtctacggtggtcactatcgagtcttcacggcttgcgacgagtggtgagatgacttaaggcatgtcacaatcgagctagatggcggcacaacgacgacagggcaaaacaatgccccaagttcatccccttcgcgagatttttcaccctacgtagttatctgcactccaccgggcacgaatcgcaacggcggcgaggatcatggcgtgggatcaccggcggcggtgcatttaacctagcgatcttcatcaggttactgtaccattgtgaactcccttcagggcgcctaacagagcaagtttcagagcgttttactccaaaaattgttcagcgcctggtcaagcttggtataacaaagttgtttaccaatgtaagagcttcaactttgccacagcgaccctaaccttatctccattgaattaaccatgaactgcttccaaagttaaccaaatgtcactaaacttaggtttttagagttaagggtgtctgacaggccagtttcaagtctctttttctcccattttcatgtagta

SEQ ID NO: 179376 - DNA, 459 bp, Zea Mays
agcatatatccttcagggtatggccacttgtggagagctgggatatgccaaaggagaccactgccgactctagtgagggtggtctggtccgactaaagtataccttcagatttagggagaagtttgatgagccaaacgacgactggctgaagtgcatcgaagctactagtgatgagctgcttggagcatactccaaggccgaagataatgctctgtccgcagcctttggaggtcagggcaagaaaagattaaacagggtatttgatgctattggctttgtataccctgattaccgctacccactacgagggcaagagaaaaagaggaagattgctgcttcggtcaccccagctaagcctgtgtcgaagagcaaaaatgtgaagattctaacccaccggccgcgttatattgaaccggccgtagtgcctaaatttggcacagggtcctcctcagcagccg

SEQ ID NO: 179377 - DNA, 554 bp, Zea Mays
tgcatctcaggattcttgaagtttttgctcaaagtcaatatagcaaagttgtagagttactacaggagaacaactttgctatagggattaagccttgatgccatgaaaatgtttgagaaaatttgatccaaagtcgggctgttaggtcaccttaagtctgaactttcagtgacagtgagattggatgaacttagggctcgattttgagtaagatcctgtgactttttgtgggtgcacaatgtaacaaaattaaagttggttaattaagcttcaactttgatacagggtgatggttgggtcaccagataaaatatggagcaaattgaccccaaacatgctctatcaggcgcttcaaacagagattccaatggtacagtagactgaatgagatcgcaggtgcagtgcaccttgcagccggcgatccctgcgcctcaattcacgccggcgaggtgattcatgctcaccggtgcgcggataatgtctcacggtgaaaagatctccaccacggatgagcttaagacactgttccgtccgaccgccgtgtccgctctgcc

SEQ ID NO: 179378 - DNA, 350 bp, Zea Mays
tcggcgcggaatggatcgctcgaaacgaagaattgaatgaaattgaagcctggtatattggattggcgtgaaattgtgcgaatatgttattgaaggtgttgtgaaggtgcctgaaaagtttgggttcaatcggagtaattttggctggtttgggcatttcaccgagcatgtggcgtgcggtgaattagggttatggagaaatgcctatttgaggtgggaaaccctcccaaagggagctcaaaacctgcaggagcatccaagagaggactagggactcattcatgcacttgattcacagagctttgacaagaatttgaattgggcaatcaaggggtgggtaggcttcaatg

SEQ ID NO: 179379 - DNA, 527 bp, Zea Mays
cggcggcggagactcagctacgtggtgagaagtccggtgaacgtgaatcgagggaaatagaggggttgggggcaaaccagagggtgtctcgtgttgctggcaaggaggtggagctcactggggaaatggacacgataagagctcgacggccatggaacggacaacggaggatggcagtgctccacgggtgcgcgcgcggtgcgagggggtctgctgggggcgctactgagcgaggggagtgagcgagtgagtgcgggctccaaaaagaggtcgggcgcatggggggagtggccgggaaacgcgcgacatgggcgcatccacggtggagtgcacgggcaggatgttaggaatggggaggaggatgacaggtggggtacgcgagccagtgagggtgaacacgcgaatgggcggtcagcgctgacagggcggacccatcgggcagagagagggagcgagcgcgcgcgtgaagaaaccggcaccaacaagccggccccaccgggcagagggagagggggagcgagcgcgtg

SEQ ID NO: 179380 - DNA, 841 bp, Zea Mays
ccgcttaccgctgtgcgccatgtgctaaagcgcagtaccacgtcgcagtgaatcacgtcatgcatgcccggtgatcgccggagagccgccacggtgaaagccactaatctcgtgcgccagtgacctctttcttctccgaccgccaccgcgccaacccaaattcacgcgccaccgcctccggagcctataaattgagcgtgccttcgggtccgtaaggtagtcaagcaccaagccaccaagccgtgcctccaattgctcactagagctcgccaatttcagatttccccaaatctgttttctgccaccgtgaaagaagcctcaccgtggctagctcatctcaggtccgctcatgccctctgctctttcgttttagtgtccttgtgtgtccctgatgcttcccgaccccgccaattaggctaggaccccttagatcgtcgggaacacgtcgtgttgtccattgtgcccgctgtcaccgtggacagagcgagatagagctctgctagtgagattaattgaggggaaactcttgttaggccttgaattaggtctcagccgaagtagagcaccggtcatcgagtgatccggacggtataagctcgccggagctcggttccccgccgtgcgatgtcgtggacttggcactacgaagaaatagaagtagaaggtgtttcctgtaaacgtcagtgaaacatataaatagtgttgtgacccctttactagttgtttaaaatgccaagggtctctgtgcaaactgtcctccgcgggcgcgcctgggcgaattctgtctttgctgggccgtctcggattgaaatgagcccaatactatagagtctttcttctt

SEQ ID NO: 179381 - DNA, 514 bp, Zea Mays
caagaaccaacttcatttctccccaaaacatctccctcttttggcgccaagcagcaaaaaggcaagagaaacctcatagcccactataaggattgccacctggagatggtgcgaagaattgcttggtgaaggctgcaacgaagtcttgatcatctgaaggagcatgatcagtagtaggaggaggagacggaggagcatgagaggacaaggattgatctgggcgcgaagaaggatgggcagcagactgaccctgcccccaaacaccatcatcttcatcatcttcagtggtcatgaaggggacaccataatgatgttggtgccactaatcagtgccttcaaatggttggtgaagagggacgtcaggagaagacgactaatgacccatgttatcgtcggtctcccgctggcgccgagccaacccatgcacatctaccgaaatattatgacacaagagaaaagggcagagatgccatgttgcagccaggagcccaaccctcgaccacagtcgtgtcct

SEQ ID NO: 179382 - DNA, 740 bp, Zea Mays
gagttgaggagcatcagtggcatgtaagagtgctgaaacaagagagcagatgacaagattggacctaaattgagctagccacggagaggatcttttcacggtggcggaaacccgatttgggggagatgagcaattttgtggtctctggtgagtaattggaggcaagtgctggtgctttggatgggtgattaccctatggagctcattgcgtgctcaatttataggtcccctgagcggtggctagtgaatttgaaggagacgcgcggcggccggagagatggaggggcactggtgctgtgattcatggcaattgcgggataagaagccacgacggtcactgggtaacaatcacaactcatggcacaatcgtggtgaagggcgcaaactccggtgacggccacaaggctacgtcgccgatgcaagtggtcgaggaacaacgaggccacagtagcccgaactcatccgtgacttgatcttttcacggccgagcttaatctacttccctacggcacgaatcacagtgaccgacgtgaatccaggcgcacaattcaccggcgccgaagttatctgatcctgggatattttcagtactgtaccatcagaaatcctattgagagctcctgacagccagatttgtagcgcctagatcatagattttttataagaacttgctaattcgtctatagcaaacttgtagcccttcataccagctacaattctgctatagaaacaacccccaa

SEQ ID NO: 179383 - DNA, 381 bp, Zea Mays
gggggaacggattgggccattcccggtcatggcgccgccgttggcgggattgctccgctggggcgtgcggttgccgccgagtccatagtactgagggatagcgcgcaccgccgaatagggtgtatgcggctgcaattaaacccggtgcgtaccgcttcggggttgagggtgagtcgtaggatgcgatcggacggaccagaatcggccacaaatctttaatttcgctccgttggattccgatccgtgggtcgcggatgaatactgattcgtgggataaggagatccaatcctgggcgctaaaaatagatctaacggccagtagttcaccgtaccccttcggccctggaatcttgcataagaaaccctctcgaattagaaaat

SEQ ID NO: 179384 - DNA, 850 bp, Zea Mays
gtggttgtctatgcgaaagggaaagagacatattgccctaaataaaggctatattgaacccaaagagcgcataatattagtgcagactccgcgaaattgccctaatcctaggcctagggatagcctagataaatctgtttctctccaaaaaagtatagttcgaagaatttgatgttggtgatacagttgagaaagagatatttgaaaagtaatataagttaatttgtattctaatatgttggctgagccatattttctgcgatgaacctaatcttaggcctggggatagcctagataaatctgtttctcccccaaaaagtatagttccaagaaattgatgttggtgatacagttgaggaagacatatttgaaaagtcatataagttaatctgtattctaatatgttggctgagccatattttctgtgatgaacctaatcttaggcctggggatagcctagataaatctgtttctccccaaaaaagtatagttccaagaaattgatgttggcggcacagttgaggaagacatatttaaaaagtcatataatctaatttgtactctaatatgttagctgagccatattttctgtgatgaacgtaatcttaggcctggggatagcctagataaagatgtttctccccaaaaaagtatagttccaagaaattgttgtgtgacataatgatacctaaggaagtgccacatgaccacacctaatctgaataaaatgcatacagtctatccatgtatgtctgtatctatgtctgtattattggaactctacctttttggggactctacatggataaaatgcatacacctaatctgaataaaatttgtgctctagtac

SEQ ID NO: 179385 - DNA, 1342 bp, Zea Mays
cttttctcctttttatttttctgttttcctctatccataattattttgaatccccaaattttgaattcaaaatcgttgtggatttattatttccaactaacacatattttgaacatactagttccacttttataatgttcattttatatattttctctatagtacctctcttctccctctccacttttctttagagatttgttttccaattagaggttaaattctatggatccattaatacattgttaatgaaacatttattaatacattgttaataaaactcggcatgatgcatgatttgtctaggtgtctggttatttaatccctttttggatgatgtttattcacatgtgatagcaggtatagtcaatacacacaaggtcattacctcttcttacgatttacaattctgggtattacaaatcctaccccccttacaaaaaatctcgtcctcgagatttaggaagaactagggaaaagatgaggaaaatctatgcgaagctcttcttgtctctcccaagtagcttcatcttcaccatggtgactccattgtactttgcacatctttatcaccttatttcttgttactcgagtcaaagtgtcaaggattttgatagggtattccgtataagtcaaatcatcttgaacactaagatcctccattggcagctccttaggcaccctgaggcacttcttaagttgtgacacgtggaagacatcatgtacatccgcaagatgatcgagtagttctagctgatatgccacttctcccactcgcattaaaatcaagaaaggtccaataaagcgaggggataactttcctttaactttaaatctcctcataccccggattggtgacaccttcagatacacgtgatcaccctccttaaactcaagcagtcttctccgggtatcagcatagctcttctgccttgattgtgcaattctcaaattctcccttatcattcaaacttgttcttctgcctcttgtataagttcaggcccaaagaactgtctttctccagtctgatcccaatatagaggagtcctacattttctgccatatagagcctcaaatggtgacatcttcagactggcctggtaactattattgtatgagaactctgcatatggtaggctcttatcccaactgccaccatgtttaagagcataagctcttaacatatcctccagcacttggttagtcctctcggtctgcccatcagtttggggatggtaggctgaactaaaattcaactgtgtatccaagctctcatgcaacttcttccaaaaccgagaagtaaactgtgatcctcggtctgacacgatcttcttaggcact

SEQ ID NO: 179386 - DNA, 933 bp, Zea Mays
gtgaagtgtccgtgtaccaagtgtcggaattttaagtatgtgagaaaggccgaagaactggagcaccacctttgcaagaatgggtttatgcctaactatgttgtgtggcgctcacatggagaactagagcagaatataacagagttagaaataattgatgatgaggaggaggatcggatggatgacttggtggctgatattagtagagagtatccaacattggcctcggaacaggctataccagaggaagtgcaggagttttataagcttcttcacgcgtcagaggaaaaagtgcatgacgacaccactgtgaccgtgttgcaggtggttacacgtcttatggcaatgaaggcaaagtataacttctctaataattgctataacgatataatcaatctgattattgatctcatcccatcgaaccataagatggcaaaagacttataccagtctaaaaagattgtgtccggtctttgcctgaagtataagaagattgatgtgtgcgaagataattgcatgttgttctggaaggaatatgaagcggccacccattgtcagaaatgcggtaaatcaagatatgcggaggtactaaaagaggatggagctacttttgctacaaaagtggcagttaaacagcttcgatacattcccatcattccaaggcttaaacgtctatttttaaccccaaaaactatgaagctaatgttgtggcataaggaaggagaccgtgatagccaagacccagacattatgatgcatccatcagatggcgatgcttggaaggatctggatcgttttgacccagaatttgcaagagatgctaggaatgttcgtctaggcttgtccacagatggtttcactccttacgacaacagttccacttcatactcttgttggccgattttcatcatgccctacaacccccctcccaac

SEQ ID NO: 179387 - DNA, 553 bp, Zea Mays
cacgacgatgccggagttgaggcggtccaggcggctagagagtcaatcacttggtattagctaaagcactaactaataaattatattaattacatcataaccagaggtaggcacgagtgggattgaacaaaaggcagcagcggattcagggaggcggagattgctagcctgtattacatccttaaggttgttcatggataatggatggatgatctctccttgtctctatgtgcgagtctactgttagcagtcacgcaacaagtgttggagctgtcttcttcgagacgagtggcatgagcagcaactactgcaagctgtggagaggagaggagcatgctttctatggctgaccacggcagcctgtcgacgaacccctctgtgtccttcgtcgttcagcaatcctcttagccacacaacacacaaaaaccgtggtcattggcataaaattctacctacaacaacccataaaaaacaaaacaacgtctcatgataaacactaaccttaaaaactcagacgcggctgcaaccggacggaccggcggcgccccctggg

SEQ ID NO: 179388 - DNA, 391 bp, Zea Mays
cccactcgtgcatttgctccattttttctttgttcgaattgaccgaaattcgctggtgcccttttcctgttctatccccgtcaccctttttcaccccaccccattctccttcttcctccagagtccagacggcgtgcttccgcctgccgccgccggcgagctgcttgcccgcagcatgactccgcatcctggccgcctcgtcctaccaccggcggctccttctccctgaaccccgccgcgcgccaggcaccacgcctccctccgcagtcacacgagcacgcggccgtcctctgccgcaccgcgccgcctccagacgcctcgctcgtcaggtctctccacctccgcctgcgaacgttcggcccagctccggcgagttcctccgcaattccgg

SEQ ID NO: 179389 - DNA, 962 bp, Zea Mays
gcgaacaatatattccaactcatttcgggaaggcgctttgggcataggtgatgttagctcttttggaagacttccctttgcctgctccaatggcttagatcccgaaggtaacacaggtaggagaagcgcttgcagcggctacttctgctagaccttcaatctcattcttggaagcttcagtagaagcaggagttgatatcttcgtagatttcagaacagcgtcaagaacgatgtccattctccttcctttcctaggagttattgctgcagcagttgttaacttcggcaaccccgttgtggttgggggactctacagtttcgaatgatcctttgtctttgagctctttacttccgtttcttttaccggagcgacagtaacttcggcagccatagcaggaattgtctccgaagccaagggggtggcttcggcgtattcagcaatctccatcttctctgtaccaagcactgcagctgtcttctctaaagaatgtgactttggcctacgagtcaaaaccttagctctcttcgacttaggcgcggtggaagaagatgaagttgctatttttctttttgacccttgtttttgggtcggaaagtagtaatcaggataaaaaatccgatcacatcaaaaactctcttcagcctcctcttgtcgcgagcgccgaaggcagtagtcatggcttcgtcctttgccttcgtataagctcccaacatctcgtcactggtagcctcaacagcctcaagctagtaatcattcggctcgtcaaattgacttctatagcgataggtatatcttagataaaccagaccaccttcgctgaagccaacagcagtctcctttggcatttcctagtcattaacaagcggccacaccttataagcaatatgctcttgaaccaaatccctggtgctaatgtaagtacacaccatgtcgaaggccatcaaacatgcatgtacttcgt

SEQ ID NO: 179390 - DNA, 397 bp, Zea Mays
cgggcagggaagctcgcccctaagaaaatcccatagacgaagaccccgcatatgctatcaaagattatagttggtgccattaaagatgggcatgtaatgggcacacccgtgttcgaagaagacaaagatggtgccatgacagagcaacaacaatagacagcaagagcacagagaaataagcggcttgagcaaaaattttaccaaatcatatggaagcgcttcaatccgatcgtagagcataagcgggtgagtgaaactgcacgtttcggcgagcaactggcacgactgtgtcggcggttgacaagacgatgcgagggtggcgagcagggccgcacgcgagtagcggatggaggacgtgcgggcgtcgagcagggccacacgtgagcagcagatgggg

SEQ ID NO: 179391 - DNA, 917 bp, Zea Mays
gtttggagcaactagttgacttcagatcaacaaggacaatgaccatcaggtctagcgctcacaagaacattcattggttgcattgtgctttcaagcacataggagaatttgcgcatatataatggtggtaaagtgcacggcatcaggccaatgctgccaagcagagatttttatatgcaaagatgtatagtccagctcgtttttatcattgcccatgggtttcccaattactcataccattctgaaattgggtatcaatttatgcaacatttttaggtataataattttgagagagaacttataataatagttaattatttatggtgttgccagcagggcaaacttttctcctcgtattatataccaacttgttctataaagcattattttgtctcttcattgttctgcaaaaagagaagctttggaatagaacagacaaggccaagaatttattttatctgggaaaactcatcttattgctaagactaagcaaatggtgataaatgcttggcaagagcgaaaaaagaccaatatctgtctcggaccagtcttcaacaacatatagtactactctcatacaaagaaatcatcaggagtagagaggatacaccaggtctctacaagatcttcatatttctatcacaaactatcatcactagtagtctagtggtcaagacatatggctcttctggctccgaggaccaaggacatgttaatgtctaatttagcttcaagctctgtggtgatgtgggatttcatagttatttgtctactcttctgtagatcggaggtagataatggtaagcatgccaaggggtggaatccaatgtagttctgctacaaaaccccagttatatgtccattcaggactgaccgttaccatttgacttataatgtataccatactcgtcaaggg

SEQ ID NO: 179392 - DNA, 526 bp, Zea Mays
aaaagatctcacgccagggatgagctcggggcactgtggccaccctatcgtcgtacccacttgtgccacaacgtggccgcatggccaccgccggtgcgaccgtcgtttaccagaatctgccatgatactcaccctgttacctcgtcgcaaggtgccatgtgaattgattagtcatcgtctcaggtctctaccccagaaactgccacgttatacgactcctgtgactcacccctctctccggccgccagccttctccttcaaaattcggagccaccggtctcggacactataaattgtgtgtgtcgctaactccgttaggttgtcacgaagccagagcacccgccctcgtctccgatcatccactatagcgccttaattcgggtttcccccaaatccgttttccgccccgccgtgagcacccctccgttggccctccatcctgtccctccacccgcctacttagttgccgttcttgagcccttgtatgttgctaaagcttactgtgcccccaatttgtatgttgtca

SEQ ID NO: 179393 - DNA, 423 bp, Zea Mays
cagggacttacgtagactcaggacaatatttattgaaaagatcatgcggcttgtggtggttaagttcaatcatagagtccccaccgttcagctaagctcaaactgaaatatctcaaaggcaaaattgacgcctagcataagaaaaataatcgggctctgcctcaaagctaaaatatagtacagtagctatctgttcatgtcactgtttaccagttcgtgccatagacgcatctctaaaaaggacatcttatgtaaccaccagcaaataaattgtcagactaaagcacgattctttctccaagttcacctcaacattggcaccaatttagcgatgaagacaaataacttcaagcctttcaatagagataacagataaacattggatgcctcagcatggctacaattttatctgggctgcaaaac

SEQ ID NO: 179394 - DNA, 383 bp, Zea Mays
caagctcatccagcagcttgttccgccttgcccacatctcctccctgaaggcgaggtcctcctcctgccaggtgagatcagttgcccgttttgccagggaagcttccctcgccttgaggctttcctcggcacgagcaatgtcgcgggccttgtcggtgagttcctgctgcagcttctatagcttcacctcagccgcagcctgcttgtcccgctgtttctctagcaccgtattataagctttcagcttatcatggagcgctgtgatgacctcctcccttttgcctaagcgtacctccttcctggccaaacttttctccttttaggtcacctcttcctctcggtcagacaccttccggatgtcctccttgaagtcctcgcgctcc

SEQ ID NO: 179395 - DNA, 1607 bp, Zea Mays
gaactcaagaccatcaagaccctgcatcagattgccacaaaatgtcgctatttaatttatgttttttatggtgtcgtgttgatgatggaaggaggcacaagattgaacatgaatcattgcaacaggcataacatatcacaactcactcggtaatttgcatccataaagccaaatcatgtgcaactgtggaaaggagagaaaccatacttcagccaaaacgccgaataattgcatacgacgagggcgatgtaaacggaaaggtgttgctgattggaaggtgcatgctccagatgagaaggagagcgcaatcaccaacattgtccattcccaagctttttggcctggagcagagaaacataagaggaattagcctatagctctcacgtgcatgtagacactcatgtagctgtgaattaatctcacagtgcttttagactccacatagatagcaccaaaaactatattccaacaatttaaacatttagtgtgcagagaaaatgacaactcaagctttgtccaatgctcttgaatgattctgcgctttatgtggaaaatgaaagaagctgtttaaaagagcaaccgctgtaatttaaggggcatataagaccaggaaggttacacagaagcacaagcaggactgcataaggacagggtaggacgcagatagacaaaggttaccgaaccagaagggccagcaggaaacaggaaccagacaccttggcctaggaggccaccaaacctgttctgttgccaaacaatagaaatcagacaatcatcatgagctcaaagggcagacaccaggccgagccatgcccacaaaagcatgagacaggccaacaggtccagctcaaagcttcgactatgccatcaacaaatgcagcagtgcagcacatgaattcctaagccatcatatgatcttgcaagctaaatgcctgcctgttttaccgatcacaattgtattatctcgacctacaaatattctatagtggcatttgataatcgtgcaagccaaatgtatgttcttccaatcacaccgctgctatttccatctagaaaattatatagccgcacacaagcctcatagcaactaaactggaaaacacgaaacaacaaagcaaataatacagaacaacaggttaatggataggcaccggaacacgggcacacaagcatccaagaacagcacaagaaaagaaaagggcagggactcacctcagggaagaggacccttgctagtccgccgaaatcacgaagcatcctcgccaggatggaattctgagaccgacaatctctgggagacagaaatcaggcacaaaagcacatgtatcaggaggggcaccgacagaagaggagagatctaaagcacatcggatggccaggccgagccatcaatcccatcattccacatgggagcagggatggtagggtcctaggcacgtggaaccgcaagcggtggcggatggggcctagcatggatggtttccccgtcgtggagccgcacaagcgcaacatgaaaccacgcatgccgataatgtggagacggtcctccatatgcgattatgtgaggaggtaaagaagccggtgcagtcgccaggtgcttgcctctc

SEQ ID NO: 179396 - DNA, 504 bp, Zea Mays
cgtttataaatcatttttatgcgctgtcgctgttcccttggaccgtctcaaaacccgcagcgtggaagggataagcactctactgcctgccaaggcagagaacgcaagccatggcatgcgtgagttgtcagtttgcagcactcggtggcagcttcgggtccggcaaagctgcactcggtggcagcgttatctgtgtggtatggatgtccctgttcccgcaatgagagaagaactcagtacagtgtgctactcaattgtaccttgcactagcttgttttgtcattggccagactaggagatattttcagcgttctcaactgatcttatgttcaagggttaattgtgtcagctatgtggcactgatttgaatttgaagatggcccatcgacagttacacttgaacaaattgacgactgctcgattcagtactttgcagcacgagcgagttcgacttctcttggtgccgtgccaatcgctgcactgatagatagtgcgcagccagct

SEQ ID NO: 179397 - DNA, 451 bp, Zea Mays
tctaccactaggactctattgtacgagacagcccatcattaaggaatcaggaacatgaagattattgtcgtttctgttgctaacaaacgacagctagcggctgatcagcaacgttgtaccgtgtccgtgagtacgtcaactaattatcgacatcaagtcaagtgaagtcgagtggttccatgcatgcgatgcgacccgcctgccactgccagccatcggaccagatcgatcggatacggcagaaatcaaaacaggcggatgctagctagctgcaaatcctagggactccgcttgtcggcacctcggcttttgtggttgcgttggtcaaatatgtctgcccaaaccgtgcccgttgctccccgagccgccgtatactttttgtgctatctgtgcatcctctcctcatcgtgtgttgatccaataaaaaagattacccctgtacttgtttcca

SEQ ID NO: 179398 - DNA, 711 bp, Zea Mays
gctcagtccaaaccttttcaaatcctctaagaaaatattttactagatcatgaatgctcttggaaaaaccactttcaattcccactaagatttccccatggttctcttcagttttctaaaaatctgttagccagtttcaaaaccggttcaaccgaactaaaaaccggctcaaccggtttttgcattgttcactgtgccactttctgacctgctagtctgctagtcagtcctgtcagaaaaagtcgtgtgcagactgttggaaaatcggttcaaccaattttgggctggttcaaccggatttggaaccgatccactctccggctgagtcagccagtgaaccgagaaccactctagtggaaactggttcaaccgatttttagtcaggattccccaacggccaccagcttttgggggctcctttatatacccctcacactctctctctcttcattcacttctgccctctccatgaattcttggctgaccaactctcaaacaagagcattcaatccacctctcacacccaaaatcgcatctccttcaattgattgaaggacccttggtgtgaggtgaaatcggtctaactcgttgttgatttcatctcgattctccctttcttttcatctctcgagctcatcgcaaacttgaatcttgtgcggatttgttactcttggaaccttgagttccttgacggatagaggttgcttggga

SEQ ID NO: 179399 - DNA, 553 bp, Zea Mays
caatgactgaaacaaagatttccaaaagtggctagtaaaaattatccctgtctgagaccaatgacttaggagtgccatgaagttttaccacgttgtctaaaaacacttgtgccacagttgctgccaaaaatgggtgtttcaaggcaaaaaaatgtgcatacttagaatatctatccaccaccaccaaaattgtatcacacccttccgacttaggcaggccttcaataaaatccatagtcaaatcttgccatgcaccctggggaacaagaaggggttggagcaatcctgggtaaaggactccttcagacttagcatgttggcacaatgcacactgctacacaaatagtttaacatccgacttcaatcctttccaccaaaatagcctcttcaccctctgataggttgccagacagcctgagtgacctactatactgtcatgtaatgccacaatgatcttagttctaagggctgagttctgagcaatccaaatctgagaacctcttctgatcacaccctgctgcacagaaaaaccttgttcattgggactgtgaag

SEQ ID NO: 179400 - DNA, 610 bp, Zea Mays
ctgggtcatgtgattaatcagcaggtcattgcggttgatcccaagaacatcacggctgtggtggagtggaagagaccttctagtgtctctgagattcaaagtttcttggggctcgctggatattatcgatgcttcgtaccaaatttttccagcattgctaagcctttggctagactcttggagaagggtgttctcttcgtctggtccagcgattgcgaggtcagttatcagacattgaagaacaagttggtggatgcccctatcctagctttggctaagagcggtaattgtttcactgtttatacggatgcttctcgaattggtcttggttgtgtgttgatgcaggaaggcagagtgattgcttagggctcaaggcagttgaggaagcatgaggggaattatccaactcatgatcttgaattggtcgcggtggtctttgctctaaagtcatggaggcattatctttatggcgagtcttgtgacatttacaccgatcataaaagtctcaagtatattttcactcagaaggagctgaatttgaggcagcgtcggtggctcgaattgattaaagattatgatttgtccattcattatcacccgaggaaggcaa

SEQ ID NO: 179401 - DNA, 792 bp, Zea Mays
gaaaaagcagggtcctggcgcaagagatccaggacacagtgcacagtcacccaggacggtgggttattttataaatactacagggattcttttagaaaaacacctcgctgaaggggtacggggcactgtgatccgtccgatcctaaaccagtggcccagattagaaattgtctaaattgaaccggtatgtgatcaggtccgcacatcacagtaccaaaggtcagcaacgctctacgccatgatccaatactagccctcggatggaacgttaacggcccagaccaatccattgaagcggtacgcatacatctaattctaatcgtcggatagaggatcaacggtggacgtgttgtcttcttctttacgaccccaagctacgatggcgccatcgagcagccaccgtgggccccgacagggtcatcaaaccaacgacgcggcgcaagaatccccaccgtacctatcctaagcacttaagcgactaagacacatgaaaacgaaagggctagcatctcaccagtgatcacgccgcagaacccttgattcggaaggatgcaagccacggtgacgacagcaatcctcggactatagaggttcagcccaaattctggttcccgcagatgccacccacgtgagcgggccacacccgacgatctccagaagccgattggcctacggcgtcaacctccaatccgcccgatggtcgccacgccccaaatgtcaccataggcgagtatccacgatcgcgtgcgaatccaggccgagcaccacaccggtgaggaaccaccaagcgtc

SEQ ID NO: 179402 - DNA, 530 bp, Zea Mays
caagggaccaagcttcaataagccaactggacccactccatcacgttttagtcagcagagtcagagctctttttaggccccctcagtcacaagcaaccaaccaccagctaatgcctgttggcactgcggaggccccagtcacttcaagaataactgccccaagttgaaggcatcaggacctacttactccaactcggtgaatggccccaagaatgccccagcgcccgcctccaaggcaccctcctccatcagcctgcagaacaagacccagtatcatggcagggcacgagtaaaccacgtcgatgctcaagaggctcaacaagctccaggagtagtgctcggtgagttccttgttgaatttactcccgctactgtactttttgattcaggagcatcccattcatttatagccactagttttgtggaaaagcatggcattccctctacccacctagaaattcccttggtcacccaaaccccagggtcagaccttttatgccagctcaaatgctcccaagtcagatttcttt

SEQ ID NO: 179403 - DNA, 544 bp, Zea Mays
atccaccaagaaatcctggccctcggatccctgatgggtggttcggatttaaaatgactagatcgaaccgcgcccgccagatccgaatcgaacgccacagattgacttggacgaaccggtagctagggtcaaatcttgaccgcccatccagatcaaacaaccagggcatcatcttcaccccccaactgtacacggcagcgccgccctttccacacccgccggagacacgtcgtggaaatacagtcccgcgaaccagcccacgatactcataattgattgcggagtaagctaggtacacgatggttgaatacataccaaccacgtgggtgcccaggtgggttgtccgcatccgcccgcccgtgtagtagcgcaggatattccggcgacgaattgagtggcgtcccgatgaccccgcgctacgaggttttctcatagacgatcttcgcaccaccgcgctagccaatcgcacctttctggcagttcagacgatggtggtccacggaatcggtgcggtggcgacctgcgctcgttgccctctctctcg

SEQ ID NO: 179404 - DNA, 724 bp, Zea Mays
tcacatcacaacttgttttgagattttagcctagtggatgcactctaggtgtaacatacataatgaaatgtcaatgcatatgattccatgcccaagttttagtgctggtaacaccatgtgtgttacacggccgatggaaaagtctgaaccgatagaatatgcttgaatgtaaaggtggaaataagggggatagagttccccactaacctgatagtgatgggtacccagggaatagatgttatcctagggataaattggctagataagtaccaagcaatcattagttgtgataagagaacgatgaagttggttgtccccactaggggaagaagtggtgactgagctaatcccgcccatgtcaagaaaaggaggttgccaccaaatgactattgatagtgaggaggccaatccactcaaggctatcaaggtcgtgtcagaatttatggatgtgttccctaaggatttaccaggtatgccacctgagcaaaaggttgagtttgtcatagagcttatccttggcaccgcccccatttcaagaagagcctatagggtatctggaccagaattggtgcagctcaagaaacagatagatgagctatcagagaaaggttacatcagactaaataccacaccttggaccgcccctgtcctattcgtggaaaagaaagatggcaccaagaggatgtgcatggactacagaggtctgaacgaggtcaccatcaag

SEQ ID NO: 179405 - DNA, 530 bp, Zea Mays
ggcccaaagaactatctttctccagtctgatcccaatacaaaggagtcctacatttcctaccatatagggtctcgaacagtgacatcttcagaccggcctggtaactattattatatgagaactcaacacaaggtagactcttgtcccaactactaccatgctgaagggcacaagctctcaacgtgtcttccaatacttgattagtcctttcagtctatccatcaatatgaggtaggccgaactaaaattcaactttgcatccgtattctcatgaaaacttttccaaaatctgggggtaaactgtgatcctctatccaaaatgatcttccttggtacaccgtgtagagactcaatccgagacatgtataacttagccaattgtgatcccttataagtagtcttaaccgggatgaaatgagtcattttggtcagtctatccacaataacccatatagaatcatatcctttcagggtgtgaggcagtccagtaatgaaatccataccaattacttcccacttccactcgggt

SEQ ID NO: 179406 - DNA, 759 bp, Zea Mays
aaaaaatagctcgaggcttgcaggccggctcaagctccatacgactcgctcggtttatagtgactcacaaactctgaccgagtctatcatgtttctcaagtttgatccatgacttagccgagtcagctggctgtggctcgtgaactaagtccaaactggcataacagagaacaagagcctaagatgttgtctaactagacaaagcccaagacagacccaaactagcctaacaaagcccaagactgaccaaactagaatttgtatgcaaagtaggatgtatcgtgagccagagtcgagtctctatctcgagctcgtacaccaaaccgagtcaagcatgtctcttctcgacttgtttccaccactaggtgtgtggtgacaacctccatcagtgctgacctcctcgcattctttgcgacccatttaggcatagatcggcacaggtggagggtgtgctcacagctctagccttaagacttcttgcgctctttaaaactgtgtccaacagatcgtgtatatggtcgtgcaaaatatattttttgcactagagatataacacaatttgtagaacgaagtttaaaacaggaggtgagatagataataggataggagtgcttttgggcacaatatccgtagactccagcaaggatgtagagctgaagactatgatggagaagaggggcggatgcgtgatagagaaagggccacgatgcatgagggagggagaggctcaatgtgtggcagagtgtagctagcgtcggg

SEQ ID NO: 179407 - DNA, 917 bp, Zea Mays
tcctagtccttgtttacctagctgatgactaccagtgaatcgtcatacaccattaaccttttgatgactattctcgcttcacttttgctcagccatgaaccaaggcctcgtactctgtagtgttgttggacgctggaaataggagctgaagtgcatacttgagttggtcacctcgaggggcaatgaaaagaatccctactcctgctccctgcaatcttagcaagccgtcgaagtacattttctagacctcagcatcttttgggttttctgggacctagtgctcagtccattctaatacgaaatcaaccagtacttgagtcttcattgcagtacgaggtcgaaattctatatcatgagctccgagttcgcataatcacttggatgttcttccaacaacttccttattgtggagttaatctcctattgggaatcccatgattactattgcgagcggttagaagtactgcgtataatagcttctaaacttgagggtaccttatcttcgagggaccgaggacttcgctgataaagtaaatcggatgttgtactggatacgagcgccctatttctgcccgctcgactaccaacgtagtgcttaccatgtgagtcgtgcaggatatatatagtagcaggtctttagccggttgatcgaatgtagctcggcgtggtggcttgagtactggtggtgtggtcagaaacttctttagtgcttccaaggcttcctgagcttctgtggtccactagaatttatccacctttttgagcagtttatagaatggcatccctttctcatcaagccttgatatgaatctactaagtgttgacatgcatccagtgagcctttgtactttcttctgtgatcgcggtggctccatcctcataatggcttcaatcttctctagatttacctctattcc

SEQ ID NO: 179408 - DNA, 806 bp, Zea Mays
gcgccatgggacaacattataatgacttgcataagattttccacgtgactcttgttgaatttttctctctgtacgcattgcttgatcaactagatcttgcaaggtacggtatgggaacatctcgacaaatccagaaatatcttcattgagtccgcctaaaaatcttgccatggttgactcaggatcttctctgattctagtttgcactaacaacaactccatctccttaaaatattcatcaacggatttctttccttgcttcaataattgcaatcgatttcgaagatcacgttgatagctggaaggaacaaatcgactcttcatcactcgcttcatctcctcctatgtattaatatgtcttagtcccaatctaagttgatgttcttgcagttgattccaccaagtaagagcataaccagaaaactcgactgaggccaagttcactcggtgttgatctgaaaaattgtgaactctgaaaatttgatcacattgctcagcccaattaagatattcatctgcactttctttcccagtaaatttaggaatatccaacttgactcggccaatatggtctggatcatttctatgacgacgcccatgataatggtctctattttcaaaatcagcatgtcggtgatgatgtcaccgaccaaacattccatcatttgcaaagggattctcatcagatccttcatcacgatcacggtcttcatactcctcatcttcaaatcttactcgatgtccgtgtgcacgacacattccacgcggattatcaagatcagcgcagcgaccatcaccataacctc

SEQ ID NO: 179409 - DNA, 472 bp, Zea Mays
tgactggggtgcccccccaagcggagtattgtggtgtcccgaaaggatatggtggcataccccacatctgattcgggatatatggtggtggtagtatgtatgtataatgatatgacataggtgtgtatgggagtggaggtgtccatgcatgtacgttaggtcttagttggacattatgacctcctgtcctttccgattggtgaggtggttcaatcggcctaacctgctgtcgctcctgggtgggtaagcgagaccgctttggtggccgatcactggggccgaccttctttttcacatatttagataataattgatcaaaggtcgggctggatttgactaactgaccagcggccttgaacgtgttagttttccacgtacctatttttggtcgtcgtggtttgaaggtacgtggtcgtcgtcgctcctcggtgttgccggaccgtccgctggaacgctccggaccgtctggtga

SEQ ID NO: 179410 - DNA, 646 bp, Zea Mays
ttggcaccaacccgagcgcgttcgctccctctctctctcgctgctctgtggggccgagctgtcggtgccgttcttttcccccgcacccactctctctatctgtctcgtcgtccccacctgtcagccgtcccttacctctcgcccacgatctccccaccgtggacgcgcccacgaccgcacgttctccggccacgtcctcgtgtctgtgccccttttgagccccgcaccctgctcgcccacctcccctcgctcatttgcaccctcagccaaaccccctcgccctctctctcgctctagccacgcaagcagagaactctaccaccacccgtcgtcggctgctgcctgttctgcggtcaccatcgcgcccgcgccccgtcatttgcctccgtaagctccgcctcgccgtcagctgctcgggacacccttcggtgtgcccttcccctctcgggttcgtttggtccgtgctcaccagagtgattcttgcgcaaccagagccccaccgccgtcgccccgtcacgtccttgtgcctctgctgttgcctcgtgactccagcgcttccccttaaggtgagcaacccgcccgcgtccataatttggtcatttctgctctgttgctcgcgcgattgctcaccgaagctgtcccgtgc

SEQ ID NO: 179411 - DNA, 418 bp, Zea Mays
ctggggacactattttgcgagagactaggggttgacgtataaaatcccatagactcagtccaaccccgcagtggactgcatgttgatgtatattaacccgagggactcttttgagaagttgccacgcgaaggggtatgcaaggatcacggccgttggaacggccatagatggctcggattaaatttgtctttaatccgaaacggtattcaatcatcactgttagattcgctatcgaccgcccagatctaaaatacctgagccaaatccaccgcgtacactacccgatctacggtggaggtgagcccaaactgaaaggatatgcgtgcacagatctgggctgtccatcatagatcggacggccaggagcttctctcccgtacctctctcacggtcggccaatcccaggtagcggcggcg

SEQ ID NO: 179412 - DNA, 419 bp, Zea Mays
gaaaacgcgcgcgagagagatctagagaggagcgacgtctccctctgagcgtccttgggcaacagggaggcttcgagtcctttgctgctgccgcgccactgcatgcaccaccgagtgccctcaattcagtcgtcctaatcacaaatctgacattttagtcgaagctgcaattcgacagatgtggggtttagatctggccacgcatgaagcctacggcctacccatccagcagcgagcagtcactgcagattgaaggatagtattagagcaagaacacagtagtgcacccttacctgatacgactcttgatacatcggttcacttcgaatttacggatatctatggcgcaaattatttcacatgggattatagcctcatctgtctgctctatttggtcagaaaattgctcaagatattat

SEQ ID NO: 179413 - DNA, 552 bp, Zea Mays
gtttccttcaccgtttcctctttgcagcagtgacaccgccgccctggctccgtcgcgaaggttccgcagctcccccaccatcgcgtctgcatcttcgtaggtacggtgcacctcgcgtccatccgtacccaccccgctgtctcctgtcgtgttgctagggttcgatcccgccacacccctccccctcatgtccagtagctccacttaatcttcaaaggtaatgaacgacctagtaacagattattgtcttcattgccgcctacagattttcgtatcaagtcgaggtcaaggtcttcggttccaagatcaactgggattctaggacttcggttccaacctccactgaagctaaggtaacgtgaatatcaatttgtgtttgacttatttgtcagcatatatgcagtttatgtgttccaagaacgtggatccatggccttgttttagttcataaccgtcactagacctgaacaatgattccacggttaggataagagaactaatctaaatggtagggatcaactgcttcaacaattttattgtggggggaatgat

SEQ ID NO: 179414 - DNA, 416 bp, Zea Mays
agcttcggcggtgaaagaagcaattcctgtgaatactagagatgctggtggagccgaagctgaagaactcgcagtcacaatgtcaaaaatcgacaagcttatatcagatgtggctgtggagaaggcaggtgtggctgcggaggaaagcatggccacagtgcctcataaagggaagaaagttgttgatactccttcgggagagagattttgacctttggcacctgggcggccaggaaatttctgaggaagatagaatagagctgaaagaatttgctatgtcctgtggttaccaatcggggtccatgctcttcggtggggtcgatgaagaaatcttaggatgcattcttaaccgcgctggggtgaagattgtaggcaccttatccaagagtattggattcccaaagttggaatctgac

SEQ ID NO: 179415 - DNA, 676 bp, Zea Mays
actgcgggttctaaatcctaaaaacataaggtttcttttgtaaagtgtacccgcgaaggggtacagtcagatctcggccattggatcggacgcgaacggtgtggattagactgattttatcccgaaccggtacgcacacggggccccttggattcgcgatctgcggtgctgatttaaaatgctctagattcaacctggaccgtccgattgacatccagtggacacagaaccctatcgcgaatcggtatgcgccccactgatcacagtcgttggcttcaggatcaacgatccagatcggcttaacgcaaaactttactcagagttaatctaaaccgttgccgcagagatcaacggttaccggctctcttccccacggcgacgtggaacgagtccgcgagacgacccgttcacgcctcgcggcggcgtcatgaacggaggacccgagcgagcgccaacgagcactaaacctagcgcagttatgtgcaaaacggagagagagcatggtagcggttagtatcgaggtagtcttaccttggattatgcgcacgggtgccctggcgcacgacggaatgccccggactccacgacgtcggtgagcacttccagtcgccccgaggccacgcagttcaaattgaaggcgcggtcagcttcacgggtccccggcgaacgccctcac

SEQ ID NO: 179416 - DNA, 283 bp, Zea Mays
ccttgcattagtgatatgtttctgtgcataagatactatttatggttatggttggtcactcgttctgattcttgaaaaggcaccagaacaaggcaacacaattaagaacaaggacattttcctcttcaatttatcttcagttttagagataaactgatgagaaaaagttattaagattgaaattttaacgaaattgagaacatataagcacacaaaagatatatccactattatactctcagtattatcttattataaatgaatacaattattcgttcgtagg

SEQ ID NO: 179417 - DNA, 502 bp, Zea Mays
tctctggcgccacgttgtcctccttaggctacgcaccaacatgcggctttttgatccctatttgcaagtacatgcgcgaaacgagctcgacatgtttgccaaatgggtactatctgttggtgatggtaccttgcctgctgaaagaagagcgagcgagcgtgaggctacgtggattacaatccctgaagatttgttgctccgggttgagggtgataaggtagttgcgcttgtatcaaaagtatacccagattttctgttgaactaccgagatcccacgtacctttcctcgtgtgccattgtttgcccaaataatgccacagtcgatgacattaacaactacgttctctcgcttgtccctggagacaccatccaatacctgagttgtgacgttatagcaaaatcatcggaacacataccagacttcgacatcctctaccctaccgaattcttaaactcaattgatgcgaaaaatttccctacccacaaactcgagctaaaaaag

SEQ ID NO: 179418 - DNA, 641 bp, Zea Mays
aatatccgagcacctatctttaaagaaacggacgacgagttgatttctggaaagccaaggggttattcaacaaaaatgtcatacgaaggggtatcaggctctctcggacgttggatctcaaatcgacagccgagatcagatcagcagggcatgagcaactgacaagtggggcccaggggcagaggcacgagcacaactaacaaacggggcctaggggcaaaggcttgggcatggctaacaagtgggacacattggatctgagttggacggttaggattagacttgggttatttagaatccaaccgttggatctagggtagacgatggggatcggggcgatcggctttggccttcttctgccaccagaagcggcgacgcccgcgtttgcggcggagaactcaccgaagacgaagagagcgcaggttccaagggtcttagggcaatcggggtggcctcaagaggttagggagggtgtagggactcgctggcgagggccaaaccatggtggaagcaccgaaggtcggagatccacgacgaggtggcatggtggcgacgctagcaactccgacgagcaattgcgcaatgcagagagcgagggtgcaatcagagtgggtagggggggttccttacctcaaggtgag

SEQ ID NO: 179419 - DNA, 318 bp, Zea Mays
gtcgtgtttcccttgccttgatttgaactccctgagttctgctggttgttggatttgttctgcctcggatatgggtagtctttgataaaatgtccagacttcccacaattgaagcagccagttgaagagctcaggagggcggggaaacgagcaccaggggcactcggctgattggttgaagtgggggcagtggcagggcggatgaaaataggctgtttgaaggggtaggagggtggacgaggtgaagaacggttttgattgaaaggccggattaccaacctttgtcgcttttcaggcccctgattggacctgtcacct

SEQ ID NO: 179420 - DNA, 796 bp, Zea Mays
tggagttcatatgcattttctacaatttaaacaagttctaacatttatttatgcactaaaaattgatttctgatattaatttctgattttcgatgctctctggattgggcctcaaattccagaaagtgcaggggctacggtgtaaaatatcctagacacagtgaacagcaatatgggacggcgggttgttttttgttttagtcagggtctctttagcatgattaccaagccgaaggggtatcctggattgccagccatccgatcatcaatcgagggctcggattaaatcatgggtggtcatgaagtcgtcatctcccgaccaaatcctagccgccccatcctgaatctacgggtgagattttaagtgggcgagattgatcagggatcgctcgatccaaacccacggcccagatccattcctcgaagcggtacgtggttatctaatctgaaccgttcatttatggatctagggtcgctctagcatcttcaacctcacgctcgcactctccggcggcggcacgcccagactacagcgacgagggacagccgcggcagcgccttcgccgcatagcaccacatgcccaaggtcaagtgttcgctacaaccttacgtcccgagaatggcttatgcgcagttcaaagtgagcacaacatggggaaaactcaccaacgcagaggcataaatgaggccggacgaagacgacgtgaagctttcgccacacgatgcgagcttcaccaggactgtcgccggagaccagcaaaaacgtccgtcacgggcgggcgcggattggtcccgc

SEQ ID NO: 179421 - DNA, 494 bp, Zea Mays
gaccaaacagcgtcaggctgagacctggatctctaccggcacttcccagccgaacaaagcagccatagcctccacatgtgatctggagaggccgttcttgaataatttgacatatctagcagcattttctaaggagatttcctcatggtcaccaaaataccccaaatgcctgcacaccttggcaactgaaatgtttccgaggtcaggaggaagcttagccacccttctactcctcctgggcatgaaatcctttggcaatgtcttcttgtttctcaaattgcacctaggtggcgagagcagcccgttaatcggtttggtgataatttgtttgaaggcctccaggggcaaagaatcaaccgactcctccagaatagatggatctgacccaaccttcgatcttcgagaatagacattgagacaacagcgatcaggacgccatctctgatcaaacaagtcctgaataggaggaacaagaacagggctgctgctggccg

SEQ ID NO: 179422 - DNA, 698 bp, Zea Mays
gaaatgggaagaaaagaaaagaaaaggagagtatataatacaaagagaaattatatttttagaattggtacctcttaattttacaatataattaagaataagtttagcacaagtttgaattcaaattcaaattgaacttggaaatataggaaagagaatagagtgtaaaaagaaaagaataaaatgaaccaagccagagtgggccggccgccacacttctcggcccagtcgttttccctccacgtgcagcccactatgctgccttccctacgctactggcagccggggtccacggcgcagccccttgctcgcgcgcggctgtcttccatgcgggacccactgtcagccctatcctcttcctcaagtccgaacggggggcgctaaaacagaatcccgccgtgatcttcgccgctgcgttcgtcgagcggtctcctccgaatcgagctctactccggtataaaatcctagaccacctcatcctatccacatcccaagctgccaggatttgagatctagcaccatgggggggggggaaatcgacctcgccacgggagggagatcatgccctctccccgcgaccatggattcccgcctgtgtggccaactaggcactggaggatggctttggcgcttcaccggtcaacagggatcatgcccagggcccgtgggatgatgcgagtttggctgggaggatggac

SEQ ID NO: 179423 - DNA, 1421 bp, Zea Mays
tttgctatagttcgagggctagctcggttttgggatgatgaaacactaagcaacattatgacagcttgcattatcatgcataatatggttgttgaagatgagggaatagttgatcccaacgaacgctttgacaatggaggaggtaatgttcaaccatcacatgaccatacaacagatctcgatgaatttattgagaaccatatgaaaatcaggaataaggagactcaccatcaacttcaagaagatctagtcgagtacctatggcaacaccatccagacatgtatacatagtctcatgtttagtcaataataaattatttgtaacctcgaccttatgtaacatgccatgagacacaatgctgttacactaagtgtatcaatcattgtctagacttttacctcatgttggaacagaccagtcatattattcagtacaaaaatccacagatgcacataaaactaaacggaaaacagtatataagagtagcacatgcaactaaaaatccatagattgttcatctctatgtgtactcagtgaaacaaaataatctaaagtagcatctatgatctgaccaaaatttgaagaaaaaaacaactaatgaaacaaaataatctaaagtcgcatctgtgatctgaccaaaatttgaaaaaaacaactaattcatgcgacgtgcaacgatatcagcctgcaaacacatatagtattgtctttgcaattcactcatagtagtaaggtctatactcataattttctgttcttcttcaatccgcttaatgtaaaggttgtttgcttcattggctaggcgctctttctcttgatcaagccttttttgttcatttgtatgcttctgttcttcaattgtaagcctcttgtgttccagctcaagcctctctttatctagagcatatgcttgtgcatacctctcctctctctttaactccttctctacatcagcctgtctcttcttttcccacaaaatgtccaatgcatcagaacatgcatcaaaaccccctttacacattgcttcttttgacctcttcttacccattggtctttctggtgcagctatatttggagggacaatctgtacaggagaaacttcattcccaacttgagtagtaagatcaactaatcccggactcaaatctttggctaccttctgttttttgttgcttgtttttacagctgccatttgctgcagcttgtcatgccattttggctgatttctgagctggagccaacaatgcctaaactgaaaagactttttttgggggtctagagactggaaaagcttttcagcctcctccacctgaatgaaataaaaaaattagagatgcataataaattcagtataactagaagtagtattgtgtcttaccctgtcatgaatagtcatcccactctggtttctattgtgtat

SEQ ID NO: 179424 - DNA, 416 bp, Zea Mays
aacaataaaacgtaggtaacaaaccactcggtacacagcaagggatcattcatatgcctgcgaactaagcaacaactgctggtactgtgttctccgctgcaaaccttcttcaagcaatgctaggcagagcagaagcaacaagataagagacgggctctccgtgcttagcgaggccgatgccgcagcagaacgtcttgaacatctcaagcctctcttctgtttccgcgacttctttcaccgccctgtccactcggcgctcaaggaagaactcaacgcagcgtcggctgctccgcagcatccagatgatcagctcaactgtcccccgccgtatacctgggtactcggtgtctggtgacttgtacacggcaagtatcctgctaagcttgtgcatgagcaaatccactgtgaggttggcg

SEQ ID NO: 179425 - DNA, 513 bp, Zea Mays
aatcgaacgacaccagatacattggtcaaaacggtactcaacaactaatccggaccgttggattcggatcacacggccacgacatcatcttcaccctccagtcgaactcgcggtcaggaacggcactacggcggcgccatggccgcagtccccccccagacccgagcaggggaccgccaacaatgcttctcgtcgagctacacgcgaggaagacgaaggctagacagatacgagggctcttaccactgtctgttgtgcaggcgacctccgactatgatgagcgacggatccagggcgacgacgtatccatggcaagcgattccaagagctccgtccatgatgaggccaggacggtattccgagcggcatgatgaggcccatgggtccaattccgaagacccgccctaaccgcatgccaatcctagagccgcgccgccggtgagatgcccatgcggcggccaggatcttctctcgccccgctccgctctgtactggtgtccccatcaaatcccg

SEQ ID NO: 179426 - DNA, 861 bp, Zea Mays
gccagaagccacgaagacagtccgtggaacgacaggacttcatccgagaagaggtccggaagctattgcatgctggctttattgaagaggttcatcaccccgtgtggctggccaacccactcgttgtgccgaaggccaacgggaagcttcgaatgtgcatcgactacaccagcctgaataaggcatgccctaaggacccgtatccactaccgcgtatagatcagattgtggactctactttggggtgcgacctcttgtccttcttggacgcttactctggtttccaccaaatccggatggctaaggaggataggaggcataccgcttttgtgacagtacatggactatactgttatgttgtaatgccctatggtctgcggaatgccttgccaacttttgttcgggcgatgagcaagacctttggggacctgatccgagataaggtggagatttacgtcgatgacattgtcgtcaagactagggaagggtcggctatagtcgaagacatgaccctagattttggcaagctgcgggcaacccgcaccaagctaaacccggagaaatgcatcttcggtgtctccgcagggaagttgctggggttcctggtttcataccggggcattgaagctaacctggagaaaatcaaggctattgaggtaatgaggcctctcgctcgtattaaggacatccagaagcttaccgggttgctagcagcccttagccgcttcatttcgaggttggctgagagggcgctgcctttcttcaagctcctgcggaaatcaggcccatttgcctggtccgaagaggcggaacaagccttcaaagaattgaagcaacacttagcttccctgccgatcctgg

SEQ ID NO: 179427 - DNA, 557 bp, Zea Mays
acgaagaagaagaagaagaagcctacgttgatgatcgcgagcagtttgccccgcctccctaccatggggatctgggtcaatcatcctctcaccctccgcctccctactcgggtcagggacccactcccggtgaccctaggccgtccggctctggtcactatcctcctccctacccgggtccgggacccattcctggtgacccgcggccatccggctctggttaccatcatcaccctccacctcctcctcatcatcgtacatctttggcatctggtttttctgcgggtgatgagccccctagggactcctcactcgaggaagacgtgatgaggaccttcttccctgactacacatcataccctccatcataacctccgtcctatcctcctcctggaggatattgattcatgtatccttgtctctctctctctcttcgtttttggtacttgttgccaaaaagggggagaaaatccaaaatttctagtcattctgtttgtggttctttcgattatgtatttcttttggattatttttttgttctggccactgttgtggct

SEQ ID NO: 179428 - DNA, 509 bp, Zea Mays
tttttttttggggggggggggttgggggggggattcttttgcttggttcataaagatcagtgtgtgtgggatctgaactgtaggctaaattcacggctactgatacgacagacagacagacgtgcatgcttaccttcacctaacagtcactgttcatctgttattgcgcgccacagccatgtctgacggatactaattacgcatgattcgattctgcggattttttttgacgtgggaaatgatgctgtcatgatcgcgcgctggctgttggttaaaactcggaagcttttctgtaaggtaggatatatagacactatatcctgtattatctatagcagccactcagctagcagccagcctcatctcattcgatgatgatggctatgtcattgcccacacgcttgcttgagcacgaatcctctccgacccagcgcgatgatccacttccaactgtcaccctgattagcagcgttttgtctcgatgaagtaaccgtcgtcgacaagctgca

SEQ ID NO: 179429 - DNA, 560 bp, Zea Mays
tcatatttcatgtctggagtctgagatagctttatctcggaggtgtccggagatgaactcttctcaggacagttactaaggtaatgatcttcacgtccatattgatagcaagactttcttgaagttatttcctgacattttccatgtttccatttttgtttcttggaactgatgcgacgacgaggctgaaactgtgtgcatgtgatagtccatccatcaatgtaacactcatttgcttcttcttggggctgggcatccttatgatgtttcctttttggaatactttgcaattcatcatctgacagtgcattaggtacgagagaatctgctattagatgttctgggggagacatctgtctgtttatgccagaaaatgaaatctggttcttctgttttgtagtttcactttcgtttgtactgatctggtgacaaggaattccatagtactcacaacaataacatgttccagggtcacttgtctgttggtttggttgtgcatccttttgtgtcttcaatgtctgttcatcaactattttatttagagtgttgttttgacttgc

SEQ ID NO: 179430 - DNA, 853 bp, Zea Mays
aaatcaccgagttgcgaggtcatcaccttggtggctaggggaaagagaatcggtaaccattttgccatgatgacaagggtgacagacaagatctttctcaaatttcaatttgggcaatccttcgatgatgtcaagtgagctcaaacgacacaaaagatcgaagctcaaatgacctagcctcctatgtcacttccaaatcagataggaaattcctacctagagacatcaagatgggtcggctgaatggaaaaaatcagctcgaaaaactcgtccaaatggagaaatctggcaaacaaactcttcccttgcatctaaaacacaagaaataccccctcttaaagcgcgcttcatagtcatcctcaagaagttgtgaaatagaaagcagattgaaatgcaatttcgaaaacaaagcaacatccttgattacaaaattcttatccactcgaacggagccatgggagacaaccttacctctcgacttatccccgaatgtgatgtattccttactaatcatggggtcgaggttggacagccatctgaagctttcagtcatatggcgtgaacaaccagaatccatgagacatgtgttctccaggccttcatcctgcatcaacaataagacacggggtgagcaaatggcacaaccctatgttaggatactaagaataataccattgttgcagcatttgccactaaaaggtgttacgaaaaacaccaaacatccccagtcccatgggggatagcgatcaccacgagaaggaaactatggtccactgggaaagtaagaacaaaagcctctgccacgggtccttggatatatggcacatgaccaaaaccctgctgatcatgatca

SEQ ID NO: 179431 - DNA, 909 bp, Zea Mays
gcgattcctgcggcgtcggcttcatcgccgagctctccgccgagcccagccgcaaaaccgtgagcgcttccgcgactacgcgcgcgcctgcttggagttcatacttccattccttattcttccttgctgaagctttcagtaactcagtgctttgtgccagcccctgtacatgtcagagttcgcttaacgtggcctgtgtctgaactgtagatcgtcgacgccgtcgagatgcttgagagaatgtcccaccgtggcgcctgtggctgtgacaagaacaccggcgatggtgcgggcatccttgttgcactgccggatgcctttctcagagaggcaagcttatgtttagttgaagttgttaacgagggagaaggactttctgtggccgaggggtcactttgtgcttggttttgtgtcgtgtcaggtcaccaaggacgccggctttgagcttccaccgcaaggtgagtacgccgtagggatgttcttcatgccccacgatgatgaccgacgtgagaagaccaagcttgtgttccatgaggttagtctagtgaaagagtacaaagaagaagaagaaaagggcaaaatctagtcgagacaaaagcgtgttcatttttgtccggcatgtatttggactgcagattgccgagtcattgggacatgtagtgcttgggtggcgtcgggttccaacagacaactcggacttgggcaaagcagcgcttgaaactgaaccaacgatcgaacaagtgtttgtgtctaagagcatgcactccaaggctgactttgagcaacaggtcattttgatgagctataaaatttgaaatctgtgtgatagacattgtctgttgacttccttctgcaaattgcatatgcagttgtacatcctacgtgggctctcaatcaagtccatccgtg

SEQ ID NO: 179432 - DNA, 1123 bp, Zea Mays
gggatcgggatcccaaggagaagagaggagaggagtggagtggaagaagaacgaaagcagagacttcgacgcggggaagtgacgaattgttaggtccacgtgcaagccgctgcgatggcccacagcaacagtggaacacgacgagggtacgtgtccaggataataaaaatcaggcacacacatcgatgacgagaaaacaaaaggaagataggacaagctagattagcccaaattgaccaagatgcaagtttttttcgcatcgagaatatctatcctcactattggtctcattttcactacttcgttaggcactatggaatctgtttatggagtaaattattaggttccacgaatggatcttccaagattgtgcaagggatttatctagctgaacatctaactctgagtcttccaatacgacactagtagtagattctaaaggtaactgtggttttcccactaggagaaatgtcaacttccgacgccccaagattagctgttagttcgcgcaaaagtttcaagctcctcacataacacaaccatcgactactttggtaacttcggccaatccgatccaatgacgatgactcgaactcggtctccatcgtggtatcaactcggactggacctcgttatccaaaaacgaatttcgactattactccaactcgggcccggatacacactcacgccctaaagatgacccgcacatgtcaatgcgccgacactagcgatcatgtggtcaaatcacctctaagccgagtcctcagacgacgcaactaaagagcctttgacaactcagctaaacgagatctacaccaacctgtcaggtttaactgcaccttccaacgacatccttcgagatctagaaccgtgcagacaggaaggaaaatcgaactccatgattttgatggccccacctgtagaaacggcttagacaaacaattaaggtcagtttgggttgcatgttcagctcactacgcacatacgaaacagctttggtttgctatcttatcacaatttaacatgcttaaattagataagtttgactaaattagacatacatttggtctcctgctacatgaatcctactcctcatgacatataaaagtgtgacaagatttc

SEQ ID NO: 179433 - DNA, 275 bp, Zea Mays
cccgggaaggcaaatgtggtggctgatgcccttagcaggtccggggttccaaaagtggccttgcctttgaccgctgatctggaccgtttggggatcgctttgtgctatgttggcactgctagtgaggagactcagatgtttattcaatcctccctcatggagagagtgcgtgcggctcagcagcgggatcgattattgcaggaagctcgaaagagggttggtgatggtaaaccccgtgagttcactattgatgagaatgatttggttcattttag

SEQ ID NO: 179434 - DNA, 947 bp, Zea Mays
gattatggccacaaggttcaggctgccgcgagggttgctcctccgtctagtggcccgatcggcctacgttggtatgtatgtatgaactgacgtagtcacgtagagactggaacactcccgcatgccaattctcgtggtaactgtctgtggaccacggcgccatgccattgccttgcagcattcacactgttcgtggcggtgaccttcccgttcttcggcgacctcctaggcttcttcggagggtttgggttcacgccgacctcctacttcgtaagcagctgcagctctgccttccacgctgacacgtaccatagcagtgacgactgacgagactcgttggaccctgtttgcgcagctcccctgcgttctgtggctgaagatcaagaagccgccgaggttcagcgcgtcgtggtgtgccaactgggtaggcgacgaccgccacttcttcttcttcctcgcattctttggctttttcaaactgggagagagtccagagctgggactggcctctgcctgctcaccacttgcttgctccgtccgcgtctctttgtcagggctgcatcatcgtcggagtgctgctgatgcttgtgtccaccatcggcggcttacggagcatcgtccaagacgcatcgacgttccagttctactcctgaagccctcacacttgcatgtacctctacactcacatggttccagcaagtcgtcaccctcgctcgtccacgcagctctacctctacattttgttgcaagcttgagggtgtccgggtgtggctgcagcctgccgaaatgcagaggacgatgcagcaaactgtacactcgctaagacgtacggttgtgtgttctacggatggggggggggggggggggggggctttcctgtgcgcgcccagctcaatctgcaaggtgtggttgcaacaggcagatcagacgaatcgtttagccgtagt

SEQ ID NO: 179435 - DNA, 908 bp, Zea Mays
ggagtcgcatctaccgatgagcgccaccatgacaacacgggagaaatagccgccgcacccagaacccatcctcaccagctcccagaatcaggggtttggtctggggtcttcgtcggagttcgcgggagcacgaggtgcactcgccaggcacgactgatggctggagcggagggaattcttcaccggagcatggacgtcgtggtggtgtcatgtgtcgtcgtgggaggactcccccactacaccgctgcctgtaagatgcctttacatgagtttgtgttgtccttcgttacatgtagcgccctttgtattaggggtatgtgacctatgatgccggggcgctgcctcattatcgtgttgccatcgcggggtgggcgcacgccactggagtgcaaggtcggagcgagaataagaggttagagtcgttgatctccttctgggcgactctgattagaacgtggagatacccctttgtgcattaaaccgtagtcgtcgggtttggatcggagggataggataacgttttggctagatcagatcttggtcataagatggagcgttagtggattagattagatctctccctaataaaatctagattgtatattcaagatcggacgaccctgattagaaattgagataatgttttgatccgatgaaaactgggcatcaatcggggatctagcagctggaaatccataccagttcaacgaggggatctaattcgcgcctttagttgaagatctagcggccgagacacgctcatacccctttggctattgttgttttgcgtaagagaccatgcgttcctcaaaaagcaacccgcagtccaccccagtgcaaagactctcacgaattagtcctaagaattctgatttagaccctacagtctccaaaaatataaactgcca

SEQ ID NO: 179436 - DNA, 631 bp, Zea Mays
atggttgtgagttttgccttgtattttgaatccatgtgtgtatttagtctctttgagcatgtagtgtgaatgtgagttaatttatagtattctaatttggtttctgattaccgttgtaatttttcaggcaactttgccaaggttaccaactacaattttggtttcctttttttccctgttgccaataccactgttgccacaggatgtttttacttttcagtccgggagctattttatttggtttcatggataagcatccttgccagcattgtttacaaaaagaacattctactaccaaagctgcacaaaattagtggtttgagttctcgtgtactcttctatgctgcagcataatctgtttcgttttgggaggagctattttatttggtttcatggataagcatccttgccagcattgtttacaaaaagaacattctactaccaaagctgcacaaaattagtggtttgagttctcgtgtactcttctatgctgcagcataatctgtttcgttttgggaattgggtactatgtttgcttttttcattagtgacatggttgtgagtttttgccttattttgaatctaagtgtgttgctatttagcccctttgagcatgtagtgtgaatgtaaa

SEQ ID NO: 179437 - DNA, 590 bp, Zea Mays
ctaattccctaccgccggcccactcaccccttttgctccttcacgcgccagcccagtctaatttcgccaccggtcgcttacacgtgggcccgggacctgacgatcttctccatctcgcaactgcgcagcgtggtccgagctcctcgccgtggaaatcggaccttcctccctacaagttcggcctcaccattgcatccttgaccggttcggggtacatatggttcacgccctccgtgctcgttgagatccctggatcgtgaaccagtgccgtgcaagcttactaaccgcgagagagaagagaggagcggccgccgcgagtaatccctgcaaggtcgtcgatccggtcctcggtggggtgtccgcgggcttcatctggccggtagggaggcatccgtggcaaaagcactcggaatccgtcgcgggcctcgccggaattcctcaccgtgcctcgtcctccactgcgcgccgcgagcaggagtctaccgccattcaatcgaggtactaacgccatccacgtgttcgcattgttgttcagtaggtttagcgttagctaatcgcattttggacgaccctagcgcgtggaattgctc

SEQ ID NO: 179438 - DNA, 466 bp, Zea Mays
tggtgacgcgtctcatcgtagctgacgtagattagtagcgttggactcagatctttgcctcgccgggttgctcgacggtgagttagtcgtccggagctgattggcggagagtttgtcatcaaagatggtcatcggagttggtcatcagaaagctagtcagtcggtcttcctcgcagagttggtcggcggagttagtcatcggagggttggtcagtcggcccgtctcgcagagttggtcgatggagttggtcggtggagttagtcatcggagttggtcatcgaagagttggtcaaccagtccgtctcgcatagttggtcagtggagttgtttggtggagttggtcatttttgaaggggctattttgggtacccggttcccgagtactcgatagcatccctcgagcctttgtgtaacaccttggagttgcatagaggctttcgttgaggcccaaattcttgggtgcgc

SEQ ID NO: 179439 - DNA, 787 bp, Zea Mays
caacacctcagtcacagaactaggagcaaccccagaaagcataggagcagcagcaaacacagggtcataaccatacaaggccttgaatggagaacaccccaaagctgtgtgatatgaagtattgtaccaaaattcagcaagggccaaccatttcttccaagtattaggtgcctcatgaatagaacaacgaagatacatttccaaacactgattcactcgttctgattgcccatcagtttgagggtgatatgcagtagtgagagccaatttgatccccaaagcctgaaacaaagatttccaaaacaaactggtgaacactttgtctctatcagaaaccaaagactttggtgtcccatgcaacttgacaatattgtcaagaaacacctgtgccactccaacagcagtgaaaggatgcttgagggaaaaaatgagcatatttggaatatcgatccaccacaaccaaaatagtatcatatccctcagatctaggtagaccttcaatgaaatccaatgtaagatcctgccaagccccttgaggcactggtaaaggttgtaggagacccgaataatgcaccctttcatgcttagcatgctgacacacctcacattgctgcacaaactgaaacacgactgacttgagccctttccaccagaacaacctcttgatcctttggtaagtggcctcaccaccagaatgtcctccaccacactatcatgcagggctgaaatcaacttagtttgaagggcagaattgttagctatccagatttgatccccttttctaata

SEQ ID NO: 179440 - DNA, 1182 bp, Zea Mays
aggaaatcagggttccaaaccttgggttgagattttgggatgttacaaacctaccccacttaaaggaatatcaccctcgagatttagactggatttgagaaaagataagggtaatccctcctcaaagagtcctcactctccgaggtagcttcctcttctccttctctgctccactgaaccttacagagttttacttctaaggtgcgggtcttccggactgctgaatcaaggatctttactggcttctcacggcactgaagatctttctgaatctgtattgcctcttcttcgatgtgactttctggtgcttgcaggcatttgcagagctgggacacttgaaacacattgtggatatcagacatggattctggtagatcaagacggtatgctgcgggtcctactctgccgatgatgggatagggaccgacgaatcgcggtgctagctttcctttcacttggaaccttctgacaccacgcatcggggagaccttgaggtagacgaagtctccttcctcaaatctgagttctcttcgcctgttgtccgtataactcttctaccgactctgagcttcaagtaatcttctgcggatcagggcaactttctcctcagcctctttaacaaaggcaggtccttctagtgccttttcccctacgttggaccacatgagaggggtctagcattttcgtccatacaatgcttcgaacggtgacatcttgatgctggcctgatggctgttgttatacgagaactccgcgtaaggcaaactggattcccaacttctatcgaatgttaacacacaggctcttaatagatcttcgaggaccttgttgaccctttctgtctgcccatctgtctgagggtgataggcgatgctgaagtctagcttggtgcccatagctttctgaaggcttgtccagaatttggaggtgaactgggttcctctgtctgacactatctttcttggaatgccatggagcctgactatctctttgagataaattcgggcaagggtggctcctccaaaggtagttttcatgggaatgaaatgggctaccttggtaaggcggtctattattacccagatagagtcattccctttttgtgtccggggtagtccggttacaaaatccatgcctatttcttcccacttccattcaggcactgggaggggttgcaatagg

SEQ ID NO: 179441 - DNA, 667 bp, Zea Mays
atgaaatcataatacgaggacaatgcatacgtctacgacggttactggaagtaaaagatcccaaacatttgtaatatatgaaggttatacagagtaacatacaataatttattggaaaataaatctaaaacaataaacatgccattgcctgctaggactaccaaatgggacttacatttacttcaaattgttaggcctcaagtttgttggagctgtaaagagaacaaggggagggaagctacatatattacaaatgtttgtcagaaacgaggaaacaaccgaacgatagttgagctaattgaatccatttaccgctgcttctgaaggcttcccagttgcttcccaatgtaatcacagaaccttagatcatatcatagcaagaagcatggttcagctcaactatgatgccatccacctgcattccaaatttcaatcaatgacaggaaacagaacacaagaagaccaacaaccagtaaatatcttaggccaaaaaggcgcaagtgcgattgtaaggaagggaaaatagcacaacatccatgaactaaacccaatcagatattcatatgagatggaattgagcgggggagacaaccgaattaaagttacaaggcaaaaactaaagggaggaggatgagcggctgcacctgcagtagcgagttgtggccga

SEQ ID NO: 179442 - DNA, 557 bp, Zea Mays
atgccctcccttttttttgtccgggtggcacgcagctcctgaggcatggctactgttcaaggatactgtatgtgcagatcatgaagataggtgagtgagttgcgttctggttgggggtagtctgtactctgtaggtagactgcgatctgatagcacgatgcatctcatttgctaggccaaccgaactgacagatgtgcatgcaagaatccacctcacagctatgattttcctcttgattacaattacttgttcacttgtctcactcggaatgatgcatacctaatcaatgttgctggctttcgtaggcctgttaggctgttacactcccattgcatggttcatgtattaatcttcgtagaaggatccatcatctaccaatctcagtcaattctgacttgaatgcaatctccgtgctgacttgacggcgacgcaaaaatactgttctgtttctattggatcatgattttcgttggtttggtaggaaggctgtcgtcggttcctggcttttgctccttcaggattaccaactagtacatcttagttaagcaagcaaact

SEQ ID NO: 179443 - DNA, 603 bp, Zea Mays
tgcaaatgttttgtgcggggagtctttttctttcaaaggtcctcaaaacttgtgcggggagtcttctttcaaaggtcctcaaaacactaacctgacagttatcttctagcatgtttaaagcgttacaggtagaacaccgaaggtccgactcggccggagcggccatgagcgcaagtacaaaggcaccaactttggattaacaaggtgtgtgcgtagccgatgaagcaagacaaatcaagacaaaacaacgggacaaaaagacaacgctacccttagtttgttcactagctcaaatgtataagtttaagggcatacttgtaatttttccaaagctatacctcacgactataaatagagtaacattgccatgcattaaatgggtctttggataagagaacatactactctgtctcagaagttgtatttacttctctcttcttttgtaccttcgcgaggatagggataaccgtgggtcgggttgtgttcgggtataacaatacccgacttaatattgtacccgatactttaacaaatattcatacccaccaatcggtcgtgaaattatacacgtaaacactgggtatcagttattcagtggaaacg

SEQ ID NO: 179444 - DNA, 380 bp, Zea Mays
ggggttttggtggggaggaatttgttcttgacaatggcaccgctcattgtggtggtgggaattgatgatgggggaggtatgtttcattctagttagcgagggactagcagtgatgacagatgcagtggcaggagccgctagagacagaggaggcaggcacagtgggggtgctagagccaggaggaaaactatgggagaagcgaaaggagtcgtacggcttggtgctcatggtgtgcgacaccatgacacgcagatgacaggaaggcggcaggcggggtgcttcatttggcccattgaatctggtgtacaggtatcattgcagtagcaatatggaaaagaaaacaggtcactggatgtccgtcataaaggtccaaatctga

SEQ ID NO: 179445 - DNA, 540 bp, Zea Mays
cacaagttctagtatttatttttgtattaaaaataaattcctatttcattttccccgattttctaatttcctggactgggcgcaatatttacagaaaacacaggggtctcgggataaaagttcttaagactcagggcacagtggagagggacggcgggtttattttaactttgctcagggttcctttagcaaaattgactcggctgaagggtacgcacggatcctgatcgtccgatcaaaaatggacagccacgattagaattgagccgcggtgaaccggtacgcacacgggaccctcggatctagatctgacgcccccagtttaatgaatcccagagttatgaccatcatccgatctcgatcggacggttcccgttaccccaacccgaaacgctacgcagtcaccacatccggcagtcaaaaagagatccaactgtacaccgccatcgtctttgacgcgccctgtttcccctccgtccgccgcagcccgaccacgatggaaaacccaacaccggtgatgaccgccccgaccagatggcg

SEQ ID NO: 179446 - DNA, 1033 bp, Zea Mays
cgaatcccctcatttaattgggttgtacatgacctaaggtaatccaggttttaagaaatatcgtacggtgatttaaattctactcagactataacttaatagaggtgtgctattagaacttctagttttattaaaacttgagtataaaattctactatgtgtatgactcctatttacatgtacgagttttagcaaagactgtataaaaagatatataggctataggcagtaaccaagaatttaagccaattcagaatttattctttgtttctccacttctttcttttacctcccaaaccttgtgaaagtatcaaactgaagttagatagtttgagccagatactaccatagtggcttcgtagaatggttctaacaagatacataacttctttgacatctcccaatcattaggcgaaggctcatgtgtggatttgtgggtcatttcgccttaaagcttcatatgctcttctatacttcaaagatgtcttaagaatatgataggtcgaatttcaccgggtgaggacaccgaatgtagggtgtttctcaacatcgagtacaacaactgtgtggtcaacttgaggaggaggtgccaccaatgaagatattattggcggagcaggagaaatgtcgagcacgaccgatggaaaggcagtagtgacacttcacaccagggactttccccttagatgtgataaggttgtccttccctctctggtctgcatagatcaatagacgatattattaagtcaataacagtatcaagtgcctgtgctaattattggaagaggagagagggcgatagtgacgacagcgcgagtgagggagagggcgcggcgaggatgcgagggagggggggactagacgcaacgaggtcgcatgggaggagaggggtcgatgacgacgacaatgcgagtggggggagagggtggcagggacgtggggagggggaggcttttgtcaatggagtcgcaaggtgatgatgagggtgagagatgatccaaataatattgtccattatacttgaatgagtaag

SEQ ID NO: 179447 - DNA, 532 bp, Zea Mays
agacacgatcacggtctgaaacaatattgtcgggcataccatgtagtcgatacacctgatccaagaatagtttggctaccttaggtgctgtaaaggggtgagataaggccagaaaatgtccatacttggaaaaacgatccaccaccaccagaatacaatccacgacaccagacttcggaaggccctcaataaagtccatggagatggagtgccaagcatggggaggcactgggagaggtgcgagcagacctggataacgagatcgatccggtttggcctgttgacaagtgctgcacgactgaacatacacacgcactgcctgtttcattcccttccaatagaacagttgcttaatgcggctgtaggttactggaaaaccagagtgtccgccaataggtgaatcatgaagggccgaaatgacttggcgttgtatagcctccgaactccccagccacactcgtcctttgtgtcgaatgactccctgagatagagtgtatggggcagcagcatccggggagacgaccagtttggt

SEQ ID NO: 179448 - DNA, 766 bp, Zea Mays
gatgatgagtgtgtccgcatggagcgcgatgcgaaagtcgatgtctcttgcttcgaagattagtggtacatgagaccactttgtctgaacaataggtcctgtgatagcaacatggttaacacttcagtactgattccttttctgtcgtttgttctcaaattccaagctggaccctccgaagattatatgatcactcccctgaagggtggatcggcgaagtcctcctactttggtagtggggggagtggtaagtgttggtttggatgctgtggtggtggtggtagggctaacctttctcagtgttgaaggcgttgttgctatgggaagatattggggttttgctgctaggggtaatatgggtgctcattttagtattgatgctggtggtattgttgcagctgatagctatgagcgatgactctttggttgtctgccggggcggccatagccatttggtcctttatcgccttggtcttcaggcaatccctggttgggtgcgctgagtcttcgccatggaagacatagtagaatcttcttggctgctgagtgcctcgggcctctgcctctgtccctagtcgcatcgccaccgcggccttgtggggggggggttctctcctagttgctgctggtttgcgatgttatgtatctgaagctgaccacactcttgctatgatgggtcctactgtggaggcctgatccatgtcttgctggattgcagagtcacttttggcattcaccgagactcaacttttctttggtggagttc

SEQ ID NO: 179449 - DNA, 692 bp, Zea Mays
gtgcaccggacaggcactgtagactgtccggtgcgcccatatcgcgtttttaaaaatggcctccaacccgcagagccgagccagaggctccctgtttctctctgtcagcttctgctctcggtctcaggcgttttccctcccctcaccggcgatctcctctcaacggcggcaaccctccggcgacctggtcttcgtcctctccctctcggtgagctggctcacctcttccccctaagttcccctctcacttcctctcagttctctgtttgtgacttttggcaccttttctccacccctttcacctctattcaaaatctctgtgaaatccagtgaaaccatgtggtcatttgtgttcctatgtgtgccttgaacatccttgcaggttcctagctccttcgggagggttttcatacctcaaatggccatttccccaaaaccctagcttcccgcacgccacatgctcggtgaaatgcccaaaccagccaaaaatgctccaattgaacccaaatttttcaggcaccttcacaacacttccagcaacacccttgccaaatttcacgccaatccgagatctcaggcttaaatttcaccaaaattcccgttttgagcgatcgtttccgagccgagtgcccaaatctctttttcttcgcctaaattcaaaccaagcacacacttcactcatattcacctat

SEQ ID NO: 179450 - DNA, 1346 bp, Zea Mays
gataaacaacaattttataaaatatagaaattggaatgggtaaaaaaggatttaatatgaattttatatgatttaaatgggtttctgcaattatttttatacccaaaaaccaatttctaatctcttttatattaattacccccctgactcgactacgtgcatgatttcctgggaatcccggggcgattctacaattttcccaacactcagcgcacaacatctttggattgcgggttaattcctagaatccccgaggactctttagcaaaattcgtggtcgaaggggtatcctccatccagggccgcccgatcagaaacggacgcgcctgattaaatccaggtgagctacacatccgcgtttaccgctgaccgtccgatcagatcctacgatcaggatccaaccacccgaaccggtgcacgagatctaatctgaagcgttcaagcgcagatcaacgaccgagagccaactgagcgaatgggtacacctaatctaatccacgttcattccttcatcatccaacggccgaacccccttctcccccaacaccactacacacagcggcggcgtcaccgcgagcagcagcgaagttcaacggagatcgtgattctggccctcccgagcgccatgccccaattcgcatgacccacgcgaaattgatgactccccgagccccattctacaaccaattttggccaacaccgagtacaggactcggtacacgttgcgccacggcggcgccattgccgtgcaccccgtcctcgcgatacgctatcctatacctcaattcgatggagcgatacccagagaggagggagacgaacataggggaactcacatatgctagaccgagatgaggtggcgcccgaccacgatgaagagcggacacaaggatgcagctagcgctccgacgagcacttctcggttccccgctccaacgaccgccaccaccacaatcgagctaccccggcgaagatcccgagcggcgcccaatgcctaagagaggtcgcaaccacggtcgtcgttgtcggcaacactattctttctcccctggcgacgaacgcaacactcaccttaccgaggtcgcggagtttctggtgtgggcgtgatgtcgatgattagggaaaggccacatgggtaggattatatgctcctaaggaaggggtctgagcggcgaaaaggccacggccccggaggagcagcgccggcatgcgcggggttagttgagctccgtgcggtgcgggattccgtgaagacgactccacagttgagcgggcctacatgtaagtgagacgagggcgggcgcgcgtgtgaagaacgagcgccaagttgctgacagctgggcccc

SEQ ID NO: 179451 - DNA, 460 bp, Zea Mays
ttgctgcgttagggtgtttgttctttgcaacagctgtgttaccgtcggtcatccggtatacaatccatgtgtggttggtggattcttgctctttggtgcgtgtgtctgtgttgggatgggttccagatacctggatttgtgagggacaggctatgcatactgcatctttggttcacacagtttgttactttgtttcgatacttaggtgccacgtgcgtatagagcagttaaggtggatttgcatcctttagaagagtgacatctagatgtgtgtgggtttatggtcagtttttccctttggtcttagatgtcgtttctccaacaaaagttatacttatgctccatcctgcgcttttacactcgaacagttaaccagtaactctggcatgccagtaggatgtaaagggcatttgcaaggagtcaaccgcattcaactaacaaattatcaatttcactggaa

SEQ ID NO: 179452 - DNA, 296 bp, Zea Mays
catgggagggtgttggaacaatagcacagagggcgagatcggacctgagttgagctggccacggcgaggtgttcttcgcggcgtatttgaaccgggttgggggaaatgcaaaatttgagctcgctggtgattggctgggagcaatactgggtgtgggggtgcgtgatgatgttgcgaagctgacggcgggctcaatttataggccaagtgagcggtggccgggaatttgggttgagcgcggtggcggtcagagaagaagtgagtcaccggcatggtgattcgtggcctccttaccg

SEQ ID NO: 179453 - DNA, 731 bp, Zea Mays
tagtcagtccaaaagacatgactaaaaactcatatagtccatatcttgtagtgaaagttgttttaggtatatcttcagtccgaatcttcaactgatgatagcctgatcttagatatatctttgagaatattgtagctcctctcatctgatcaaacagatcttcaatccgaggtcacgggtacttattcttgatcgttacttcattcaaacttctatagtccacacacattcttcttgaaccatctttcttgttcacgaatagaattggggctccccgtggtgatgaactagggcgaataaaacctttttctagtaattcttctatttgtttctttagttcaattaaatctttgacatccattcggtaagctcttttcgaaatgggtgcggtttagggtaatagttcaatagaaaactctatatcacgatcaggtggcatacctggtaattcctttggaaatacgtctggttattcgcacactatcctaatgtgctccaaagatttctcttccaactgatttaccattgtctctactattgctggcatactgacattgacttcaattctttctcttgtggactggttaatgtaaccatcctcttggcataagatatcactccatcatacttggtcaagtagtctattctaagtatcacatcgattccatttgattccaaaattatcagctctattagaaaacttaggcctctaatttcaatcatagtctgag

SEQ ID NO: 179454 - DNA, 608 bp, Zea Mays
ctgactaccgctacccgttacgaggtcagaaaaggaaaggtgtggcacctgtgaaggatgttgcttcggctgctccaagcgagtccgcgctgaataggaagaagatgaaggttcttactcaccggtcgcgatacattgaaacggctacagtgcctgaatttggtggtgagacctcttcggctaacaaagccaaagaaactgcgctaatgcagaaaactgaagggctggctacaacgccgaaggtaccattggtcaaattgggtgagccacaggtcaagagaacaaagttatcagaaattacaagtccttcggcaaaagtatccgtgccgaaggcacaaaaagatcttgcaattacccctaagaggaaaagaatggtccacgtattggatgtactggaagaaataaaaacttcaagctctacttcaggtaaaatagccgaagcttcaaaaacgcaagttgacataaaacaaattgaagccgaagctgtagagagtcatgctgaacccgaagctgggccctcagagcccgccagaaagaaatccctggaaaaagaaatgaaaaagacacttcagaacaacttttgtctgagcaaactggtgctcccacac

SEQ ID NO: 179455 - DNA, 615 bp, Zea Mays
ggcgtgttgtagtcgagcggcgtccgcgcccatgccctgagcagtgcgacgagagatgtctttccatagccgatggacgacgaggctgcaagcaagtaacacaaacctgttcacgcccgtacctcaagcagtacgatggcatggtgatagatctctagtcaggtagctttatatacctgatggacgcgcaggctgctttttaggctacagacacggacatgggcttgggaaccgcttcatatggggctgagacaagcagcacaatttctaggtgcttgagcgtgcgtcacgcatcaagctgcaaaggcatctagaaaaccgaaaaacacggccgtgcaaggaaatcgattgcagttttaatagaagagatacttacacggttgtgtgtcatataggtctctaaacttgttttgatgtcattaaagatctaaactattggagcatagatgtgcattttgatagtttaggactagaattatacaacactccaggtttagggacgctagtgtattttagtcatgaaaatatatataagcatgcacacccattagcagcgcatacgtatgaatgatgtttccttctgtactgacctcgcgtcacgcttctgctaacggc

SEQ ID NO: 179456 - DNA, 273 bp, Zea Mays
caacttggataatgagcgatcggcagcgcgatgcagtcgctaggttgggattttccagtatatttgatttgcgaactgatgccttagagagcagatctctcattaggtggttgatggataaattggatccacatgacatgaccatacgcccaggggctggcaaggaactgaagataacaaaagagacagttcgtcttattttgggtttgccatgtgctggagggggcagggagtttactgattggtatggtgaagtggatgctgctgcaaaac

SEQ ID NO: 179457 - DNA, 844 bp, Zea Mays
gtggcatacctggtaattcctccggaaatatgtctgggtattcacacactaccttgatattttccaagggcttttcttccaagtgatttatcactgtctttccttttgcatttgttgacatgtctgtgctaacttggactctttcacctttaggacttgtcaacataattattccgttggcacattgtatcactccatcacaacttttcaaccagtcgcatccaagaatcacatcaataccattggatcctaggaccactaggttgactggaaaatctattccttgaatcttgagattaacatggaggcatgaatgtgtggccttcatgtcacctcctagtgaactaatgtgtaacatctccttaagagggtgctttggtaagttatgcttttccacgaatgactcaattataaatgaatgtgatgctccagagtcaaataaaactgatgcaggtatggagttaataagaaacataccatacactttgtcggcatccttaggcatggtttctgttgtgacttggttgactcttcccctactctagttctgcggagtcctgttctgtgcagatccacaagcaggggtgttttggtcattcctctgattgtcgctcttctgaggtgtctgctggttgcgccttgggcagttgttagcataatggccaagctcaccgcacttgaaacagccattaggttggactggtgtgttgttgcttctggcctgtgtgttcacggcgccaccttgtcgagtctgcgaactgccaccagaccattggttggtctgagagttgttcctcttctggttttgactttgattgcttctctggccttgctgtccaaagcg

SEQ ID NO: 179458 - DNA, 330 bp, Zea Mays
gctactaaggtttgtaggtgaatattccttcaacagaagaaatgttgtacatatttactccaccgagttacttgcagcaatcaaatcaagaaaaagttttgatgcaacatctggatttggcagatgcatggtgggcatctatctgaagagttcagaagtgaagtccagatgctgtcaaaggtcgagcatttgaacttggtaaagtttcttgggtatgtggaatacgaggatgaacgcctaattctggttgagtacgtcaataatggaacactccgtcaacacttggatggtacgtcaaacatgtgcaatggacaagcttaaacacatact

SEQ ID NO: 179459 - DNA, 494 bp, Zea Mays
ctcctttccaatcaactggccggcggcaccaagcaagctaataaggctagctagccaagacccgtgtggcggtggcgcacaggaagcacacagcttgttgggtgcatgcaggtgttggcaacttggcaggcaccaaggagattgaagaaggctagggcagaagaaggacgtacaacgatcttttgaagggtcaggttcgctcgatctgcttggagggtagctagctagtagcaagcaatccagcaagcttgttcttgcttttgtgggggacaaaaaaggaggtaggccgggtggaggggaagcaggatgtgagatatggggctgcggaaagggagttatcttttcttagcaccaagcaagcaccaggagagacgagagaatacacacggaacacggttacggtgaggagaaacgaaaggagggagagagatggggtaacttgagttggcttccaagagaggacaataaagaagtatgtgagggcagatgagaga

SEQ ID NO: 179460 - DNA, 537 bp, Zea Mays
cttgactgatgaaccatagcccattacgcctgactacagtcccaatcctcttcccagttctcttctcctgaaaaacacatgattgttcatcaaatatagctagacacttgaactgatcaatgattgagctgacaaaaaggagattgactgtaaatgatgggacatgcaaaactgatgatagattaatggatggtgtacactctatagaccctacaccatgaatgagttgggaggtaccatcagcaatttggacagtttcagggtgaatagtatgaaattatgttttgaaagaatcaattagtcatgtgacatgtctagatgctcctaaatttattatccaatctctatgacttctacatgaagatgcaagggcttgtgcctgagtaccagcgcctaaatgggagtagttgttaaagttaccgaagtgctgggtggatgtagttgccacagaaccaagaggagtgctggttggacactcagattcttttcccttatgccattcttcccatcgtttagcttgttccctagtcagggtga

SEQ ID NO: 179461 - DNA, 572 bp, Zea Mays
ttcgcagtcaagctgggcgaccgttcttgagatctttttgttgcggagactgaaaaggaggcagaggaccttgttggtcctatgacggaggttgaaatcaagaagggtgctgctctgcgcggaggccatgtttgccttaatcacgtttttagccagatgggtctgaagtatgaggagcataaggctcggttgatgagggcaaagaaaacgccgactggggcccctactcaatcacacacgtcgccggagactccatcaacttgtttagggcgttcaacttgttggtctaatggatgtgcgaggcggctggtttggcggacgatgtggaagccgagtccacagaggacttcgtcgagcgagttatcgaggttaagttagggtgagacttaattttgatgagggttgatcgggtagtgcgaagcgttgggttgtgagggacgcgattgcggcatgtggttgcgaagacatttccgctagcccgcatggcgagggagttgcttatcttcccttactcgcataatatcccagatattattgctgtagcaatggacccgaaggggaaggcctccact

SEQ ID NO: 179462 - DNA, 717 bp, Zea Mays
aatcaaagtgctttcatcaagggccgatccattcaagacaatttttttgcttgtaaaacaaacagccaggttcctccaccttcagaagcaggctcatattctcctaaaactagacattacaaaagcctttgattcagtgtcaggatcatttttactggaggttctccagaagctaggctttgggctgatctggcgggatgttctcagtggtctgttgtcatcctcaactacacaggtcttactgaatggaatccctggattcaccatctttcatagaagagggctacgacaaggggaccccctctccccttcgttattcatcctagttatggatgtcctcagtctgatttttgctaaagcttccgctgttggactgctgcagcccctatctacaagggcgttgcaacacagggtgtccctttatgccgacgacgtggtttcttcatcctgctgacttggatttgaacctaaccatggatatgatggaactctttggtgatgcctttggtgatgtatagagacggatgtggcagtggttcagaacgttcttccatgtgagctgaaagaagtccactgcagatatctaggtgtgcctctttccctgcgtaagttgacaagggaccaaattcagccgtttgttgaccggattccggaccgtctacctggttggaaggccgacctgttatctcgggaaggtaggagaattctggtgaatca

SEQ ID NO: 179463 - DNA, 610 bp, Zea Mays
gtgatagcgacgacgatgagggcgaaggcggcagcagcgatggctgcgacgacagcaggaggggcggtgacgacagtggtgatggcgatggcgagagcagcggtgaaggcagcaaaaggggcagctagggcggaggcggcgacgcaagtggcagagtgccacctgcttaagtattagtatagtataattgttgtagtagtagtagtttagtagtagtataatgtagtttaactagtagtgtaatgtagtttaattagtaatgtaatgatccccgacttatggaaggataaatgaagtctatttcatgccacttcgctgttgtgtattatgttcttttgtctgacggtctgttagctttctagaggtactgaccaagtcctgttactttgctgcgaccaaaactctcccgagccaccggcttgtccttctgcgcccgactcagtgtgccaacctgtacttttgtcgacgtcctcttggcccctgatccctagttcctatttttcctccaccgctttccagctttctaagtcccgcatcttttcgcgttttgttcttgaaccgcactgtttgaaaaatcgtgatggcgcccaggaagagaaaatagagtgct

SEQ ID NO: 179464 - DNA, 511 bp, Zea Mays
gtctatgcgaagctcttcttctctctcccaagtagcttcatcttcactgtggtgactccattgtactttacacatctttatcaccttatttcttgtaactcgagtcgaagtgtccagaatcttgatagggtactcagcataagtcagatcatcttgaacactaaggtcctccattggtagttgctcctcaggtaccctgaggcacttctttagctgagacacatgaaatacatcatgtacatctgacagatgatcgggtaactctagttgatatgcaacttctcccactcgctttaagatcaagaaaggtccaatgaagcgaggggacaactttcctttgactttaaatctcctcataccccggattggtgacaccttcagatacacgtgatcaccctccttaaactccagtagtcttctcctattatcagcatagctcttttgcctggattgtgcaattcttaagttttctcttatcattcgaacttgttcttctgcctcttgaataagc

SEQ ID NO: 179465 - DNA, 1647 bp, Zea Mays
gtcatccgtagaatatccaaattacctagcaatgtttgccatgcgttgcaagggtcattcgtattatttatgtcacctaacaacatttgtcatgcagcgcaagtgtcatccatagtatttgtgttacatagcaacgcttatcaagtgttgcaagtattatatgtagtatttatgcaaatcactatattggttttgatacttacaaagtaatccctccatcctgatttgtagatcgtttgattttttggacaccaagtttgacttactcaccttattcaaaaaatcataacttactcaccttatttttattatggtttaatttttcccataattctcaggtctgcttcctttgcctcgccaccccgacctagaatccgaccccaccacaatcggacgctgccgccgagctttgccatcgcaagcactgcttccacatggagctccctctctcccaaagcaccgcaccacagcgggtgtcggggtctctccacctccccgttctcctcctccacccttcccatacatagctaaaccctaaccctacctatcgcagtcgccgttgtcaacaccgctgcttcctcgccttcctgatgccctaatccgaggcgtccccgccgcctactccggccgccgcagagcccacggtaccaacgaagccctccttgtccccggtggttggcagcgcacgtcccctgttcctctaatctctcatgtgctaaatctaatttatgttttttgttccatgccagcctcctcctgatcccaaattctagtgttggatcgaggaggttgtgatgccattcgttttgacgtggagctgatatcaaaaataggtacactgcttgagatcgaccccaacctctgcctcctccatgccctcaccaccaagtgtgcgctacaccaagctaggtcaatgttgcgctaggttagtgctgctatgcctcaccagccacccatccgctcctacctctctgcatcactttattcgtcttcctcctgagagattaattaaattttgttctattcatgtgagcccttctcctccgtgtgcttcttcttgcctcacttgattgttgcttccaacttaatagcattgactagattgagataaccttatactaaacaaaaaggctgacaagaaggtatctgttgtcctttagtttttgcttctgaggctccatgccaataatcaattttgctcctaatgcttcatgcaaataattagttctactttactacatggatgcatagttctagacttatttcatacaattttgcatgtgtagctaccccaatgtttaatatcatgaacacaagaatttgcataattgtttctttgattacatcctaaccatttgtttccctgtgcagaccgcttcagttatgtatatctaacacattgttcaatagcttgaacacaaggagtgcatttacagttgggaagctgtgcgtagtctactctagagttctatatgcatcaatgtaatttcattttgcacatttacagtatgattaggcattgttacatcaaacctatcaacatgacaatgacgagttttcagttagagttttgtaagttcttgtttgacacctactctattgttgtacgagctgccgctgctatgttctcttaagttgtcactctgc

SEQ ID NO: 179466 - DNA, 280 bp, Zea Mays
gttggtttcaagtcatgtatgatagaaggcgtcatgtatcctgttggtggattgtagtggttctgttctaacgagcaaaggagcagagtagtattatgttccacctgtgcagcttccctggcccattcggttccaaagagcaaaagggaattccactgtgcagggatatctctcccgggctctagctgtacatggaatcctacggcgtgggggttttatccctggattaattactctcagctgccaaactagccctaaatgattttggtggttgaattgc

SEQ ID NO: 179467 - DNA, 633 bp, Zea Mays
gggattttggcccagcgcgggtgcgacgcggggacggcgccctgggcgcgggcccacgtgccagtgaggggaaggggaaacaacgttaggggggagagggacgggggtccgcccgggagggagaacccgtcgccggagctcgacggcggttctccgccggtgatccggttcggggtggtcgaggaggtggcctagcacgggcaggggtagggggttatggtggtggggtcaatttggccggtgggggcttgggttggccggtccacggcgaggtggcgggctctcgcggcggtgtggtcgccggcgaggccgctaggcattatgggaaaggcgaaaatggtgccttgtgctcgcggaaaggcggtgaagcttgtgaactatactaatttgagtctaggccaccggagaggggagggagaagctcaccggagtgaagggaggtgacaacgtcgagcttgattgggtccagtggaggggagagggagtggctgaggtcggtgcgaggagaggtggagctcaggcggttccttttataggcgcccggggaaggaagcgatcggaaagaagttggcaccgacgaggagcacaacagcggcgatgatggcgcacaacgccggggatgggacggctcgg

SEQ ID NO: 179468 - DNA, 556 bp, Zea Mays
tgagcaccgctctcggcgctcggatcctctctcaaagtttatggaggtagcaggtacgatggttacacgacggcacaccgtcggttcgccggacgcagccgggttcaggttccaaatgccaatctctcctctcctcctctcagccgccgcaaatattcctctcccctacgtatcacacgtctgggcctaatcacttcacccactcatggcccaagagccggatgttgggccgtgtcacccgttggctccgtctgagtccatcagcgtgcgcgcctgtcttcgattcacgtcttcctcccgcgttgaagcttgcgtcttcatccgcctgggattggcttaccaccggtacactgacacatactcaagaattcctcgccaccgtggtgagaaacagggttgtcgcaggagtgttccggcttaccttcgaccgcgcgcttggggtggggcttgttgacttcccttggtagcggggaaggctcttgtggtgacgctattcggagttggtcaccaacatcgggcgaattgctcgccgaacttgcaaaatcgccacggcggc

SEQ ID NO: 179469 - DNA, 883 bp, Zea Mays
cctcccgggggtgaggtttttaacgaggcggagccatgtaatataataccgaaaagcccccacacaaacaatccagccaatatcatggtcatgggcgtcgaaaaagaccgtggcaacggtcttcgacattcaacgcacaaaacagtcaccgcaagaggcagcctagattgcccttgcgtgcaacacgtccgagcaaaagccgcctaagggtgcagccgtgcatgcacaataagtgcacgacatcacccacagggtgcgaagtctttactataagacacgtccgagcaaaaagccgcctaagggtgcagccgggcatgcacaataagtgcgcgacatcacccacagggtgtgaagtctttactacaagacacgtccaagcaaaagccacctaagggtgcagccgggcatgcaccagaagcgcacgacatcacccgcagttaacgaagtcctcatcccacccaactgctgcgccaacacaattacaaattgaaacaatctcacaataaatgcagcacgcgatatgccatcatagtttacatacataaaacgaaaggcccgtcggccacatcgcataaataatacaaatcatattttgccgccctccctctctattgcgaagcaggggagggcagagttttcactcactattgcaacacgagagcgaggacaacaaaatgtcacatcggctctgccttcggaataagacccgcctcccagaaattaaacaatatcatcctcaactctttgccctcaaatagattccgcaagtccccctccccaatacacgtcctggacgtcaagcacagtagatcgcgttggctaccccgatttagtcgaagacgggatcgctccatacccatccggcgacatctcccacttcgtg

SEQ ID NO: 179470 - DNA, 744 bp, Zea Mays
gtcgtggcgcgaactccagtagaacaggcgatagcggtgaggttcaacacaacgacgagctccagcgacgtcgttgtgcgacagcagcacggcgagcaactgcagcagctcggcatggcgacgtcggtaacagcagcaagcatggtgtagcacgacaagtagcccgcacggctcccgcgacgtaaggatggtgaccaagcacaggcgcagcgtacgccgacgagcactagcaaggggattcagcgaactataatgacgtgtcacgagagattggaatcaacgacggaaatggtgcggtggtgtagtgtgtgcaagcagctcaagcaagaggggagcaggcgagcagagacccgaaggactgataagagagtgtggcgaggtgagaagcgcggacgggtctgctcttatagttgagcagaggaagtggagagggtgtcgggtgccagcttaaaggtgccttgaaggctatttgctgtggtgttgaatgtcgtgattgaaatctccattaatggaggaggtaaggctgggaaagaaaccatcgtgacgagaaacgggcgagcgactgattgggcgctgggccagcgaggcgacatgggctgaatcgacgatgactgctgctgctgattattgcgaacagagcaacgtgagagaaagtggaggagaggaggaatagtgtcatgggtcccatgcgtcattgagaggtgagagaagagaggaagagtgcgagaggaatgtgctagctag

SEQ ID NO: 179471 - DNA, 390 bp, Zea Mays
gtttttaatgaattgttattcagttttgcgtcacaatttccatgttctcgcatgaatatgtagctctacattggccttgaaatcttatcgaggtcttcactttggactatggaattagaaaagagtggaagaatagggtagggagtaatttctttttctacttgtatagtgagctgtgtaaaatctcattactttaaccactccaatagttgttagctttgcacaccagtttggcatgttggacccatggatcagctttgcgtgacgacacaacatgcatcattatatagcacctgaaacccatgcaagatcagtggctgacatctagaatccacccacagcttctcatcttttcaagatctcttatctatttagagagcatgattggcc

SEQ ID NO: 179472 - DNA, 276 bp, Zea Mays
gcacaagtcgcctacgggcacgaccggatcaacgaaggcacgcagcttcatataaattatggttacatacatacagcgagggcatcacactttacattggctcaaccttcgggatgatacccatctccctgtagttgaacagcattatcctcagctcctcaccctcaaaaagatttcgcaactccccctcacctacactcgccctagccggcgaggacaacaattcctgtttgctagccccgtctacacgaagacgaccaccctccacctcactca

SEQ ID NO: 179473 - DNA, 313 bp, Zea Mays
gtcgtgatcgccttcgtcttaaattggcgaagcacgtagccggctcctttaaattgagcactaacctcgctccgcctctctattacgcgctcataccaccctcagttagtctctctcgctcactgtagcccccagtcatcggatttcccccaaatcgagtcactcacaccgtcgtgagacaccctgccatgattagtcgttcctaggtccgttcatacctctctatgccatgttttagaatttttgaatgttaacgaagctcgtcggctcaaccgattgaacactacagcgatagagcatcgagaatatcacc

SEQ ID NO: 179474 - DNA, 381 bp, Zea Mays
ccccctttccttctctcagaagtcagatggaggtttagtgccaaaccagcttttgccagaatgaatatggtttccccaagttgctgagagcatgcacagttcgcctcggaatcaggagccagccagagtatgatggtcatgaattcgtcgagcatggcacagagaaatgtgtcgtggctgtgtacattggatccagtctgcaccatgtggaatggagtgtcactgctgctgggcacagattcagagacacctgccaagtcgtcgctcgcaaggcattgagggccctgtgtcagatctatgaagaagaagtggccgacaccccgctcagattctttccgccctttcagagaaaccgtccagtttggatggccaggatgcgtg

SEQ ID NO: 179475 - DNA, 303 bp, Zea Mays
ttttaccgttgcccaccaccgaagaaaccgctgccgagaagaaggccttcactgaaggatgagcatttattttaaaggaaacccaaggccggccagattcagtttttttcaaccagagccagcgcagtctaagagcccaattcatcttttgcaggtccgagatgcccagtcccccaaattcttttggtctagtaaccttcttccaagctaccaaacaatgccctcccaaaacatttttccttcctctccacaagaaacttcttctgattttgtcaattgctttgatagcccaagaagggaggt

SEQ ID NO: 179476 - DNA, 662 bp, Zea Mays
ttggattgagtctcctactgccttggaagtaacagaagctagggttctgcttgctgaaatctgtctgctgaaggagagaggtctgaccgctgaggctatggttgctgtctttgtttttaagaatattcagcccttgaaggacagagcatacccagcttacttgtatagtggtgttaccgactcgactcgggttaccaataggaagattcctgctgaggatctgatgtgccgactagacatgatcttgagaggcaaagtatcaaatgttggtgctcctgttgcctactctgcttggaatctgccacctcctaagtcctttttcaatttcgtgtcaaatcctcctgctggtgatagtggtctgggtcttagagtgcgaccctctcctgaatatattgaggtcttggttgcttctctttgtgatcttcccaatgatgagaggcaagttcattttgagatgccagtgagtctagatgatgcagaaataaatgttgtactcgatatgttggctggagaatcttctgactcggccccttctgaaacaatggctgtcatggttataccagagcttgtcaaaacagtggacacccgaaagcctaagggtactcgcccaaagcatcttcgccaggtcagccacccaactgtgcctgctgaggagaagaagg

SEQ ID NO: 179477 - DNA, 485 bp, Zea Mays
cgataaagatcaggggcactgttgaacaggatgtgctcgcgtgatccagtggtgggaatcgatcgcggggaggatagcgtcgaacgtggcaccatctcgcaagctgagccgggcgtggccggagttattcaccgacggccaccgtgactcagtcaattccaccgcggtgtcacccatgtcttgctcctccctcactgtatctcttccctacgtggtaaccatgcactaacgaagttatccgtggccgtggatagctagccggaccgccgtagctataaataacaccatgaaccacgacggggtattcacatctccaccaagtgagtttgattgaagcccaaaattcgcactacctctgccacctcttcccaaattgagtgtgcacggtgaaactatagttccttacggccgtgtagccccaatctcacctcccaatttcacccagagccgtcgcgacgccattttcccctttctttgtcaccggc

SEQ ID NO: 179478 - DNA, 1242 bp, Zea Mays
atgcatagtctcatacacactaaacatgcattcaagttatgtcgactttcatcccacatgaagacctatgatccacatcaagaacctaaataaaaactaaaacacaaaaccatgcattcaaattcctgaacttcatcccacatgaagacccatgaaccacgtcaagaaccaaaattaaaattaaaacccacaccctcaagtaattataaggttagaaaagaaagtgggtgagcatgtcctgtaagaacatagaattcaagcaactgaatacctaatgggctataaatattgtcaccccaaggttctgacaaggaaaagaactcacaggcatacacgttactgtaaccaatgcccattatgcataaacaccagtagagcttttacctgtgaaattgcctcaaaaatttaggcagaaaatcaccctctccagtaaaagttcactatgaaccctagatgaatcacgcgggatactccagttccctacaccagctatagagagctgttctaattcaagcctagataagctacagaccaaaagctcaccactctgctactctactcctaatgcaaccctagacacttcaaaaaaaacgacagaagactactgaatcgaactaaacaacggaggtgagccccgcgctcaaatcactgccacacgcctgatccgacccccagatgtaccattcccacgcgcaatacaccgaatcgagacgtactagcctcgttaaggaacatggataaaagggggctacctcggaggggaactgtgcgcagaggcgctcgcagaggaatatggcgttgcggtacatgaagaggcggaggctactgtggacgcggtctaccattagggtttccatcgccgcccagcggcggcggcgagcgcgggtgggcgatatcaaggggattggggaagtagtgcggtggccgaaacgcaggcggcaggcgcagcaggggagtgtgagtgtccggactctggtcgtttgaatcagccgtttgaatccagcaggctcttgatttttgggtgcgatgcgatctgatagggcattccaagtttccaacgagtgccgtgcctgtgcgaaacagccgagttacatggccgacaagtgggccatagggttcgctccgaatatgtgaacgttggacaagcccggctgggttatttgctattacagtttgaatgtggatgttggaaagcatgaaaattgaattgggttcaattacaaatcaaacatgatactgaaa

SEQ ID NO: 179479 - DNA, 388 bp, Zea Mays
taccgatccgcccatgcacctacatcgtgtagcaccagattgatttgggaatcgcgcaccggaacgcgcagattgggtgggccggccatggtgaccaccgcgggcggaacgctgtgcgccacggcgttgatagcttggggtggaagaggggtgagggtcgttggatcctcgatgaagggtgcaggtgtggcaatgggtataaccgttggatcagccatggacgctccggatcattcgagtggataccccttcgcatatttgaatcgtgaccgttgattgccgttgccgatccaacgcacctcgtagcataccctttcgtgttatatcggagaccatcagatctagattgggcggctctgggtccctggtacctcttcgccgttgccga

SEQ ID NO: 179480 - DNA, 839 bp, Zea Mays
ctgcatgtaaatcgagagcttagacctttgactccaactgtaaatacacgagtccatacagaaagcaaagggtgccgacaacaacacggcgtcgcttcgtcacatgacagcaggatctgattcctctggctaagagcaggcactctgtattggagggatcgggctcctaaatcctgatctttaggtccagaatagcatcttcagacagagaacccacggtctcattcagtccctcacacacacactctctcttcttaccttatctgcagtggcagaatctgcaacatttgctatctgtcattcctttgaacagttacaccataccttgtgagtaaatcattagccaagacaaccgtttgataattctgcctagtttttctatattttgttctctgaagcattttctgaccaatcactggccgcaacatgttatcagatacgcaggcatttgccctggcatagcattgcgtatcagcaaggtgcatgctgtgtaagtgatggtgtggaacagtcgccgttgatatgctgccgcgatggttcttctcattgtatgatgcaaaccccccaggacaagtagacggcaatggagaatatgtggatagacatgtatccttatcctcaagatctaccctggcagtgctgaccctctgtagagctttgcatcttgagattccttcctgagcctgatcagttcttggctcctcgtgtttgcaaagggttgcgtgctttgatctgcagaagcatatctgaaacaaaggtaaaggtgaggtgcaagtgcaatggagagagaaattctggaaatatatcgcgaagaatcccatgttattatatacttttat

SEQ ID NO: 179481 - DNA, 708 bp, Zea Mays
ctcacattaatcgcattattgttgtgcttctcataagtcacgcgatctacaatatctacagcgtcagggaggtcatcaaggtatggttcctcaagaactactcagttatcacttgctagagaacaatcctcaggttgtggtaccaaacaataaaattagttccattgagtttctctttgccaaacatagatcgcaaattgaaaacgaaattgttgctagcagacatgaccatgtctataacagaaaataaatatgcaaagctttagcactttgttatgtaccaatcttctactaaccattttaataaaatacatcactaaattgtcttccctctaatgaaatatagtggtccaagatccatattcagtaaattttagtgagctttggcttcactactaaaatttaagtgtcatagataaacgataaattgttaatcatatctctatgtgactcttgtttgttagttagcatccaatgccctggctcccaactccatgccataaagctcgaaactgttttgatagctttgctaagtaactaattgtcggggttaaaaaacctaggcctctgggcccacgggtcataggaaatggaaacaccctaaaaggtcaagtcgtgatactgcacctagaggaggtgaatagatgacacgtgaaaatcacaactaaaactaaaacttaatccaaattaagtgttagtgcgaaaata

SEQ ID NO: 179482 - DNA, 571 bp, Zea Mays
agtagtccgggcggagaagaactgcccgttggttcgggtgccgagcatcgtggacgcctgccgcagtgcccccggcctccccgcctgcgcggcgcagtgcatcgtctaccactaccgcggcgggtactgcgacatgctgccccacggcaggcccggcgactgctactgcaccaactgcctagcgtagttatgccactatctaggacggccggccggccggcggcggagccgcctcgatgtctcgatccccgacagatgatatgatcggagctggcaaaccaccagggacaggaaaacaaaatacttattagtcgagtcatactatttgttatatgtctgcatttttagtgagctactactttggatccgccgtttcttcgtcaattcatggtgtcccttcttcctgatttctcattcatttcctaatattgttctttgatctacaagattctttattcggtgaaatgaattttctactatattaaatcatcagcttcaatggtcctcctacgtcacctttttacaaagaaccccttgtgtttcttcaaaatcaacccgcggtcctagatca

SEQ ID NO: 179483 - DNA, 504 bp, Zea Mays
tatcaccatgataaatcttatcaacaggactctccaccagccacgattgctgcaacatcttcctatcaggtcgatcctaactggtatagtgacaccggggcaactgatcatataaccagtgagttggatcgtctcgccttgagagaacaataccgtggcactgacaccgtgcaagttggcaacgacgcaggtttgcaaattatgcatcttggttcttgttccattaatactaatactctccctcttgcactaaaaaatgttcttcatgtcccccaaatatctaaacatcttttatctgtccataagttaacccgtgataatgatgttttctttgaatttcatccctctcactttttaatcaaggatcgtgccactcggaatcttcttctggaaggaaaatgtgaatccggcctctatcccatcaagcctgctgatcttgcgtctattaaacaagcacatctaagttgctcggcacgacctgcgcagtggcatgctcggtttggt

SEQ ID NO: 179484 - DNA, 383 bp, Zea Mays
aggccctcttagttgttgtgcagcaaacattggcttttgtatctccatgcagcgaattagtccaaacttctgttccataactcttacccactcatcagcttctagaggttcttctgctttagtaaagagcgggggtcgagtctcagagaattcatggtatgtagtttcacgcggtccttgaggaggaactctcccaccatgcagttggaactgattgcccgccatttcgcgcaagaagcgcgtattatccgcagtggcattgaccagggcagcgatagcctcggccaaagtcggtggtactggtggcgggttaggagtatcttcccgaccgcgggaagtccccacaccatcatgtgcgcgagtccgtgatggcatctgaggca

SEQ ID NO: 179485 - DNA, 1100 bp, Zea Mays
ggttttttgacactagatttggcgcatcatgaggagaaaaagcccaagccatccgtagcgatcccaaccaccggcatcagcggctttttttgccttggccaaacatacctagctgcaacatgagtatcgtttctacaaatctcacatcatggggacttagagtagtccctagtgtggtgtccctcttcactgcatttttgacagaaaaccctcctcccaaattcccgatctactccagctaggcgaattagagcactagggttaccttgcaccaccatttctccagtcgaggatgagcctgtgaagtttcccttggctaacatcctccctggacgcggcttcaaccgccagctcaggttcctgttcctcccccattgctgctcctgggagttctctttgccgcttcccctttcccatttttgggaccaacctttcgcctccatcctcttggaccttcgagatgagcgaggactcacagatccagggtgcggccacccttcacacctcggaggtggacgacgaggagcccaccgccacccccacggaaaccaacatgcacggaagtggggatcgcccagagcaaagatgataaagcagctagatgagggagagccaaactcccgactaggtcatccgaactcactctcacaggcacagtcgatccaaccaaaggagacgtggcacaatctaccaccttcaaaccctcgacatgggccaactgtgtaccaggattcaaaggcccgatccatggcgaccccaactccaccccagaaacccaaccgtgccaaggacccatagtgaaaactgaaaccctacatctgcctgaaagccaaatagcccacccagaacggcccactgcataagagaaagggaggggagaggggaagggaggagtgaggaggaggagatgagggcccacaaggagcgaaaaacctgcaggagcaacgacgcggcccaataaagacgacgaccgctccgtgccgtgagtgttagaacagtgtcgtactgtcggaccccatttgggatggaagaaaagtatggatatggtcgaaaaaatacatatcttaattaatagagtttatcgtgatcgtcgatgaccg

SEQ ID NO: 179486 - DNA, 916 bp, Zea Mays
accgaattcaagtcctaacgagagcttcccctcaactaattgcactaacggcgctctaacacgctctgtccacggtgaccgtgcgatcaacggccaatccaacgcgttcccggcgatctaaggggtcctagcttaattggtgaggtcgaggagcatcaggggcacacaagaacactaaaacgagagaacagggagcatgaacagacctggaattcgctggccacagtgagagttctaccacggtggcggaaacagaattgggggaaaagaggaattggaaggctctggtggataatctgaggcaaggatcggtgcgttggatgcataattacctagcggagccgcgggtgcgcttaatttataggctccgggggcggcggtgcatgaatttggtttggcgcggtggcgttcggagatgaaaaggggtcactagcgcatgagcttagtggctttcaccgtggcggctctccggcgatcatcgggcatgcaagacgcgattcactgcgatgtggtcaagcgctttagcacgtggcgtacaacggtaagcggccaacgacggtgaggtctatctcggctgatcggcgagcaagtgggtacggtgaaactcatccgcgaccgagcccaagcctatcttgtgccaagattcttactccgtcatgattatcccctcaccagagagcatgaatcgcgacgacggcgcaaatcacggcgcaaaggtcaccggcggcgagggggctaaacttgtgatctgtttcagttactgtaccatggtggttaccatcagagtgtatgacagaccattttgtagggctcagatctcaaattttcatgtgatgacttgctaatctatctttaagaaagttgttgttctactatccagcttcaatcttgctatagcaatcactcccaaattctt

SEQ ID NO: 179487 - DNA, 748 bp, Zea Mays
ctgggcctcattttccagagagtactggggcacctgggtaaaatttctaagacatagggaacagtgtccctggaccgctggttcattcctatgtttcacggggactctttagcaatttgtgcaaccgaaggggtatcgcaagattctggccgccagatcacgattgaacggcccggattagatcgtcaatataatgaagcggtatgcgatcgcggcccttggatctaaatctaacggtacggatataatgaagccgagatcccgccacagcccttgaattccgatgtaacgacccggggaagttctagcgaagggggggtacgtgtgcgcaaatcggggcgtccatgtgccgatcgacggtgcacccaagtcaacacgctccatcatcaaaacagagcggcacctccatccggccacggtggaggccatggccggagttgccgaccacgacacaaccatccaaaattccaagctaatcggtgctacgcgtttcggaaaggaaagtaaacttaaaggcgtggctcataccggaaatcgcagggcaaagttatcccgaccacgacgctgcggaggcgatactcgacggcgagcaaattcgaggtccccgaccactaatcccgcgcgccaaggccaccagcacctttcttgcgcaccggcgaaaccactagccacgacgcagagggggcggcggcgatgagcgcccggttccactactccgagccgcggcggctctactctacaatggcgg

SEQ ID NO: 179488 - DNA, 698 bp, Zea Mays
cacagggacaacacggcgaagcatcccggtgagcagtgctccaacacctaggtgccccagctaggctacggatctatgctaaacagagcggagggtaagaagaacttaatggagtgcttcatactggttatggtagcgtctgcagtgttatccacgctgcggcacggatccacgacatggtcgccaccacggcgagaaattgagcggcttgcggtccaattcccagggtgggaaggttacgagcatcatctgagcaccactgcggtatacctggccaaccgacgaggttgaagcgccacccaaatcatgagtcgaccatggcggatccaatcacccgcggagaatgggtacggcggcgctcactccatcatctctctctctctctgctgggcatggaggtttgccgggctggataaaggagggggagggctctacggatcataaccttaagtagccccgaggatggtgttaaggctggaccaaccgcggcagcggcccgagcagcgcatagaacaacgacgcaagctcgcgatagaggaggagaagagagagagggctcgatttgtttatggcctcagccaaggacgggctcggtcagacttaccccaaggttctagcgtggatcacggagaatcagttgcttcggcgcgtccggttgttagctccgtccatggcgcgatatttgcgcgaggaagacg

SEQ ID NO: 179489 - DNA, 949 bp, Zea Mays
cggcaacaccctcgggggttgggttgcagcttgcgctacccacccgagccggatcattaccggcaacaccctcgggggctgggcaaccgctggcaccacccttgaggactgggttctctgcaacaaccacctctaaggctgaaggattctcagtcacctccatggtaattgaacgaccttgaccaatctcttgggctctgaagaccgccttccaaggtcgacgatgcatgcgatgctgcccgggatacctctaatcccacatctggaatgtcagagtagatgtccatcatattaacatcagttggctcggacaacagatcttcaggaacaacatcctcaagagcctgatcaaaatttgctatggataattcttgcagaccaacaagagcagacagaactggagaaggaatatcgctactcccccccactaactctgtaacgccgactattcttctgaattaatgggacttcctcttcttcttcctcgtcctcatcaacaatacggacaataaacggcacagggtcacacccattgggatcagctctggcagggtcacacccattggaatcagctctggcagggtcacaccaattgggatcagctctggcagggtcacacccattgggatcagcattagcaaggtcacacccattgggatcagcatcagcagggtcacacccgttgagatcaacatcagcatggtcacacccattgggatcagctccagtaaagagttccaccggtacttcttcagcagcaggagcagaagggccagcatcctggtccaaacacgacactcgccgaagccgtctctttttctttttcttcccctcggcaggtgcagttggatgactgacctggcggagacgtttcgggcgagtaccctcaggcctttgagtatccacggttttttcaggctctaggatagttgcaacagccattgtttca

SEQ ID NO: 179490 - DNA, 629 bp, Zea Mays
ggagatagtcttatggcctattattgtttgctagtctgagcttttgtcctacacatccattcttttcgcgtcttcccaaacatatcttactattactattggaaattcaggcatccagccatccactatataaaatgattgctccctatatgtcattgttttttagaaccttgccttttgtgttattgttgatcattagtggggagtcagacatggagcccaggggaaaagttccattttgggttttggcttccatgttgctttgccccctccctcttgcaccatctcttctgtcttatcagatcacatgctgctacagtcaggacagtttggcccagaactgcaaatcgttgctgccttgctatgcagactgcaacttattatttttttgttagccttattgttgtaaaatacgaaatttctaaataaatcttgattttccagttttaaatctctgtacatgtagtgtgtccaccagttcttccagattgaccaaactctgataattcaatctgagcatcccatctctaaccactgtagttttctttgcatcagtcgagacacaaagaaatgattgtgatagggtgtgtttggtttgacttttggatttggctttcgtcccttacaag

SEQ ID NO: 179491 - DNA, 371 bp, Zea Mays
tggatgtatatcatgttcctcgttgggttgggatagtttgagtccactgttgtggtagccgagctatggagagtttacttccttgcagtgctctttgcggtggcagctatgcaaagatccggagtttgtgtttgctatggaaacttccatacattttctggtgctttgtgggcgttgaggttcatgtttattttcctcaagttggacgaaatggtggcttgtctgaacaaatgactagtggcccctggtgttcatttggttaacggttggcctgtctgaacaaatgactagtgacatttggttaactgtccaagtagccgcttcttctcaagacttttttcaggtcgaaactctacgtatccatgattttg

SEQ ID NO: 179492 - DNA, 810 bp, Zea Mays
ggctgcagttagcctttctattccatttctttctccatttgacttgaaatttttggaggactttcctatgacttagacacatataattagagtataactcaattgactatgtcatagaatcttacctctttctcatcatctcctcaacttctctgtttgttctcaaacagtgccccgaatggcactttctctacaaaccaagttagagagcaaaccaaagtgccaaatgcatagtaaaaggtgtatgcaatatattcaaatactcaaaccttgcatacttaaccttttttcactatttttccctttttggcctgtttgagctcggggttggactccaaatcctcaagtcgacataacttggtaatatttgccatctttgagcttcaacaccctgcaatggttacaaagaacttttccaaacataagaatgactcaaactataagtcaaagtgtgcttagctcttttgggctcttctaggttctgactttgatacttctccaccttattgtgaccatgttctactgtttgagctaggatcttgagccctatgacatgaaccataaaccataggatatacctcaatggttccaagtcacgttcttatattgtggtcttcaatgcaccatgcttcttgacaacttcaccaaccttgacctcttggaagagcctcttcttctctatggctttaggttcctcggccttcttaaccttctcccttactcttggtacctcaaagtccttcttgccttcgtcctcggttcaattagttgtctccaagtcatgcacattgattcccacttggtcaatgt

SEQ ID NO: 179493 - DNA, 2720 bp, Zea Mays
gttctcacttccattggagagcaaatggataacgatgatatcaagtatgatgaggtcaatttgttttgtttattcttgtaacttatatttggatttatgttgatagtttttatacttttcaagccaatatgaagggacatacattaaactcatacaatattttctctcactattatccttcggacttttgtgttttaggaatatgtattgaatgcacgaggaatgaatctcttcacatgccaatggagacctttgaactctgaaccaaaagctctgatctttctatgccatggtaactttcttactaatgtgaacttgttttataattttctaatccaagttgtctttcattccatatgcattttatttcatgccaccttttttaggatatgccatggaatgcagtatttcaatgagaggtaaatattataatttggtgaatttcataggcacctttacttagcattataaacatatcattacatatcattgtgatgttgaacatgaattaatagtgatgagtttagactaactgtggtagaaacatgaattgcaactttattgcgaatgaatagtgatgagttgagacaactatggtaaaccatttatgataattacccacataaactctttgtgtcatattatggtaatataattatagttttacatatgtaccataaatatttaaaaacacacataattatcttatacatttgggattgttacttttaggcacaggtacaaggttggcgcaggctggatttgtagtgcatggaatggactatgaaggccatggaaaatcttctggacttcaaggatatattaatagtttcgatgacattgtggttgattgctctaagtactttgcaagtgtctgtggtatgatttataaataatacaagtgttttcttatgtcaccttttaatcacatttataaggtgtcatttcttttatattaaatgatcactaggttttagaaaacaaggattaaaacaaatgtatatgaaattccttgagtattttattagacttgatgtgacattttacaaactaatagtatgattcctcttgtatagagaaagaagagtataagaaacaaaagagatttttacttggagaatccatgggcggggcaattgtgcttatgcttcatagaaaggaacctaccttttgggatggggccattttggttgctccgatgtgcaaggttatattccaacaatttgtgttttcaattttatttagatgcatttgaatctttgataagttatctatgttaaagttagatcatgctattgattatttacactaacattcatatagatattagatgatatgaagcctcaccctattatgatgtcaattttaagtaagcttagcaatgtgatccctacatggagaatcattcctaatgaagatatcatagatagagcaattaaatgtgaggagcgacgtgaagaggtatgataaaagaaaggatgacctaatcctaaaagctaatatgtttcatggaaaaccatttttgtgctacttttaataccattatttgttattaggtaagaaataatcattattgctataaaggaaagcctagggtaaagactggccatgaaatttttatggcaagcttggatattgaaagtaatcttgacaaggtacgaggaatgttatcattgtgtttgttcttacaatacccttgtggttaaaaatagcattcgaggttttgtgtgcatccaacctaataaattttgagtgctagaagttttggacaaatgattattttaatgatcgtagtgtccacctttataaatagaagctttctttgtaaacaaattaataccatgtgagaatggtgttcctaaaccaaatttgccttctcctgaagatgtagtcagaatcctagagaatagtttgttcttgatgatttaaacatgcaaaaaaataacaacacttgcttttgcaaaggttgtaaagattcatgtggactacacatgcgcacattttatttgtaggtggaaatgcattgtaaaattatagatgaataaaaagatattgaacactagtttggacgaaatgtgaaaatcatgtggcaacaactgacttggcatcattgtataacataccatgcttgtgtcttaataaaattagattttgcatggatgttgtatgttgcattctatcattgaaaggataatgcatgcttgtgtttgtatgttcacgtcttcatgcgaataggttactctaccattcatcatagtccacggtggtgatgatgctgtaactgaccccacagtaagtgaggcactatatacaatagccacgagcaaggacaagacactaaagttgtaccctgggatgtgccatgctttgacttcaggagaacccgaggaaaacatagatattgtgtttgcagacatcatcaaatggttgaatgacagggtatcatcaatttcctatcttggatccaacagcggtttacagttacaagaacaatgttgatagctcacaaaaatcaatgggtgtgtgtacgagaagatgacatccatctgtcgataggtggaacaatcaatggtgtcgacatatgtaagattctctactggcacatgacactagcaaggtagttatttttgtctattaaataaaaatgaatatactaggtgtaaaccaatatatcgatgtaaatcaatacaaatatatagatgtaagaatcttttagaaat

SEQ ID NO: 179494 - DNA, 272 bp, Zea Mays
cggggtgattcgaggtgggcgcataggggagaggactcgtggacggtagatgcacggatctacggccctgatcgcaccaagtctgggggaaaatcagaaccattggattaacagtatccgattcggatccgtgttaggagattttgaatccggatcatcgaaactcaatcggacggctcggggttataggggaatcatcgtcgatcgatataatctggaccgcactctttagatctaacggcccagatacaaccataccccttcgcgggtcc

SEQ ID NO: 179495 - DNA, 1043 bp, Zea Mays
cagactagttaaagtctgaaatcagactaacagtgaaatgtcatgaacttcaagctcaatttcaagcaagatccattaactttttgtgggagcacaatatagcaaagttatagttggtttatagcactacaatattactgcagagatctggatgtgttgccacagaaatttggaagaaatctggccctaaactatggctgtcaggcttactgatgaagcactcgccatggtacagtgtcgtgtatggatcagaccaccagcgcagtataccttgccgccgatggtctctacgccgtgatttacgctgccgtcatgattcgtgctcactggtgggtggataaccacggcaaagaaaagatctcgcgacggggattggataggatcgcgagtgggaatttatcgccgtgattatagccgctgcgacgtggccggactaccggagtcgtcgtggaagcaccggtgaccttggttgtgccacgaccgaagcttgttactgcgtgttagcaagcgtggcacccttaggagtattctccttgcgccgttacaccggcgactgccacggttacagccaccgtgttcttctctgtctccggccgcccgtactgcccgatgaaatcacgcgccaccgcctaagccctctataaattgatggctgaacctgctgcgctaggtcattgcaaagccatagcagccactcccgtccccgattagccaccccagccggagaatcgttgtttgcccccaaatcgatccgccgcaccgcaagaaccgagctcgtcgtggccagcaccgttcaggtcagttcatgccgccttctccctcgtttgagtgctctcatatacccatgatgcccattgacccactcaattgcactgggtagccttagatcaccgggaacgcactcatctgtctgcaacaccctcggtcatcgtggccagagtaaaccatgtggtcattgatgaaattaggttaggggaatggttcagggagggtccaattcggtgttagccgctcggggaccccagtcgttgccccattcggcc

SEQ ID NO: 179496 - DNA, 823 bp, Zea Mays
ataagtaaaggtttcgttagttgcatgcaatggttttgtcatgtaaggaaagactactcgtaattgtaggttcactaagtccaattcatagacagaagttcttagtccaattcaaagaaatggatatgaaaggaacaaggggttcagttggggaatttaacggtactactacttagttgttcgaataggaagattaacatgcatttctctagcaccaacatagaccaaacaacatacaaaccacaggataaatgacagaacagttcaaatgttgtttcctttgtaccatactacaagtagcataaatgttgtacatgagtagcatggatcagttagcaatacgtgattaagtataagttcagatctaagtgtacaataatatcaaactttgttcttgtacataaacaatagcccaatcggagatcggacttaaaccgtaaccctaataagttaagtaggcgatgaacacttgaatcgtagcactcaaataagttaagtacatgtaaaccctagtgctaatcgaaggtacatttttttgccacacggattgaaaccgaggtgtagaacatggagatgggacgaagcttaccttggaccttgaagcttgaatgacgcagatcggttgagcgtagatctgtcggcatatcgatgacctccctttgacctccaccccgcagccgacgtgccggcggacagagaggagcggcggtggcgtcttcgcacggatcgcccgggtcgccggtccgcgaatccagacggtggattcgcgtggaggacccccgctgctgctaggtggccggacgaagacaaacgattcgcgggc

SEQ ID NO: 179497 - DNA, 774 bp, Zea Mays
tctactccacaagaaatggtaaaaggaaaaagtgaccaaaaatagattgtccagttgttttctctgccattgaattgtctaactgtctattgctagaaaatcaacataatcttaagtgtagtatggtaattaacctattgatgtgttgatgcaactgacatgcatataatttaattaattatttgtcaacaattgtcaactttgactttccagaacaaaatacgacttgcattgatcgatgttgggactgggagtatatattggtgcatcttttgtttgtacactaaatacgtatataatttgactaactgtttttttcagaacttacaaaatttgactttccctgccaaagtttgccttacattgatggacacaaggtgtatgttaactccattgtcccattgagaagatcaagagttctgtaataaaaaaagtattggatccctgtgttaatgctgcataaaattctaaaagttaccaactagttgtagtacaccttttaacaggagcatgctgttatggcattggtgagggggtaatggtggttcaggtgatgatgatccttggctacgcaagtgtagctgcgggtatagttgagcgaggtttcacccctttagctccctattttattggagggaagagaaataggaagatcattcattgcttgattatgctccaagggccattcagcttacataggcatcaggctgccaatcagtcctcaaatctctctcaattattaagtttctaaattagcaccagctaatgtccgct

SEQ ID NO: 179498 - DNA, 463 bp, Zea Mays
gtgacacgcgcgcagctgcataggcatgcattggcaaaagaacgaagagttcatactgatgttgaagaaggcgcagtgacagagaaagaggttgtgaggtgtcgcagtgacgggttatgggaggagacaggagagacgcgccagagaagacgaaggaggagagttttgggcgggagaaaagaacgagctttcatgtcgtcaatgccagcaaaagcttcgcctcctggatgcatacaacggaggatttagaggaaagcagcatatcgcggacaatcatgcacacatttgccaggctcaccaagaccgcgcacgttccaagaaagcatgtagacagttttagatttaaaattcatggagcaccagagttattaccaagcaaatacaaatggcataggccatggctgaggggatgatgcgatgcgaggctgaatctaatgacatgcatgcacgcacgcacgcacgc

SEQ ID NO: 179499 - DNA, 647 bp, Zea Mays
gaccaatttagtggtgttctacaccttctcccatacaaggcctcgaaaggtgccattttcaggctagattggtagctgtcattgtaagagaattctgctagagaaaggcatttgtcccaatctttgccataatgtatcacacatgctctgaacatgtccttgagaatctgatttactctttctgtctgaccatcagtttgaggatggtatgctgagcttctaatcattgttgttctgagtgacttttgtagctgctcctagaaacgtgctacgaacggtgcccctctgtcttacacgatagtccatgggattccatgcaagtgcactatttggtcaatatagatctctgcgtattttccggacctgtgggtggtatgcacgggcaagaaatgagtagtcttggttagcctatccacaatgacccaaatggaatcgtggtgctgggaggtgttgggcaatcccacagtaaagtccatgcaagtgtcctccaatttccaagatggtacggggagaggttgtagggtacccgctacctttaaatgactggccttgattctttggcaagtattgcactcagatatgtacttagcaatctatctcttcatcttggtccaccaatataaggatctgaggtcatgatacatctt

SEQ ID NO: 179500 - DNA, 792 bp, Zea Mays
tgtgtttgaggtccgagaagggatcagtcatcctcatcaccatgctcggtgagcgtgggaggttaatcgccttccgtgttcgtcccgggcgtccagaattgctcgccggggataggatttcgccgcctgccaccatatgtggacatatgacctctgcattgcacaatccacaggtatgagtgcttgatcgggttcattatgctcttagctgcgtgtagcacctagcggtagggattttagtgcaccatagagattgatcggtgtgcgtcgatgacgtctccgccgcgctccgggcggcgccgccgtcaaggatgtcgggaggaaggagatagcacgtcgttcgtagatgtaagaaccgacggttatggttagtccgcgcgtatcggttcgcttgtattaatccggtccatccatttcagatcaggcgcgtgagattcgttgaagccaacataaaatctagatggttgaactgggatcttagggctaggaatgcataccgtttcgcgggtgcagagatctaatcgtagtcgtccgctgttgatctcgcggccaggataaccccgtaccctttcagccctggcaaaagtgttaaaaagcccctcggttttagcaaaaaccaacccgccgtccagggaccctgttctctgtgtcttggatatcttgcgcatagccccctgcgcttcacagaaatgaggcccagtccagtgccatgataaattgaataaaggaattagaaaataggtttttattgtataaatgagcactagaatttgaataattcatagaaaattc

SEQ ID NO: 179501 - DNA, 1119 bp, Zea Mays
aaaaaaatgtgttgctaaactccttggccctaggtttaactcttgtacaaagctgaaaagtacacacaatttggttgataactgaaaaatcgtgattggcggtattagtaagttctataataaagctgttgatgagattgattcatatcctcactgcttcaaggcagatattggaatggggaaaccacttgcagcaatcggcaagttctaatgctttgtacaggtggaccagtcaacggtggacatcaaagagagatttgggaagtttaaggatgtacttgatcctggatgccgttttgtgccgtggatcattggaaaccgcgtcgaaggtcagctcacgcattggaaaccgttgtgagacgaagacaaaggtattgatatctcacttctgacttgtcacatgcaagattcagcttccatgttcaatataggtagtatttgttaagatagtgataagtttttaccgcctgtttgcaggcagcattcttcagatcttttgctcaccttatctaataatgtttttgaacgcttatttgtttaagcatcctgtcgcaggataatgttttcgttacggttgttgcatccattcaataccgggcgatggaagacaaagcatgcaatgcatattataagctgagcaacccaaaagctcaaattcaatcatacgtccttgatggtaaaatcgatttatactaaattcttaccgtttagaatggttgtccaaactgtcccatgcatgggaggtagaaaatagtagtagtaaatcaacagagttgaaccatttacccacttgaaatactcccccattggtcacaaagaagtgatgcttgggttgcatgcagtaaaccactgaacctctgattacaaattacttattatgtgttgagtttggaaattaaaatgatactgctagattcctcttgaaaaatactttgaaagaggtatatttttttactatggtttataaaatgtacacagcgaaaaggactagtctaaattatgttttgaagattgtgttgatgtccaaaacaatgtgaccagagggagtgcctcatttcaaccgcttaacatctttcaaactatttgtaggcagaaaagctctaataagtgaactctttt

SEQ ID NO: 179502 - DNA, 530 bp, Zea Mays
tatggtgacccgtcctgttgcttctgacataccagctactgtggaggctctagtgctgaggtcgcccctaacccggctgcctcatcccatcagacagtgtggtatgcttattataagaaagaggcgtacagtcgtgcctacgactattgtgtgggctcctggcaacgtgtcctgatgtggttgacgtatgcttgtggcgctggcctagcgcttgggctcactcggtgggtacttgatcggtcattccgcctcgtagacttgctcagcggggacttggtcgtccactctgccttgcagatttgttcgacgggcacttggtcgtcctctctgccccgcagacttgctcggcgggggacctggtcatctgttccgcctcgcagacttgctcggcgggggatctggtcatccgtttcgcctcgcatacttgctcgacaggggacttagtgtgccggggcagaaaagggtttatgtgcttgttccgagtacctcattcctaggtacccgacactatgagtacttgatatcacatc

SEQ ID NO: 179503 - DNA, 590 bp, Zea Mays
gcttacaagaatgacgatggaacatccgtaaatggttgtagaaacgtttgtaacgctcctagtatgccacttcttggtagcttggcataaatcattgaaaataagctggcactagtccatctggtggaaacaattcatctcctcagttaaaagaacctcatggttggttattccccagctggcagtagggaacaacaacctattgaacagtatcaggaagaaggatctaatgcttagatcatcatcagaccctttcctcagacgatcttgaagagctgcaaccccaaaatcttctttcgataaaccaagttcagcccttaaattgttggcagcaatagcttcatcaatgcccaatgccgttcctccaccagcatttggtaaccccaaaataaggtgcaccgcatcctttgtaattttgagctccttccttgggccggctcgaattgtcatgtcattatggtcaagtttttccatcagccaagctaaatgagatctactgccgagtgcatcaactctcatatcaagaatactggagaaccccctccgtgcaatagcttggcgctgtctgtcatttaatatctggatgctta

SEQ ID NO: 179504 - DNA, 570 bp, Zea Mays
agatagatttggagccatagatcgatagagtcggagtctgtaataacgcttaattcagtgtcttagtcttagtcggtcttagttagagttagtttgtttatcatatgttttgatgcttgtcgtgatgaacttgtaattaagttggatctttgtaatgattgtcaccaaggtgtgggtatccccttccacttggtatagttattaataaagtcagttgtttaggtgggcaacccatttatttccacttccctctttatctgagatgagtcagtgaagatgatcaattgttcagtgctatgaagatttccatatatcttttcttatgctgaaagactgtggagtcagatctggtacgtgtgtgctttctacagatgtctaggaacaagcgcagaggtggaaggcgtgctcagtaggagcagcaggcaccccaggaggaggcagctcagcagcagttgccatcgccaccccctataaccattgagcagatgttcctgatgcaaacccaagcaatccaagcaattggttagactttagcagcaatgcagcaggtgcaacagctgcaacccccac

SEQ ID NO: 179505 - DNA, 553 bp, Zea Mays
ctgactactgttacccgctgcgagggcaaggggtaaaaagaaagattgctgcttctggaaaggttgctgcttcggccatcacagctgagccgaagggcaagaagataaaggttctaactcaccagccgcgttacattgaaccggccgcgatacctgaatttggcgaaggggcctcttcagctgctgagacaaaagaaactgctccacctacgcagagcactgaaaagtcggctgtaatgccgaagttactttcagtcgagctagttgagacaaaggctgataaggctgaagggccaaaaattgaagaaataacgaaaatgccagagattttgagccctccaacagaggcaacagtgccgaaggtacaaaagggttctaccgcaactcctaagaggagaacgatggaaaatgtattggatgttgtgttagaaacaacaaaaaccttgagtcctgctcctaaaaggaaagttgtcgaagcttccaaggcgcaacacgaagttgattctaagccggcagaaatcgaagcagcaacaattcaagctgaaaccgaagc

SEQ ID NO: 179506 - DNA, 507 bp, Zea Mays
gtgatagttggcctaacccctagaatgaccacccacaatattattttgcaaggtatcaatgattttagtcctcaaggcagaattgttagccacccatatctaatctcccttcctgatgacaccttgctgcaatgaaaatcccccttcattgggactatgtatagccaactggcccaacaacacctgagcctcttcatctgtaacataagagtttaccacctcctgaatccaaataggttttacatccgctactgattgcaaagccatgaaatgtcccaccctagatagagcatctgcagcctaattttcatttccctttttgtactcaatttgaactacagtcccatcatttttgtcatggccttcctttgcaattatgaatgtaacacctggttctccagaaaaatcagggccttatgatctatcctgatgatgaactcagctctctgaagataagttctccacttctccactgccatcaataatgccagaaacttcttgtcatag

SEQ ID NO: 179507 - DNA, 692 bp, Zea Mays
gaaagaatgcaggtagtaggtaagctagcagcagcagggcatggggctgggcctagggatgcgtgagatatataaaagccaggaccttcacgagggtgcaggcaggcgtgcaggagagagagatggactttgttgagacttgagagagaaagagagagagagggggtatgaaagccacgcggggcagcagccatcaatccatggatggaaacctagctcagctgcttctccttcgttgctttctctctcactcccgctgatcgatcagttcctctgatagcatggccatggcaacaagtactagctagtactcgcacccacatcagccttgcagttgcatatgcatgcgtcgcctgctcctgctgcggttgctgtagtttgttgctgcacccccgatcgccattattctattcctctctcatgcatgcatgctgcatcaccatatattaccctatttagtaaccaccttatccatcatatatcatatgggcagaccccacctcgctcgcgccctagcagttattagtttataccatgccaaggccctttgaatctttgtcctcgtcgagcctccagccgtcaactctctttcgcaataaatacccgaaatgtgatgatgatattagagccagacacggggcaagaaataaaccgtatgaccaaatcaaacaagatcttaaaaaacactactg

SEQ ID NO: 179508 - DNA, 570 bp, Zea Mays
cctaactaccgatctgcatgccataaatagttttagcatatttagacctagaaattaaactcacaatgaaacttatggagcgatatgcttccttaatttctggagtagattattaatttgttattgaagaggaacctcagccttatcgtgtctcgtacgtattcccatgcggactagtgctttgctctgtctagagccgttgacgtcgtacgtatgtccgaccggcgcctgctctctctagaaggaaccatgcatggcggtattatgcaatctatctataatctatccaaagcccctctgatccaagcggcatgccctaacgaacgcagccaactcagactcgatcgctagccggccgggttataaatacaactcgctgttctacacagccagccaggtgagatcatatcgtcgtttcgcttgtgacctcgctcgccacgtgcagcctcgcttcttgccgcgacgcgttaggcttgggcgccgccacctcgtttgtcgaccggcagtgagggtcgcgccgatccggcgacacgcaccacgtcggtcggcgccgagatgtctacttccccg

SEQ ID NO: 179509 - DNA, 356 bp, Zea Mays
gctcggtccacactcccaatctctcactaccggcccattttcccttcatcaccgcgtggcccatatttcttggcgcactcgcactccctggcgggtggacccaccggcgtcggctcttctcctcgtaataacagaaccccgcgaacgattgtgtcgtggccgccatggatgttctcccggagatctcgtgggtggttgcttgcttggactctagggtatataaggctcctattattccccctcttttcctccctagttaaagccgtcaccaaatcatgcgcctgtgtgcaccgttggccgaatcaagtggtgaccggagcaccagcgcgggcgctccgccgtgcaccgtcctgttt

SEQ ID NO: 179510 - DNA, 1556 bp, Zea Mays
ttgcaggaggaattgctgacaccaaatatcatgaccaattcccaaaagagctctgatcaagcgacagctaagcaacacaaccgtttccagtagggtgtgcctgaacagtctaaacagcactctgatcaaagtaaagcgacagctctaatggcgtatcgtcgtgctaaaggcctgtgctacaaatgtggtttacgatggagccaaactcacaagtgtagcaccacggtaccccttcacatggtggaggaattgtggcaattggttagtccttctgattcagtggatgaacaacaacctttgcaagatgagtcgaatcaagaccttatgattctgtcagttaatgcagttcttggcactgaggccctgaaaatagtaaaacttctagccacaattttcgcaaaaaaggtaatcatgttggttgattctggaagttcgtcctcctttatttctgaccgattagcaaaagcacacccagctctaattaccttgcctgctcctgttcaagtgagagttgccaacgaccaagttatttcctgtactcaagaactgcctaaatgcaaaatccaaatccaaggccactgtttccacattgatctgaaggtgctacctctgaactgctatgatatcatcttgggtatggactggttatcttcacatagtcccatgcagatacattggcagcaccaatggttggcttttcaagctgaacataagaatgtggtattacagggaatagtttctgataattctaccttgcaaccaatttcagtccctcagctatttcatctgcaacagcacgagcagctatggtgtgttctccacttgcaggcagtggatcaaatggactcatcaccacctcagagcgctctctcggtggaaattcagagtttaattcaggagttcgcctccctgtttgacaaaccaagtggtcttcctccccccagatcccattgtcacaatattcctcttattcagggagctacaccatttcggttacgtccatatcgctacaaccctgctcaaaaagatgaaatagagcgccaagtggcaggccttctccaatcaggaatgatacaaccgagcagcagtccattcacatcaccaatcattttagctcgtaaaaagactggagactggagactatgtgtcgattacagacgactcaatgccctcacagtgaagaacaaatacccgttgccggtaatagatgaacttttggatgagcttcacggggctgtctggttcacaagtctggatttgagctcaggatatcaccaaatccgaattgcacctcaagatattcacaaaactgccttccaaactcacaatggacattatgaatacaaggtcatgccttatggtgtcacgggtggtctcgcaacttttcaattggcaatgaattcagtgttgtccccatttctcagaaagtgtgtagtcatttttattgacgacatactaatctacagctcaacttggactgaacatttgcaccagttaagagcagtgttcactaccttggaccagcatcattttaaagtcaaactttctaagtgctc

SEQ ID NO: 179511 - DNA, 590 bp, Zea Mays
gttttatgtgaagaatgacttgcacaagaggaaggttgttaagggtattatatagaggcccatcatatcccgcttaggcataaagaggctagttattatagaaatagaagaagctcaatcttgcttggtggcattcaatgttgtttatagttacatttgcaccagaggtttagtccaagagctcattgctttaaggtttgacctcttgtaaatgagtggaaaatgctgacgggaaatgaagatggttcgaatcagggtgctgggagaggtggtctagcaaacttgaaatacacttatcgatacagaaatcagtttggcaagcctgatgacgaatggttggaggctatcgaagaaacatgtgatgagttgttggggaatttctcgaaaaaggaggatgaagctctaaccaccgcctttggtgcacatggaaagaggaggttgaattgagttttcgatgccatcagctttatttacccggactacaactttctgttctgggtaaaggttagaagagaaaaagtgctctgaagtctccctcggctatgccaaagcaaaaaagggtaaagattctggaaaatcggccatcatcg

SEQ ID NO: 179512 - DNA, 380 bp, Zea Mays
tattttcaagatatattccactaaaggttgtacaaaaaattaaattccaataaatgtaggtgatctactccctctcatatccactttaattgtattaataatcttttgtgagagaagacgaaaatgttacactactaataatagaagatcacttatatgtgcttttaggggatgagaataagaagtatgttggagatgctctaacatgttccttattaaaatgtgtccccacatccattatttattgcttatgtcaattcttaaaagaagcatcctcacaaaaaggttctgaagtagttaagatgatttttataagggctttatgacacctccccattttggtcattaagctacattgcgttcttcaaatcatcataaac

SEQ ID NO: 179513 - DNA, 861 bp, Zea Mays
ggggtgtgctctaggggccgaggaggtcccggaactagagggggagttggtggtctttgaagcatttttcactgctggtctttgactgtctggacactgatttcttgtcaaagtcttgcagcatttcgaagtccagcttcactagctcacaccaaatgccatggtggcattggctacgtttatgtcggtggacccacattcattggtgagccttcggttgaggtcttcaccaagaactattgccttcactggtagaataaggttactagtggcaaggttgtgcagtttgttacgggatgcgaccatggacatggggttcccgtgccggtgcatataaaagaggcccctcggccacccctacccggagccatgaacaaatcgtatagagagagaggtgggaggtagtgcttgaagtcgccgccatggtcgagtagagggaagcaaagagagagatcgacgccacaaccaatgtgcatctacgcagctccttcgccttggcaaggtgcttgggggaatcgctagtgacagtggagtgtgcgcgtaggctaatcgcgcactgcgatggcagatgatgaagaaattgctcaccatcacatatcgtcgtcgcagatccatgtcaatgcatgggcagcctagtcttcgccttcatcaccggtgagcgtttgcctccttctcctatttgttttaggcccaaatatgttcgagatgacgctccggcgggcttggttgcacgtgcgccggcgatgctccaccgtggggcactcgcgccaccgtggcctgggtgtctctaggaaagggaaagtgtgggagccgtcggtttctcgatgaatgatctagattagagcatgcgtaccccttcgc

SEQ ID NO: 179514 - DNA, 878 bp, Zea Mays
ggcgcatctctcctcggcatcgaaacaccgtcgagtcaaagctgaagaaacaactgaccgtcataaaaaatatgaacgagaataagaaaaatcagcaaggaatgacatcaaaaacttaccagcattggcaaccttcaaatcatctactttcttatgaagaacaataggactcccctgtgaaaaagaagatatttttgttcaagtattggagctccatgtgcttttagctaaacgactacttgatccaagacaccctgtgaagatagaagccgacaaacaaaacacccattgaaaaatacaaagtaatgtgagatacaaaaccaagtacctgcaagttcggaaggaagagtaaagacctaaagctagaacaaccgagacatccccgggagcagtagcaccaacggaagccacaaaaggagtagggacaaacgtttaaggttctgaatctcccaaactgagtgcgacacccattgggattctagcaccggaaccactgaccttcaaagtggttgggtcggctggactaggcccgatgggcaggacacaacttgttgccacaacatcgtttgtctgaggtattggcgacccaatgtgaacctccattgaagcagcagaaggagaaccaactacggcaccctcgggggctggagcaccctctggggctgaagtgtcctctagggtcgggactatgtcggtggcaagattgactgatgcagaagccctatgggggctggcaggcttatctctggcccgaccagcaaactagctgaaggtgcttcatccgagcaatctatgcggacatcaataacgctgatttcaggtagctcaagtagaagctcctcaggaacggcctataacacccaaaatcctaatttgtg

SEQ ID NO: 179515 - DNA, 362 bp, Zea Mays
cagtgattttggtgctggtaggattttggtaatagtccatggtggaaaaagttatagctgaaaagctctattttcagttttccatcgaacatcattttgataggttgaagagccaaggctgacatatttgtctaaaaatgagaattatatatgtcaaaataaatattgctttactagcctgaaatatccgaaatgtcacactacaccataataaagaacagagcttaacaaagcaagaacacattaaaccaagtagttattatttgcagctcctttaggctacagaggggggcaaagtcatgttatattttaagtaaacgaaagaaaacaaaacaaaggaggtgtgtgttcaaaaaagaact

SEQ ID NO: 179516 - DNA, 738 bp, Zea Mays
tcaatcaccaaccgaaagaaccctagggggagaaaattcagaattgtctctaagtcccccaaaccgaattcaaaacttaccatgttcacctagctccttaactcaaactcaaatggtccaatggacaagtttgcgcctaatcacctcagacatgtcctcgaggaagttgacacgaaacccagcccgtttgacatgcttggcacacgcttttgtcgcgacccgaggggctgtgacagacacgacttggcactgccaaagctcctagcccgacgtgtatctcaccttggaactcacatagaaaagcaagatcttggtgcaaggacgagatcctacatggaaccctcactgagataggcactctagggcagctaaacagacgcttgaacttgggcagacgcaatcctccacttgttcgacctatcctaggcgcgctctgaccgcacagcgcatgccacaagcgtcgaacgacttggccgcgtgctccaccccgcgcccatgcccgaaacctcccctataagaagcccgacccttggcctttcccttctgcacgtccaaatccttccaccgacgaccgagcgccggtaatcgcttgaaaaccgagcacggccccacaagatcacagacgcgacgaccgccatagccggccactccagcccaactccgcccaatccagtttctcggctagcttccctataggctagcaaagctccccagccgctcggaccaaacggtacctct

SEQ ID NO: 179517 - DNA, 584 bp, Zea Mays
aggcccagctcccccactcctgggacgacgacgcagcatcaggcgaacgaatcaagaagtggtgtagcttcttcacgccacccgtcgtcgatgttggtggtcttcgaggcgagcaaatcggcgctgttgtcgacctcaaaaaccaccaccagcagatccctgtcccgcacatctgctcgtcacccagcgaactcggtgccgctcgtcgacgtgtccacctccaccgtggtcgctgcacccacgacggagcacctgtttcgtcgtgcttggcgcgcacgcctctagttccaccactcggattcgggggggtaccggcgttggcgaggcgcacatggatggaggtggtctcatccctggcgcggtcaccatctatccaggcacaaaaatggcgctggtgcggacatcctcgcggcgagcaggggtgttgtgtgtgcgcgccagggggaggcatcgcgtgatgtctccgccggtgggggagggtgccacggcgggatgggcaggctagggagcgggcaagatttccggcggccgcctacttttgattacgtgctgaccgcttcctcctcctccatgcaaaggggttg

SEQ ID NO: 179518 - DNA, 507 bp, Zea Mays
aggagggcgtgatcggacctatggagagctggccacggcgagctcacacacggcggaattcttgactgatttgggggaaatctcaaattggggagctgtgggggacgattgaaggtgagggctggttcactgggtgcacaactacttagcgaagcaggctggggcaccaatttatagtatccaagggtggtggctcctaatttgggcatggcgtggtggcggccggagatgaagaaggtcactggtggctcagtcgcggcgttcatcggtgcagcggttctgagatggtaagcctaggcgtgccacagttactactgtgcagtaaagagccacggcgtggcatacttgaggttgctggagcttccacgacaacaccggcggttcgaccacatcgcttggttacagacgcggttgataagcttcaccccacgaccaaatccactcccccttcgatcttttcacacgcccagtactttcctacctaagtccaacacgaatcgccacgac

SEQ ID NO: 179519 - DNA, 378 bp, Zea Mays
cttatcccttggtttcaggttttagaaattgattggggggcaatacagattgatgatagatgggaggaagaaggagaacaagagactgcctctgagtcagtgatgtatgatcggttaggattgttaacagaagatgaacgtgaaactactgaaaggcaagatgcttttaccccatttggtgtccgccgaagtgatgaatttgatgatgaaacagctgcattgccctgcattgattgcataccacaagaaagggtatttgtttgcaacagatctaatccaataatgaagattggtagtttgtacaaggatatgaaagaattcagactggctatcaggcaatattgttaaagtccttcgtccttcgaagcattatttcct

SEQ ID NO: 179520 - DNA, 384 bp, Zea Mays
cttttgtgccctggtagcttctcggggcacaactgtcgccttcctgaaatctggctgcgaacatggaaaggttatcaatagacccaatttcagcatatcaccagcagatctggataatattcccaacattgcccgaagcatagcaaatagatttataaaactggtatggacaaagggtggacgaagcaaagctggtgatgaagctcggagtcatcttaagccggtaacaaaatcataccttgtgcctacctcttccttcaagcttgaattttgcttataatactttaatatatacaggatgacgaagccgaggccgaagctgaggagtaagaagacgaagccgaagcttaacggatgacgaagcctaagccgaagctccgtgga

SEQ ID NO: 179521 - DNA, 555 bp, Zea Mays
acttcatcattcttcggtgctggggtagttttttctccagcaaatcaaacaagtttactttcagcttctcccaaatagcctagtttcatcatcatgggcatgtcatcttcggacacagtagatttctcaaaatctagatgactgggctttgttgggatcaaaatactgtaatctttatcactttcatcaacattttcttcttcaacaacaatctgttcagcttcggcatcaggagcaccttcgtcaatagctccctctgtcacaactagacctgatcgttccatgacttctgaaattggtgctgtctcattgacctcggtctcttctccctcacgagacacccttgtagttgatcgcactctagccattttgatggtttttacaatttgatgaagctaactcgtctgatgaagctaacttcaaatgatgaagtgctcgcttgagagcgcggtgcagaaagctttggctatggttaaattttttaacagcgcaacagtgcaatggcaataaatgctatggtaactcctcaccaacccgtctgtttatatagtgctg

SEQ ID NO: 179522 - DNA, 765 bp, Zea Mays
ctttgccttgctctgaaagctctcccctatagatggccatatagcactaacacggtgagccagcccgggcacggcactaaaaagcacgacccagcccgaaccagatccagcccatacactgtgtcgtgcataggccaccagctcagcccatagtatcgacccaggcccaacacggtatactgggttggcacgcccaggcgccaggcccagccaagcgccatatccccatatgccaaagtcgcgcccgcgggcttaaccataaacgcctcgtccatagacaactctccttcctctcgcagtctcgcgcagccgcgaactccttctccctcggtttctcctcctccgctgcgatctgtcctctcttcggtctccctctcctctctccgacctccggctctccacctccgctcagatatatcgtcggcgatcctcccccgctccatcctcaacggatttgcgcgtttgtggaaccatgtaactcctatccgtaaccttaactcggtaactcctatcttcttctccgcctccggtgtcatctacaccaattggtgtccactggccgacattggcacacgacacagcatcatcctcgtctacctcgtcgtctccctcgagctcatacgccgtcgacggctactgtgatccagattcaaatccgttgaggaaccgggtggccggatcggttgttcgtcgacggtcgatcggtcgacgtcgtctgtggagatctcggtgctccggcttattaggtaaccctaaccctaacct

SEQ ID NO: 179523 - DNA, 467 bp, Zea Mays
gcgagggatgttaaatcatgatttaatatgtgcaccatataattctcttcatatccacctcctgaaccacatgctaggaattgcaagcagatgacatgtacttctattgcagcattttgctgtgacctgtgaaccaatccacagttttgatcgttagcattcctgaagcttgttttggaatgtattggacacatgaatgtcatgtttaggctactgactgtaaaatttcgctgaattccagataatttgtgaactgaatggctggtcaacattgctcaaacaaatcttccaaatcccagacatagtatggtttactctttctccagaggtgtttagcgtcttccaaataagattacatctttctactggtatttgcacctatttacgctccaactttgtgtgacttctaacaaagtagtgagatcggtctaactggtgggtcccacgcagtcagtgaacaacgtccc

SEQ ID NO: 179524 - DNA, 444 bp, Zea Mays
tgaacgttgtgggtccaagcacttgggaatatggtgacaggtggcaagaaggaggcacgacaaaaccataagctaggggcgcaaatgtcttgtcaagtgtgtcctagtctagcttcagaacgggggtatttatagggggtaggtggcctaagtacatttgtgcccctagttacctagtatattcccagaatatgttgtacaataggataattacagggcggatccgtttttatcctagctacaccaaatcttctgggccgtcggaggatgtttggtgggcccgacctagatagggatcgacccaccttggtgcggtcatggacatagcctccgggccttcgcccccggcacaagaagtggcctcgatgagcttgagcttgatgaagacccttgcaaagccttcgcgatattcgcctcgcctccgccacaatgggtcgacctctc

SEQ ID NO: 179525 - DNA, 321 bp, Zea Mays
tgcaaacccattctgcttgcgtgcgggagcaaccgatgcccgatgaacttactatccgtggaccaaacgcataggccagtcatcatcatctcagggtcaaaggtgtcagtgcacttgagcgcatatgttgtgacagcatcaattttaaagtcactagagtaccaggctctcatttatctctatttaggctatgtgcttctatgaggttgaaatgcgttcacggtcactatatcgactcgatataataattatgaatcaatataaatcaggccgcctctccatctccctcctccctcaaaccctacctgccaccacctctac

SEQ ID NO: 179526 - DNA, 725 bp, Zea Mays
ggatgtttagatgggccatttttcatatataaaaaggcacatgttaaactggtcgcatacaaattgtaattgagggcacattttgattactgatagttctttcttttcctacttttttacttgaggttacaaagggtgcagggtgttgtgcatgacattatgtatttgctcattattatcaattcctctaaaatctgaaagaacattgaacctgaaactgttgtggtggctgattttcattttcgaaggctggtacatagctctattttgactccatacaccaaggtatttaaacatccgggtcctcccttgaatccttactatcatggttatcttgtgtcgtctctagatctaactgaattgtatataatgcatagaatcgagggagccatcatccgtgggagtaagactctagccacataattgctttaatgatctaccttgctacataagatcgtgattgtcaagtcgatgaataataataaagtttatcttgcttttatatttataagatcaaatgccacaaatgatttgcttcccgaaatagcggctgcaatatctcatcccctaactcatggcatcactgcaggtttcttcgatggagactgcgcaagcataggtattcatccctcctcgaacaacctgcctgcaccacatgactctgagagcatttctaaccaaggtagtgcagcagcaccaggtgtgtaattttcaaatcgcacaaa

SEQ ID NO: 179527 - DNA, 326 bp, Zea Mays
acacaatcatgatcggtcctcactggttttccacaaccacagccattcgatctgagaggcccgacctttgggaagcaagtgccaaacagttgggcccaactctacagtatactagatccctgagtcttaagggccaatcttggggaagcaggcgccaaacagatcttgttcagcattccctcctcactcaccagttactgtattgaggcgtgcagcctatagaaatgagctgatgttaacaatgatgtaaccctatccttccatatgtcccactaaagaccatttagttatttttatgatcttccatataatttgtcacatgcaat

SEQ ID NO: 179528 - DNA, 731 bp, Zea Mays
gttctgttggaagttggttttattttgctttgggtatggacagtccttgatgaagtgtccggactttccacagttaaacaaccagtagaagaactagggatagcagggaaacgagtaccaggggcactcggctgatttgtaggagcgggggcagtattgggacgaatgaaaacaggctgcttgaagggataggaaggtgggcgaggcgaagaacgattctgattaaaaggtcggatcaccaacctggttctcttcttaggcccttgatttaacctttcacctccaaacccctttgattttccatgcccggcatttttggcttccactgccagtgttgtactgacagacctactgtaggtgagatccagacatgttgccattttccgttgaagcctgtcattaagtcccctcataaaacaattctttttctttagatcggtatttacttggtcgatggcatactgggatagatggttgaatttgttgacatactgcacgacagtatctcccccttgctttaaccggatgaattcttcttgtttcatatggagcactccttctggaacatagtgctcacggaatgctagcttgaattcctcccaggtgatctggtgtccagttggttggattgctgcaaaatttgcccaccatgtactggcagaccctcttagctattgggcagcaaacaatggcttctgcgtctctgtgcagcgaatcaatccaaacttttg

SEQ ID NO: 179529 - DNA, 550 bp, Zea Mays
aatggggaaatctgaaattcagatttctgaattttcagcctttgaaccaaaaccgagcgcgttcaccttgatctctatctcaaaactctaagctcccattaacaaaaatgtgtctaactaacccctctacctcataccagaagatggcatcgggacggtgccctggacacatcaaacccgggatcttctctctgtgttcggcagtgagacaaacccaacttcacccctccatatctcttgatccagtcagcgaaacctgcaagcctccacacacaaacgataaaggaatgtcaggggaagagatctctcaatgggatcatggccataatctcaaagatttggagccaatccgcgcttgaacacgacctttctctatgctgcctcgtgctcgacgttgtgccagatgccagagcgcgcacaggcgctcgccctcgcacgccccgagcgcttgtcagagcctcctctcggccgtgcttgcctgtgcctttaaaaccaccccccgggcgcgcctcacctcactccacgctcaccctcgctggccagacacccc

SEQ ID NO: 179530 - DNA, 594 bp, Zea Mays
ggatttcgaggtcataatccttgatcaattcgagccaccttctttgacggaggttgaggtccggttgcgtgaagatgtacttgagactcttgtgatcagtgaagatgtggcacttgttcccgatcagataatgcctccatatttttagggcgtgcactatggctgccaattccagatcgtgggtagggtagttctgttcgtgcggcttgagtaagcgggatgcataagcaatgactttctcattttgcattaggacacaccctaagccttgcttggaagcatcacagaagatgacaaaatcctggtgtatgtctggtagggtcaaaactggtgcggttgtaagcttctctttgatgatttggaaactttcttcacatttgggagtccacacgaacttattgtcctttttgagaagttcggtcatgggttttgctatgctggagaatcccttcataaaacggcggtaataccctgccattcccagaaagcttcatacttcactgacgttggatggttgcttccaatttgaaacagcttctaccttagatgggtccacttctatcccttctgcagtcaagatatgccccaggaaag

SEQ ID NO: 179531 - DNA, 438 bp, Zea Mays
cgacgggggtcctagtatctagagccgcgacccaaggggggccgaacacgcaacttggccacctggactacaccctgcaagtcccgagcatgtatcaaaggatggctaatatcagataggggaccctatgggtgtactactaacgctccctagctaaagctgtgtacagatccagatcccggcgaggctacctcccgagagttgttgacaaccctttcagatacgctggtatccaacctcgacacatcaagcctgcatcccaggcggggggccaggtaccagggaggagtcaacaacatagcatcacatacagcaggaacatgtggtacacagataagtgctaacactgcttgataaatagtgctcaaaagtaccttacaaaaagcaaaagtattacatctgccttcaagcggaaccctagttccatctctactctgc

SEQ ID NO: 179532 - DNA, 496 bp, Zea Mays
ccgaggaagagcgacaatgatcagtgcccacggagcagggcggctacgcggcggaaggtgaaggacgatgagaaactcacgtcgtcgtggggcctcgcgcccccggatttctccccgagcacaacccacgagtccgcccgagtgcccgaaatcgattcactggtgcaaagcaacggtgcaggtgagaggtccgcacggcggatcccgtggctggagatggatcacggtggtggcgccaggtatgtccaacaaaagggagagaggaaataggatcgaccgaggaccacgactcttcatataggcatgaggcggtcggagtttgagcaacggaattcccgagtccgccggagatccggccatggcgcgcgcgcggcaaaggcggccaggtttgttccgccgccagactctatcgcgagggaggagctgacagcgggggggtcccaccgacagtgagaagaaagcgcgagcacacggctgagggctggacagtggggac

SEQ ID NO: 179533 - DNA, 612 bp, Zea Mays
cctgttttgcgtactgggcagcagcttcgagtgctcatgaatcttctaaagtcgtgcaaattgtctgctactggaggagatggttatccctcttgtaatatcattaatatggagggggttctcccatggtttaatacaccaattgagtcttcaatgaattcatttacgttctcaaaaagtagcgtggaggcagtaacatgcaaaagggatgctatgtacaagttgatgatggagaaactccaacgttttttctctaatgtggaggtcttgtcacatctactactatgttttttgctctaacagtagcaagaatactttatttctcagaagtcttgctcaatctgttatgcaagaaaacttgctttccccaaagtcacctattcatcgtaaccttctgtttccaaatatgctgacaaatggttacgtttcaggtgattccttttgatactgcatcaaacatcctacataaaaggaccaatcttctggacacatcagtttcagatgctgaactgttcaatggggacagcgacgctgcactaccttgcaatatgtatatcctcatttcacttttttaatctgtttgtggatttatttgtagcgcacatatctcgc

SEQ ID NO: 179534 - DNA, 388 bp, Zea Mays
gtcatcttcattatgatctcttcctgacaaagccgggagtcttttcctccaggtaggggtatttttgttgctaggtggaaagtagcgaaggggtgtctcagagacttccctgctgtagttttggcatagttggcggagggctttttgggcagcattctagcaggtgtctgggaagcggtggccaatagcggtaatctgaaagagagggtgatttgggtagcttcgactttctcctaggtagaccgccatagagcacttctcaatcctgttctcgtggtattccttccagacatattccggcttcttgtggatccccatgcgaagcacacaactccgaagaaggtgagggaatccttccacctccgagcaataggatgtcttaaggaag

SEQ ID NO: 179535 - DNA, 582 bp, Zea Mays
aggccaccctcgaggcctctagactgcagttcggcttctgccgcctagcacttgaggacacagctctaactccagcaccagatatcagggttgaggatgaggccatcagacagtttgagaatcagggtgcagttgctgatacttcttccgatgatgaggaggatcagggggattccgccacaacctctcgtgccaccttgttctcatgatcacgaggctaatagctctagtgctgctctagctgctcctccagcaattgaccctgctttggctaccatcctttagtcgctcactcagcaacaggctcatatggccacagagcaggcccgttaggcagcagagcaggctaggtaggtcgctattcagcagcagttgtccgagcggatgttatctatgttctagaccattcaagaccgccatgacactctatagaagcaactcatagtagacaggacagagcaccgagcgttcatgactcatattctccaacataccggtgttctgatgatccctctagtgtagactgttccccctccatctcttcaggctactgttgtgccatctattcagttaggaccctag

SEQ ID NO: 179536 - DNA, 559 bp, Zea Mays
atgaaatcggagtgcagaaggtagttcttcttgccacgagttgctcaattaatgaggatatcttgggagcttaggccccttgtccttgaccgtttgattctttggtcctgtcattgttagcacaaaacagagacaaaacgacaacaaacaatgtgaaccctacaactatctctcagggtggtggtggtggtggaatacaaattatgaagcgtcttaccctgctcttacaacgttcttaccagcactgcaggtggcaaacggtgaccggtgtgactatccaacgagcgtgggtgtgattgcaaaggagtacctgttctgctcgagagaaagctggagttctgggaaggctgactaaatatatatatgtggcacacaagtcagtaatagatagcaatgctgaataagtgttccaagtactcgtcctagttgctggcctagaaaatgtaacagatcagttggaccaaggcataagaaaggaggtacatgtatatgggtgcagcaagaaaaacaagcttggggcaaaataatcacagaggtgcatagaacactggcgtttctg

SEQ ID NO: 179537 - DNA, 477 bp, Zea Mays
cttacatcgcttagctccatcaccagctcaccttcggctctcgtctgttcttcggctctcgtacatgaacatcaacaacggctcctcggctcatcttatctccatctgccattttcttcgccaccaaactatccgtcgccgccacgaggctattcgccgccatcccacctcgcctcctcatccaatggtgaagtctcaccgagctccctcctaaactggtgacgacgtccatcctctgctgatcctctctgcttctgtcgccatcagactgctcgcagacgtccctcctatgctcactctcaccactgcaaatctgaagcttcttggaaaatatgtgaactcccatatcttgttcttcagctcttaacttgcatcttcaagtacataaatttgtttccctcaagagttctaattatactatttgtataccaacattgattagattgatgttgatttttagcaatatctctctctccc

SEQ ID NO: 179538 - DNA, 631 bp, Zea Mays
cctcaagaactgccaacagaagcctgaagagaccttgagagactacatctgatgcttctcacgacagtgcaaagaggtgactaaccttgccaccgctgacgttatcagtgcattcatctcgacaaccacgagtgaaactttggtgcacaagatagggcgcaaaagcccgcgaatcacaaaggaacttctagacatcacgacgacccacgcatcgggggagaatgcagtaggggcaattttcagccaccacaagcagaaggccaagcgcgacaaagagcctgatagaggccctagagggagacctaataagaaaaagaaggacgagcgaaggcatgacaaagtgctggtagtcctagcaggtcagaaaagaaggaaccgccgaccgaggaggccaccgaccatttcgagaaaccgctcgaggctccgtgtccaaaaggactgctatgtggtccaacatgcctataagtactatgggttgctaaggaaattcctgagcaaaggagcgccgcccaagagaggggtcgaaccccaatagagtggcgagcatgggaaagcgggggctgctttcccccaactgatattggagggttggattactatgggccgagaaggcatcgaaagtcggaatggc

SEQ ID NO: 179539 - DNA, 995 bp, Zea Mays
tggcaaatgatatcccatttagctaacctgtattttttcctatgtccttccccttgccaaaaaaatctagatcgatagtagtctattttttcaaggactcccttggggacctcaaaaaaagacaacataaacatgactagacttgtcagaaccgaattgattaatactagacgacctcccccggacatcagctttcctttccagctacaaagcttcttctcaattttattctcaatgatcatccaatccttattacccagtttcttgaaatgcatagggatacctaagtatctaaaaggataaatcccacttctacacccaaacagttgaaggtaactatcctcttgatcctttgcatggccaaagcagaaaagctcactcttgtggtaatttatcttaagacccgaaacttgttcgaacgccgctaataagagcctcaagttggatgctttggcaaaatcatggtccaaaaaaataacagtatcatccgcatacttcagaatagataagcccccatctactaaatgaggaataagcccatcaaattgaccatcctcttttgctctattgattaatatagctagcatgtcagcaactatattaaatagaactggggataagggatctccctgccgcaagcctttgtgagttaggaaattcgctccaacttgatcatttacctttatgcctacatgaccccctgtcattatagacgtaatccagttgcaccattccaaggagaagcccttcatacgaagggtctgctggacaaaagaccatttgaccttatcatacgctttctcaaaatcaattttgagaatgactccgcttgcttttttctatgcaactcatgaattgtttcatgcaaaataacagcgccttccataatattcctacctggtataaaagctgactgggtgggacctatcaccttgtcagccactcctgagaccctatttgtaagtgtttttgtaaagattttaaagcttacatta

SEQ ID NO: 179540 - DNA, 786 bp, Zea Mays
aaggtgttgaaaagtgcataaacgtgtgagacgttgaatagtatacatttgtatatccgtttaacaataaatttatgctgaattgttttttgatacatcaaacaattgagttaataattaggtgaaaccgatttacgattcagattgtgtaaatatgcaaatgtaagagtaggctgttgaagacttacctgagtgtgtatgtgcctggaggccggccgatttcgggaccctctgcaggggagaagcccaaggcgacgcgcggctcggtcaatgcgtaggggacgctgaagttgacggccggtcggactcgtcgttggagacggagctcgcgacggtgggtggattgcctagtgttcggccgccgcggtggagaagaacgagggctcggtctctgcggtggagaagaacgagggggcggcgccaccgcctccgtgattccgggtcccttccctggcgacggcgtctctgcggtggagaaggcgattccgggtctctgcggtggagaatgtgaatgcgacggcggtggaactacgggaggagaatctctatgggttcggtggtcgcggtagagaagaagcccacgacggcgattaatctagggttcagcagctgcggtggagaagaagcagacggcgacgattgagctaggattcggtcgctgcgagcgttacgagtgaggtgagctgaaaaaaatgtgtgctcggttgctggattcgtgggcccgatacacgtaaactgctgcgcgaaatcaacgcgaaggcccatggaccgacacgtggattactg

SEQ ID NO: 179541 - DNA, 582 bp, Zea Mays
agaaagaacaaccgtcggctgcaaaggagaaagctgaagggcaaaagaaacaaagaatagtcaacgtgatgcaagccattaagcgaacaccgcctttagcctcagcgggcaaaatgataactgctgcaagtacagaagctgaagctgcttccgaagctgcaaaactcacaaccacaatgtcaagaattgacaatcttatatcagatatggttgcagaagagacatttgtggttgcggaggaaagcatggccgcagtgcctgataaagggaaaaagttgttgatacttcttcgggagagaaagattttgaccttcggcacctgggtggccaggaactgtccgaggcagacaaggaggagctgaaataatatgggatatcttgtggctatcagctgagatctatgctcttcggtggggttgacgaagaaattttgggatgtatttgcgaccgcgtcggggcgaaaataatcggcactctgtctaagagtgttggtttcccaaagctggagtctgaaattagtggttaccgacggcaacacattgtcggcggcctattttactccaattttaaggtgaaatcttt

SEQ ID NO: 179542 - DNA, 665 bp, Zea Mays
gcgaaaatagatgttgtactcgatatgttggctggagaatcttctgactcggcccctgctgaaacgaaggccgttacggttataccagagctcgacaatacagtgaacacccaaaagcctgagggtacacgcccgaagcgtcttcgccaggtcagccgcccaactgcgcctgctgaggagaagaagaagaaaaagagacggcttcggtgactgtcatgcttggaccaggatgctggaccttctgctcctgtttgtgaagaagtaccagcagaggtctttactgaagttgatcccgctggtgatgtacctgttgaagctgaacccaatgggtgtgatcctgttgagactgacccaaatgggtgtgatcatgttgagactgaccctagtggatgtaaccctgttgaagctgaccccaatgggtgtaaccatgttgaagctaatcccaatgggtgtgatcgtgcaccatctcttgtccgtatttttgatgaggacgaagaagagtaagaagaagttccgctaattctaagaatagcaggtgtcatagaggtagtaggggggatagtgatattccttctctagctctgtctgctcttgttagccttcaagaattatccataacagattttgatcaggcccttgaggatgtcattcctgaagatatgctg

SEQ ID NO: 179543 - DNA, 650 bp, Zea Mays
cctgatactgccggtgttttagaggtaaccgccaagtagtgcctgatactgccggcgttttagaggtaaccgccgagtgatgcctgaaactttgctttcccgagtagtgtcttggcactttagaaatagtgcccgacccaggaaaccccatttatactcgcaccgacgtgcttttttgatttctaagtcctaacttcactttttccctttgaaccactcctctgcttccctgagattttgatcctgctcgttccgccagagagattgcgatggcgccaaagcggaagaggcagagcattgttgctgcaatcatcccgcctatcgaccccaacatctagctgccatttgctggtaaccatatgtctatcatttctgaatccgacctccttcatctcgttgaagttggggttttgcttccaaaagagctctgctcttggcggatttgccgcggcgtcaccgtttcgatagaagatacccatgaatccgtcgtttacgttccttttcttatttgtgggcttgctcttcccgtctccccctttttctgtggtcttcttaatttctacgagttgaacttgacgcatctgaaccctaattccattctgcaaatttccatttttgtacatctgtgcgaggcctttctcgggattctc

SEQ ID NO: 179544 - DNA, 666 bp, Zea Mays
cttcacctgtagacatatttccctctgcacaaactgtctgcaaaatttgaggacattctgtgaagttttgcatgcgcgacactgacgctctcaagcctagggctgtcggacaaggagttttcatccttttttgctcaaacttcacggtttagatcttctacctcgtatcatgccgtctgcaaaatttgaggttattatggaaaaattttgcagttcgacactcccgcacctacgagcaacaatactgctcagtgattttttcagactttgacccaaaatttttactggacctttagtgtctttttttggaggtttttgtgaaagattgggttaaaaacaagtctttttttgtcccggatgagctcttattctcctctgaaacttggtaggagcagtcaatcgatctgcggttggtatgttcttttgcggagtgtgtttggtgtccctagaggttagattaggccagggaattaagtcacagtgttctcactgttcgagaatttttagtggctcccattcaccctctctggtcgtctaactggtccttcacctatataattttacagcttagagtataacttaaatcgtaatgcaggttaaattgagtattccagagcaagtagtctggactaattttcttgttgtaacaagatcagaagtataaac

SEQ ID NO: 179545 - DNA, 806 bp, Zea Mays
attcgtatcctgcggttcagattagatcgcgaagggctacgcttcaacggccatcggatcaccgatcagtggtccaaacgccatccacgacaacccctaaccgtgaccatttgatcatcaatccatgatcaatacccagcgcacgctaatgaccccatgatcttagatctacggctagtcctttctcctctaccccacacacgcccggcgctccccccagacagcgacggcggcggtacctccccacggcggagcgccatagccgcgattcggcccgatccacgcagtaatcaagcttcaagtaggaactgctacatgatataaagacaaggtagagactagttgtggggtcctcaccgagattcgccagcacaggaggactgccaacgacacgaggtggtccatagcggtgcccagtaaatctggcgaggaattctacttcaaccagccatcctcctgacttggcacgaccctgagcgcctccctggtgacctggtgaggttctgagccaacacctgagagcccgtcgctggcgtgaatccggatgggagcaaatctggcggccaccatggttggtgtgataggagaaccgagcagaggataactcgagctcgaaggacaggggcgtcgagcatccagccatgggatgggcaaggtggccagagagttcttgttttatatcccaggcggaccctccttcaccgcgagatccggccccgatgtttggcagcggcgacaagttgagataaggaagaattgcggtcaggtcttataggtgtagaaggacacggaagaggacgaatccc

SEQ ID NO: 179546 - DNA, 721 bp, Zea Mays
cccactggaaaactcatctggctgtataagtcaccaattcagtttttcgcttctctctgtgccactgccgtcaacagtagcagtaacgccagttaagtttggtgtggaaagacaatactgcccttgtttggccaggagactctaaacttttatttctttctatgccactctgcacgctgcgattatcagcagatctgtagacatccaaaatgaatccaagcaaaattaatccaagcgaaattgttccaaacaaaacacagtaaaacagtgttatgtccatacactacttcaggccaaatcaaataatgcataggaataaaaccatcaaagccacctaatagatttaagttcataggaagtagcaagtgacattcataggtcacatgatcttacatagagcagtcatacatattaaatagagtagtcatagggagtagcatccattacagaacatgtcttgacagtaccaaaataatacagatttaagttcttaggcaaaaggtcgcctgaacaacgtgaagtgttgcctggcattatcacaagatcaaatctgaagctttctcttgctcctagtactcattgctgggctgtcaggtgttggctggccctgtcccttgctccttgtgcagtttgcaggactatgttgaggaacatgtattgtcttctttttgtccatcttgttcttgatgttcttcttcttctctttggccttgctctgttt

SEQ ID NO: 179547 - DNA, 554 bp, Zea Mays
attagaaaagcttgagactgggtttctacatacatgaatttataataaggaaaactttatatcagttatctgaatgaaacatctaagatgcaaagtaggttgttcctctttaagattggcacatgctcagctggtgtcaatggtggccccatcaatcttaaataaaatacagttcattttctattcaaaataaaaatgactggccaacatactgcaactgcaattcatttgatggcccccatttcacattctagatcataattgacaactgaatcagctttcattcacatgtcaagtgcactgcacacaaccaacctggcgagatagtgaataactcaacctatcctagagtatcctctactggccatggatgtcattaaatcataattgttgatctaatcacaatattggctacaaagcccatctgcccttgactgcctattagacaaaaggcctcccacaggaattagtccggaacttattgttcacataataaggttgtagctactcaaagaattcttcgttattcaagtggctgcaataacttatccaag

SEQ ID NO: 179548 - DNA, 578 bp, Zea Mays
ggtgggggaacatggaactcagctgtctggagggcagaaacagagaatagcaattgctagagcaatcataaagaaccctaagatcttgctactggatgaagcaaccagtgcgttggatatggaatcggagcgggtggttcaggaagcattggttaggataatggttgaaaggacaacaattgttgttgctcatcgcctaagcacggtgaggaatgctgatgtgatatctgtcctacaacacgggaagatggtggaacaaggtatttgcttattgaccttaagaaaacttatttttctatgttcttcccataatcccatttgcagctttcctaactatcatctcttcattttgcaaaactgttcaatttctgtgaatcctgagcaggttcacacgttgacctgatgaagctacctggaggagcttacactcagctgattcgtctacacgagactcaacaagaggcagaagatgtccaccctgacatggaaatttccaggagatcaacaagtaaaggctcctcctcttttgggcagtctatccctgctccacttggctcacccgatccaacggaagtcag

SEQ ID NO: 179549 - DNA, 759 bp, Zea Mays
ctgtcatcaaattgattgacagtatcactatcaaggtatggagacagctcagactgagcagtagtagatcaggaagaaatagatgcaacattactacgagaaccaaatctccttccactcccagactgagaagcatatcccttggtaccaatatcatcatcaccatatatgtcatcccaggcagatttgttcttaccctcagttgtggatgatggttcatgtacacgtaagcgcacatcaccaaactttgtttcataaacctgaaaaagtctagttaaccctttcctcacatcttgaggaattatagaataatctatactagtaaaacctgataggcgcagtagagctttatgaaaacctctcatcttagctctaggatctagtatgaaagcaaaagcatatagaatgggtatatctctccaatatttgaaatatttatctttcatatgaacaacaacttgcctcagtagtgtatcattttcaaaatcattcaagtgtctagcaattttaagtatttgatgcaacattaatggagcagttgggtaataaacaccagacaaaataacagtagaatcatataacagttgaagaaatgataacagtttctccgcaatataccagtggttgttagttaataaaggggtaccatcagatgacaaaggataattagtttgcatgaagacaaaaaaatgtgcttctgtgtggcataaggtgtttcagcattaaaaaagttgagttccacctaacatccatatccac

SEQ ID NO: 179550 - DNA, 470 bp, Zea Mays
gcaacaactaagacagggtaccatgggaagagagggagagggcgtttaggaaggagtgagtgacagtggcatctaggataggaattgaggggcggtggctggagagggaatgagggtggtggtcatgaaatggggaggatgggggatggcacctagaggaggatgggggaaacatgtgaagtccctcatatccctactccatccaatgatctagatttcttggctcctcaaaaactcatatggtatccaaacgggacaagttaaaagtcaaacgaacttgtctcactgagctctaagcctccatggtctctaatcgtccataggacatatagatcaacaagtcagctttgagccataccaggtgtctcaattatttaattattggtattagtttgtttgtggatattacatgccttgtttgttatacctttgtaggcctacaactatttgagttcatcgctttagacata

SEQ ID NO: 179551 - DNA, 832 bp, Zea Mays
gcccataactcgtttttaaaaaactcttccctgcccgagcccgaggtcagggcacttctcatttcacatctctctgctctctctctctctcggtgatccacccctctctggtgaccatcctcgccagcggcgatcctccggtgaccaagctgggccctgtgcttgccttcttccccctctagtgagctgcttcctccctctcttttccctatctgtttcaagtgtccacctctctccttttttatccaattcaaattcttgtcaaaatcttgtgaatcctatgcatgtttgtgtgccatagtgcctcttgaatatccctgcaggttcctagctccctttgggagggtttcaccacctaaaataggcatttctccaaaactctaatccaccacacgccacgtgctcggtgaaatgcccaaaccagccaaaaatgctcctatcgatcccaaatttttcaggcaccttcacaatacctctattaacatagtcgcaaaatctcatgccaatccgatatcctaggcttcaattttacacaaatccccgcttctagcaatcgattccgagccaagtgcccaaattccactttcttcgcctaaaatcaaaccaagcgcacacttcactcatatttacccatataaacctattcgtgaagtatcggctcaattccaagtcatttcatgcctcaattccaatttcaaatatcctatggcactattcttcgttcaaactccgttttcacgtcgtttgatctctcgatcgccacatctcttgatttctgtgccataacactctgtgcatgtatttattcacatttcatatacttatgactatg

SEQ ID NO: 179552 - DNA, 610 bp, Zea Mays
ggtacagtgccaggaggataagaatcagcccctcgctggtgataaggatgccaccgcggctcgggatgggtcgtcggcggccgcggtaaagatcctcggcgacgtggcagagagttactgagatggcgctacccggttaatcggcggccaccggactttcgtcgtggctctgccgcgcgggtgagctcgccagcgcggtcacagctcggtggatctcatccatctccggcttgccgcctataaattgtgctcgggcgctgcttcttcaccgcatcacgcacactagcccgtgagtagttagctcaattgcaccagaagaactcccatcgcccacaaaatcaatctgccctgttcttcgcacggccgtgaagaactccaccgtggccagcactcctcgggttagtaatttcccaattgcttcctattctagtctatttatagccccctattgctctcatagtcaaccaattgaaattcggcagaagcctttcaccggaacactcctctgttccgtagaacgccgccgtgacaccccctctgtagacccactcttctgctcttgttttgcccgaattaaagcgtgtacctaacctctggtgaacatgggaac

SEQ ID NO: 179553 - DNA, 362 bp, Zea Mays
tttgaacaatttatttagtagataatctaggtgctggaaaataaaatctaagtgaggtgtttatgatcaaacaaagtgtatgcatatgatgggaaaaatctaagggagttttgggatacataataagaaggggggttagattagggtttcaaacctgggttagaattttgggatgttacaaacctaccccacttaaaggaatctcgccctcgagattcagacggggctcgagaaaaggtaagggtattccctcctcagagagtcctcacttttcccaggtagcttcctcttctccatctctgctccactgaaccttacagagtctcacttctgagttgcgggttcttcggactgctgagtcg

SEQ ID NO: 179554 - DNA, 454 bp, Zea Mays
gcgagattggttctagatttggtaatgggagtccacggtgcaattcattccccgattcggtgatgcgggtttcccttttgtcattttctcttcacttgtgacttgtgaggggacgtatgttgttcggttgactagtgctttgttcaagttggcactacgttttttttatgttccgaatgtttaggatacccggaggttgatttcgtccacattgttaccctgtttaggagatgaatctgaactttgcgaatcaatcttctcctacgttggactgttcaaaggatgccggcgcgtttgcaccactgattggaaattctttgttaagcagtaatctaactatctaagtacatggctgttacaatctggttgtttccctaatgtggtttgccaacttcagttattttatccaaactgagtagttatatatgaatgtatacaaaaaggtagttgttgg

SEQ ID NO: 179555 - DNA, 627 bp, Zea Mays
tccggtgaggaattaagcgcagcgggggtaataaaaaggaagagagagggcaggggaggtcccttacctcaaggcgaactccgaggactcctcggtggcggcgaaggcacggcggcagcccgagtcgacggtggcggacctcggcgactgcgcagagaacggcgggtgagcgcgggcagaggaattcggggagggagaggggaaattggggcgtgtcccgggttgcggacgtcggggcgaagatcaccgtggcagagggcacggcggggctccaacggcgacggagaaacgagctcgggcggtggcggttaatggcggcggcgctttggcgtgtgagcagcgtgggggaaggtggaagggaggtctgcaggtgcgcaaatgagggaggggtgagggtgggctaggctctgggctcaagtggccgagggcgaggtggttgcgagctccacgcgcgatgtgggcgcggagtccgcggcacgcgcagctcggggcggcggttacgcggagacggaggagctgacagccggggcccgcgagcagagagagcggaagaagcggacgcgggggaagcggctgcgctgacgggcgggcccgccagggcagagagagaagaggggggaggaaggc

SEQ ID NO: 179556 - DNA, 785 bp, Zea Mays
cgttgtctgctgtttttgcgtttaaaccctcccaccacacctcttgtatctcgtcaatcaggctctgagtatttgcgaaacaccccccaccgtcctgggacatttcaacctgggcccttaaatcgaatcagagcctgtacacgttgttttagcgactccagacgatagtcgcttttcagaaaaaatcacgtgaaagctagcaagggtgaaaatggattgcaatattcaacgacaatatccacatcaatggaacagtactccattttttaattcgattactcattatccaggaacatgacacaatatatagaatcacagatatactagacataacatgagctgtaagctgacaacaggaacatgacccaaaactttattttgctggacagttacgcgcatcatgaagaactaattgtttgcagatcttgcataagcgtggcagtcttgcttgcttcattttgctaccacttacttctttgcttttcttaatccttttgcttctcccctttgaacagatatccgttggaggatgaaccatcacttcatttggaatatggcaaccgatgaatgcctcatattcatcctgcctagagtgtgtagttgtcggcaaaatctgatgtagagacgcctcgatgttacaaagaccagacaataagaaatccatgccttcctcagcgttgttggctttttttatcaaatcttcaaacttgttccgtacacttgctatttttttcctcatcaccaaatcatttggctctaggatcttgtcatgcaatatgtttccg

SEQ ID NO: 179557 - DNA, 507 bp, Zea Mays
aaaaaaaacactcacgtaccttagaccatatgcccacaagctcggccagggctcaggctctcccgtcgcttagcccaaatagttagacgctctcacatttctctgcaggtgggcccaccctcacctgttcactttcttcctcccatctctcacgcgtttgctcctgggtacgctgcgcgacgccgggctggaaacgcagttcgggtccccgtcgaggacgttcgaagccaactcgggttggtggttgcgcgcccaaacacaccagcgcacgcccgcgtccgtttcttctcctccccgcgaccgttcgccatcctctccattacgccgcgcgagtcactgcagcgacggtttctccactgattcctccattaataacctttaaagcaattcaagtccgcccagccagtcctaagctctccctaatccggctataaaagccacgtccgtgagtctcttcccagctcgcccttgctgctctcttgctcgtacgcacacacctgctgtcgc

SEQ ID NO: 179558 - DNA, 476 bp, Zea Mays
cttccacgtgttcgatcgcgtgctcaagcgctcggtcgcgcactggctgccctctgtgtgcgcgccgcgcacgatcggcgcctgcgcccagccatgcccgagggcgcctataagtgcccctggtgcgcagcagtccgctcgtcacttcgcctcacgccccgagcagaaactccaacttcggcgagctctccaccgcccgccatcactgcccgagcacggctgcacgtggccagccctttccgacgacccccggcctcggcctagcccctggatggcttccctaagaggcggtgaagctttctcgagcttgagccgaggcattgcctcaccgaaaaagtgagcgcgacatcgccggacttcggccgaccgccaccgcgcgtggaccgtgtcacatggtgagacattctccgattccttgcacccacatcatcgctgacctcccctgaagctcctcgagcactttgatttgactctac

SEQ ID NO: 179559 - DNA, 702 bp, Zea Mays
cgccaatctctcctccgtcctcatacacatcacaagagcggggcacacgatgcgttgcattgcatggctccgccacacacaccccttgcatgtaccccacccaccacggcggcataagtatctccgccggctacgcgcgatccaggcccggccgcgtgcgtgcgtgcgtgcgacgactgcacccatacacacatatacgcgctctggctggctgcctgcctggcttgcggagctccgtttcggccggccatctctcgctacgctacgagcgcgcgcggcccccgcgcccgtgtcttcccgctgtcgaccgtcgtgttgatcgtacatgcagctgctagtagcgaactatagttgcagaccgcatcagtgcgtgacaagaggatatatattatcagacacgcacgcgatcgcgcggagatgaaccagtgcgtgccgagctgggatctggtggacgacccgacggcggcggtagctggcggcggaggcggcctaaaccatcaggtctcgacgaccgggggcgcgcaccggggcctgctcctgcaggcgtcagctggaggagcaggcggcgggggcgcgttcgctcccgtcgtcgtgcccatgtcgaaccagtactacgaggtggcggagctgacgtgggagaagggcaacatctcctcccacggcctgctcaaccgcccggcgcacaataagtacccgcccgcc

SEQ ID NO: 179560 - DNA, 576 bp, Zea Mays
tctcatcaaaattcccaacagaatgagtgagaacctttctgcgatgaatcgggacagcatttgcaccagataggggaggaagcttaacaatattagcaaaagaaattttcttcttgcccttaataatccatcaattggcattttcttcctgaatgaatttcctgtattcatgagtccaattcggtccaccatgattccatagattgaagaaagccctgaattccgaacgatcaatgcatttagaattataaacatgaaaaccgacggccttggagaataccgagaagcgaaaacccgatcagatagctgagatacattgaaaccctttgcaaaacctcccagagcagcttgaagaagataaccaactgaaaccgtgtcaagcttgaatatgcaacgaccaaaagagatgaccaaccaaaaggtcgcagggagattcagacgcctaggacacactgtagaagctaaacggcgccgaatatcatcctcaaagattgtccccggccgaaaatccagctttgccagatccatccagaagaaacaaagaagaccaagtaggaggagagagggggagcagga

SEQ ID NO: 179561 - DNA, 761 bp, Zea Mays
taggaattcaagctatcgtagaatatgagattccagttgccatcacatccataccaaaatttaagcgtgatagtttgcttacatcccctaacacttggggtaaatatcatcggctcgcaagcgtgatagtacttctagcattcagaatatcagagtagcggtcgtggtccttggtcctccacaggcatcctttagcgttgctccgtagcctagtcggaccatccgtcgtcggcgaagtcgtactccggctcgttctttcctgaacctgccgataagtgtgtaggccaccgtaacatccccgagcatttagccagcggtggaatctagtagtgataggtggattttggtttcctagcaggcatgcgacaatatctaaaataccgttgtagtatttagatataaatcaggtatttcggtctcacaccaccggttcctggcttaactcacacacgcacaccaccaagttccccattcccagccacacacacacctcaccaccttcatcggcacatcacccatctcactctcagtctaaatctacgacaaggacagctcccacccgtccttgtctcaacggcctccagctagatcctagatcaggggtagaaaagaagattcccgggctatgacgagaaaactaagtccttgggatcgtcattgaccatggacacggctatacgtatagatttacactctgcagaggttgtacaactatacccatacgaagcggaggcttgaccgagcctcaacacaacaccatc

SEQ ID NO: 179562 - DNA, 439 bp, Zea Mays
aaaaatagcctatatttgtgataataaatacattttttcaaacacaagagtgggtcgaataaaatgtctatacgatcacttattgtgcgattatctaaatgacatgcgagtgttggctctgatttggagccaaacactaggggtcggtgtaaatttctggcggtgctctatgtgggaagcgcggatggtccacgacctcgctccagaagcgtctcctttctatgtcaccttagacggtccgcacgcagggctcggatggtccgcaatggtgcagagcgtcttttgatggtgtagaaccctagatcttaaggggtgttccaggttcggtaggccacccggggtgtccctaggcattgtaaagtcgcctagagatgaaataataggtcgatgaagattaatattaggctaattactgttactcatagggcaggaaagtaga

SEQ ID NO: 179563 - DNA, 595 bp, Zea Mays
tgatggagcaaaagttcgggctgatccgatgcaatgagacatagaagcccctatttgccgcccaacagttgagaggccctgccagcacttggtgggcacatttttcagccattcagcctataggacatcagttcacgtggcaagagttcaaactggcattcagggaacattatgttccagaaggagtgctacagatgaagctggaggagttcatacgtctaaagaaagggggaaattctgcgatgcaatatctcaacaaatttaatcacctctcccaatatgccatcgatcaagtggacactgacttgaaaaagaaaaattgcttcatgaggggattgaatgacagactccagcgcaaaatggctacgtgtatggatctcacatatagaagggttgtcagcacatcactgttagttgaagccaaaagttcgggacaagaaaagtcaaaaagatatgtgggtgaaggatcaactcaggggtctgaaaaatggacaaggttggtaatccgacctttcaacccaaaccattcttctcctcacccacccaaatatccttttaagcaacccgtgtttatccgtcccactcctgccccgcc

SEQ ID NO: 179564 - DNA, 663 bp, Zea Mays
ctttcttgtccttctgctgctgcttcgcccacgcgcgagctacctcctccaccgtgctcttcggcagtggaacgaggtcatatcacaacactagagaagagggctggtggaagggggaaggtggggtcggaggttgcgaaactaaaaatggaagagagggagggtggaacctgacaaactggctacctaagcatatgaggactggggcctttagtgccctaggacctcaaaggttgaaatataatgtccccaaagcgccttgtttcgtggggtactagctagagaataagtcctcgaggtactacttaacctttcaaactaagatctccttcttgggtactacttgaccctccaaatcggcgtctcctttcttatacctttgtgtagtagcactaaaatcgcatctcatgtatttaattttagttctgctaagcttaaaacctttaaactctaaagtcccctacaagaactctaatttatagttactcatattaggttttcatcaagtaccactttatcatccgaaattatatacccctttgacctcatctatcaccaagacaaaaagataagggctcaaaactgatctttgatatagtcttactctaatacgaaagtcatcagtgtcccatcacttgttgaatattggtcacaatattatta

SEQ ID NO: 179565 - DNA, 861 bp, Zea Mays
ataaattgtctcagatttgtatgaataaacacctcatttgaccatacatgggagaacataggggaggtggagaaatcatattaaaggatagagtatgtttggttgcctgacccaaaataaaacataggcaggaataaaaccaagagcaaggaaaacaaagcagtaagtcaacctcccatgagtggtcattagtcaaatatatttcatcacaagcaaaattcacaaaatgagcaaagaaaacaaagcaacaagtcatactcccttgattgatcatcattataaaacatatcatcataggcaagtaaaggcaacagttaaatataaaatcatcacagaccggtagaaaagtctcagaattattaattatcatccacagttctagatttagtgtcataggcatagagcaaagtattaggcatagatcaaagtattacacatagagcaaggtattaggcatcataggcataagactagtctgctcaaatctttgcaaggtgctaccttagccaaagcacacggtgtttaggctccatcttcacaaagccatcaccttgccttttgttgtccaataggtaggtaaggcaagtcatcaagtcctcatcagtgaaacctggaatactcatgcaaatttgatacagatcagggtggacatatgtggtctggactataacaggtgcttggacagcttcagccaatttgttcacagctccagtaagtcctgtcataatcccgagctcttcatcactgagtctccttttctttccatatgatccataggaactaccagcaccagcaccactatgcgaagggctggcaccagtagaaccagaagcagtagtaccaacaagacatggttcttca

SEQ ID NO: 179566 - DNA, 433 bp, Zea Mays
cagaggtctgtttctatcttcggcaagccaatgctttttgagagggtcctaacaattttggcctcggtgcggttccgaaggcaccttaacttcccttcgttgaccccaccaaatagcatagctcctgatttatatccacaagataaagcatgttttttcaattcttctttttcggtgtctgttagctcttgtccaagcaaatcttgaaagttgaaatctccttcctccgaaatttcaccaatttgctctttcctcttttcagttgccgtattcaccgcagccataacagcttcttcttcagccattttcaggagtatattgtcaataacctcaagtgtggtttccaggttcgactcttcggtggtcccggctttggccccggtagcttcggcttcggcctcggtagcttcggcttcgccggtttcagcttcag

SEQ ID NO: 179567 - DNA, 557 bp, Zea Mays
gaaggaatgaccgcagcagcataattatgattctttcgcttgggcgccatcacaatctcgatgacggactgagcggaagcgaaatcaaaggaaaacagaggaggttcataggcaaaagagtgaggctagggcttagagcgcagaggcgtgcggcgacgtgatacaaatggggttttcccgggttagacattgtttctaaaaagtgcttagtcatcactcggtcgttatttctaaaatgccgacgtggctcgttatgactcggctgttacctctaaaacgctgacatcgccagtcatcacttggtcgttatttctaaaatgccgacttggctcaacatgactcgactgttacctctaaaacaccgacgtcgccaagcaccactcggttgttacttctaaaacaccgacgtggctcagcatgactcggttgttacaatctaaaacgccgacatcgccaagcaccactcggctgttacttctaaaacgtcggcatggcccagcatagctcggttgttgcctctaaaacaccgatgcaatctagcataattaggttgtcac

SEQ ID NO: 179568 - DNA, 752 bp, Zea Mays
aactcgctctcccatttgagctcccgatcctagaggaaaaaatgccaaaagatctactatttcctgaggaatgcctcctgaaactccaaaccccaatgccacagaacaagaaagaaaagagaaaaagaagtttaacttcttttcagaaaattggtgtatcacacaaatctagaacccgtggtagcgttgaaccactcaagtgtccccttcgtccttttctccgacgacatcacctctagtctatctcccgacctgtcgaacatctccatcatcttctcccagaagcaaatcactgccaccaccacgctttcgctacgccaccaggaacaccaagccggccggtcgtcgaaggtcgctgagaagtgaagacacaacaccgaacgctgagagtcggtgaaggaaccttgcgcgcgaaggtccttgtcgtcgaggcttaaacgacgctgaaataggacgtcaccgaggagacacactccgttccgcacgctgtcgaggaccgatagctttgatacaacttgtcacgcccctggccactggcgatcgtcgttgagacgtgagctcgtcaccatacctgagaaagactcaggatgacaatattctggaaaggtttctattattcattcgatgtccttcgttgttacatcctggcagcctatataggcgcccaagcggtctggcccacagcccactcacgtccggcgtcgtggcccactcctaactctgttacaatcaattcaaacattacacacgcc

SEQ ID NO: 179569 - DNA, 273 bp, Zea Mays
gcctgataatctatctgatgtgcatgatgtattccttgtgtctcaacttaagaagtgtctccgtgtccctgaggaacagttaccaatggaagagctcagtgttcatggtggtttgacttacacggagtaccctatcaagattcttgacactttggctcgagttacaagaaataaggttataaagatgtacaatgtacaatggagtcaccatggagaagatgaagcaacataggaaagagaagaagagcatcacacatattttctccatttttc

SEQ ID NO: 179570 - DNA, 288 bp, Zea Mays
ccatcatcagctccagcctggacgataaataggaaggcgcgctcgtccggtttctgcaagacaaccgggacgtatttgcatggcaacctgcggatatgacgggagtcccaagagaactggccgagcacaaactgaaggtctacccccaggcaaggctgatccggcaaaaactacatcgcttcacgcccgacaaaagagaggccattcgcgctgagttggctcgcttggtcgtggccggatttattagagaggtgttacatcccgagtggttagccaaccctattcttg

SEQ ID NO: 179571 - DNA, 525 bp, Zea Mays
ctacggtgaacggtgggtggtggttaagggtgggctagacgcgtaatagaaaggcagagcgaggggaacactcagtttaaagatttcggtcaagcctattacaaattttggctgggatcgagctcgacggtgactaggatatttcaagggcttgtttcaccatgacgcatgatggattattggctcaagagcagtaactggttactcgcaacgactcacaatgatgtggtaacaccttcgagtacgtaatgcagccgcgaggaacgacaagcttcggcgttgacagctctgtcgattgtgcggggaagtgggtacaatggttaagccgaccagcgacccaatccaccccaccacaaaattttcaccgcagacgattatccactgtaatccaagcacaaatcttagcacgacgtggatcgcagcgcagagatcaccggcgacggttcatcaaacctggcaatcttgttcaggttactgttcctgcctgaatgccatttcaaaactacctgatagagcatctttgag

SEQ ID NO: 179572 - DNA, 625 bp, Zea Mays
ggacgacatcttgaggaccaaatacccgtaatgggcaatggccatgaaccagtataaggttggcctgccaatgatggcattgaaggggaggttaacctccgcgacgtcgaactggacgttctctgtgtggaagttttcctcggtcctgaatgtaaccgggagtgcgatgctcccaagaggatacaccggttgtgggcccactccggagaacggacgagaaggtcccagtcgggaccctggatctgcagctacttgaatgtagcatggctgataacgttgagcccagccccaccgtcaatcagaacatggtgcagccgcatgttggcgatgacagggacggtgatgagcggtagtattccggcctctgccatgttgtcgaggcagttggatgccccgaaggagatagtggtgcccctccaccgctgatgtggagcagccttcgggaccccccgggactgccgaaaggacctctcggcgcagggactttacattcttacgggaggtgagctcccagctcccgctgtacatgacgtacaacttcttccggtggtcgttgtcgtcaccggagtcggagtctccagtgaaaacgtccttcaggacccccctcaggtgactgatacccgag

SEQ ID NO: 179573 - DNA, 646 bp, Zea Mays
agagaacatttcctctgtccagctcctctctgtctctagcgtttccaccctcgccggcgaccctccctcaccggcgaccaccatgctcaggtgatctcccgtgtttgtgcctgttcttcactcctctcggtgagcagccccttctccctcggtcttcctccctctctgttctgttgtgcaaaggttctccttcccacctcttgtgaccatctccaattcttgtgtaaatcttgtggatcctagtgcatggttgtgttcctatgtgctccattgtatcgcctacaggctcttagctccttcgggagggtttctccaccccaaatagccttttcaccgaaaccctaaaactccgcacaccacatgctcggtgaaatgcacaaaccagccaaaaatgctccgattgaacccaaatttttcaggcaccttcacatattcgccaaatttcacgcccatcagatataccaggcttcattttcaccaaattccccgtttcgagcgatcgtttccgagccgagtgcccaaattccattttcttcgcctaaattcaaaccaagcacacacttcactcatattcacctatataaacctatttgtgaactatcggctcaattccatgccatttcatgcctcaattcgaattccaacc

SEQ ID NO: 179574 - DNA, 474 bp, Zea Mays
cgggaaggatgatgcttcagctgctccaagcaaacccgcgccgaagagaaaaaaggtgaaggttcttactcaccgaccgcgctatatgaaccagccacagtgcctgaatttggcggtgagacctcttcggctactaaagccaaagaacctgcgcttacgcagaggattgaagagccggctgcaaagccgaaggcatcctcagtcaaattagctgagccgaaggccgataatattgaagagatagcggtcgaaggaacaaagatattagaagttacaagccctttggcagaagtgacagtgtcgaaggcacaaaaaggtcttacagcgacccctaagaggaaaagaatggtcaacgtactagatgcgctggagacaataaagacaagctctactccaaggaaaattgctgaagctccaaagacgcagtctgagacaggactaaccgaagccgaaggtgcaaagagccaggtcgag

SEQ ID NO: 179575 - DNA, 430 bp, Zea Mays
ggattggagcaggttttccccttagagcagggggagaagctggcggagaagggagtgagacccacctccccgcgcctccagaactaccactagatttggcccaagttctagccaatcagacccgactcattgaagtcctcacaagaagtctggaaaaccagcgcccaggtggtgggagaccacaggacaggatgggagaatttctgagactcaagccacccatgttcgcggggtctagcaatcccctcgatgtagacgactggctacgcacgaacaagaggaagctggaagccatcggatgccccaaaaatcagcgtgttcaattggctgctcatcaactttctgggatggccctagcatggtgggataccttcagcgaggccgtcagggatgctacctaggcagaattcgaaactgccttccgtgagca

SEQ ID NO: 179576 - DNA, 573 bp, Zea Mays
gttctctgtgtggggataaagagacagttgatcacatctttattcactgtgtccttccgaaatatgtttggggaagaatgaaaaatattgctggttgggaccgtgtccctaggtctgtagctagtatgtttagcaattggggagtgggatcctcccatgctgcttgttctttccatctctttattgttgccgggctggtttggtccctttggtgtaacagaaataagatggcgattatgaaaaaatttcctaacaatacgacaacgatcatatatgagatcatgtctttcttgtagagctggagcgtgctactcaagacaagggaacatgcgatgatggaagatatactggactcagtgaagaagtggttacagcaacatcattcggttgaggaaaattgcagtgacattggagtgatctgaagtggaagatgtcccttctttttgtcccaggcgtggagttggtgttgctaatatggatgtcatatgagggttctttttgttgtgcttggcttgtttctagctcagttaggttgtttaatcgagtgaagctttctggttgatgatatttgaa

SEQ ID NO: 179577 - DNA, 285 bp, Zea Mays
cccccagcgttgaagtggccatgtatgggcgatgagcttggtgaattgcgaagggtggcctgagcgaggagagaacttctggcatgcttcgcatgaccttgtgactcgattggcagtgcaaattattgtgggccaataaaatccctgatgaatcaccttggcagcgagggccctaggtcctgagtgggagccgtaggttccgctgtggacttcgcggaggatttctatgccttcggtttcggttatgcatttcagcatgggctgactgatcccctttttgtacag

SEQ ID NO: 179578 - DNA, 340 bp, Zea Mays
gtaccattagggatgaaaacgatttcggtttctcgccgacagcaagagccagagtacaaaccaaatgaatctgtctgcatgcacgacgaaccagatgaatccgcgggtataggccactggatggtgtagatgcgaagcggagcgtgtgtgggtggcatagagatgaatccacgggtacacctaggccccaaatcttacaagtgacaggaaaaaaagcctagcgcgcgggaaggccggatttcacatggcgtacggggtaggggagtaataagcgtcgaggacatcacgacacagtcgcatggagctgcccagtctacaggccggatttcacatggcgtac

SEQ ID NO: 179579 - DNA, 508 bp, Zea Mays
ttttattggacccatttctttatgtagttttcgacgtcccatgcctttagaccgacttttacgttttcaccatttctcatccgctacagctcactagttttaggtagtttagatagcaagcagataagaactccagcgtaggcagacacaaatgggtccaaaagtttgatatttctgaagggagaggccactagaagtctttgctgtctagttcattaaatagtagacaaaacagatacacactccacttgtggataggtatttgcagactatggtttgatatttcatttgttgttcacccaaggtttacctcagcttgagcacaccaatgtaggacagcagcagggggaggagatcttttgtgcaacttcaaacctgatccgtattcagataactacatttccctccactatctccagaacagtccaactcctagatttctttctgtagtgggaaaccttcagcacctgagctatgtactttatccccactaacacttatacctatg

SEQ ID NO: 179580 - DNA, 786 bp, Zea Mays
gaaaacaaagaagctcacccataatgaacagttcggagcacttctgccgcatcagctcctcaagttcccaagtagcctcacgctcagactgattagtccacaagaccttaacatacttaattgatctccttctcatgacacgctccgaggactccaagatacgcaccgggcaacactccagcatcaaatcctgctgcacagcaatcggttccatctcgatttgatggtccggatcccgcaaaaacttcctcaacatagagacatgaaataccgggtgtacccctgccatggaatcccgcaattgcaagcgataagccaagttgcccacccgggccaagatagtgaacggtccaatgtatctcgggctaagctttccgaagacaccaaaccgaacaactcctttagtaggtgataccctgagaaggacttggtcacccactgcaaattccaagtctcgcctcctcacatcagcataactcttctaacggctctgagcggccaaaatattctgacgaattttccgaaccttctcagatgtctgctgaacccaatcaggaccaaccagagatctctctcccatagtctcccagcacagaggggaggtacaccacctgccatataaggcctcaaatggtgccatcttgatgctagcctggtagctgttgttataagcgaactcggccaacgcgagatgatcctcccagctacccttccaagatagaacacaagcgtgcaacatatcttccaaggtttggataattcgctctgactgaccatcagtctgag

SEQ ID NO: 179581 - DNA, 1171 bp, Zea Mays
tttaaactggaatttgtctaattattcaacaccttggacggacctccttctactatggagtcatctaaagccgcgatgttcatcgcaacaaaaaaaatctaggtcctgtaaggaggactcatagttcatctccgcaaaaatctccaagtcatcatcattaaccgaggactcccatagcaacggacttcaacatgctaaggggtaacgcataaaatgtcctcaaaagcatcatccttctttaccagaggaacaaaatcgccttgtgtaggcccctgaagagaacctgcaaaaatgcattgtttttagaacataatttaacaccaagacccacgaaaattctttacaagaatgaaataaaacaagctagacctcgccctgggcggcatcagcatcaacaccagtcttgtagcctccatggttggttgggtcaaaccagcctccgtagtgtccggtgacaaagtctctctagctttagcttccacattcagctacacaaaaagagtccataagcaatgacaaaaaacacaaaggaacataataacagagagcacataaccgttgcagcctcgtcactgaccggtggcaaagaatgtcagcaccgaagcggctccacatgcggtccagcacgtcctctgttgcattgctggcgaccacgctgacttcagtatatacgttcttattcatgacaaaaccgtccgaagccaggcgcccccacatggctacacccttcgcggatcaacccctcaaaactgccctcatacgtcacaagggcgaacaaagtcattagccctcgtatgatgactcagcccaacggtcaaagaggctgtcacttttaaattctagcagatgaatcgcatccccccagctgctcgtagactttgtggaaatcctcaagaccactcatacatggacttgcacactttgcacgaagtcttcagtacgaagtcggtgctcagaaagctccctcgccttcctcccttggtctgctctctcatctttcagctcttttcttaaaaatgtaacctcagccagggcagacttcgccttaatagccacatcagtgtcctttttcttcttaagttttagctcttgctcagcctttgtcgccttagccgcatccacttcccctagcacatctgcgacgacagcgagctgacaaaaacaaaaccac

SEQ ID NO: 179582 - DNA, 391 bp, Zea Mays
gatgactgtgtatgtattccgcatctatacccctaaataaagcaccaatttaacttaatctagatatacctaaccaatgacccccgctgagatgtgttttctttgtacaccacattttatacacaagaaatcttcctatgtcacattaaactgtccagatcttttctccctcgttttttctctcatccactcccatctcaagactaaagatgtcccgatcatcccaccccacatgcgccctcacgcaccccacgcaccctaccacggctttatccccatgtcaccacgagtaccacgacccagtgcttccttcatctgtccttgcggcatctgtctttgagcgattaggatctcggtctccttcctacgcatccacacaggtcgagctgcc

SEQ ID NO: 179583 - DNA, 952 bp, Zea Mays
ggcgggaacttcccgcggcgtggaggaaactcccaacccaccacttgtacctcctacagtggctgaggctatcactgccttagtcaacactaccgccgacaacacgtgtttcctgcgtgaattggcgggaaatcaatttcagcaacatggaggcagaggtcaacctcaaggaccacgagacaccacatatctagagtcctcagagacccgtccaccgctctttgttaaggttgaagaacccctggaagcagatgaatgggtgcgggtgatggagcaaaagttcgggttgatccgatgcactgaaacacaaaagcccctattcgccgcccaactgttgaggagtcctgccaacacttggtgggcaaatttttcagccattcaacctgcaggacatcaggtcacgtgggcgaagttcaaactggcattcagggaacattatgtttcagaaggagtgctatagatgaagctggaggagttcatacgtctgaagctagggggagattctgtgatgcaatatctcaacaagtttaatcacctctcccaataagccatcgatcaagtggacactgatttaaaaaagaaaaattgcttcatgtgggtattgaatgacccactccagtgcaaaatggctacgtgtctagaccttacatatagaagggctgtcagcacaacactgtcagttgaagccaaaaattcgggacaaggaaagtcaaaaaaagatatgcgggtgaaggatcaactcaggggtctaaaaagcggacaaggttggtaatctgacctttcaacccaaatcgttcttctcctcgcccacccacatatccttttaagcaacccatgttcattcgtcccactcctgcccccgcccagaacaatcagccaagtgcccctggtgctcgtttcttcgcccttcccagttcctcaagtggctgctttaattgtgggaagtctggac

SEQ ID NO: 179584 - DNA, 433 bp, Zea Mays
aaggccgcaacagagcacattgcaaggcaatcaactcactatacgatcatagaaggtctgctatataggataagtgcaggaggagtcctcatgaaatgcattcactcggctatggggagacatctgctggaggaaatccatgtgaggcagtgtggaatacacgcaacatcaaagaccttggtaggaaaggctttcaggtcaggtttctgttggtcgacaccaaagaaagatgcagcggacttagtccagaagtgcgaggcatgctagttcctatcaaagcaacaacacttaccgcttaacatctgcaaactatccctgtaacctggccttttgcatgctgggggctggatatgatcaggccattcaagaaagctcagggaggatacactcatgtactcgtcgccatcgacaaatttacaaagtggatagagta

SEQ ID NO: 179585 - DNA, 833 bp, Zea Mays
tcaggccacgacgatcactgcagctgggaggttactatacgccgtaacaaactgtaaccgccaccgatttgttcgctgacatcgcgccaaccctcctcacgctgggatatatgaacagactgcgccctggccgtagatcatccgatcgcttgaagaccagctaccaccgggagagaagaagcagagagaggtaggaggagagagggggtcgccgatctgatcctctcgctgctgggaatttgggagtgtcggggaggagctgccggagcatcgcggaggcgtccgcgtggtgctctgatgtggaatgtgaacctgggggctctggttgtgctcgtcatgcgtgaagaaaagcgaccgctgccgtggagtcacacctcgccgcggctagaagattacacgcatcaagtctcggtaagatgtctcttattgagcttgccgtgatcccccatcgtgtagtatctctagtttcgaagtttggaccgacgggttgccagagcatgcacttcagccatggcgccaccaagttaggcggcgccgccgcggcgtgctgttggggaagaaggtaacgcccttgccgttcgaatcgcgatgggcggtgtagattaaccgatgctgttcacgttggggcgtgtgtgccgtccgatctggctgacggttaggatttgttatgtgcgccgatgtaatctgggccaccagatggtgatcggacggctgaaaacacaggataccccttcacgcggcataatatctaaagagaccctaggttaataacaattcaacccgcagtccacctggtgggtcatctgtgtcttaggattaattgcatcagggcc

SEQ ID NO: 179586 - DNA, 641 bp, Zea Mays
gagtcgttagatcaacagccgacgatggggattagatcgtatcttacaacaaaacggtacgcacagagagccctcggatcgtgaatcaacagttcagattcaataccccaagggttatattaggttctaatcgtggtcgttgacgccccatccaacggccccagcacgccctacacttcccgacaccggagcacggtggcgcaatagccccgcacggcggcgccatggtcggcttaagcgcgtccatcgattcctccggccatccccaaatccgaccaaggtacacggagagaaggacattgcgaaacgaaagggggtgctcaccaatgtatacgccggaggtttggcagaccacggcgtcggcggatccgcggcagcgatgcgacaacggtgaggaattaactcggtcctgatgctccacgactcccaccaaggctacggacgtgaccaccgaggctaaacgcagcgccacaacccgcactgaggccccaacagcggcgccgaaagatcttcggtgatgggcacaccctacgctgccgctgctcacgacaaggtgctccgacggggtgctaattgtgtggtttatggtggaggggtcgtgggagagcattgtatttaatgtcccagacccacggaatcgg

SEQ ID NO: 179587 - DNA, 670 bp, Zea Mays
cacggcaatagcgcaaccatcatggttttcccctcgcaaccactggtatggcgccatgccctaatttgttattccctcggcaatacgattctagtagtggcggtacaattcgagcgctgggttggggagtcatgttctcaccggtgtttgtgggtctgctgggtgtgtctatggcaccggcggctggaggaggtagacggtacctggtgccgttgaactgcggggtgacggctacagaggcgtggccgcgagatccgaaatgatcggctcctcatcagatccttgggtttaccagttcgtgggtttaatctgagccgtcaattcgaggatgtgcgactgcgattataacggcggcagtaattcggtcgagtgtggcggggatcgttcgattcagaccgtgcggtcgaggatcagtttagggcatttaaatcttgagcgttcatttcagatcgttcggccctcggctgatactggttcggtgagctgagatctaatctcaaccgtaggatctagatcctgtggatgatgttgcgtactgattcatcatcccactcatctaatcttgcgcgttcaaactgaatcgggcggtgcagatcatcccgtaccccttcggtttaaccattttgcaaaagaaaccccaggattccaaaaaatcaacccgccgtccgcg

SEQ ID NO: 179588 - DNA, 650 bp, Zea Mays
ggcaggaagtcgaggcggcgcgggatggacgatttccttcaggtacgcgtctagggtttccgtctgattacgtgggttcgcattctttccctcatctcgcgtcgcgtctctctcgtctctggtcgctcccgtgttcgtcgtgtgctagtttctgcggtggttggttttcctctccgtttcgtccgtcgacgattgccgaggagtggcctctcctgggtctcttggtggctccgctccagatggatccgaagaatcgcaaccctaactgggaccgttggggaccgaaggaagctccgcagggttcccaatcttggggaaaaaaccgaagcctcagctggcgtttgaagccggggtctggaaagcctgagggcaaggatgacatccctatctcttcttccagcgatggcggccagccaggtattcttaaaacccctccccctaccattctgaaagtagagaatgaaatggtgcgtagggttttctgccaaaaaagcggtatggatggccatcatgctagggagtgcttcaaatctttgtggtgtgagatctgtcgcaaggaaacgcacaacaccgctcggtgcgttctccccaaacagaacaaacccagcatgcctattgttgggatggcgggggatggactagggttttac

SEQ ID NO: 179589 - DNA, 336 bp, Zea Mays
ggcaggttgagcgagccaacgggatgatactggaggcacttaggaaaaaggtcttcgacaagaatgaaaagttcgcatgaaagtggataagggaattgccctatgttgtttggagcctaagaacccaacccagcccagctttgcatggaaacactcctttcttcatggtctatgggtcagaggcagtgctacccgccgatctcaagttcggggcgccaaggttgattttcaaaaacatagcagaagccgaggccaccaggctggaggacattgatgtacttgaagaagaacggctgaatgcggtaatccaatcagcacggtaccagcagactctaa

SEQ ID NO: 179590 - DNA, 362 bp, Zea Mays
caagacttatggaaagagctcgcaaggagcaacttccggaccttagggcagatgaacaaggagttctttggttcaagaaccgtctgtgtgtaccaataggagaagcacgggaagtcctgctcaatgaagctcacaactcagcttactccatccacctaggaaccaccaaaatgtacctagacctcaaagccagatactggtggagagggatgaagaagaagatagcacagtatgtggcccggtgtgacacctgccagcgaacaaaggccgaacaccaaaagcctgtaggcctactgcaacccctcccagtgcctgaatggaagtgggaggaaataggcatggattttgtaaccggactgccc

SEQ ID NO: 179591 - DNA, 567 bp, Zea Mays
cttcaattgagaagatggttgaatggtttttcttggtacctccactcggctaggcatattaacagcaggattcaaggtttttgtgacaacattatagtcagtaaacacatcgggcggattatttacaaaatgttgcgattctataatttgttgaacttaaagttcagttttctgggttcgacgatacgaggacagtttggatttgtcatatcagttgatttcttggcattcattaggataattgaattctccccctaatgttgggaaatggtcctcgttaaagatgcgatccgcgaagcgggctatgaacaagtcccctgttaggggctctaggtatttaacgatcaatggggattggtatcccacatagatgcccaatttcctatggggtcccatagttgttccttgaggcggtgaaacaagggtgtagaccgcacatccaaatttccgtagttgagaaatacttggaggatttcctcgtaccaggtgctacggagatgtggtatgatatgaagttgggcaaagttgaataaggtcatcaacgtgtaaaatggcatggccccaaca

SEQ ID NO: 179592 - DNA, 609 bp, Zea Mays
gctcggctcaaaggttatcggcaatccctggtcgttggatctcaaaccgaccacgcggattagatcgaaacctaactgaaccggtacgctccctcagccgccagatctcgcacctacggctcggattttatggtggccaaaacatcgcggatcgcccgatcggtcatcgacggttgcgatcaaactgagcgaaggggtatctctgctctaatcggaatcgttcgccaaaagatcaacggccacgagcgcatccgttccactgacggccacccacggcggcgccgcccaaggagtacgacggagggttgccggcgtacacccaatcccgcctccccagtgttatctactacccgatttctagtgcaatgccaagagcagtgaattgtgaaactagtagtggcgccataccgggagattaggctccgagggagttcgtcctcgctgcgcggcggctcggccgcggaagctgatgtccggcgagcgatacgggcccaaaccgcccgcgatcccgccaaattacgcgatgcgcagaacacccagacggtgccgaagccgtgcgcagctgcccgcgatcactcgacggtgtgaactcggtttgagccgcggcgg

SEQ ID NO: 179593 - DNA, 1093 bp, Zea Mays
gggcggctagggttagggaaggttagtgggccgaaacacgaatcgcggcccaactcgcccacgcgacagctcccgaccccgtcgcaagcgcccaaccaaacaaattctactgccctactggtgaatgtttttccccaaattccaaattcccaaaacgcatcaaccgaatgagaaaaaaaacaaaaagaataacctccaacttcccttctttgcaaactgggtatcacactctaccccccttaaaaagaattcgacctcgaattctgacgcttctatcggaacgacaaaaggaaagattaaagaataaacaacacttacccacaacaaaaagttctggatacttctgctgcatcagctcctcaagttcccacgtagcctcacgctcagactgattagtccataagaccttgacatacttaattgatctcttcctcaatgcacgctccgagaattccaatatacgcaccggacgacactccaaagtcagaccctgctgcaccgcaattggttccatctcaatctgatggtctggatcctgcaagaactttctcaacatagagacatgaaaaaccgggtgtacccctgccatggaatccggcagtagcaagcgataagccaagctgcccactcgggcgaagatagtgaatggtccaatgtatctcgggctgagcttcccagagacaccgaaccgcacaactcctttagtaggtgataccgtgagaaggacttggtcacccacagcaaattccagatcatgcctcctcacatcagcataactcttctgacggctctgagctgccataatattctgacgtatttcccgaaccttttcagaagtctgctgaacccaatcaggaccaaccagggatctctctcccaaagtctcccagcacagaggggagatacaccgcctgccatacaaagcctcaaatggtgccatcttgatgctagcctgttagctattgttataagcaaactctgctagtgcaagatgatactcccagctacccttccatgacagaacacaagcgcgcaacatatcttccaaggtttggattgttcgctctgactgaccatcagtctgagggtgaaa

SEQ ID NO: 179594 - DNA, 1019 bp, Zea Mays
cggtgactgacatcgtccggcatcaccagcttatccccccttggcggtagaggaagaggtaatggcccctttaatggtggtctagccacccacgccaagtctggccaacgagcatccaagcgcttagccggtgtagtcacctcctcctgcaacaatgccaagacacaagcagtacccagcgacgagggacgttgcacaataacaacatcacgaatatcatctctaagcccatgcacgaaacgttggacaaaatacagcggatcaacatgatgcccatatgacaccaaattatccactagagcagaaaattgatctacatattccttaacagccattgtctgactgatacgaaataaacgatgaataaacacctcatgttcatctttgccgaacctccccatcaactgactacaaagccatgcccacgggaaggactgaaactagtcatccattgaggataaccaatgagccgctgaccccacaaaatgcatagaggaaaccttcacccacacaggacgttccactacatacaactcaaaataatcatgactacgcctaatccacaacttgggattatctccatcaaacactagaaaattcagtttcggcagacgacctaaatccatagtacttgctcgtaacatcgcctcaacccctggcaatgttccaacaggctatcccaaggcatggacacgtaactcatcggccaacagcactgaacccgaaggcaagtgagaacacgtacccttgaccgggggatgaattagggtggtgatcgacccaaacccatcctcccggtgatgcacgccgacgtggtgcccatggggtgaggtggttgtggatccggcagatgggtgctcagcagcctgcggcgctagagccaacacccttatcatcgccgtggatttatcgacgacggcgcgctcccagtgcttagcgattttcctgacttccagtcgcaggtcatccaccgtaccctccatgcttgtgtgccattcatcaaacacattggatgcttt

SEQ ID NO: 179595 - DNA, 2260 bp, Zea Mays
caaagaaggcccctgaaacgaaccaaatcattctcatcaatggtgaactcccggggtttaccatcgccaaccctctttcgagcttcctgtaataaacgatcctgctgctgagccgcacgcactctctccatgagggaggattgaataagcatccgagtctcctcactagcggtgccgatataacacaaagcgatcctcaaacggttcagatctgcgatcaaaggcaaggccacttttggaaccccagacctgctaagggcatcagccaccacatttgccttccccgggtgataatgaatggacaaatcataatctttaatcaattcgagccaccgacgctgcctcaaattcagctccttcttagtgaaaatatacttgagacttttatgatcggtgtaaatgtcacaagactcgccataaagataatggctccacgattttagagcaaagaccaccgcggctaattcgatatcatgagttggatagttcccctcatgcttcctcaactgccttgagccataagcaattactctgccttcctacatcaacacacagccaagaccaatttgagaagcatccgtataaactgtgaaacgcttaccactctcaggcaaagctaggataggggcgtccaccaacttgttcttcaatgtctgataactgacctcgcaatcgctggaccagacgaaaagaacacccttctccaagagtctagtcaaaggcttagcaatgctggaaaaatttggtacgaagcgtcgataatatccggcaagccccaagaaacttcgaatttcagagacactagaaggtctcctccactccaccacagccgtgacattcttgggatcaaccgcaatgccttgttgattaatcacatgacccaggaaagccacttcggacagccaaaaggcacacttcttcaatttgccgtaaaaccgattcttcctaagagcacccagaacgaggcgaagatgccgctcatgctctgcctcggtctttgaataaatcagaatatcatccacaaacacaaccacaaagtcgtccaagaactcatgtaacatcctattcaatgcttccataaaagcggcaggggcattagttaagccaaaagacatgactatgaactcgtaatgcccatacctggtgcaaaaggctgtcttctcaatatcctcctcacgaatcctcaattgatgataaccggagttcaaatcaattttggagaaaacctcggcacccctcaactgttcaaagagaacctcaatacggggtaccggttatttattcttgattgtcacttgattcaaagcacgataatccacacataacctcttgcttttatccttcttctcaacaaacaatactggggaagcccaaggcgacctgctaggcctaatgaaacccttatccagcagatcattcaattgtcgcttcaattcgacctgctcctttggagccatccgatacggggccttatgaataggctgcgtacctggaatcagtttgatttcaaaagcggcatcgcgctccagaggaatgcctggtagctctgctggaaacacatcggcaaagtcacacaccacccggatgtcctgcacccgcaaggcagcctcacccgccaccaccatcgagaaaaagattctcgacttccttgactgacgatctggaagcaattgcaacaacaaggataacgtgaactttggagaacttaccaagaataccacctctctacccgacggcgcctgcaataacattgtcttccaaaaatatgatatcactacgcgatactgagatagccaatccatacccaagataacatcaaatgcccccaaagaaataacaacaaggttagctgaaaagacctcatcagcaagaatgacggaacaaccctgacaaactgaacagctactaatggagccattagcagaactaaccataattgggtgacccaacctttgcattgaaagaccagcctgcgacacaaaattctccgaaacaaacgaatagctagtgccagagtcaaaaacagcatgggccataaacgaataaactgagatcgtacctatcaccatgtctccctgctccctgccatcagcagagggtagcacataagctccagaaatacccgcagaagaggaagctcctgaagtgaagttaacagaggaaccccacttagtcgagggtgaggcagacgcggagctccaaactaagacagaatagaagtagtcggggcaggagtaggtgcggccaaaaactaaggaaa

SEQ ID NO: 179596 - DNA, 410 bp, Zea Mays
caaccccgggcagaacatgggtacggtagccatgatgctccgatcgatccccgagccaaacaagcccgagcgaaatgtgatgtaccacaacctcgacaacttagtagagagagccacggtacaacaagctgaggcggatcaacagcatcgtgccggcacagagagccgtggcacacacacgacctcgtctagaagcaggggagcataggcctcctaatctacttcgatgtgtgtccacataaaccatcgcatcggagatattcgcgacgctaggcacatccttgacaataggcgataggagcaaggagaggtcgagcaaccacgtgaaagaagatgcacatgcagccccagcccgcctggggtgggaccacacgccttcaggcgagagatccgaaagggacagtttcccc

SEQ ID NO: 179597 - DNA, 1204 bp, Zea Mays
cgagaactgtctcactgagtcactaggtcatgggttcgaaacagtctcgatgcatttgccggggaaaagacttcccttgatttatcccttccccagaccccatgggagcctccagcactagtctgcccctttttttaactatcaagagataaattgcatgaaactactagaaagagaacttactgatgttagtgttttcacttttcttccgagcccacctctcattaatgctgtcctccaacttactcaactggctgataccgtactgcataaaaaagtgcttctggttagaaagctcaaacaaatacgaaacttaggccctgtttggtgctgttccaaggggctccggctctggttcctaaagcactgtgcaacgctgtttgtctgtagcatgctgtggctgggagaaaaatgtctctggctccagcaaaaatgaactggaaaaaggaggagctgcatatttggggcttctcccaactccgctacagtattgctgcagggaaggagctcaggaggtgcccttccaaacatgatcttaacacaatagacaggaaaagcatttgaaaaaactaaaaggatgctgcgtgatccattgatgtaaatcctggcaaaagcagagcactatagacaccatgatagaatattaggcttcagaacactcaactgtagatagaaactatttttttctcgaaaggcgcaggagaactgcgctccattatattaagagggaaacaaggtcaaaagaagaccagatacaaggacttccttacggaggtcgaaaactcaaaaaccaaaaaaagatccatctagcaaactaagctacacttctgaccaaagaaaccttctcccctggaaggctggaactaagcgtcaggggaggaggccgccaagaaggagaggcttttggccccagccatttcccacaacaatatctcttccctagctaaactaagagctagagaaacattgggggtccaaccctcaaagatacatttgttgtgatgattccagatgatccaagcccccaaggcgatgagagaatttagccccttgataggtctgttgacagcccatgaaacttcttcccaacataacatggagggcaaacctggctgtggggcgagcagttgcagccccaattgtctcagcagcttgaaccagaactctcttgagaaaacacaagctactaaaagatggcccaaag

SEQ ID NO: 179598 - DNA, 504 bp, Zea Mays
cgagaccgggagtttcactagcactagaggatgtagaaacatggatcagagggatgtgaacggatctaagaatggctggccatggcttgatgcctcacggcggcgttccgaccgatttgggggaaatctgaaattcacgatctatggttgatgatcaggagtgaggagtggtgcattgggttcgtaacagagagacagagcaaggggaacactcaatttatagcgatagtcctcgtgctttgcaaatttggaatggaagtgcacacggtggtgaatagatgagtcaccggaactcatctaccgtggtgctcaacgaagtaaagtctcggggtggtaatcgactgtctctcacgaccaactgcgatgtgataacacagtctatggcgtggcgtaactgagataaatggtagccaccatagtgacggctgcacggccacgtcgtcgggcaagtgggtacgacaagcttgctctagggcccaagttcaccccctcggcgatcttttc

SEQ ID NO: 179599 - DNA, 849 bp, Zea Mays
caagtatttaactttatttgcttctccgacttaatttctcatatacatgtattaaatatctgcatattcacaattaacaaacattttagttcattttgttgtgttgggcattaatcaccaaaacattttatagaaatggcacaaaggcacatttcctttttagctccgccttcacatgatgtgcctctttcttctgctctagatttggtcgcttgcaatcttgcttcaagtgactgtagataccacaattacgacatctttccttcggcctcggtgttccctcggatgtcaggttgacgacaggatcctccttgtcactgcacccgctgcccttcggtttggcctggttagatccaccttgtttcttgcctcctcctgtcaaggatgactcaagggtaagtctctggcagtactttgacagccactcctcctctaacagcatgaggtgccctatcttttcgttgatggagtcgatctcgaatcgatcttcaatggcatgctactcctcatttaggatgagacacccccatcttcttggtgatggagtcgatctcgaatcgatcttcagtggccttcaagcttccgaccaagtcttccaccgtcaatgtctttagattgagtagaatctcaatcgagaatgcgataagggagtagcgcttcgtgagcacgcgtaacatcttcataacacaggtgtcattgaccgtttccccgagcccgtgcaggtccttagctagcgtattgatacgtagcacgatgtcatctacacgctcgacattcttgaaagagatattcttgaactcatgccataggcactaggcatgggcttcctttacacaatcagccccccca

SEQ ID NO: 179600 - DNA, 320 bp, Zea Mays
atcatttctagccactctttgcatggcttgttgaattgtttctcaaatttaaatcgataagggagccgaacaagttcgtacttcccccctcctttttcttaagcattccccagccactagaggtcagaaatgttctatttgccaagtactcttgtactagatctctagtactgatttcggcagctaccactctgaattccacctcagccagctggcatggggagccaagttgcatgtggcacaagggccttgtcatcccgaagcttaatttcattggactcatgaccatagtcatcaatttctcccttttcttctcatcc

SEQ ID NO: 179601 - DNA, 343 bp, Zea Mays
gttcaaccggcttcgtttcttcgatcacagctccagtcttgtcgggtcgtgctgtcaagaaaggaggcactgaagatttgccatacccctttcctgacgacgcccattctagacgttgatgctccaaacgtcggttagacgtggccacctcttcccgcagcaaggcgagagcgcaagcagaatccaaggaagaaggccgttgaagaataatagcagcacgaatgtctgaacgaagaccatccagaaaacgttgcacaaaatagagaggatccacaggtcgcccatacgacaccaacttgtctactaatgaagaaaactgatcgacatattcagttactgtgcc

SEQ ID NO: 179602 - DNA, 362 bp, Zea Mays
tggaaatatggtcaattcactgataccctttgtgattatcaaaacagccaaggaagatgtgcaatgcggaacacagagccaacttgtgggcggtactggcagaaaggttgggatagcaagcgcaaccaaaaacacgaagatgatcgaatgcaggcgcagagctgacgaggccttggtggagcgtggagtcattgagtgtcttagtggtaggatgttgtggaggtaggtggcatggtgcaaggcctcaatcttgtaaggtagaatggaaacctaaaagagcaaggagcgaatggcatcatttttagagcaaatcatatgttttgtcatgtttcgagtcgagatgttaggacaggatatctaga

SEQ ID NO: 179603 - DNA, 744 bp, Zea Mays
agggcaccctcatagctcactaaattaattgcccacacctggcctctacaactatggggcctcaatatagtgggaccgctccccaccgcacacggcaacctgagatatgccttcattactatcgaatacttcaccaagtggatcgaggcaagagtagtttccaccataacaacaaaaacgtcacaaagagttttctggcagaacattgtctgtcgttttggggtaccctccgagctaacggtggaaaatataaaaaagttcgacaatcaagacttccgggatttttgtgcctccgtaggaactaaggtagtcttcacatcagtctaccacccacagtccaacagtcatagagcacgcaaacggaaagattttcaccgcaattaagaaaagactcctttaggacaaaaaggtaaatgagcagaccaactaaccgaagtgctctgggggctaaatacaactgaatcccacacaacaggctttacaacattcaaattgatgtatggagccgaagtaatgactctgcaagagctcaagcatggctcaccatgatcagacctagtgcagtcctagatgtcgacgagctagaaacaaaatacctccttgacggagaccgagttcaagccctcgatgcccttaacaaataccaagcagcaacaaaaagctagagagacaaagttgtcgtccccaaatatttccacaatgaagaccacgtccttataaaaacaacacgaattatgtcgaagg

SEQ ID NO: 179604 - DNA, 315 bp, Zea Mays
ctgacatatctagttaatacaaggcataatcttgctttttcagtgggaatggtgagcaggtttatggagaatccaaatgcagaacattggagtgctatcaaacgaattgtcaaatttgtagctggcacattccagtatggctgtaattatgtcaagggagctgaaaatgatcttctgggtttttcagatagtgatcatgctggggaccttgagaagagaaagagcaccacatgtgttgttttctttctaggcaaaaacattatcacctggtaatctcaaaagcagagggtagtatcattgtcctcttgtgaatta

SEQ ID NO: 179605 - DNA, 852 bp, Zea Mays
tatatgagaccacttggtctagacaacgggcccggtaacgacaacatgtttaacccttcggtagcgttcttttttctggtgcttgttttcgaagtctatgctatagcctctaaagatcatatttattatctcatggactggtgcttggagaaatcgtctttgtccttgggtggggaggtggtaactggtggattggagggataatttgtggagttggcgggagaggtaatctttcttggtggtgtatttggctgtggtaattggtggaataaggggggaggtggttattttggtatcgagggggttgctgggtgtcttggtaatggaggaggtgtgggctttggtatttgtcggttggtcttgtgttgtcctcgccattctttctttggtttctttcatcactgcacagtccatggtggagtgctcgcgtctttgccatggaggaagacactgtacaatttttggtcctacatggggactctgcctcgcccagggcctctgttggtcctaacccctcgacctagttgctgagggtgattttggttgcaagggggctttgacatactattgttgattggtgatgttgtggacttactattatggtttgctgctagattgcgaggtctctttgggctttcgcgatgtttccggcttgtggtaatgtagctcctctgatcatgcatatttctcgtgaacttatatagttcctagagcatggttggagggtccatagtgtagtggctatagagatggccagctcgaaggccactgattacataatggatggcgatacgatctttgactgatgggagttgtgactccatcagtaagaatctattgtagtaattgcag

SEQ ID NO: 179606 - DNA, 653 bp, Zea Mays
cggggttagttgtgacagatggagccattgtagaaggtgcacctgctgccgaagctgaacaagctgatgttgaggaagaaaatgctgatgatagcattttgggtccatcaaaatccagccacttggattttgaaaatctactgtgtctgaaactgatatgcccatgatgataaaactgggctacttcggagaagctgagaagaagcttattcgctttgccaggaaagaaaccactccaacaccgaaggatgacgaagtagtagtttttaaaagctttttcagagcaggattacggtttccgctgaacgagatgattggagaagttttggataattatgaaatctatcttcatcagctggcccctaacgctatcgttaggctcagcatcttcatctaggctcttcgaagccaagggatggacccaaatgctgaagctttctgccgagtgcatgagctgcattaccaaacaaaggccagagaagacaggctgcatgaaaattttggttgttataacttcgcgtattgcaaggatacgaaggctccggtcctcagttatcgcaccaagtggccaactggctggaagagtgagtggttttatatcaaggccgatgagaagaagagggagaagctgaagacgatggtcatgagcccgc

SEQ ID NO: 179607 - DNA, 414 bp, Zea Mays
gtgtgattgaggagtgatgtagtggcaagcgaggagtaagtttagtttttcaaacggttagtggatagtatctatcggtgttgtcatgatttttgttgtatggcaatgtgatgcttcgctttgtcaatcatcacattccatgcccatgggataaataatgtcttgttgatcgattaaaaatcttgtgtgagcgttgtcgcagcccaataattattggaggcgagtagcgttcagaagtcggtccttgttaaaattgaagaacaatccgataagatgtgcacataagtgctttaggtccttcagtagcaaatgtagtcttatggagtttttatgccatgtgttaatgcatctatattagaccccctaaaatgttctattttaggtgacttgtgtgttaactaatttaagttgagc

SEQ ID NO: 179608 - DNA, 685 bp, Zea Mays
ctccggcaaggattgatccaaggcgatcggggtagagcggacacagcgaccggagtaaacagtgaccggagttcatccactgcgtgatatttcgcacccccacaacgttatccaacgatgccaagcacgaatcacgtcgaccggcgcaaatctagacgtgcggctcacgggcggcgagggggactgaacctagggatatttagtgcactgtaccatcagattgttcttcagttagcctgacagaccaagtttggcattgattttctcctaaatttacatggcaagttgttgatcggctagtagcaaatttgttgtctaatgatccagctataaaccgactgtggtaaccatgctcaaacacccacgggatcatcttcaaaatggcacccaaagttcatcccatgccactgaataccataattcaggttttagacagactgacagccccactttgggcacatttatctcaaaatacttcatggtaccaggacttgatctctatagcaaaattgttcccctttcatagctctacaaacttgatgtggtgacctagggcaaaaactttataatttggaagatatagggccccaaagttgagccaattccattgaatttcagacttatctcaatagagctcaaatgtggctttttgcaaataggtccaaatctcagggtttaggttgca

SEQ ID NO: 179609 - DNA, 394 bp, Zea Mays
agggcctgaaaccttctatcaggcatgccttgggagcctttccgttggtggattttcatactacagtggagcaggcattgggtgtggagatgcaacaccagtacaccatggagtcacagaagtcttcgggtgttgatcagcctcgtggccaggacgcgaagaggggcaacacatgaggtctagcccacaacaggggcaagtctcagcaccagcgccaccacccctaccgtggcaaatcctttgaatcgggtacttcgggaggaagtactcagaggtatcgggctgttcctaagcccaggctagggctagtgtgtttccgttgtggtgatgcgcatcaccgtgcagagtgccagtggggtggcaggtgttctatttgcagtcaggaccacaagga

SEQ ID NO: 179610 - DNA, 505 bp, Zea Mays
atcaatggttcgatcaggaacccgaaggcacttcttcaattaggatacatggaacacactgtgcaccgcagacaatgtttcgggtagttggagtcgatatgccactgtcccacattgttcaagaattggaaacagaccaatgtatcggggtgcaagctttccttttacaccgaaacgagtcacaccattcattggtgatactttcaggtacacataatctttgacttgaaattacaagggtcggcgtcatttgtctgcataactcttttgttgagattgtgcttctttcaagttatgtatgattcattgaaccttttcttccatctctttcactatatcaggcctgaaaaaccacctttctcctggttcagaccaattcaaggggatacagcaccgtcgtccatataatgcttcaaatggtgccatcttaatactttcttgatagttgttattataagaaaactctgcaagtggtaaacagtcatcccatttttgcagaaattct

SEQ ID NO: 179611 - DNA, 652 bp, Zea Mays
tcctaaaaccagggggtttcttaagcaaaacaaccatgcgaaggggtacggggtaacctcagctgtcggatcaggcttcaacagcccagattagatcacgcgagggtgtgtgcgggcgcgactgacaagcggggccagggcgccagcgagccaaggcgggctgaccggccgggcccagggacagagacgcgggtgagggggagaggggagagacggttggatctgaatcggagggctacgattcgatccgctcgggttaagtctaaaccgtccgattttgggtggacgaccgagatctaacggcaaggggcggacttaggcgcggtggcgccgctcggccccgcggcaggagctcaccggagacgaggagaccgaccacggcagggcactaggggctcggggactagtctaggcacaatcagaggggtctggcgaactcgaccatagccttcacgccggcgcggggcaccagagggcgctgcgcgtggagaggcggactagcggcggcgctagattgctccggtgagcaatcacacgaacaatagggcagtacacaggaaattaggggcgcaggcaggtttctcacctcgaggggaaatgatggagtcacggggcaacggcggtggcacagggacgcgacggacgacggtgg

SEQ ID NO: 179612 - DNA, 361 bp, Zea Mays
gtctttacaattatttctatattcacaaatcaatttataaatgttttctctgatttacccacactctggattacgcacactatttacagaaaccctaggggctacggcgcaaattgctctaagacacagagaacagtgagcggggacggcgggttattttctggaaatcgtaggggctctttaagaaaagttccacggatgaagcggtgcgggcaaggtcggtcgtccgatcctgatccaatggatccgatagaacgacgaaggggtacgcgctattgaccaccagatctagatccgatggtgaggatcccaccaacctaaacgttatattgcgattaaatcctgagcgcatgatggctga

SEQ ID NO: 179613 - DNA, 527 bp, Zea Mays
taagagaccacgtttgaactaaggtgggagattggaggttgtagataacgaacatagcgtaatcactaaggtaagattgagagatgagaagggtaaaggcagtaagaaacaaaagcacaacaaaggatgaggttacaaactcatgagccaaataataggatacaaccaagataaagaaagtataagacggaagaggggcgattttaaagggcaggtatgagacaaacatcaatgtaggatatataggtgtcaagggtgcatatgataataattaaaagcataccgaaggatatagttaaggcaagactcgcgaaacgacaaagtggagaaaacaatcaagggtaagataggtaaggttccaacagaagggttgaagtaaagattcattaccgagtggagttacaaggagacaacgagatcactaaggatatgcaaaataaaatgaccgctcatggatcattaagaaacaagggtggtcaagggcatgttaactgaaatgtcttaaacagacattagggtataaagac

SEQ ID NO: 179614 - DNA, 862 bp, Zea Mays
aattgttgctcagtggttgccatcatgttgacagtgccctacgaagaggaagaagtcactggctcccatttaagtttcccatttggattcctcctacacaccacatccttgttatcttggttgcaaatagagcacatgccactccagtgacactcagcatgacaatccgcttcaccgcaacgaaaacataccaaccccaacccaggcttaggtacagcccgatacctctgagtactcccacctgaagtacccgattcagaggacttgccacgataggggtggtggcactggtgtggaaactttcccttctagtgggctaaaccctcaaggtagcccctccccgcagcctggccacgaggctggtcaacactggaagtcttctgggactcatttgtatactgatgttgcatctccacgcccaaagcctgctccacagtagttcgaaaatccaccagcggaaaggcgcccaaagcatgcctggtagaaggtctcaggccctgacgaatctggctcgccttttctaactcattgtaggccacatgtggaacaaagtggaccatcttgttaaagcccacttcatactcagtaaccgtctttttctcctgcttgaatgattgcaagtctatcttcatcttctccaggaaagtgactgggtaaaatctcctttcaaattgcctgacaaaaatatcccaggtcaggtaacccggtgaagatgaatgagctgcccgcatgcctctccaccaaatctgagcctcccccttcaacagttgtgtgccaaagagaacacgatccccaaacgctatctcaaagacatccatcttatcttccacataagtcagccaatctgccacctcaaccggag

SEQ ID NO: 179615 - DNA, 322 bp, Zea Mays
gtgcaactcaagctacccagggcagaaacttgcctagggaagcaattacatgtggtgggaggacctactccgagacctatgttaggagtaggaaatgccaaaaagttacagtggcttaggacttgcagcaaggagatggcagtggcagtgacaatgacagtcacaacgaaaatgatcattgagagccaactcaaaatgaccaagatgctgcagaaaaagtgattgatgatgaagatgaatctggagctgctggtgatcaattcaagctggatgatgatctcatataggtgttgccttcttggaccttagtcatagtctacta

SEQ ID NO: 179616 - DNA, 463 bp, Zea Mays
ctccctgctttgtgtccaaccgttgataaaggtcgtcataggcttgaccctgggctctactaaccgctcgctttgcagacttcttcgctatcctgtacttctctatgttttctgcacacttgtcatgatgtaagcgtttgtagcaatctttcttctccttgatagccttttggacatcttcgttccaccaccaagtgtctttaacttcccttctgttttcttgactcaacccaaactcttctgaagctatctttcatatgcatatcgccatcttcctccacatgatatttgcgtctccctcttctgcccaagggccctcctcgataactctctccttgaaagtttgggccacatcccctttaagcttccaccactttgttctagtgaccttgttatgcttattccgttgtaaacgaatcttaaaacgaaagtcagctacgacaagcttatgttgggttaccac

SEQ ID NO: 179617 - DNA, 717 bp, Zea Mays
ggcgccacggcggcgcgccatggccggaaactccattccagcccacggtgcacaattccaatgaacactagtggctacacgaagcctatacgctggcaaatacggtaaagggactctcacccgcaattgaagtagtggcgagccaggccatgacatgcagcgggttcgcgacagccaatgaccgccgacgaggaattatcgccgattgaatcctcccgcggcaatagatcccgatgcgctccttcgccacacccagtgctttcttcctgaccaagtatctagggtcgagacggcgagtaattggaaacggactgaggcggcgctctcaactctttctttcgctggcgatggtgtcacgggtgaatcgagtacggtggggcagggcacggagctcccacatttatacgaccgaagccacgtactccggctagaggagacgcttagcttggggcgcgtgatttgggcgagcacggagctgccccacgagttccatggatggttagggaagacgaggtcctggggtggcccacgcgtcagtcacagcgcaaagagagcgagcgagtgcgatgcgggaaggactgcatgtggggcctgcgcaacagtgagacggcatcagcgcggacgtgcctggtgagggagagcagctatcgtgtgggaccaagttgtcggcatggagatgacgcgcgcacgtggaccttggttctggcagggcggccc

SEQ ID NO: 179618 - DNA, 731 bp, Zea Mays
ggtaaccaggaggacggtctcacccttataagtacaattatgcctctggttacctacgttcttcctggaatattcccccatcaggggctattataggtcattacagcatggttaagtacaacccggactaacacaccatcaatcataccccagactagggcttacacgtgggcccaaacaagccaacatgccgctgcatgggcccacttcattgacatgcgtgggtagtggctacaaccttcgtcttaaggcgtcgggtcttcagatcctaccgtggcctccgcctataccgatcaatctctgcgctccaaagccttcacttgattgagatagactctactctctgactgtcatgacatgttttgtttacattataaataaattaaacgaggggtgtggattaaacgaggggtgtggacggtcttcgttccaacaccgtacaaagtctaacatgtgtaatgcgcagtttatgtaaggcaagtgtttagataggtccctactctgccctgcttaagggcacacacgatgacacgaagtttcgtgtgttcagaaggctgaactgcgaggaaagcaggaggcagctgacagaaacatcgtggaaaccagaacgcctggaagggaagagaccgatgtgatggtgcttctttacttccttgtggggctcaccactgaactaccttatttgccgttctcccctgccgctgccggccttgaatctgtggcaaggttcg

SEQ ID NO: 179619 - DNA, 385 bp, Zea Mays
tccttcctgtggtgcttctggaggtattctgatgggctggaatgcctccatcttcaccgggcaggtccttagctcctcaaacttccaaatcactcttggtttcacgtcgatgcacaatgctaatcaatggaatctcactacgatttatggaccgtgcaaagggcaggagaaacaaaattttattgactggctatacaaccttcagatcgcagatgatcaagattggatgatagtaggcgacttcaacatgtactgttcaacagaaaatagaaacagggagggtggtaatatgacagatgtgttcacattcaatgaaattattagttcggtaggcctgcaggaaattcccctcaaaggaaaaaattacacttggtccaatatgcaa

SEQ ID NO: 179620 - DNA, 300 bp, Zea Mays
gttcttcttgctagagttgttcaattgattgcagaattactttgggagccaactcaaaatgatatgaaatcaatcacaagcaagagaacaagagagagagggaagaggaagaaccaaatcacaaagaaaaggtcgacgcaatgaatacgtgcgatttgtttcccggggttccactcctgaaggatgtacttcactattgaggagtccactaaggacaagcctctttcaatcatttccctcccttaaatggtcatagagatcggttgagttttctttcacttcttatggacaacaagtccc

SEQ ID NO: 179621 - DNA, 886 bp, Zea Mays
acaatgtaaggaaccaaacacaactgtatcagtgcacaatgattacataaatcaatttacaatatctctaacaacaacgaatgaataattaaactaaatctagcgatggttagggtttaggggttggacctttctgacttctgtgcctccttgtgttcaccatcaaggttgtttgcgatgacctaaatccagcgatggttagggtttaggggttggcgagagaaatgtggatggggcgtgttaggtggaaggggcgagagaaatgcggatggcaatgagatagagcgggatgcggcgagtgaagtcggtgacgacgcagctcatcgacgcgatgagaggtaagggggcggcggtgaggtacctggtcgagggggcaggtcgtcgacggcggatgtgtcccagcggcggtgatgaggtacctggtcgagggggcaggtcgtcgacagcggtcgtgtcccggcagcggcgattagggttggagaaaatagtgggggagaaagaagaggagtgggggagaaagaagaggagtgggggagatagaggatgagcggcgtctgttttagtgacgacggcgaaacatgttttttggcgcccaatgtgtttggcaatgcggatgctaatgcgtttaaatatattagcactgggtatatattgaaaacacgtgaatagctcaatggtttgacctcgattcaagcgcccgcaaggagacattttttgtgttttgcctatcattttatattgattctttgtttttttatttttctctatgttttttgcaattatctattcatgcacacattagtttggtttatgatcatgttataatattttgaaataattttgacatagtggtactatacatctctcacttgcaatagcatctctc

SEQ ID NO: 179622 - DNA, 1121 bp, Zea Mays
aaggaattccatagtactcacaacaacaacattttccaaggtcacttgtctgttggtttggttgtgcatccttttgtgtcttgaatgtctgttcatcagctgttttatttatagtgctgttttgacttgccaacacaccgcattctttgcatttagtgacatcacttgtagttgacattccaaggtctgacatctgtatgggtatggaagaatggaagggacgaaagggttgagcaaggacatattatagagagcagagaaaacccatctatctaaggttttacctagctaactgatgtcattgtggacaaaagtcacacaatacaccaacaatcatttcaaagaagcaaatcaaacatgaacacaaaggacaatgaattcaagcataccagcacaacacaatccaattatactcattcaaccaaaacaaaaaggtgagacgaggtttggaataagaaagatattatgacatcaaggagttgggtaagaattatcaaggagttagacaagacatatttgttcatggacaagagtgaaataagataaccatgaactattaaagtgagggaaaatgatacaaccaaggatatgaagtgagttagggaaaagcgttatcaaggagaaaagtagagaggcaaaggtttaatatatcaaggtagatattgcgcaagggtcgcaatacaatggcacgaaagcaaaagtataagaattcaatagggagaaagcattatcaaggagaaaagtagagaggcaaaagtttaatatatcaaggtagatattgcgcaagggtggcaatacaatggcaagaaaacaaaagtataaggagtcaagggttatatagcaatattagggattagaaaaccacttataatataatataatattgccattaccgatctagtcgaaaacttagcactatagaactatcctatcaacctaaccaagaagaatggtaatagatccaaagaatccatagcaaaacttcttgcggagtggggataagacagaatagggcatcgtcgatagcttcaaaagggcttcttctggcaaacttcgcttcaagttccgcaatcctagcttgatcatcttgcaatgcttctcattagaaccttctgatagac

SEQ ID NO: 179623 - DNA, 783 bp, Zea Mays
tttagaagataaggtcaaagaactcgaagactctttgaaggaaaaagatgaaatgctacgttcagccgaagggtcccttgccgaagcacaagctcaaaacaaggagttgggtaaagaactggcagatgctcaggaacatttgaaggaaaactctagtcgattcaaccaggaaaacgaagctttgtaagcaacacttaaggttgagactgagaagaatacgaagcttagtgatgcactgagggctctaaaggagagatgcttcgagtttgcaagccaatgcaccgctcggttgagaagcattttcaattcagttggagctgcatctgaggaaaccaatctcgctgccgaagatatacccggagcactcgaatttattgaaaaggaggtagatgtccttgacgaagttataactggccatggagacttttgtgtgctagttgcttctcgtggtatagctaccatcttcataaaagtcggatgcaatcatgcgagagctgtcaacaggccaaatttcaatctttcatcatcggatctggttgacgttccaatcgaagcccgaagcatagggaacaggtttattacccaaatttgggctaagggcgggcgtgaattggctggagacgaagcctgaaaactgcttaacacagtatgggaccttacctttgttcttttaccttgacctttccctatcagatttttgattaccttgcactttgttattctgcagaatgatggtaccgaaggtcgatgagctgaagctagttctgaaatactgaagaagac

SEQ ID NO: 179624 - DNA, 488 bp, Zea Mays
gtttgcttctcaaaaaagttgttctgaggtggcttgagctttctggaggatggcccagacaaaggccgagtcattagacccgtggtagaagtcctcgatcacggtggcctccgtgacgttggggatgtgattcctcatagtttgaaaacgcttcaagaacgagtggaggggctcgtcgcttcggcgtttcatggatttgaggtcctagggttacgctggcttgttggaaagggattggaagttcgagacaaaccggtggcagcagtcggcctagccgtcgatgcaatggcggcgaaggtgttagagccactgtagcgcatcctacccaaggacgatgggtaggtacgttgtcatgatgtcctctgtttccccggtgacttgggcgacgaacgtatagacgactaactagctgccccgatcttgcttgggcttgtacttatcgacgttcgagatcttgaagttaggcggccattgaatcgctcggagct

SEQ ID NO: 179625 - DNA, 593 bp, Zea Mays
gtggaatttccgaactgtggatgatggtcggccatggtgggttcggcgccgtccgccgtcatgggcagaacactctgctccatcaatcaccatagaagagaaccgagctaagtcacccttgtggtctcactctgaatcaccatgcgcggggtggaactagaactcggatcgctgggccgcttttgcgccggcgatgcgccgctgcactcagctactggaatttgggggaaaagggtgatcgtcgatctactgatgagcggctacgattgagccttagtggtaccgatttgggcataggatctgggccgttgcgatccgatcgtgcgaatcggagtgattccgctgcatgtttggtctgtaccgttgattctagatccaacggtgggatgttaagtaccggttcgcaagagtaataaactaatctgcgcgattgaaccgagatcggacggctgatatctgaagataacgtttcggtcgtgcgatttagcatatgagtccctatgttttaattagaccaactcacgatccacgcaggttgttcactgagtttgtggaatcttgcgccgaggcccctgccttctcgggtatttgac

SEQ ID NO: 179626 - DNA, 454 bp, Zea Mays
attcaacagcagcggcggcggcggcgttctctatctctcagcggcgccaggcgatggtggaagtgcgcggcgagaagatgggagcgcgagcggcgagatcgtggatcccgatacttgtaggcgaggcagggtaatggcggttgaacaaggctccgtagctcgtggctgaagacgcgacatgcacgaaggtgggcgcgaggaagggggaaaccccgacgggtgggttccacccgtaagtgacttcagaaggagtgcagcgcaacggtgtagactgacgcaagggccccatatgtcggcgcaatggtgaggtcggctgcgcgggagtgggctagatgggccgcgcggttgaaggagtttgggccaaaatgaagttgagctggcccaagcggtgttttaaccttttcctttttcttttctttcctttcctttttgttttctttctattttgttttct

SEQ ID NO: 179627 - DNA, 615 bp, Zea Mays
ggggggggggggaagctccgccacaacccggtgagtatcctcaatacccgtaggttatgttctcaagtcgatgggcgcttattttcacgtgatgcttggcgttgtggccctactggcgaatttccatggcgtggcactgtggctgccggtgcgctgccgatgctttgtgtgccagggtttgggcagcaggcggaaggttgacgacggcgcgtccgccgtcggatccggaacgagtatgcgagattcatccaagtggggcgatgatcgttggccgttagatgacaatcgtagagccacgatcgtgcaacaggtgtaccgattcggggttgtgctctcgctgtagatctgggatccttcggtacagattaggattggcggcattaaatcgcgatcgttagtttctgatctggcgggcaacatcgcccatcgattcaattggggaaaatctaatcttggcggccgacagctgatcgaacagccaggatggctgcgtaccccttcaccctggcgtttttacataagaaaccctctggaattagataatgaacccgtcgtcctgcgcagtgtggctcagtgtcttgggaagaattaccccgaggcccctgcctttctctg

SEQ ID NO: 179628 - DNA, 459 bp, Zea Mays
ggaacttgcggctcccactcaggacccagggccctcgctgccaaggtgattcgtaagggattttactggcccgcaataatttgtactgccaattgagtcacaaggtcacacgaagcatgccaaaagttctcccctcgcttaggtagcccttcgcaattcaccaagctcatcgcccatacatggccacttcaacgttggggcctggacatcgttggaccactgcctacagctcaagggaacctcaagttcaccttcgtcgccgtcaaatatttcacaaactggattgaggccagggcagtatccaccataacatcgaagaccgctcaaaaattcttctagcaaaacattgtctaccgctttggaatcccgtccgaactcacagtcgacaacgacaaacagttcgacagccaagacttcagggatttctgcttttccatcggcaccaagcttgtctttgcc

SEQ ID NO: 179629 - DNA, 362 bp, Zea Mays
agcagagggccaaagaagaatctccagatactggcgtagctctagagaaaagtgtggccaaagaagccaaatcccctgctcccgaagcaccgtccgaaggtcctgattatatcattcgacatgcttcgggaaaaagattatccgaagaagaagtttttgaagccaaacgctatgcccgggaactgaagtacccgaagggggccttagtgtttaacggtacggacgaagatgatttcctgtactgcctcccggacaacaaagagttatccgtctgccgggagatggccaaaagtatgggttttccgaagctcgaagctggcctctgcgccatgacgaaggctgacctcgcggacagcctcaca

SEQ ID NO: 179630 - DNA, 540 bp, Zea Mays
tgatgatgtattttccgattacagagtacaacgccgccccgatagcttttgaattctagctaggggtaaaacttcctgagatgctctatattccatgaattccctatttccgtgccatccatttgagtaagccgatatgatcctggccgagtgacttctattaccatgaatggcccttcccatagtggcgacaatttgtgtcgtccttcctacgttagaattcggcgaaggaccaagtctcccactgcaaaggatcgatgtcgtatggccttatcatgatagcgcctcagggtttgctggtatctagctaactgaattactgtattcaatcgttcttcttccaatgtatcaatattctctagtctggtagcttctgcctcagctatgttttcgaagaccagccttggtgccccaaacttgaggtcggcaggtagcactgcctccaaaccatagaccatgaagaagggagtgtttccatgcaaagctcgactaggttgagttcttaggctccaaatcacatacggcaactctctgatccac

SEQ ID NO: 179631 - DNA, 602 bp, Zea Mays
ggagcacaggggcaagggatgaagacaccgtcggggtcgtcctgcctacgtgcgcaaagacgaacgcagggagagaaggcgaaaaggagcatacctggtaacggaagacttgcacgatctggatccggggcgagacgaggggttatgtgacggcgggaggggatatttttatagataagataggattagataaaattagatggagatggttagagctggcctgtgggcccaaaatgacgaggatagccgacgcgagcagcatgccgttcgtgggaggaagcagttcggtgatctcgcgataaaaagggtacgagatctggaacaggttcgacgagaggaggatatatatatattatcgtgtttccaagattttgttgttttcgcaaatactaaattttaggtatttaattaatattagaaaaacggaaattcatatttaatactcgaagaaacgcttcgaaggttcccgaaagttttccggaaacaggttcaagataattcgatttattttgaaaaacctttgcactcataaacactatgcaatgacatgaatgcaacaatcaaagtttctccaggattctattttactacgccaaaaactc

SEQ ID NO: 179632 - DNA, 456 bp, Zea Mays
caacaatatcctatattatgagtatcacatctaaccttttcagatccatttcgtagccttctcaggagcaataatatcgtgcgttgtcgctgttacatctagcctttttagaacctgtacatagctttttcagagtgtgacttgtatcctattcatagcctgtacataacctttttcagaatccattacactacctatccttccgcctatatatacacggtcctttatacatttgcttcattgtgcaatacaaatgtctttagggtcttctaggggcaagggtgggggaaattggagatgaaaggatggagggaagttacctctaatgtgtttagatggccctcttggtccagatttcaacaaagaggttagacttaggtcctacgataacatgggagaagattggccaaagtgcatgcatggtgaggattgcttggtgcagatgttcgtcgaggg

SEQ ID NO: 179633 - DNA, 879 bp, Zea Mays
agaagctagtgaaatttatacctctgaacaggggcaaatgaggagtaggctcctgcttggtcgttcctaagtcagctgaaccaaaaagagaagaaccaaactgagaatctactgaacatgaagatgttggcacacacatgaaaatgaaggaccagcgcagactaacctggacgtcggtggtcgcgacatttgggggacaattgttgtgattgcggtaccgagatcgtgctttccaaatcgccgacgtagattgtgcggtttccaaatcagccgatggagatcatgcacgccatagccaaatcgggcgccattgccgcggcttccaaatttgtgggtgcatttcctcggcttgagcgcggaggggaaggagaggcgggttcctggcgggtcgggcggttgcacggaggggaaggcacgatggatcgtgcgaggcgggggcatgacggatcgtgcgaggtcatggcagttcgtgtggctgcgcggacctcggcttggttgtttgagcgcgaaggggaaggagaggcggggtcctggcgggtcaggcggctgcggatctgcgcgtagggttagccgaggcgggggcatggctgttttgcggaggggaaggcggcgggtcgggcggttgcacggaggagaagcagagacgctggcatggaggatattgcgaggctgaggcatggcagatcgtgcgaggtgggggcttggcggttggtgtggctgcgcggaggggaagaccgacgcgggggcatggacgcgccaggcgcccactgtcgaagcttaattagtagtaggatagtggccaacacagtttgtacgattaaagtatggagccgtgattgaatggttgcatcacgacagggacatcctcggcatttcatt

SEQ ID NO: 179634 - DNA, 661 bp, Zea Mays
ggcctggtgagcgcgaatcagcacctgagggagaggagtcagcgtcgctccaggctcggcaccagaccggagtggacgcccaagaataacctctggaccctccggagttggctgggggacagagctggacgcgccccccacgcctacctccggtggtgcatccgacggtatcgccgttggagggtctgcaacagctgctagcggcaccgccgcttctggacccccggttgaaacttgggaacccgaaagtgttgcctcaacggtgacaggcgaatcctgggggcccgatgacgccacctcggcaccagcgtcatcctgcgtgatgggggcagatgcatctgtaaccccctcggccgccgccgatgatgggcttggcgccgacactgatggggtcgcagtagccgttggcagatcgccggtaacactcccagcagatgtatgctaatgggcaccaaacccataggtgggcatggcgaccgacgaggaaggagcatccatggtagctgctgacagatcgccggcgacgttcccggcaggcgtatgccggtgggaaccggacccccggcaggcatggcggccggtggggagggaacacctacggacgccgaggaagaggaggccctggcaggcaaaggtcggatcatgacctgtcgacataaag

SEQ ID NO: 179635 - DNA, 615 bp, Zea Mays
ggaaccggagccgccacagagaagctgttgtttgtcgtcgactcaatgccagcagtggtgtccttggactaattctggccttggggtgaagcagtggtggtcgggccgcttggattccaccgtcaacagctccagggttgcccgccatcgactgggagtccattaccgaccgcaagccccgcgattcggcctgccagtgcgtcgttcagtggtgagacaccttcctcgtaccccgtcgtaccctactccatattttgaggccgctagcgcgagtaaataggcacgaattgggtgcgacgttgagctccggcgggggcgccaccgcgtttggggtcgccgtcggtcagtgctgggggaggatttgggcgctccgcgattgccgttggattccttagttgacggccacgattagatctgggaattgggagatttcgcgtcgttgattctcctatgggtgatccagatcgcttgcattaatacccctttcgcgcatacaatctcagccatagatctctcatccaacgcttgtcgtagcgtaccgtttcgcgtatgactggattaaatctgggcgctctgtttaagatcggacggctgtgagcgcaccgtaccccttcg

SEQ ID NO: 179636 - DNA, 473 bp, Zea Mays
gcgcagctgccgcgaccccgatgttccgggaccgctcgccaaaacgttaatgcttttgtttcttcttctctctccctccatacaagctccatgaacgccaccaatggtgccttaaacccgtcggccgccctttattctccctctccccatcgacgtcttctcccctccctctccggtggctatataagccgatgctaaccacacttctcaccttgccccagctacttgtctcacctccattgccgtactctcctctgcgcagtgcatgatttggtcttctctgagttctccactgccagctgctcccatgtcattgtagctcagtccctttcaccggtcatgaacttcctggcacagcctcgctcgcactgctgctcaaggcccccatagttctcttctagtgttgttcaccgcgtacctcagtgctcgctcgcactccccacactctctcactcacccgcgcagcacctcgc

SEQ ID NO: 179637 - DNA, 621 bp, Zea Mays
aagatatccgaggaggagaagatgtatgaggaggagaaggttgcagatccttttattgctgggttttacgaatccatgtcaaaaacaaatacagaaaaaatcacaaaggtgataatgccagatttatctaaagattctgatgatagtgatggatttgatgtggaaagtggagatgaagattctgaagatcggccatggcgaccaagccataccatcttcggaaagtcaactattaagcaaagtcatgttgacgctatgagaggaagatactttcgtgacatgtctattgtgagagttggaggagatagcactgcccctgctcctaaagaaaatgaggtagttatttacaaaagctttatgaaggcgggtctttggtacccgttaagcagattcttggttgaagtgctaaagatatttcagatttttcttcatcaacttactcccgaagctataactaggatgggcttgtttgtttgggctgtaagaagccaagggttggaaccgagcgcgaagtgtttttgtagtatgcatgaacttttgtacgagacgaaggccaccggcaaggagcagtatcacaacaacttcggttgttacggcttcattactcgctctaaagcaagc

SEQ ID NO: 179638 - DNA, 840 bp, Zea Mays
cttaagccaaataagtgtgtgtttggggtaccagctaggaagctactcgagttcatctttagtcactagggaatcgaggccagcccgaagaaaatcgaaggcttcctaaggatggaaccaccacgatcgcaaaagaaggtccaaaagcttactcgctacatggcagtgctgagtcgttttatctcatgactcggcaagagaggtataccattctacaagctacttaggaaggtggatagtttccaatggactcccgatgctcaagaagcattggaggcactcaaaaaactcctaaccaccccactggttctcaaaccacccaaccgacctaccatcgaccgaccaactgaagatttgtcgttgtacatcttgtgcacaactcacgtggtaagcaccacgttagtagtcaagcagatggaagaagggcacacacatccaatccaacaccctgtatacttcatcagcgaagtcctcagaccctccaaggtcagataccctcaagtctagaagttgctatatgcagtattcctcatcgcacgaaagttgcgccactatttcgacgaacacaaagttgtagtggttacacatttttcgataggaggcattgtccacaatagggaagcagtgggaagagcggccaagtgggcagcaaacttggagctcacgacatagaattctgaccccgcacgacaatcaagacccaggctctagtggatttcatatcaaaatggacctagcaacagatccccaaaaaccctgagtcagtggaggtatggaagatgcactttgatgggtcactgaggttacaaggagcagaaaccgacatccttttcatcgccc

SEQ ID NO: 179639 - DNA, 517 bp, Zea Mays
taaagagctcctgccgcaactggctggtgaaaatgcgatctctgtcggagacaatggaagatggcatcccatgtaagcgatagacatgcagcatgaagagcttggccacactagctgccgagaacggatggcgaagaggaataaagtgaccatgttttgtgaagaaatccaccacgaccagcacgcgattgaaggaggataaccttcaacgaaatccattgatacaacctgccacgctgagctgggtaccgataatggctggagcaacccaggaagacgggagcgatccggtttggcttgctgacagacggtacaggcacgaacaaactgaagcaccgcagatttcatgccctgccaggcgaacaatttcttcatcctcatgtaagtcaccgaaaatcaacagagtccgccacacgacagagctgcacatgaagctcatgagaaattttacgggacaatgcgtctgccacacgattctacgaaccacgcttatacaccacacggtagttgaggccca

SEQ ID NO: 179640 - DNA, 404 bp, Zea Mays
gctggttcacaggctcgccttcatatttacagagcgtgtaggatggatcatagggcgtggcgactggtttacattccatatgtccaaagtgagtgaggaccttttccacataatgggattgtgacaaagtaatctcatcctcaccctttatcagcttgatgttcaatattacaccagcttcacccaagtccttcatatcaaagttcttggagaggaatacttttgtctccatgattgcttccaaatcggtcccaaatatcaatatgtcatcatcgtataaacacaagatgacacatttgcccccagagaagcgataatacacacacttgtcggcttcgtttacacaaaacccgcagtggtcagagtgttattaaacttctcatgccattgtttgggagcttgct

SEQ ID NO: 179641 - DNA, 283 bp, Zea Mays
gttaatactagtgaaatatattagaccttactccaaatttacttaagcctaaattggtgacctagatcaactcggccatacccaacaacttgacctacataacagatctatcttagcctcttgtcccaaacccggatggagacaccaaagagcaagactggaaaaggacaaggtcaatcttgtgaaggaaggatagagaagtcaaacttgatcatcaaaggaaattactacccaacaaaagttctttctcactataaacttttaccctaggctattattaccc

SEQ ID NO: 179642 - DNA, 398 bp, Zea Mays
ccaacccgaaccggcccacgtccaggcgaaacgcgcccgcgttggcggctttacatagaggacctcggctttttaaataactaattaagaatccttgcgcactattcatctgtgtctctgacgtttgcactaaggacctctgatttctgtttcttctccaaaacaaaccctggcaacggcacgcttgtcgtcggccatctcttcgctaagaccgaccatgatcggcgtcgactgcctaaaataaatgctaggctagcgtccctgacccgaggcgaacctaaaccatgcctcaattgaaccaatcctgccctggattctcccacccacggcgacggcgaacaccgtatacaaatccaagtgttccggtcggttgagcgtggtctagctcaatgggttga

SEQ ID NO: 179643 - DNA, 1570 bp, Zea Mays
cagcacaggaaacgcgcgcccgcgcccgcgcgctggcggttttgcaaaaagggcctcagggttctgattaacaggaacaagttcttctactattcctatgtgtcgctgacggtttacagaaagccccttcgacttctatttcttcgcacggccaagtccccgacggcgtcgcgcacggcagagctccggcgagcatctgtactggccgattgaggcgatgaccggcgctcccgagcgacagacaccaaatcggacctatcctaagcttttcccctaacttaattgcactaatgaccaactaaggagctctggccacggtgaccgagagcatagcggctagatcgtcgtgttcccagcgattggtggtctcttaatttgaattgatggctcggcaagcatcacagagcaaccagagtgctcaaacaaaggagagtgagggatgaactgacctggaaagggctggccgcggtgatgggtggtttacggtggcggagagtcaatttgggggaagttggaaattgggactcactggtggacgatggctaacgattcttcgtagctgggtgggtaatgacctaacgcaaccggcccggccttcaatttataggaggagcgagcggtggtcgcgaatttggacgagacacacggcggctggaggagaggaagctttactggcgcaagggattcgtggcccctaccgtggcggtcattccggcgatcaacggagaggctagaggaagtcatggcgatgcggtggcgcggttgagacacgcggtggacaacagcgatggcacgacgacggtgagcagctttacccgcgggcggtgagccaggggaggagtaccgcggctgaccggggtggcttccagcttgacggcggcgaagatctttctaccccgaagcgttattcggttaccagcgagcgtgaatcctaacggcggcggcgcgaatcttcgcgcagggggggtcaccggcggcgagcaagctacgctggtattctgatccacttggtctactgtaccatggcgagacctcatcagagcacctgatagatcatatttaggtcacattttctctaaaatttgcatgtgaacttcatcaaacctctgtacaaaagttgtagagctatagttaatcttcaactttgccacaatgcttaccatcaaatagtcactgaatcccattcaaaatcgagctcaaagttcatcccatcacactattactgaaaattcagcccagggattgactgacagcccgactttgagcttaattatctctaaattcttcttaacaactaggcttacattcttaagcaaagttgttctcctatgattgggctataattttgatgtggtgacctagggcaaaaatcccataatttgaaagttacaagggcttcaagttgagtcaatcacactgaaatgcagacttaaccaaaaagggtcaagtatggctcttttgcacttaagtccaaatctcaagttttggattgcaaatccaccttcttgtgaaccatatgacttaggataccctattaacctggtttttgcactttagcccaaaagtggac

SEQ ID NO: 179644 - DNA, 1157 bp, Zea Mays
agatatccatatatagttttgtactgcatctgtgtaatctccttcgtgtaatccgaggaagggtggccagttctacccacaagtttcattgaatcaaaatctcaattctattccaatggattgtttggttcgttttgctcttgtgttcttcccttccgtcttcatgtggatttgtggagaacctttgagttcttgtggcatgggtgctattggggattgatttgttgggtgataaactctatggatcactgcgtacacccatgtggtgcagttttgggccatgatccaagttgaccccgttttgagtccgtttgggaaaacccagcaaaaccccatctctcgggatttcgcatctgcgcacgattttttgagttcacatttatactttgagaatagacatctttatctctacacatattgtctgcaaaatttgaggtgattctaccttggttttggtgcctagtactgccgcaccccagcactgccggcctgatgtgcggcactactacgccctcttccttatgattttgactctaagattttacaggaagttgggttggttcttatgtagtagtttggtgaattctatcggcaatggactagatattaccatgttacacagtttcgttcatctcttggggttcgtgtgaagattgtgatcgcaatcacggtgctgttcttgaaagagaattttagtgtctcccattcatccccctcaggttgcctcatcggtccttcaattggtataggagccaattaaggatttccataccctattcggtctaaaatccacaaaggcaacatggaataaggtgtcggaaaacctccgttctttgatgggatcaactacccatactagaagattcgcatgtcggcatatcttcagagtattggatatcacacctgggagatctgtctcgatgctaagtttgattctgtgagtgatcgaatcacttcgatttagatggagttccatgattcgatcaacaaagcttgaaacactttgttctcatgtctctcgcttgctgagtttgagcaagttggacatttggttacgactcaccagatctagtctaccctcgagagattccatgaggggaacgatcatgtaaagacctaactgtttgagacgtaccgacaaaagtacaagaactttg

SEQ ID NO: 179645 - DNA, 477 bp, Zea Mays
gccccacggccagcaacaatcgaaggcaggtccgccatggccttcgtcaaagaaaccgaagtgggtgcccgcgccgctgctcgctgtcaaacacatgctcgcaatgcccatctctgacctccattgcttgcgcctccagcttcgtcaagtcgcgcatggtcgaagtgctccacgggcccagtaacaaggcgtaatgtctggaggtcgccgcaagcctgctgttttttcatggtgggatctagattttggaggtagttgttgactgatttgctcaatccttagctaaaattatgatttttttatgatgagtgatctcgaagttagaggcctcgattgttttaatactacaaatatgtgccacagcttccgctaattatatttcttcgcctaagtcagagagataaagaaggaccaatagaaagcagccacgtggtgggagtatgcatgggaggatgtaaatgggaggagagaagccgc

SEQ ID NO: 179646 - DNA, 744 bp, Zea Mays
gctgaatcattggtctacaactttgctgcagagttttaggtgagttgccataaaaaatttagagaaaatttgccttgaatctactctgtcagaccgactgaatgcaattcgcgatggtacagtaaactaaaatggattaagctgccagctcagttcagttcaccgccgacgatcgtcgcgtgtagattcgtgccctcgcagccgtgattcgcgaccagatcgactggataacacttgaagtcgtgtaaagatcaccaccgtggataagtccggccagtaaaatattccggccgtcgtaccaagctcaccgcggtggaatccgataagcacgccggtgaccgccgccttccgtccttgcgccacgtgtataggcacttccactgcatcgccgtgacctgctctcgctccccgttgatcgccggagtgactgccacggcgtaggacacgaattcgttgcgccagtaccttttctcttctccggccgccagcacaccctggtgaaattggacgccaccgccgttagaggctataaattgccgccaccgttcgctccgttaggtaattacgcaaccagcgaagcaactcgcacctcgaatcatcccttagagctcacaaatttctcgtttcccccaattcggttttccgccaccataaaagcaacctcgccacggtccgcttaatccaggttcgatcttgccatttatgttcttgtctcagtacccatgcatgccctggacactcacc

SEQ ID NO: 179647 - DNA, 501 bp, Zea Mays
gccgattttgttttcaagaacattcagtcactaaaagacagagtgtatccagcttatctgtatcgaggccttgctgattcaacccgggttaccaacagaaagatttctgctgtggatttggtgagccggcttgagatgatactcagaggcaaggtgtctaatgtcggtgctcctgttgcatactcagcctggaatctgcctcctttcaaggccttcatcagttttgtgtcaaatcctcctactggtgatagcggtttgggtcttagagtgcgaccttctcccgaagaggttgaggctttggttgcttcacttggcgaaatccccgacgacgagaaacaggttcatttcgaggtgcctttgaatccgagtgacgcagaaataagtgccatgctagacatgttggctgaagattcctctgatgcagcccctgctaaaacactggttgtagcacccatccccgagtctggcaaagctttggatactcagaggtctgatagtatt

SEQ ID NO: 179648 - DNA, 344 bp, Zea Mays
gaggctctatatggcagaaagtgcaggactcctctatattgggatcagactggagaaagacagttctttgggcctgagcttattcaagaggcagaagaacaagtgcgaatgataagagagaatttgagaattgcataatcaagacagaagagctatgctgatacctggagaagactactggagtttaaggagggtgatcacgtgtatctgaaggtgtcaccactccagggtatgagaagatttaaagttaaaggaaagttgtcttctcgcttcattggacccttcttgatcttaaagcgagtgggagaagttgcatatcaactagaactacccgatcacctggc

SEQ ID NO: 179649 - DNA, 607 bp, Zea Mays
tgaccataaatcctacgtccttagtgatttctacactaatctcttcggtaattcctctcccaccacttggaattttgacctgagtgatctctatccggagggatctgctactcatctctcctctcttgatgctcccttcaccaatgacgaaattgatatggagttgatgaagaaagtgttgttcattttggggttttccccttattacaaaaaaggggggcaagggggacaaccgggctgggccgctacaaggcctcacggtcgagcaaccctggttggctccaccctaggactgatgtgccgtatcccagagaggttgagaggccaggggatagagcggggttgggcggtggtggcggcactgaacggcctctctgccttcagcggcatgctcggccgaagcatgcgccctccccttgcacgaccacctcctgctcgactccttataatgggagctcgatctcctggcttggtaatattccttatcctctctccctgttcactgctccagttgagaactggatcgattgactcgatccctggccttcctgtggagattcttgctagttataattggaagagagcggtagctggcgctgcacacgtg

SEQ ID NO: 179650 - DNA, 909 bp, Zea Mays
agatctctagtgccgtgagctcgacgccggtgatctgtcgccacaattcgcgcctgccagggagattcgtgccgcgggaagagtagataacgtcggggcggggtgaaaatatctagtgtggggtgaatccagtcactggccggaccggccgtcgtatcccgcctcggtcagtcacactggcatcacaggagctcaccattctccggccgtgccacatgcttaggaacattaccacatcacagtgaagcatagtagggagtccgcctatcgtcggaggctttgccacggtgaaagccacgatagcactcgcgccagtgacttcccctctccggccgccagcgcgccttcttcaaattggacgccaccgccgataggttctataaattgctgcccagtgagctccgctaggttattacacacctagtgaaccagccctcacctccaatcgttcaccatagctcctcaatttggaattccccccaaatcaggttttccgcgccgtcgagtctctcaccgtggccagccctcctcaggttggtccatgcctctctgttggatgttctagcatctcttaggtctcttgtttcttgtaggcacaattgattgaactagaccatgctgaattgcccagaacaccatagtttctcctcggatcttgtcgtcgtcgtgggtagacgaactccacgccggattcgtgcaattgatggaggattagggtcgcctggggtaggatttgatgttagccaagtttgggcaccagccattgcgtgttccggccagtacaggttcaccagagggcgtgctcaccagcgttcatcatcggggacctgtcgttgcgaagaaatagaacttcgagggcctaactgtgaatgtcagtaagacagggaacaatagccgaggattcttcac

SEQ ID NO: 179651 - DNA, 590 bp, Zea Mays
ggaaaaggagagagagggcgaacctggaggcggctagccacggcgcgacgtctcacggtggcgcagacaatagatttggggtaagaacaaaattctccggctatggtggctaatcgagggtgagggttggtgctctggcttcgtaacaatctagcggaacaggttgaggcatcaatttatagtggacgaccgtgagaagggtcaatttgaatggagaagcgctcgcggtgagaagggggaagagtcaccggagttcgctaacatggcgttcactggttgacggcctacggtggtcactgccaagtcttcatggcatgcgacgagtcgtgagatgacttaaggcgtgtcacaaccgagtgagatggcggcacaatggcgacggtcgcgcagccatgtcgctggtgcaagtgggtacggcgacagggcaaaacagtgccctaagttcatcctcggtgaagatctttttactgccgatcgtgatccacaccacagagggcacgaagcgcgggcgtcaccagcggcgagatacactttatctgcaatcttgttcagtaactgtaccatcgcgaactcccttcagggcgcctaac

SEQ ID NO: 179652 - DNA, 572 bp, Zea Mays
cggttttcatttcttcacaggggaaagtccacgacggcggtgggcgcagggaggctccggcgagcacctgcaccggccgatttacctaaggactgatgccctacttcggtcgaaaccgaattcacgccccaaccattgattcccctaagttaattgcacaaatcgtgaactactgtggtctagccacggtgagcgcgcggatgaaccaaggatccatgcgttcccgacggtcagtgaacccttagtccaattgggcgggtcaacaagcatcgtagacatgtgagaatgcttaaacgagggagagggagggttggactgaccggaaaaaggttggcgacggtgaagcacgtttcacggttgcggagaatggatttggggggaattagaaattcgtgcgtgctggtggacgatcgagggtgggagcgggtgctacagcttcacaactacatggcgcagctacgggcgaggtcaatttatagtgctagcgagcggtggccgcgaatttcgagcaagacgcgcggcggccggagaggaagaagaacactggcgcagcggcttggtgtctactgccg

SEQ ID NO: 179653 - DNA, 1026 bp, Zea Mays
gcgtcgggggcagccaaaggaggcgcggtggcgcgccgtgccgccagttcacccaggcgctccagagcctctggaggcacagtcccccgatccctcctcctgcgcctcccgctgccggcgctgccaccagcggcgaggccgaaccctcgcggcagccgccggtactcgagaacgctgccttcgaggagtactataaggtgtggttcccatttcgatttcgcatagcgttttccctatctatcgcattggctggcgcgatttggagtgaattcaggctgcagtctctggtgacagcttgtttgttgagattggaactttttcgttgctgcaataatgacaaatgtgttcatatatgaacaatctttctgtatcattggtctgcggtttaactggttaccactttgtactcttgtgctaggtgagtttagtcttcctatttggagttatagtgtcgcgtacaaaatggcatggtttcagggtcctgttcttctggatgtgtgtcagtgtgtgtgatcgcacttgcatatttgtttgggcaggttcagcaaattgtccgcgaggaggagtgggatgccttcatgagtgttctacggaaaccattaccagcgacttttagaatcaatgcctggtaatgctggttactctgaagtgaaatcatgaattttcactgaggtcttaatttacttgtcggattccttggcttgagtaactccacatggaccactgtcgtcaaagatattcatgttctcttaaacgtgatgcccatcccttcttctcgtcctgcgcccggagccttttgttatcgaaggctggctgctccatgacttgtatatctggttaatctgccattcaagtagtcatgtgcaaatgtggtattagatagtttatttgcagcctgcgctttatggtactccaataagggacctgtacttctgaactatcttaggaatgggtgattgtcacttattataagactcatgcagtttcagggtaacttcaagtgtgccattaccaaacctttcagtg

SEQ ID NO: 179654 - DNA, 519 bp, Zea Mays
ccggcgctgtgattcgtgcccaatggcgcgtggataacgactcagggtaaaaagatctcgtgccagggatgaagtcggggcactgtggccgccctgtcgtcgtgcccacttgcgccgcgacatggccacgcggccgtcgcggtcatgatcgccgttaaccacgtcgcagtaggtcgttgaagatagcccctctgtcgccggggacttagcccagtgaatgcctcgttaagcggcctctggtgactcctcccctttcttatcgccagctcttctccgccaaaattcgacgtactcacgatcgctctctataaattgaacgctcagcatgctctgttatcttgttacgtgcccggtgcatcgctcctcgcctccaattgtccaccgtagctcctcaattcatgatttcccccaattcggttttccgcgccgccgtgagtcaccgcgttgtggaccgttgtctccaggtctgctctcgtcctcctcacccttgtttcagaacccatgcacgctaggaatgct

SEQ ID NO: 179655 - DNA, 708 bp, Zea Mays
cattagtttagtgattacattgtatccatttaagccaaattctttaatcattttatttttcatagcaagttgttcatcattatcattagtaaaatcatcattaaataaggttaccttatctctttttgccatgaggcaagtgggagtgtaggagtcgtcggagaggttggtgaagagttgcgaggtcgaggtggattgaatggcgatattagccacctcttcctcttcctccgagcttgaactctcttcgtcggagttccattcttcacctatgtgagcttggccataccttttcttcttgaagtatcccttgctcttgtctcccttcttcaacttgtcccttttgtaatccttcttggcatcttgttcctttttgtttggacaatccgctatgaagtgaccggtctggccacattcatagcatgccctcttctttccttttctctgatacatgtcatttttccttacaaacttcttgaaggtcttgatgaacatagaagtgtcctcatcacttgaactctcttcatcccttgatgtttcaaccactttctttgacttgtggtctctgcttttcttggaagaatcttgttcatttgaaaacaaggcatgtgagtctcttgttttgatcggggcttcttcggactcatgttgttgaattttggcaaatagttgatgaggagtcatctcctcataatcatcacgatctct

SEQ ID NO: 179656 - DNA, 979 bp, Zea Mays
ggggatgctgctagtggtcgccaccagcgatttagatggatctaggagggggctaggagaggggtgagcagcggtggcgagcaggtcagggtctcagggaggaaggtgaatctagtgccacatctaaggagcgaggatagttgtgggtgggagggagggggagggggcactgggtgccgcgaacaacgcggcggctaactcggaggagaagaacgcgagcagggggacggtggctgtcgcagtggtgggtgtgcccgcgagtggggtgactgtcttggggggaggggaaggcgcgggcgtgcagggcgcgagctcggtggcgagagtggtggcgctcggaggcatgaatggcggagcttccctcaagcacggagatcttgcactcgcattccctcgacacagagatacctgaagcacggagatctcgcacggataggtcgaaaggatggtgagctcgtaccttctacatgagcacctggagcagcgattggggttggcgagaggccgatggcgctggagacggatcttagcgtaggcaaaattctgatctccttggccttgatgacggcgccatcgccgggcttcttgagggggggtgggggttgtctcggcgagcgcggatctggggggtggcgttgggcaagggcatggctccgatggaaggggattgcgggctcgggggcgaggatggcgggtgcggccttcgaagctcaacgaggcgggcatgccttccatcattcgagcgcggacgtgggggcgaggattgcgatgcgcagccgcgaggttggcgaggatgacagatgtggggaggagtatggaaggggcaggctaggatggaagggagccgggggaggaggacggtggtcggtttgccggcggggatcacggtcggggacgagggaagggggtcacggaggcaggggcgggcgtggagggcagaaccgtgcaccatgtggacgtctacactactgtcttatag

SEQ ID NO: 179657 - DNA, 512 bp, Zea Mays
gcgaagattggcttgaggaagtaagtccattgtgggtggattacaagtcaaagcaactcaggtttacctatcaaggtactagagtgtccttgcaaggggttcaagataacatcacgagctgtcagagtatctcaggacataagttccagggattacttaatcatggagctgtctatcattgcatacagttgcttctgataaatcaggacaatgatttgcctacacaaggtcctgcctctcgagtatgtgagattcagaatattgagcaacagccaatacctctcagaattcagcagctcattgattcttttgctcacctcttcagttcacccacaggacttccaccacatcgcttagctgatcatcgaattcctctaatgcctggtgctcaaccggtgaaagtgagatcttaccgatactctcctgctcaaaaatctgaaatcgagaagcaattgaaggaaatgttgactcaagggataattcgtccgagcactagcccctttgcttctccg

SEQ ID NO: 179658 - DNA, 955 bp, Zea Mays
aaagaagagacacagtgagggaggagcgaggcatgggtgacacggcggcggaaatgaccgagccacggtgaccgccggtgaattatctccggctaggctcgggctaggtctgtgggatcgcgacacgtccgacgccatctccccgcggtcgattcttaccccaaatcactcaaatacatctgattctatagtgcccctaatctttgtcctcgctttttcagatatttcggtgtcctgatcttcagcacttttctgaaccgaccccctttcaccctccttttcttttgatttgtgttaagaacaaggtgatctccattaataaagattgtttactgaacatcagtcttcaaacttactataggatccttggtacaaaactgaatggaattaaagatatggcgcttccaattcggccccattccactgtgaccattcatgttctagaattcagttttagtatctcaacacagttctgacagagcaactttgggctattgtttcattaatttttgtacaacaaccagagaagaagactgtaccaaagttactcccctataatccaactttaatcttgctataaaggtcttagccaattacccattaaatcgagctccacctgatcctgaagttggccctgtaccactggtttttctgaaccatacagattctcagcctgacagccaaacttcagacccatttaactcctaattttgtacaataccaaggcttaagtacttaataaaatttgtactcctatagtagctctacaagttttatgtgttgacccttaacaaaaacttcaagaatccaaagacgtagagctccaaagccagcctcattcaattggtttttacacttaggcatatgaggtacatggggtgtcctttttgcaaataggtccaaactttatcatttggcttacaaatcctcaaatgtgtgaaccttatgctttggg

SEQ ID NO: 179659 - DNA, 701 bp, Zea Mays
ctttacccacccacgtggttaggaacccaatagctagggctgcatctttgagtaggttcaaactagtccaaaactggatattttcaattgggagagacctctagatgcttagccatgttctccatccatatcattagctatatatacaagtgcagccacaacagggatgaaaatatcttcttcagatattcttggagcacactaaactgctattgcttgactgagttcacaacttcactccttcatttctcccagtttcaaaccacaacagggaatcaaccttaatgaactttgttcaccaactaaccctctaaaaatttgccattggaaccttagtcttgtaccccttggatcagacacaaaacaactgcaaaatccaaggaaaaatactaaaccaagccaacagtgaactgaatcagcacaacactgatcccttgcaaacctccatgttcaaaccttggtttctcacaattccatatgtcaacaggtcaatcttccttaaccaaaattattcttcacttatagcccttcctacttggtataatactccatggctgaaaatgctcagaacaagagttgtggtgcactaaagttgagcaacaacactgaaaatccaatttcaaagtctgaaatagcatatcaccaagtctgacagaacatgtttgggaccattttactcccttctttgtgtagtagcagac

SEQ ID NO: 179660 - DNA, 501 bp, Zea Mays
accggcaatgacttcacgactttccaaggcagctacacgggcttgagctgtggagagatccacatggagcttacggttgtgcttctctgcatcttctgctcgggcaatcatctgacggtggtgccgagccaaaaaatcatactgggcatccagggtgagcaggtatgtagtgaggtacacgactgtggggtcatcctcaagcagctgctgaccttacaatgcacgcatcctggccatccaaacgggacggtttctctgaaagggtggaaagaatctgagtggggtgtcagccacttcttcttcataaatctaacacagggccctcaatgccttgcgggcgacgacttggcaagtgtctctgaatctgtgcccagcagcagtgacactccattccacatggtgcggactggatccaatgtatacagtcacgacacaattctctgtgccatgctcaacgaattcatgaccatcatactctggctggctccttattccgaggcg

SEQ ID NO: 179661 - DNA, 1051 bp, Zea Mays
cagggaggtcttccacctggtccttgcattatccacggcgctggcttcaaacagtatggcgaaaacttcgcccggagctgtcctccaccgagttcatcgcaagtccgcaacagaccacctccaatcccgcgctgatctcggagtcgggccgaccattggcgtaccatccctggctataaaaccatgccgtgaaccctgttttccccaccatcaggaacggaatagagagaggacggagtgtcgccgcgcttggatctagtctccaccgccggttcggcctcgggaactcgaccagggtggagcgcggtgcgcatggaagatgttgtgggcacccttcaagcatatggtgctgggggtaagtcgcaatttctcgtcggtgtaccacaccgccccaaaatccacacttcgccgcggccaaggcttatgactggatgattcatagtctgccacccaaccgctagttcacaaggttgcccgctccctatttccctaatcggtttcgagtttggagactttatgctcgggattgacattgtaggtcatggcgccgccgcactggcgctgtgcgccgccgtgttgacagccagggaaagaagatggtgctgccaccatcgatctgtttgtggacggctagatctgtgagtcaggtaccgcttcggccgggcgcgtttcggggcgttgatatcccatcggacgatatgcgtgtatcacacgtctcattaatcgtgcgccgtgggatctggatcctgtggccgtaaacgcgtaccggttcacccaaaggagtagatctaatcggggccatagattgatgatcgggtagatgggattcctcgatacccccttcagcccctgtgttttaccaaagagaccctgtctttttcccgattcaacccgcggtccatacaagttcaaaaacccattcagatcagtcctggcatttacagagcgcaccccgatctttcagtaattagtagccgcagcccaagaattaataaaataggtaaagttaataaagaaaattggtttttagtatccaaataaatctaaaact

SEQ ID NO: 179662 - DNA, 528 bp, Zea Mays
aggttaccttatctccttttgccatgaggcaagttgcggtgtaggagtcgtcttgtaggttggtgaagagttgcgagcttgacgtagattgaatggccacgtttggcaccacttcctcttcctcggagctagaactctcttcatcggagttccattcttcaccaatatgggcttgaccatatttcttcttcttaaagtatcccttggtattgcctccctttttgaacttgtccttcttgtattccttcttggcttcttgttccttcttgttaggacaatccgctataaaatgaccggtttggccacattcatagcatgccctcttctttcctttcctttggaacttgtcattttttcttacaaatttcttgaatgttttgatgaacatagctgtgtcttcatcacttgatgtctcgaccactttctttgctttgtggtctttgttcttcttgggagtgtcttgttcattagtgatcaaggcatgagagtctcttgtcttgataggggcttcttcggactcgtgttgtt

SEQ ID NO: 179663 - DNA, 417 bp, Zea Mays
ttcaggggtggctttcggaggctgctgatgcaactggtggcactgggctgcccttggcctgtggcggtgacagacaggggaatcaaggaatctaacccagatctcggcgcgatggatcgaaaggaagcttctgtccaaaggcatggcttgtgctgggacgccgagaccagtcaccaccagcccacgaccacacgcagattcatacatgctccttcattcttgctggcgatttacgtttttgaactaattcatgtgaaactcccgttgtggtcgcatgcatacgcacgcagcgtagtattgttattgtctaaaagaactctgaacctcttacctgcccgggggcatattcacgctgcgatagcagtagcagcaggcgcatattcacgctgtacttgctgttggcggcatgacctgaac

SEQ ID NO: 179664 - DNA, 542 bp, Zea Mays
cgcttctcgatccatggggtcgtcgtccctgggtcggggacaatacaaaggaatggctacaaatgtcgagactttgttaagggtagaattgtcgtagtcgcttgatattccacacgttggtgagcgtcctgtctttctcgtcctttagcttgtaggtacccgaccaaagtacctctccaattataaacaacccctcccggggcgaagacagcttgtactgatctttgttgctttgtacccgttgaagtacaaggtaactctcttagcttacctgtaagggaccctacgttccaattgcctacatggattatagtctgctcaactagcttccttacccctcgcacctattgagacaaatacgaagacccttacacatttgtcactacacctgatgtagcgcgccactaaggaagcgacgactcgatccttgcccacttgacgccgcatctagatcacgacacgacacacgacccttgcccatttaaaaccatacccaagttccgatatggcatgtcgctgagagggttacaccccaacggttt

SEQ ID NO: 179665 - DNA, 895 bp, Zea Mays
ctcgagaggtgcagagccttaccagagtggtccggccacggagcgcggagacagtgctcgccggtgacagagaaaggggaaaatggcgtcgcgacggctctgggtggaattgggaggtgggattggggctacacggccgtaaggaactatagtttcaccatgcacactcaatttgggaagaggtggcagaggcagtgcgaattttgagctgcaatcaaactcactggtggagatgtgaacacctcgccatggaccatggtgctatttatagccatagcggtccggctaatgatcagcgaccgtggaaggctttgttcacgcatggcaaccacgtatagaagaggcactgtaagggaaatcgaggcatgggtgacaccacagcggaaatgaccgagccacggcgaccgccgatgggatatctccggccacgcacgactgagctcgcgggatggtgccacgttcaaagtttacatctccgcgatcaaatccccaccgattcatccgagctcattcgattcaacagtgcacagatctttgtttcagatatttcagtgcactggatcttcaaagcttgtctgaaccaacccccttccatccactcaatctcttgattcttgttaaggacagagcaaacttcattaataaagtttgttcacctatcaaccgtcttcaaacttactataggatatttgggtcataatcgagtgaatccaaagatatggcgcgtccaaattggctccattccactgtgaccatttctgctttcaaattcagtttcagttattcaacaccattctgacatagtaactttgagctgtcgtttctttaatttttatataacaactaaagaggatgtctgtatcaaagttattctcctataatagctctaggcttt

SEQ ID NO: 179666 - DNA, 510 bp, Zea Mays
ggaaatatggattcaagtagtttgtttaacatcgaggatcattgagttattggtactgaactactgattaagatatcagtttcttcatgtgtcacttcctctagcaagcgtgagcgaataaatttcccctcgagtacggaatattaaaaaagtagagtatggataatttgaacttaaggtctctttggcatgtctctttagacggctccagctcgagcttatagtgaagcctagcaaatggtcacaaaaatgacttcatcgatagtcctctaagagctggagtcgttcttttgttgggaacaagagcacaaaaaacgtgccttctagcagctcctattttttctcatacatcattcaaaaaacataggggaaaatattttgccaaacgaattgcaaaatagctctggctccttcagagaagccaaagagccagagaacccaaagccgaaactatttttagaggaggcggagccctagcaaagtcgtgtttgtttatgttacataaagaag

SEQ ID NO: 179667 - DNA, 921 bp, Zea Mays
gcggaatgcacccacctaatccttagaacaaggggttgcctagggttttcttgtggagatgcaagaacacatagatacataaagtggttcaggccgccagagcgtaataccctacatccattgtgagttggattgctgagagcgtggatggagatgagtctgagtctcggagagcttgccccttgtatcatatgtgacatcccttttatagtccaagggtgtcttgttacaagggttctgagtagccccgacaggtaggccctaacaaactagtatcaaatatatatactacatgaagtagtaaaggctacgacggaaagagatcttctcatcgcccgtcgttctgattttctgaccaggcgtgtcttccaccccttttgcgagcttgtgcctgctgcaaagtacacctggtatgttgacgtatgtaggggtcagtcctactgacgtgtggtggatttaatgcggtggacgtgatagtgctgcccgagccaacgactgctgatgatggtgccacccatgcgcatggcacaaagacacaactgcctgcctcagttaccgatgcgggcggtcattcgtgcatgcaatgtctgacaaaagcctgcacatgccctatgtgaggtagggcacgcctccgccgcttgcattaaatgcgggcgatcaacttacttctagtcgaaggctcctatcacgtgcctacgtgccacgtggcggtatcagaccccagcctaagcgaagagagggaaccaagggtgcctggtggcttcaagacttgggtcccacctgttaggggtccagatgtcagatggagaggtctaggacccttgtgcgtaggtctgaacgataggcgtggaggcccgggacccatccatgtgggtccagactacatatgcgggggtccgagacccgcccatgggagtccag

SEQ ID NO: 179668 - DNA, 778 bp, Zea Mays
gcccgcctggccaccgctgcgaagaccggccgcaggaacggcgccggcgcctcggccgccgacaggtcccgcgccaggcggtgcagggagcgcaggacctccccgtcgggcgccgacgaggagtagggggatgacggccacgcgtcgctcatcattggtgctgctgtatgtgccttgagtatgtaacgatggaatccgattctgattacaatctcaatccgattctgattacaatctcaatccgaagagaaggcggtgaagaaacacggatggatggacaagtgagacgagttggagatgggatgggacgatgagatgggagaagacacggagcggaaggcggggaggggtagcatatatacggggtggccggcgtgggtggcttggcgcgttgagttgtgcgcgagctggggttgaagaggctggaaatcggacggaatcctcctgactgttgtggccccagatgtgatggatacccatgtcatggcatgtgcatttcctttctttattgctgtcgttctccaactcaacactagtaggagtatttacttttttcccaccaaaagaaaaaaaacactatctttgaggcgaaacggtttgaagccgagatgttgtcgacagcctgacgcgctgggccataacagaaaaaaagggggcaaaacgctggccgctcgatctcggtgcacggccggccggatttggccgggggtacttggcctcgtgtagtcgtgtgtgactcggcttgggtctggcagttgagggagaggggttggtaaag

SEQ ID NO: 179669 - DNA, 520 bp, Zea Mays
acggcttggtggcttggtggcttggtgcttgactaccctacggagctcatggcgtgctcaatttatagagtccgtgagcggtgttgcttaatttggacgaattgcgctggcggccgagagaggaatgagtcacggcggcgatctaccgtggcaaccgcatagcgactgaactacgacggtcattggatggtcacttcgactcatactgacgcgataaacctcctaaggcgtggcgtccacccggtgaacggcgaacatggcgatgattgctgctcggccacgtcgtcggtgtgcactgatgaaccatcaagcacatagtatattccagcccatccgcggcgagatctttcaccccgtgatcgttatccgcgtttaattcagcgtgaatcacgacgatagcacgaatccgcgcgtgtggtcaccgtcggcgaggtctctgagctggcgatccaatccggttactgtaccatcgtgaagcttcatcagtcagtctgacagaccatgtttggggtgaatttct

SEQ ID NO: 179670 - DNA, 544 bp, Zea Mays
gatcgaaggatgagtgaagagaacaacggtgcaagcaggctatttatagaggccgggggtgaccatccacttcctaccacgcttgtcgaacagtcacaagtattcaataagcaattcaagccgcctaaaaatgagtcaagcaacaggcgccgcttcgcgtaacacgacatcgtttggaccaaggtcaactgcttaggcaatatgattacaccccacggtcacatcaagttactactccaggacagcgggctaaacgctctgcgtaccaagacaccccttgggcacacccattgggtgtgttgccaagaattttcaaaagattttctgaagaagtcatatccacacagtatacgcaatgaatgtactgagacaaaaggaaaagatcagctgagatgggaggaagtccaaatatagctactgaaccgcaagtctaatcagcagaggcattgaagcacagagcggggtgatgtccagccgagagccatctgccagaagtccaatctgtcaccgatcaaataaatttcagacctaacaaggcatggac

SEQ ID NO: 179671 - DNA, 550 bp, Zea Mays
cgggaatctttcgccggagttggaggtccgccacacactatgacaggatctctttgcggcgcgctgtggggtacgtgctcgtccattgcatttatcatgtttagggcctcgtgcggagtgattcgggtctgagctgtgcattcgggtagagctttggggcgttgcggccatggcgccgccgcgcctggcgtctgcgccaccgcgtgggatcggtgagagaggggagttaggtcgtgccgtcggattcggtgcgaacagccggatttgtaccggtcgagtccccctggacgattcgatcgggaccgttagatcggatcggtcagttctgggtgactcgagctacatttaatctagaccgtagattgttgatccaaagattcctatagcgtaccggttcaatcgcgtgcggatgttatcctggtcgtccaaagtagatcggacggttgtgagcgccccgtaccccttcgtggtgcacttttgcataaagagcccctctggaattacagattagaacccgcggtccactagactgttccctgtgccttagtaa

SEQ ID NO: 179672 - DNA, 661 bp, Zea Mays
acaaacctaccccacttaaaggaatctcgccctcgagattcagactgggcttgagaaaaggtaagggtattccctcctcaaggagtcctcacactcccaggtagcttcctcttttccttctctgctccactgaactttacagagtctcacttctgagttgtgggtctttcggactgccgagtcaagaatctttactggcttttctcgatactgaagatccttctgaatctggattgtctcttcttcgatgtgattttctagtacttgcaagcatttgcggagctgagacacgtgaaacacattgtggatatctaacatggattctggcaattcaaggcagtatgttgcgggtcctactctgccaatgataggataggggccaacgaaccgcggagctagcttccctttcacttgaaacctcttgactctacgcatcggggagaccttgaggtagacagaatctccttcctcaaatgtgagttctcttcgcctgttgtccgcataactcttctaccgactctgagcttcaagtaatcttttgcggatcagggaaaccttctcttctgcctctttaacgaaggcaggtccttctagtgtcttttcccctacgttggaccacattagaggggtctggcacttccatccatacaatgcttcgaac

SEQ ID NO: 179673 - DNA, 915 bp, Zea Mays
gcgagcttctcgcttttgtcgaacacctttttcctgagtgcatcgagtatcatcccgttggctctttccacttgcccattagctcttgggtgtgccactgatgcatacttgatctggatgctcctctgctcgcagaagtcaaagaattccgagctggtgaaattagatcccaggtcggtaatgatgttgttaggtattccaaacataaacattatttcctgaatgaactccactgcctttgctgaggtcaaagaggcgataggcttgtattctatccactttgtgaatttatcgatggcaactagtatgtgagtatatcacccttgagctttcttgaagggcccgatcatgtccagcccccatcatacaaactgccaggtcacaggaatagtctgcagctgctatgctggtagatgctgctgttttgataagaattggcacgcctcgcacttctggagtaactcggatgcatcattcttcgctgtcggtcaatagaatccggatctgaaagcctttcccaccaaagtctgtgacgtcgcatgtacgccacactgcccggcatgaatctcatctaacaactgctttccagtagccgagtggacacacttcatgaggacctctcctgcacctcttctatacagcaggccccctataatggtatagtggaccgactgtcttgcaatgcgttccaccgcagctttgttatctgtttcttcctcgttttttatgtatctgatgattggctctctccagtcattgggatctgcctctgcctgactcagaacatggcattcttccatctgatctatggcaacactcggttgctgtatttcttggacgaaaaccctaggtggaacttgagcccgaccgaaccccagctttgacagtgcgtcagctgctgcattgcgatccctt

SEQ ID NO: 179674 - DNA, 593 bp, Zea Mays
ggcgcagttgtcagctcagattgctttgagagcgcaccggctcttggatcttcctacttttctgtcaaccgccggtgccgagtcagagggtcacctctcttatctgccaggtttgatttcacttttgacctctagtggcagatacattgaggagtgggtcagagtattctatgcaaccgtttggattgaccctcatcattagtcgttgaggttccgctttgagcgcgaggatgtcattctgcattccactcatatcagacaactctttggatttcctgagtcgacgaccaggctccatagcttgtgctactgcatttcggatcctccccatcgccctcacgacggagttgcaccagctatagctcacgtcgctgccctgttcagacctccattcacagatgggtcacgatgttctcctgcagacttccctccagcagcgaagttcctctatgagctgatgagacggaccttgctacccaggatgggtacagggaggccaccacacatattcagctatggctacttggtgccctgatttcacactcagagttcgacgtggttgattttctcatctgtgagatcgaggatacagt

SEQ ID NO: 179675 - DNA, 715 bp, Zea Mays
catagtgaggaagtcaatccgctgtaagctatcaaagtagtatcagaatttccgaacgtgtttcctaaggatttaccaggcatgccacctgagagaaaagttgaatttatcatagagcttatccctggcactgcccctatttcttagagagcctatagagtgtccgaaccagaattggtggaactcaagaagcagatagacgagttgttggagaagggttacatcagacccagcacctcgccttgggccgccccagtgttgtttgtggagaagaaagatggtacgaagaggacgtgcatagattaccgagctctgaatgaggtcactatcaagaacaagtagcccctacccagaattgaagatttgtcagatcagttgagaggagccagtgtgttatcaaagataaatctgaggtcagattatcatgagcttaggatccggccttcggacataccgaaaacaatattcatcaccaagtatgggctttatgagtacacagtcatgtcctttggtctgacgaatgcacccactttcttcatgtacttgatgaatagtgtgtccatggattacctcaacaagttcgtagtggtgttcatcgatgatattctcatatattcctagaatgagcgagagcatgaagaggatttgaggaaagtattgcagcggctacgagattgtcagttgtatgccaagcttagcaaatgtgaattctgga

SEQ ID NO: 179676 - DNA, 433 bp, Zea Mays
ggcaggtataacgggagccctgggcttcggatattaaaggaagcccaggtcggttccgaggtctggtcgctgggacaggcacgcctgtgtttaacgtggggctgagaggcggcatgcaggacagacggcgccgttacgcggttgtttgaatggcaaggcggtaaacataagggaatggcgcagaattaaagggaatagtttccacatgcaaacgttattactatgatatgtggacgcgtaatttatggatcttgcatgggaagtaatgcgcggaaggtaaaaaaatgtagcataagatggtgaaagctatggcataaaaccgaaacgacataatagttgcataaatagtatataccgtttggcgtaaaacgttgagtcattgtgcgtaaatattttattatggattttagtttgacattgacatcgccataat

SEQ ID NO: 179677 - DNA, 454 bp, Zea Mays
gggaagcacatcgtgaggggtcactggcgttcttttgaggatgaaaaactaaaagaattggttgcacaatatggcccgaagaattggagccacatctccaagaagcttgaaggcagatcaggtatgatttatcaacagttgcaaagctatttaaattctcccaaaagtttgtgtatttttagaaagtaattatgaacttcattctgatgaataggaaagagttgcaggctacggtggatcaaccagctagacccacatcttaatcatgacacattctccatggtggaagaggagcgattgctagtggcacatcatgcatatggaaccaagtggtcccttattgctcgcctctttcctggtcgcactgataacgctgtcaaaaaccactggcatgtcatgatggcacgtaaatctcgtgcaatccaaggcattaagatgatgtcctcttctaacc

SEQ ID NO: 179678 - DNA, 733 bp, Zea Mays
acggtgttacaacaatgttgtcgtggacgtaggtgaatctatttcggccaacttggtctttaaggatggacctagtgagacaggagaatgtggatctagctttcttgaagccttcgggctcatgaagtagtaggtgccgaagggtgtgatgaaattggcatttgccttgtcctctttactgagatatatttggtggtaactagaaaaatagtcgagcagggacatgacctcgtagcctaatgcagaattgacaattttgtcgatgcaaaggaggggaactcatctttagtgcaggctttgtttagattggtgaagtcgatacacatgtgccattcaccattcttatttttgaccataacaacattttcaagcctagtggggtagtcgattggttcaataaattttgtgtccaagagccgctaaacttcaaccttggttgcctccgtcttctcatctgacatcttgcggagtctctatttcttggggtgagcagaggcgttgatatgcagtctatgttcaatgatacttgggttgaccccaaccaggtcagatgatgaacgagcgaagacatctttattcttgcgcaggcagtctagcaagctggcatcgtcctacagagctaggccttcgccaataaatattgcatgattggggagagaagtattgagtggtactttcttggccccctcgtcacttcggatggggttttggtgcctattagtcttggctggcg

SEQ ID NO: 179679 - DNA, 779 bp, Zea Mays
agccacatttgaactcttttgactaagtctgaattttagtgtaatgggttcatctttggggccttgtaacttccaaacaaaagggattctgccctaggtcaccacatcaatattgtagacctatggaaggagaataactttgctatagaaatcatgccttgctaccatgaagaattctgagataaatgagcctgaagttggactgtcagactgcttgaaatcttaaatttagattaacaatggaatggcatggagttagggctcgaatttaagcatgatccagtaagaatttggctagggatgctataacaaagatgaagatggtttaatgatttacaactttgatgcagggccttggatgtgttgccatagaaaatttagagataatctaccctaaacatcatctgtcaggcactctgaagatgactctcatggtacagtagccgatcggattaggttcagtgaacctcaccgccgatgaccgtcgcgctgtgattcacgtcgatcgccgggattcgtgcgttgtggattgtggataactgtgggcaggtaaagatcttggcgcctggatcagcttgagttcggtcgcggctaagcccgccgtacccccttgctcatcggtggatcgagatgagacctcgccgccgttgatcgatcactaccgtgcgctgcgtgtccagacactttaccacgtcacgattagttacgttaggggatccggtgatcgccggaggaagcgccacggtgaaagccacccatcccgagcaccaggatccctg

SEQ ID NO: 179680 - DNA, 895 bp, Zea Mays
ccccactaagctgggccaatcggccaagaaactttgcttcattcagggcatggtatggacaacccactgcgggttgccaaacaaaggagttagtaagaaaccacaaaatgcttagtctgagctttgaagagttctacttggtgagtaaaacagttaatcttaactactgcttggctaagataagatgttagtcaaaagaattctgtagatgtgcaatctcaaaccaatctgcctttgcatcatttagaaaactgctttaaaattcgaaatattttgcttaccatagctcatagcacagaagaatattatagaacaaaccaaggcaagtgactttctgaaacacagttttcaagaacaggttcagattaaactagataacaggatgccagcgttggtaataagtgtactccccaagagaagtcgctgttttgttctatctcaatgaaaaataacgacacgaaaatgaactatggccgtctgcattaatatggatactcagcaaaaatggacatgagtaactcaaaatcgtcaattgcttgctatgttaggcacccaagtcaatgatttctattccatgctatcacaaagattatctataacaagttctgcgtgtgtttcaaagattaaatggtccaggaaaggtaagcacttgtatttagcggacagtactagtctgctgtgggattaacccattttttatggttctcgatgaccttttgcttcaagataatatctcatccaattaatagacaaaatcacaactaatctttgttacatgtaatcatcgaatcctatcttctgtaggagcaaacttaaacggtgacatatcaagcaacactatgagaattcatgtgtatctgataatggatcattcacttcacatgtagacatatat

SEQ ID NO: 179681 - DNA, 636 bp, Zea Mays
ccaccatggagaagaaaattcctgacttccttaaccaatgatccggaagtaattgggtcaacagggagagagtgaactttggagaactccccaagaataccacctccctacccgacggtgcctgaaatgacactgtcttccaaaaacaggatataactgtgcggtactgagctaactaatccatacccaagataacatcaaacgaccccaaggaaatcaccaagagattagctgaaaagacctcatccgcaagaatgatggaacaaccctggtagactaaacagctacaaatggagccattagcagaactaaccacgattggatgacccatcctctgcactgaaagaccagcacgcgacataaaatcctccaaagcaaacaaatagctagtgactgagtaaaaaagagcatgggcaacaaacgaatcaactgagaccgtacctgtcaccatgtctccctgctctctgccatccgcagagggtagcacataagctccagaaacacctgcggaagaggaagctcccggagtgaaattaacagaagaaccccacagagtcgaaggatgaggcagtcgtggagctccaaactgggatggtacaggagtggttggtgcaggagtaggcgcggccaagtact

SEQ ID NO: 179682 - DNA, 491 bp, Zea Mays
aggactgaagagccaactacaatgccgaagctaccctcagctgagctagctgggacgaagactgataagggtaaggctgaagagtcaaatattggagaaacaaaagtgttaggaattttaagcccttcatcagaggtaacagcgccgaaggcacaaaaaagttctaccgcaactcccaagaggagaaggatggcaaatgtactagatgtgctagaaacagtaaagactttgaactcgactccttcaaggaaaattgtcgaagcttcgaaagcgcaaactaaaattgaaatagagcaggccaaaattgaaactgcagtaattcaagctggtaccaaagctgggccttcagagcccgctgagaaaaagcctgcggaaattgaagaaaaggcaacagaagaaaaggccacggagcaaatttcgcctgaaaaggttgccactcctgctcccgaagctttgaaagagagcattgattacatcatccgccatgcttc

SEQ ID NO: 179683 - DNA, 793 bp, Zea Mays
tgccctgaaggactcctgggtcctggtgctgaaaagtggcgcagtcgctgggtctctttgaactggcaaccatgagtccacaggtacgtgtcgaaaccgacataccttggagttgtggctctctgaaggtcaagcagtcgaggatcagcagcaactggtcgcaacttggtctcgtcatgctcccggcagcgaggtggacgaataggtggagcggaagctggattggtggaggtggtggtcgcagcgggtgtggtggaaggctcaagagcgaaaggagctagagaagtgggaggtggagtggtgactgggtctgaagaagtggatcagggagtggaggagcaagtccgagatgagaggcgacgaactcagaagacgatctggtcagaggaaatcctcagctgacctccctgctctacctgatctgcagctgttgcggcggcaattgctgcatgggtggctctgtccaaccgtctcttcttcttgcccattgctgctcaaggtgaacagtcttccccttgtcctgtctgaaaggacgaggagggtcctggtcatctcctccccctaacggtgtgacattcttcgtccgcaccatcctgaactggctactgacacgctgcaagataatgagaaagggtaagcatgagcagtagagcaataagtaaggtctgattagagtgaagtagctaccggggaatgtctcgagagagaggaaccaggcaggacaggagaagcgcaaacgggcaggcagaatcactaaaataacagaagaggtgagcatgtattagtcacatag

SEQ ID NO: 179684 - DNA, 484 bp, Zea Mays
cgggtttgtttaccttgattactgttttcctgttcggaaacaagggagaaaaaggaaaactgctacttcggcatcgtctagtgcatcgaaggcgaagaaagtgaagaaggtcttgacacgtagactgggacgcattgagacggccgatgtgccaaagcttattaaaggtgcagagactgcccatctgccccagaattaggtcatgtcatgccaatcgaaacttgtacagatccggccgaagaaccgaaatcggagaaggcagcggaacaactgaaggtactaagcccagcaactacaacagaactgccgaagccatcaagtatttctgcatcaactccgagaaaaaggagaatggctagtgtgctagatgttgttttggaatccgtaaagacatcagctcctgcctctgccgaagctcctagcgaacaaattaaggatgcaagagaagctgctaatgcaagcgcgaccaacgctcctaccgaag

SEQ ID NO: 179685 - DNA, 645 bp, Zea Mays
ggtcatttaagcctcttacattccatgaaaaaatcgtacagtttgtactcattaattggggactctccacttaaagcaacattgtgaaataattgatgtagcatgctgaccacatgatagaacggagcaggggcattgtctgacaagcagacccgaccccccagcaagccccaacacatcaacatttaagagcagaacaaaccacattacacaccaatccaccagactaacagcaacaggatacaacgacatagaagacattgggactaggtttcgctggccccttacaacaccacagcaatctaagacttccaacatgacttgactgacccccttactaacactagtgagagaaaatgcagacactaacatggtggttgagctccactatggctgtaacacttcccatcagatcctctgcatagttttgattgatggaaccttcacaggagccaccttgcatccacgccttggacctcctacctttttttctccctgatttaccaactccatgattgcctccatctgatctttagtgagaggtcttgtgaactggtttgcgaactgctcaaaaagagtgtcatgggtattagaatttgaagcagatgagctacaaaaagatcttgctgctgagttgttaaactt

SEQ ID NO: 179686 - DNA, 635 bp, Zea Mays
caagacttcagggaattctgttgttccatcggcaccaagcatgtcttcgcctccgtataccacccacaatccaacggtgtcgtcaagcgcgccaatggcaagatttttagcaccatcaagaaaagacttctcgacgacaaaaagggcaaatgggccgaccaattacctgaagtagtatgggccctgaatacgaaagagtgccgagcaactgggttcacacccttccgcttgatgtatggttctgaggcaatgacaccgcaagagttaaaacatgggtcccccaaaacaaacaaatcagtcatccaaaaagtcgacgaaccaacttccaaagatctcatcgacggagaccgtgtcctcgccttgcaggccctcaacaaatatcaaatccagaccaaagcctggcgtgacaacacagtcatcccaagagaattcaatgaaggggacctcgtacttgtaagaaccaccagggcaagctagagccaaagtgggaagggccttacataatcaaggcgaaggcatcccctagtgcttacaggctagcaacgtcgtccggcgaagacttagaacattcctagaacatcgataatctccgtaaatttttcatttaagtcccaaggcctaagcgcctttgtaat

SEQ ID NO: 179687 - DNA, 1789 bp, Zea Mays
ggtccgggtgcctttaactgggggcagttattcttgaagtgactggggtctccgcagtgccaacaggcatttgctggcggttggttgcttgcaacagagggggcctgaagggagctctaactctgctgactgtagcgggacgaagtgggtccagatggtttattgaagcttggtcccctgggtggaagcccaaagggtcgagctctctggtgacgttcttgctgcgagctcggagaacttggaatttcctcttgaggtgccctttttcttcctcttttgccctttccacttggatggctttgttggagaggtgagaaaagttgaggaagtcttggctggcaaggatggtcttaagctcgggtcttagtcctttcagaaaatgggccatcttcctggactcggtgctgacatcgtcaggcgcgtaacgggccaactctgtgaacttgtgcacatactcactgactgttctcccaccttgagttagctcccggaactcatcctccttgagttgaactatcccctggggtacatggtgctcacggaaggctgtttcgaattctgccctggtagcatctctgacggcctcgctgaaggtgtcccaccatgctaaggccattcccgaaagctgatgagcagccagttggacacgctgatttttggggcatccgatggcttccagtttcctcttgatcgtgcgaagccagtcatctgcatcgaggggattgctggaccccgcgaacgtgggaggcttgagtctcaaaaattcccccatcctgtcctgtggccttccaccacctgggcgctggttttccagacttctagtgaggacttcaatgagtcgggtttgattggctagaacttgggctaggtctagtggtagttccagaggtgcggggaggtgggtctcactcccttctccgccagcctctccttcagctcttagggaaaagctgctccaatcccgaaggcggtaggcgtggttttatccgaagccatctgccatggggaaaagagttactatcatgcacatgccaatttttttcaactagttactttattcattacatcaggtcattacataatgcagcacacaactaccataagctcattacatgcgagtgctattgagggtactcccgaactccttctctaaagtgtccccaaactccctgagaagatcatcaaggctggctagggacatttcctcaatgtcggacgagcttcttatcccggcagggggtagggatggaggggcttcttccttctgcttagtctgacatccttggcttttggtcttcttgcggattttttcttgcgagggcgagcttcttcagtttcttgtcgtaatccatctttagggtgcggtaggcctcacaggtattggtttcctcaccttctgctatttcgagcctctcttgaagggacgtcttttcccttgtaagttccctgactttttgctccaggctttctacccgggaggttaggtgagtgcagaggagggcaaggtcatcatattggttatcgagggtgtggaggtatccagccatgtagacaatggtggggtcatcttcgacagggtctctacctgacagggcctgaagtcttttcctccaggtgggggtattcttgttgctgggtggaaagtagcgaaggggggtttcaaagatcactttgctgtagttctggcatagttgtcggagggcggttcgggcaacattctggcaagtatctgggaagcggcatcctgtaaaagtgacttggaaagaaggatggtttggatagttttggc

SEQ ID NO: 179688 - DNA, 691 bp, Zea Mays
agttggggagcacgaggacgtggagttttataccccgacccgaggcggtaacgagcaatcaccggtgaggtttgtggggtcggttcatcggccgttccgagcttgctgccgcacgatggggagggaggagcgagtccgcgccacagaagtcggtggaagattggtgcatggattacgagggttcggtgaggtcgttgcgcggtttggttgcaacgacccgcgagatccgcggtgagccggaggcggtgactactgcttctgttcgagatcgagcggggaggggaaatattctaacgagtgggttctaggtggcggtggaacagccgagagcgtgggcgtggtttggggcgctatcgaggaggccccaccagccagcgacccagaaaaggatgtgggcacgcaacgtgttgatctgggcattggggcccactgagtagtgttccatagctggcgccctgaggcactgaccacaggggtccacccaccattgccccccctccccgcgcgagccagcaggtccgagcgaggtaagcgggcagagggaatttggggcggctgagggtttgagcccaatacgggtacattctcttttctttttcttttattttcctttttattttcttttgatttctttccaaatcaaatttcctttcaaatttaaatttgatactgtggcaaatttgtcttcaaa

SEQ ID NO: 179689 - DNA, 673 bp, Zea Mays
ctacgggaccagtgaagtccgagggaggcttgatccgtgcgcgaatccccttggagccgccggaattgctcatcggagcaatttactcgcggcggatccgccctgtaccgcggacagagcttctgcgcgcgccaatcgaggtgagagtcttctaccgaggtttgcatccgtctcagttttgcttatctgctatcagagtcgggtctagtacacgcgggcgcctagatgcatgctgctccggcgagcccatcgccgtggggcgcgtccgccgccgtgaccgtatgctggaggaagaagtagcgcgttagccgtggattctcccgtggtcggctgagattagaaacctggtaacggtacggccaatgtttggtggtccatccgatctggatccaagggacaagatcggatcgcggcataataaaatccagaccgcagatcgggggttgcacggctctggtcacgtaacccttcggacttatgatctgagcccttgatttctaatccagcggctcagagtacacgatacccctccgccatgtacttttattaaagagaccctgaaaaatatctatatgaacccgccatccatgcttgtatgaagagtcttaccgatcagtcctaaaattctcgcaaaagcccctgaattctcgggtaatagtggccgccgtccaga

SEQ ID NO: 179690 - DNA, 445 bp, Zea Mays
tatcagggttgtacgtgctctcgtagcaacagagcaggaagtgttcctctatcggtgcatcagagtcagaaatcgccttcggcgtcactatgatgatactgacctcacctggcctcacacatcggcgtcactgacgctgcatgaatctacacgcgccgtcctcttcttcggcagcttctcgtcacttctctcccgggctgtagagagctagtagaaaatggcgcggtcgcatggaggagacgccaactcgagcaaggcagcggcgcgccggtgcacgtggtctcatcaatgcgtgagcattgccatatccctttgggattacggtgaccgctgatgatcctgataccacgcgagcttctgatacacggagttgctgtcgctaacgaacttgcagcgcactgccgctgatagccgcgctgccattgttgaccaagaggaacctcat

SEQ ID NO: 179691 - DNA, 408 bp, Zea Mays
cggtcagggctcgtcgccacggctgtcctgtttaccgccgccgtcgtcgggtcgggggtaggagacgcgtcctggtcgttggatcatgatctggcgtgctgaattagatgatgggcatctggtcgtccgttttgcgatgttcggccaggattagaaaacacttacgctttcgcgatgattgaactgtggtcgtaggattgtcagtggctgagatttgatcgcgaccatattaaatctggtgcgtcgatcggatcggatggccctggttgcgtggcaattcttttaatactggaatcaaatctggaacgttcgaattggatcggatggctcagaactattgataccccttcgtcgtggccttttttataaagaacccctgtggtagtgaggaattaacccgccgtccac

SEQ ID NO: 179692 - DNA, 454 bp, Zea Mays
attttttccaacttgcatataaggacaggaatttctgtctccaacttctccatcacatctttgtttatttctttagcacaaagttgcctataaaagtagcttaactcagctaacgccttccagatactgactttcaagtacccacagaacattatagggaggagcctttccatcattatatgataatcatggctcttcaatccagttattttatttgccttcaagttcacagctctcctaaacccggccacataaccatctgggaatttcaattttttcaaccattccattacttctttcgtctgtttaggttttagacaaaattgaacacgtgactttttccattttcgtcgagttcctgggttggtcggttacaaagttttgctaagtcctttctggcctttatattgtcttttgttttgtcgcctagattcatgcaagtacttagaatgct

SEQ ID NO: 179693 - DNA, 411 bp, Zea Mays
tggaggggaacaatgtggagcagaggaaggctcagaggttcgctaaccaactgatagcaatatggttagcatgtaggagctcgacagagcgggagaggtggatcatgtgagcatagggtggcatgtgtgtgtggcacactaggaggaacaaaccagacacaatacaatgtagggcatgagtgtgagcacacgagtaggtgaatcaagtgcggtgtctctaggcggtagaggtgggtggacttgcacacagggaaaggtagaggtgcaatgacacaatggggaagaaagccccatggcatgcaagagagagttgatagaagagaatgagtgaggccccatgagtcaaatacaagaaggcaaagcttatgcctaattcagtcgttggaccacccatgtagtattgtcagaccc

SEQ ID NO: 179694 - DNA, 407 bp, Zea Mays
caaattttgtgatccgcttctaacaccttgtcgtacacaacaccaactttgtgatccatgtctttcagctagtaaactgaacatggcgtgtaactgaaactgcacatggcgtgtaaacgagttaattgactttataacactctcgtcgcgcggtttcgccggattactactccgcagctccgcttcgccaggatggtattatggagcacgcgcacacgctaaattggtatggttagtatcccgcccactgtaaccggttgttttgttgcgtttaatgaacgtcgtatattcctgtgtactaatctatccctagcgacgctgcccaagctcctgtccagttttgaccgtggcgctccctgcccactgcccactggtgcccgcgccgccaccatttggttcctgcgtcg

SEQ ID NO: 179695 - DNA, 1783 bp, Zea Mays
aatgcacgggattaagttcaacatttcaccccctaatcccgctgcacctcgacaacgcccagctgctgacgaagctccagaaatctgacacgcccaagcgcctttgttagaatgtccgcaagctggtctctggtactcacatgatcaatatccacttcacccttgtcaacacaatctctgatgaaatggaaccttgtgtctatatgcttgcttctgtcatggtgaactggattcttgctcagagctatggctgatttattgtccactagaagtttgactgttggagcctggatgttcagtagttctcccagaagccggctaagccagatcccttgacatgctgcattcgcacttgcaatatactcagcctcacatgatgatagtgccaccacccgttgtttctgtgatgcccatgtcactaagcttgatcccaacagaaatacacacccactggtgctcttcctgtcgtcaacatcgccggccagatcactgtcactgtaacctacaagttcagttgagccctgtctcttgtacacacacccaaactgtatggtgcctgcaagatatctcaatatttgtttgacagcagcccaatgacttgctctaggctcttccatatacctgctaacaatgcccactgcatatgctatatctggccgtgtattaaccaaataccgaaggcttccaatgatactcctatacttggttttgtcaacagcaggtgtcttgtcattcttgctcaacttcagtctattctccatgggcacagcacaaggattacaccccttcatgccagcttgttccagaattttcagagtgtacgagctctgacacagctttgtcattcctgcctgctgattaacttgtatccccaagtaataactgagtaatcccaagtcactcatactgaacttccctttcatctcctgcttgaacagttctatgcttgctttgtttgagcctgttattataagatcatcaacataaacacctactagcagaaaaccatctctatctgacctcctgtaaactgcatgctctagtggatttctcacaaaaccaagcttcatcagttcactgtcaagttttgcattccatgcccttggggcctgacgcaaaccataaagagccttttttagttttagcactttgtcaactccacttttgacaacaaatcctggaggttgttgaacatacacctcctccctcaactcaccattcaagaaagctgacttgacatccatgtggtgcacttgccaacccttctgagcagccagagcaatcaacaatctcactgtctcaattcttgcaaccggtgcaaatacctcatcaaaatccaccccctcacgctgagcatatcccttcgctaccaaccgagctttgtgcttaaccacatttccctctggatcttttttcactttgaatacccatttcaggccaatggctcgatggccagcaggtagtgcagacagttgccaggttttgttttcttcaatcgactgcatctcggcctccatggcttttctccaacattgttcattcaaagcagtctcaatactcctgggttcttctgctgcaaggtagcacaccccactgtactcaaaatcagtaatctcatcagttgtgtcattgatatttgccaatgttctgaatctttgtggcactccttttgagttgacagattctccagtgagtggagttgcaaattcaattccttgcacagctggactcccaggcggtgttgcatggtttgatgctccatctgagccagcgtcgatagccc

SEQ ID NO: 179696 - DNA, 964 bp, Zea Mays
gcatgaccatacctcccgttggttgaggaattcgatttacatccatctccatgaatgatcgccgaaagggatcggttgttcagtgcaaagtagaccccagcggcacttatccaaacgtcgtgttcgatgtcgtcgacgttgaagaacttgttcccactagaacaacaccccgatgagatgggtggtggaagtctcgtagccttctatgccatcttgtccatctgggtgtgtgtgcttgccaacacttccgttatctccccaaccttcttctcgattcccggcctccacctctaaaactcaccccgatcggtcatcagaccttgcacggtgagatccatctactccatggttgagtgcatcacatccatatgtcgtcacgtctccttgttaccctcatcgattttggcgattagctgcaccaacgaatcctccacccgtggacgtgccatctctctagccttggcttgaaacctggtgttgtacgcgtggtgaggatccagatcggctccgattaccaactgttaacaccacacaatcacacaatctcgcaaacactcacatgctcggatagtggttgggtttattctttcgtgtgttccaagttcatcatcagccaaaagccagccttacaatggattacctttttcccttttaaaccccgctaagactcacaatattccttgacttacagacaggtgagaccccagttacacccagctatcaccatcatacttcgaattcagcttcctctcccgatggttcctcagcttctggtcctcaacaactccagcttttccaagtggcttctcttcccctggcttggttggttactgtggtttgtctggcatgacggttcagtttatcattatgacgcatgagctgttgacaattgtccactaaaccaagccaactcaagtgcccaaagttgactaggccgccctccaaagacggccaattcgatcac

SEQ ID NO: 179697 - DNA, 763 bp, Zea Mays
cagtagggaatctcgatgtcatcacacactaggacaatgacacaccccgtaagaagcctttggcccataccccgacgctgcatgttacagccactacggcatgggcagcctctcccttaggagctcgggcatacagatgatccctcagtctcggcctcagctctctacaggaagtcagcaggcacgaatcaactacacagtttgccatcacgtcagacgccaggcatctctccttcaaatacaagacccgacttcactaaggacgctccccttggtgtataaatagggcaatggtccctccacgagggaaggatcgatcgatcgacgacatcgacatacacacgacactcgtagacgaacgctcgctctctcattctgtcttagatattggcacttgcctcaatcctctctagggacttggtgacttcccctctcctgccttgcttgtaaacccctactataggcaccacagtgcaagtaatataagcctcatcctctctactggaaatagggccttgagtagcccgaatcaggataatcgcttgtgtctactcgcacaccatctagagttggccacgcaacacatttaatggttggttaaggacccgcggtccaaacaccgacactcactataaaatttaatttcatctctacatttaccaacctcattgggactcctaaagtccatcacaaaagcctactcctaccactatttcgtgttgtcccaccgccccgcaaccacaaatccatcttcacctcccca

SEQ ID NO: 179698 - DNA, 597 bp, Zea Mays
gcgaggtaggactcccacaaagactgtgatgctcctctcagctgtcggggaccatacaacaccttctcacgatcgttgcactgggcagtgtgccactcacgctccacggtatgcaaccaatcttcaacgtccatgggatcagcagagtgggcaaagaggggggatgatccctcaagaactctgcccacttgtctctgggcacttgaggcatctggacttgcactagaggctgaggtggtagtggctgccgctgagcttgctgcatcgctactaatgtctgaccaattgcctgaactgcctgggtctacatcaagaacatctgctcgataatcatcggtggtggcggtggcaaatgctgctgcggggatgcttcctcttagggtgcctgatgttcaggctgagcacgcctcacacctctgcgcctgttctcagacatttgtagacaccacacacatatcagaactgactctgtagtctttcagcataagaaaaggtatacagaaatcttcacagcactgaacaattgaccatcttcactgacagcttctcagataaagaggaaagtggaaataaatggattacccaactaaataactg

SEQ ID NO: 179699 - DNA, 306 bp, Zea Mays
gtggcatctgaacttacactggaggctgaggtgggggtggctgctgctgcacctgctgcatcgctgctaaggtctgaccaattgcctgaactgcctgagtttgcatcatgaacatttgctcgactgtcatcgggggcggcggtggcaattgctgctgttgggctgcatcctcctggggtgcctactgttccggctgagcacgcctcgcacctctgcacctattctcagacatctgtagaaatcacacacatatcagatctaactttgcagtctttcagcataagaaaagatatatggaaatcttca

SEQ ID NO: 179700 - DNA, 496 bp, Zea Mays
gcttggtgaaaagtagatgtaatgcaagtggaatttataagagccgaaagagctcatgtagtagtgtaattagagaatgttgtagtgcaagctcttagttacttgaataacagacctttacacaaaagatactcgaaactatttcactatctgtcatatacaatcttgtttagggtcaagagtttatttagttgtactttttcatacgccatctgtttaatgggatgaatattctatctaatgaggtctctcttttgctctcatgtctggtggatggcgtcatggcttgcctcctacgtgttaccttggttgtatggcgatcggtagtttaagaatatatgttggttgtcctgctctgtagttgttgcttgttgcctctgcctttttcctatagtattggtcgagtacacgaagatagtgttgatacaatagcttcctcaggttttcactttcactgatacagtagaggctccgataaaattaccgaacataagaa

SEQ ID NO: 179701 - DNA, 814 bp, Zea Mays
ggttgattagttaatttcccaagggctcttatataaagtatgcacggcgaagaggtaccgaggagttctagccgccagatctgaatcccgtggcctggattacaatctcatttcgatgatcctatgaaccgatcctacgcgtgggatgcattatcaatggctcagattttaagatgcacacaaccacccggattcgtccgatcacgatcagatctcggtcgcacaagtcgtatccgacggtcaagaatcgtcccctctattccgtctaggcacacggcagagcctccctggtcacggcggatttctcccggagaacgctaaaccgacgccagcgcacacccggactcaaactattagcctcttctcacttcgggcacgacgacggacacgaccgtaagggggcttaccaaagggttagtagcgtaggtgttctggccatggcagaggtcgatccacagcggaggaagactcctggcgagcaattaatggcgttggggtcaggatctccccacgacaacctgtccgatgacacccccacacaccgacgcccaccctggttcccaacaccacggaagaacaacaactatgagcaaccgaggtggcgacgcttcactccttcatgggcggtgtctggtggctagggcgaggcaaggaggaagggtcgacaggaatcaggcgcgcgacttttatagcccggggaacgctgctcctaacaaaccctagctggagccaggttttctcgacgatggttgcaatggccacgatcttcgcgcgtgccgttcgggcgaagctgcgcgcgagaagaagcacaggg

SEQ ID NO: 179702 - DNA, 743 bp, Zea Mays
gcaccttggtgggtgccttggtaccggaggtcgaggggctcctccctctgtcgtccgggcgagcggtttccaccgccaggggcatgcagcttctccacagccgcaagcgcagcggcgcggtcgcctcgcatggtgaggatcctggctggggacgacatcttgaggaccaaatactcgtaatgggcaatggacatgaagcggtatagggccggcctgccgatgatggcgttgaaggggaggttaacctccgcgacatcgaactggacgttctccgtgtggaagttctcctcggtcccgaatgttaccgggagtgcgatgctcccaaggggatacatcggttgtgggcccactccggagaatgggcgagagggtcccagccgggaccctgggatatgcagctgcttgaatgcagcatgactgatgacattgaggtcggcccctccgtcaatcagaacatggtgcagccgcatgttggcgatgacaggggcggtgatgagcggtagtataccggcccctgccatgttgtcggggcagtcggatgccccgaaggagatggtggtgctcctccaccgctgatgtggagcagccttcgggacccccgggaccgccaaaaggacctctcggcgcagggacttgacgttccttgcgggaggtgagctcccagctcccgccgtacatgacgtacagcttcttgcggcggtcatcgtcatcatcggagtcagagcctttagtgaagacgtcct

SEQ ID NO: 179703 - DNA, 734 bp, Zea Mays
gagcttccacccccttcaggcgccatgagatggggatgccacactcaaagcgttgggttcctaaattaaaagctaaagctgtttctttcgctgttccgctgatttctgctgtgtggcctttcgtgggcgaagagggggcggctggtgctgacaggctcttgctgaatggtggcactgaagctggcatgctggaggcgcttggcttccatgccggagggggatcaccaacaaagctgattgcacccaaggtaattgctggtgcaggtttctctgcaggtgctcttcgcactgatgggtcgtcccctggagccgttgttgagatggtcgctgacgaaagccccgcccaagatgcagccaattcattcgacatccagaacgacctcgccatggaaactgctacatcttccaaggtaatatcgaagctctcttcagatactgcaatagccccacttcctagtaagcctgttcccagccctatctcaaacctccataattctctggatcctaagatttcaaatgtggacgtgcatcagcagtcgcagcaggggtttcaagttgtcgagccccaagtagaatcaaatgatagctatgccgagcaagtctgtaatgtgactgctgctcaagatagtcaggaggcttgtagtttaccaccagattctcaaccaaacagcactaacagcttgcagttacaaaacttcatcgcaaatataactatgccaccagtactccctctg

SEQ ID NO: 179704 - DNA, 482 bp, Zea Mays
tgcccgaaagaaggacttctgagtcctggtactgaagagagttgccgctgcagggtccctctgagcaggaaaccaggactccacggatacgtgtctgaaccgacgtacccggctgcagtggcacgctgaagatcaagcagtcgaggatcagcagctaggggtcgcacctcagtctcgtcacgctccctaaagcaaggtggaggaatgggcgaagcgaaaatgggagcgagagggggaacagtggaagctggagtggtggagggggtgggtatggcagaagttgtggatggctctggagcgacgggagctggtgaagtgagaggtggagtagaagttgtggcggagggagcagaggagcgaggctaagatgcgaggcgacgaactctgtaagcaatctggtcggaggaaatctgcaactgtcctccccgctctacctgctctgctgctggtgccgctacaagtgctgcacgggcagctctgtc

SEQ ID NO: 179705 - DNA, 323 bp, Zea Mays
taaggggcaaacaacatatgccatgtgctatagcaatcttgggactttgatgcaaatgctctagccttttctgttggcgacattaggtggtggagtggcagcgatgaagcttgacagaacaacaagttcctttcctttctgaccctgcctccctagagcctatacaaacaagtcagattgagaaattgagaggtagattaggataggattcttgcctggcttattcttttatcctggcttccttttatggaggagcttgcaattgagtgatactactttgcagcaacagcttctgtggcccaccatcacaatatatgaagttg

SEQ ID NO: 179706 - DNA, 448 bp, Zea Mays
aaaccgggtgtgacaggtcgtcaggagcacgattgttattaccttactagcggtgtggcataccttctgtgttttgatgaagacgacaacggaggcgcaaatctctggtggccgcttcatcataattaccttcttcatcaatcaccgcatcatcgggaagacgtggacgaggaggtggtggtggcggtgcttgttgttgcatctccaacacagcaagtctgtcgacgatattggacaatcatcgatccagtctctcgtaagtcctgccaaggtccatgttaatgaaggcatcatgcactgacttgtggaccgtctcctccatttgctccttcaggagcttgttgtttgcctcaagatcttggcggctaacacattcatcgaagtctgtggggatccttgcttcctcgtcgtcgcctgctatcgaaacacaaaaacaggaacaaacggt

SEQ ID NO: 179707 - DNA, 494 bp, Zea Mays
attaaagaacagggcctacccgacttatttgtatcgaggcctcgctgattcaacccgggttaccaacagaagaattcctgcagtggatttggtcagccggctcgagatgatactcagaggcaaggtgtcaaacatcggtgctcctattgcatactcggcctagaatctgcctccttccaaggcttttaccaattttgtgtcgaatcctcctgctggtgatagcggttttggccttagagtgcgaccctctcccaaagaggttagtactttggttgcctcacttggtgaaatccctgatgacgagaagcaggttcatttcgaggtacctttgaatccaagtgatgctgagataagtgccatgctggatatgttggctgaagattcctctgacgcagcccctgctaaaacactggatgcagcgcccatcccagaggctggtaaaactttggatattcagaagtctgacagtgttcacccgaagcgccctcgccgag

SEQ ID NO: 179708 - DNA, 463 bp, Zea Mays
caagtccctgttaagcaaccccgcagcggaacgagcgaccaagttcatgtcgagcaaccccgcgaggcgtagcgagcgaccaaatccctaccgagcaaccttacgaggcagagcagacgaccaagtccctgtcgagcaaccatgcgaggcagagcgaatgaccaagtccctatcgagcaaccacgtgagacgaaacggacgaccaacttcataatgaacaaaccgcgcgaggggcaagcaaccgggtcccgtgccaatctgaccagcataagggaagggtcgacctaatgatacgggcccacgtcagcaaaacaagacgggtcatcaccaaaccacgtccgggcatcgggtatggcgtcgaaaggtcccgacggacatcaaacgatatgtcgtcacgtatagtcctaggcaaactcccactgacatatggggccagtcaaccccgatcgtaggggcctcatca

SEQ ID NO: 179709 - DNA, 871 bp, Zea Mays
tctgttgattgttgaacttattctgcttcggatatggacagtctttaataaaatgaccagactttccacagttgaagcagccagtggaagaattagggagagcggggaaacgagcaccaggggcactcgactgatttgtagaagtgggggcagtggcagggcgaatgaaaacaggctatttgaatggataggagggtggacgaggcgatgaacgattctgattaaaaggtcggattaccaacctagttcgcttctcaggtccctgattagacctgtcacctccaaatccatttgactttccctggcctgtgttcttggcttctacaaccaatgtcgtgctgacagctctactgtaagtaagatctaggcaggtggccattttctgttggagccggtcgttgagtcccctcatgaagcaattctttttcttcaggtcagtgttcacttagtctatagcatattgggataaatggttaaacttgttgagatactgcattatagtatctcccccttgctttagtcgaataaattcatcttgtttcatgtgaagcactccctctggaacatagtgttcatggaatgctagcttgaattcatcccaagtgacctgatgtccggctcgttgaactgctacaaaattcgcccaccaggtactggcagggcctctcaattgttgggcagcaaataatggcttctgtgtttctgtgcaacggaccaatccaaacttctactccattacccttatccactcatcagcttcaagagggtcttctgctttaacaaagagcggaggatgtgtctcagagaattccagatacgaggtttcacgcggtccttgtggaagaactctcccgccatgttgctagaattg

SEQ ID NO: 179710 - DNA, 389 bp, Zea Mays
ttttggttggtgggctatatttggtgccattgtcacttgcattgccttcttgatgtttagaccgggatttcagtttcacagcaccagatttatggtaatgtgctttcacgatttaggaattaggagcgtgcgggaaaccaacttttctttttgccttttagatagatgggtgatatatatacatgtggtgggtctagaaacgttttctcatttttttcgttgatttatggaaaccctcttttagggcatatcacacgctgccgcatagcattattcttagggatgtgttaaatcgggtgagagtttatatcgtcagcatcggccaccgtggatgtggcattattcctggtagtgtttgcaggcgaccctttcgttgaggcgaatgtggc

SEQ ID NO: 179711 - DNA, 510 bp, Zea Mays
taattaatactaaaaatccatttctaaattcatttccctgattttatttgttctctggactaggcgtcgaattccagaaagcgcaagggtctctgtaaaagaattctaagactcagtaaatagctacataggactgcgggttggtttctataaaacacagggtctttttaacaaatgcgacacggcgaaggggtatcttgtgttttcagccgcacgattagaatctgagggctcagattagatcactcaaccacgaaccggtatgcgctaccaaccgccggatccgcgatctacggtgctgatttaaaatgccctaaactcatcctggaccgtccgatttacatccagtggacacagaaccctattgcgaaccggtacgcgcccgactgatcacagccgttggcttcaggatcaacgatccagattggcttaacgcgaaacttactcagagctaatctaaaccgttgccgcagatatcaacggttaccagctctcttccccctggcgacg

SEQ ID NO: 179712 - DNA, 650 bp, Zea Mays
gttatttttctcgtacacctcgccctacattatacatgtcgtcgagcttatattatgattgttttgactccacattcacacccacataacgaatagaatacaaatgttgtgacttacatgacacatcgatgctagcccacacatcatggtgactgctgatatggtggcgcatgtcgttgtcggggtgagccggcgggaggaggtggtttgccgcttgagtgaggatccgccggtagcacttgttgtcaggagtgtcaggtagatcgttcaccatatttgctagcataccctcaggtagatcgttcaccatatttgctagcataccccttacgtgacttggggtttgcgtggtctgggcgaactcgggttgcaagtcgcaagggaggagttgatgctcatgaggggtccatgcgttatgctaggctgcctcgcattcacgctcctgggcgaggcggtggttccgacattgagagttcctttgtaaatgaaaaccctgctcatcgggagtcttccccacctcaaacatcccatccctggaaacagatcgggttggatctcattccccggtgacatggcgacgttggatgttgcggtggcgattccggcggcggcgcacctctcgctgcgagggctccttcccttttaccaat

SEQ ID NO: 179713 - DNA, 484 bp, Zea Mays
actttgaaatataccttcatcaactgacacccaatgtaattgttagacttagtgtctacatctgggccctccggagccaagggatgagtcctaatgtcgaagctttctatcgagtgcacgagctgcattaccagacgaaggccagggcagatggccttcatgagaattttggttgctacaattttgcgtatcgaaaggatacgaaggcaccggttcttatctgccgtactaagtggccaactggttggaaaagtgaatggttttatatgaaggcagacgagaaaaagagggagaagctgatgactatagtcttgagtccactgatattgagcttcggaatgacaaggcccttgtgccatatgctgcctggctccccatgccaagtagccgaaatggagtttagagtggtagtggccgaagtcagcactagagatctggtgcaacaattcttggcaaatagagtatttccgacctctagtggttg

SEQ ID NO: 179714 - DNA, 828 bp, Zea Mays
gagaggagcgtgcggccgaacgaggggaacggggacgagtgggcgtgcgtcgacggggaggagccctggaggtccgtggccggcatggtgtcggtctcggcgtcggcggacgaatcgaagcgcggatcttggacagggaatggccgacagcgttgtggtggggtcggtggggctttggctcagtgggtccgtgggcgcatggcggcccagctcagctcaactcgagcaggcgtttttccggtgagattgcgtggggggatggcggtggtggatgagtgaatggtgatggggaatggggagggtggcgtggtgaagctatgtatatatgtgtggggatggcgcgattacgaccggcattactttttttattggttttggaaggtttgggaagaaagggtccgaagctctccccctcctcgtttgggctaatcatggcggttggagtagtttagcagcgctgtgttttcttatctttgggcgcaaatatccctctggtatcgtgcggtggacagaccaacgcaaatcccgcgatctgtagggaccggatccgcaaaaaggtttaaaggtacgtgcagtgcaggcgtagctcgtgctcgtgcgtgcgacggtacacgggaggcggcggccattattctacccgtttggttctaccagcagatcgtgtatgaaacacgattgtacacagtttatttggtggaagatatgagacaaggccgaaggagatagccacttcttgtaaattgtgctagtgttgcattagccaaaaaaaactactacagtacccttatgttatgtcagcacacactcatatttgatattcataaaaac

SEQ ID NO: 179715 - DNA, 326 bp, Zea Mays
gctctggaaatcggggtggaaataattatcaagtgcaacgctctggacaacgaggctagagaaataatcaaagtcagaaccagcagcggaacaactctcagaccaaccagaggtctggtgggagttcacagaatagtcaaggtggcgtcgtgaacacgcaggccagaagcaacaaccagtccaacccaatggttgtttcaagtgcggtgagcttggccattatgctaacaactgccctaggcgcaaccagcagacacctcagaagagcaacaatcagaggaatgaccagaacacccctgctcatggatctgcaccgaacaggactc

SEQ ID NO: 179716 - DNA, 598 bp, Zea Mays
gtgatcgattgggtatggttgctataactcaaacaaagatggattatgggacaacatttttgctgcagacatatgatcaagttgccacacaaaaattagagaaccaaggcctctaacttgctctatcagacgctctgatgatgatcaccatggtatagtactgaaaaagatcagcagatgcagtgaatgtgctaccgatgaactccgcgccgtgatatcctcgttggcgtcacgattcgtgtgctcggtgtgcggatatcggcggcggtgaaaatatcttggcacccggattggttcggacctggtcactggtgggttcaccgtacccacttggtctgaggctgagcgagatgatcctcactggcgttagttgcttaccgaccgtgcgccacgtacctaggggctttaacacgtcgtagtaaaccattgaagcaagtccgtccatcgccggaggccttgccacggtgaaagcaacaatcacctgcgccagtgcatttctcctctctccggccgccagtgtgccttctcaaaattagattccaccgctgatggaacctataaattgatgccccagtgagctccactaggttattacgtg

SEQ ID NO: 179717 - DNA, 446 bp, Zea Mays
ggcaatctggaggagaaataggaaatcgcgctcgtcgccttcctctaggcaaatgccgacgtattcgcatgggaaccatcgcagatgcctgggatccccagggaggtgatcgagaaccatctgaagatccaccctgacgccaaatcggtgagtcagaagcctcagagacagtccattgagcagcaggatttcatctgtgaggaggtccagaagctgctgcacgctggcttcatcgaagaggtccatcacccagtatggctggtcaatccagtcatcgttcccaaggctaacgggaagctttagatgtgcatcgactacaccaacctcaataaggcctgtaccaaggacccatatccacttccacgaatagatcaaatcgtggattctacctctgggtgcgacctcctgtccttcctagatgcttactctggtttccatcaaatcca

SEQ ID NO: 179718 - DNA, 762 bp, Zea Mays
ctcctagagaccacatatatgtgtctagttgtgatccactccgaatccttcgtacttgtcccccttttcatttaggacaaggttgttcagctgagcatatatttctgctgcgttaagatgtttaggcgatcctttggtgaccacggtgttctttataaagttcttcttatcactcctaaagggatgtttcctgggcaaccggcgtcgatgacaatcgaagtaagtgatctttccaccatgagcaagacagaagcaatatgtatctgaacgacaatatggacatgtcaatctaccatgtgtactccaaccggtaaaagtagcatacgccatgaagtcatgcaccgaccacaaatacgcaactcgaagtttgaatatctgttttttaaaaacatcgtatgcttcaactcctttccaaagctccttcaactcttcaatcaagggttttaacatgacattgagtttctttctaggatagtctgggccaagaatgattaagcaaagaaatataaattcatatttcatacaaagagaaggtggaaggttgtatggaataacaaagacgggccaacatgagtatgatgatgccatttgaccaaaaggtgtgaagccatcggtcgagaggccgattcgaacattcctcggatcagctccaaagtctggatcaaacgtgtcgagagcctgccaagcatccccatccgaagggtgcacaattaggtcatcgttatcacggacaccttctttgtgccatcgcatgtgcatagc

SEQ ID NO: 179719 - DNA, 622 bp, Zea Mays
ctgaagttgctgtgtcaggttcatctgaatggaactcaccattgtacagtagcctgctatggatcaggacgccagcgcaggatgctcaccgccgacgaccgatctccaccgcgattcgcgccaccgccgttgcgatttacgtcaccggtgactcgataagcctgccagctaatagctcttcgcctgaggatgactccggtgactcatcgctgtacccccgtgctttgcggcttgggctgataagctcaccggcgacagccgccttccggtcttgtgccacgtaattgaacacctctattgcatcgccgtgactctctatagccatctaatcatcgccggtgaggtcgccaccgcggtagacacgagttcgctgcgccagtgagcccccttcttgcaaccgccgcgcgtcatcgtttcaattcccggccaccgctctccctccctataaattgaagctgctgtcagctccgcagcaccatcacgtaccacaccacctagtatcgcccacaatcttgcaaccgtgagctccaatttcaagtttcccccaaatctgttctgaaccaccgcgaagaacatctcaccgaggtcaccccaattcaggttagttctgaccctctgctcc

SEQ ID NO: 179720 - DNA, 848 bp, Zea Mays
tcaaaaaaatctaactcatgggctctcttctttgaatcaagctgagcgttcaaggaagagttcagggtccaggcaccatccaagaacgcagaaacctggttcaagtcgccttgactctgagtatacctctcctcagcgtcggagcaccaccgaatcagagctggaatgacaaaaaggaaagagcacaggaggtaaaacgagggaagcaacaagcagtgaagaaagctatcaacccactaactgatgttcgaggcttttagatcatctatttgcttctaaagcaggaggggattccactgcaacaaggacaaaacctgatcgggaacaggggcaccgcaagacctcaactgagccaacacagagctcaaaacattctgcaaatacaagaattagcaaaggaatctatttgtcaacacaagtaaagcatagcaaaagtcagctcacctaaaggttagaaaggaacaagggaaatcccaaagccggaggcactgacgtgctatcagacggtggggtactagcagaagcaatatttagagcagactcgagccccaaatgaggattagagctcacgcccaaggcaacactcagtgaaacctcagctctgacagcatgcagcggattcccagcgttcgggtcaccgacctctaaagtgatcagaccaacaagagaaataggaagacttgtcaacactggctcctcagactgaactggcggtgatctgacatgaacatccatagaagcggtcgaggaggagccaagctcggcaccctcgggggctaggtcatcctcagcagcaccctcgtgggctgggttatcctcagcagcaccctcgggggctgggttatcct

SEQ ID NO: 179721 - DNA, 310 bp, Zea Mays
catgagtagcatgcgaggaagaagaagaaaaaggaagacgaacatggtggcctaactggcacgcatgacaaagatgctcatcatgtgatctagtacatgggatagtcgcactacgagtaagctgcatcaaggcatcgcgtccggggtgaccaagacgacgatgccaggtggtagaagacgtggtggcagcaaaaacagcagcagtggcaggtgacgaagatgaagaagaggtggcgtgcggaagccgaagggtgtagagggggccaagtcagacacgtctctgttcgtccaccatcatggagcagagact

SEQ ID NO: 179722 - DNA, 539 bp, Zea Mays
aaacaaattatttagcatgcaaatttactattttactcaacacaatatgtacaaacctgtatgttcccactgtttgcactcgcatgtatactccccagcttctatgtccgctgttatcttgaattgatgttgtccccacacaattttattagaccgttttgtatgttgtacgatccaatctttatcacaaccgtctgtgtcctttaatattttgtatgcagtggcgtatttcattgattcctcaaatctattcataacagctctggtgtatgctctagacactcttacttcgaacctatacaatgtatctgttgtccttggtccctataagacgttattatcataattaaacatagtatttacataaacatgtatgtcgtacagtaataataataagcacgacataccttgctcatcaatgcctcctttgattctttcattttcctgttgtgcaacattttcatcatttgtttagcgaactcatgcagaggggtgttcgcatctacatatgattgcttcactaatttgttcatgctctc

SEQ ID NO: 179723 - DNA, 353 bp, Zea Mays
attttttcgtggggcatagagatcgccctgggatgaatagttgcgaacgtgccgaatgtgccgcgccaatttaagtcgttgccagcttaaattggtcgttccgctgtcaggggtatagtgatcaccggcctaagtcgattgcttagttggtagggtatagtgatcacccttagttaagtaagcgtgagcatgtcgcgcccgtcttaagtcatcgccgacttaagtcgattgctccgtcagtagggtatagtggtcaccccgagttaagtaagtgtgagcatgttgcaccgtcttaagtcatcgccgacttaagtcgattgctctgtgttgggggtatgcttcgtagccgaaga

SEQ ID NO: 179724 - DNA, 458 bp, Zea Mays
ggatcggcaaagattgtaatggaccagcagttttcatgtgtatggttttgacacgtcttcaagtgtcacacttagccacatagcgtgcaatttcaattttcatcttcgtccaccagtagtgctgctttagatcatgatacatcttagtgcttcccggatgaatagaatagcgactaagatgcgcttcatctaagatttgctggcagagttcttcattctttggcactactatgcggttatcgaaccatatcacaccttgatcgtcttccttgaaacatttggctgttccagcccttattttctcccgtatgtgcttcatacccaaattatccttttgagcatcaattatcctttgcaaaatgattgactcaagcttcagctgattcagggttccttgttggaccatccccaggtttagcttttccatctcttgacataaagttttgtcagaggtcttc

SEQ ID NO: 179725 - DNA, 405 bp, Zea Mays
caccatttctctacattgactacaagttgcatttcactgtcagagatgctgttaagcttaactcgtcatgatggtaatggaagcttgcaatacaatagtcagaatagcagcatttctagaagaacataatcttccccagcatgataacaaaatgcatcatagcaagcttttgtttcttcatgtttaccggagtttacatcaacatcgagtgcaaaaagaacggcatgcaacacaaaaatgcctttaacccagttgcaaagaatccatcaaccaagaaccaggttcacataactccacagttagccatcaatatcaatggaagatgttatcaacaaggacaacataattggctcaatggtggatagcaccagtcccacttaataatttaaagcaaaggacaaatca

SEQ ID NO: 179726 - DNA, 745 bp, Zea Mays
agccgagggggcgcacaaccgcggggcgattgcatgctccttgtgcggcggttcgtcctcttgaccgttggttgcggcaaagatgaaggggcgcacaaccgcggggcggttgcatgctccttgtgcggcggttcgccttcttcgtgcttcgggccagcttgtatgacatgtgaggcctagcccccgtgtcataggatgggaaccttggtgcgcatcggggaggccctacccgtgacgcttcggggcgcgagcggggaaatccgcctttaaaaaggggttcatccctcgagtagcagccatgtcttgcttctctcccactcgcggtgccctttcgccttcgagctctctgtgcccctttgccttcaaggtttctgctttgtgtcgccatagtttaccatggccttgtaagtctatctcgagcatgcccagattgagtgggtgctcgacatggtgtgccgcctacttggatgggatgtgtcagtatttgccaggaggacttgtgctggtgtctctcctctcggcgacctttccgctgaagagtttgtgttctttgtttccaaactccccagtgggttggctctgccgatctcatctttcttcgtgcagctgctggaggggcttggcctctagcccctacccgtggcgtcctgcttcatcttttaggcggccatcatcgcctacctccgcgggatgtccgtggaggcgacgctccttcctgcttcttcctccagcattcgaggggaag

SEQ ID NO: 179727 - DNA, 761 bp, Zea Mays
gaggaacctaccatgccaccttgggaaggtcgtgctacacgaagtttatggatgtccccaactacgcctacctaaagctcaaaacgctgggaccgacatgcaccatcaccattggaaccacggtgcaacacgcatatgagtgcgaactcgaatgttgtgacctaattgaaggagccgctgtaggccaggagcttttggatgtactataagccattgacgaacaagaacccaacgtgaagaaggcaggcgcaaccttcaaaccaacagacgacatgaaggaagtatccttgagtcccggaagtgccaacaggcgaatggtacacatcagagctaagctaagtcccaaataggaaagtgtgctcatcgacatcctctacgtggaaaaggacaccttcgcatggaaaccctttgacatgaggggcatcccaagagaagtcgtcgagcactctttgtgggtcaagcttgtgtgcaaacccgtaaagcaatgattgtgtcgcttcaatgaaaagaagcgtagagccgtaggggaagaggtcagcaacccctgacatctaggttcatcaaggaaatacaccaccccaagtggttagccaacccagtactggtacggaagaagagtcggaaatggaggatgtgtgttgattacaccggcctgaacaaggcatgcccaaaggacatgccttgtagcgattgttagcgattgttttccttgacacacattgaccaggtggttgattccacctcggggtgcgaagagttga

SEQ ID NO: 179728 - DNA, 459 bp, Zea Mays
gggcttgccagccagacgccagcccaccttctctgggttataaataggaacagaggcatctcccatccggtagctgccatagcccttccatgcaaacgccaagtttcagcttccgttcgtgtcaccgtgttcgtcggaaagagagaggtgcagggaggcatcgtgcgaacatccgcgtcgctctcgagcgcggagaaggtcctgggccccggtcaaacctgttgtagtgagccagcaccgtagcgcgtgggcagtcctgccacatgctgagtccaggtaagaactcccagctgggtgattccctctgttctctgcgtcgtgttttgctagtaggcacatgggtagttcaccggtgcaccgggctgggactcgccggtgtgtactgtcgccgcgcttggtcgtcggtctgagcgacgagaggaaggagatggtgctgggccgttgatccggtatcatgcg

SEQ ID NO: 179729 - DNA, 652 bp, Zea Mays
gggcactgtatttctaaaaacaataaggaatttgcctagggtcaacacatcaaacttgtagagccactgtaggagtacaaccttgcttaagtgattaagcattgttgttattcaaaaagtggagataattagccctgaagtgtggctgtcagaccactctgagactaaacattgactgacagtgagttctaaggaactttgggctcgattcttgtgcaaggagataagcaaatgtgcaagatccctatagcaaaattgtagctggtatatagggctacaagtttgttacatatggattggcaagttcttgcacaaaatcgaagatctaggcgttgcaattctatctgtcaggcgctctgaatcaggttttcgatagtacagtgtttggatcagatcgccaggttcagatcccctcgccgtcggtgatcccgtgccgcaatcctcgtcgccgttgcaattcgtgctctatggggtgcagataactcttaaggctaagaaatatcgcgttgtgggtgaactcaggccactgtttctctccggccgttgtacccgcctgattcacggctgcttcggataaactcaccggagttagccacctcgcgaccttgcgccacatgctttggtgctttaaccacgtcgcagtgagtcacct

SEQ ID NO: 179730 - DNA, 526 bp, Zea Mays
tccagcccttggctcctcatagcccaaataaaaattccaactttaatcaaagcttcaggagtaacctgatgaaggtatatctcaaatgtctttagcacttcgaccaacatcttatgcaagggaaaacaatgcccatccttcataaaacttttaaataccaccactgcgtcagcttcaggaagaggaacagtactctctcctctagccctcactatggatatatcatggaaatatctgcccttcatcgcttcaattttcccttgcttaacagtggatttcccgaaaacaacatgacttggcctccatggtcgaacttcggcatcttagttctcactctcaatatcaaaactatcgttgtcgctggagtccccagacagtccagctaacatttcatcagtgattttctcaacgttggtcttctccatagcttcgtagaaaccagcaagcacgaggtccacgcttttcttatcttcggccatttcagtaatgattacaatagaaagccgaagctcaaaaaacaattgcg

SEQ ID NO: 179731 - DNA, 821 bp, Zea Mays
ctccagtacatcgatgtcctctagcctggttgcttctgctttggctatgctttcaaaggttaacctgggtgccccaaagatcagatcgacaggtagcactgcctccgacccatacaccataaaaaatggggtgtttccatgtagagctcggctcggctgtgttcgcaggctccaaactacatatgtcagttccttgatccacttccctacaaacttctcgctcttgtcaaacaccttcttcctaagtgcatcaagtatcatcttgttggctctttccacctcccattagctcttgggtgtgccactgatgtgtacttgatctgaatgctcctctgctcgcagaagtcgaagaactccgagctggtgaagttagaccctaggtcagtgatgatgctgttagttattccaaacctgaacattatctcttgaatgaactccactacctttgctgaggtcaagaaagcgattggcttgtattctatccactttgtaaatttgtcgatggcaaccagtatgtgagtatatcctccttgagctttcttgaagggcccgatcatgtccagcccccagcatgcaaacgatcaggtcaaaggaatagtctgcagctattgtgcgggtagatgctattgttttgacaagaattggcacgcttcgcacttctggactaactcggcagcatcactcttcgtagtcggccagtaaaacccgaatctgaaagcttttcccaccagagtccttgatgctgcatgtacgccacactgcccggcatgaaactcatctaatagctgcttcccaatagctgagtggatgtcatggccgtg

SEQ ID NO: 179732 - DNA, 469 bp, Zea Mays
ttagactaaagaagcaaccgaagctagaaagcaaatgcaatttaaagggctcaaagcagcagggcagctcaataacataacagacatttttaccatgaccatcatatttatatgcaaaaaaccactgcagagtggtcccactattcagaaagtttcgctaccttagcgacggagaaatgaaacttcctacgccctactctttttggaacacatacactaatacacaggcgatgacgtattctgattgcaataccgtgaaacttacgaagttcacagctttctggtggtctgaaacaattgctgtgttcttaatacatgaaattaatgccatttgctgggtccactgacaaatggcgtcaattacagttacggacgataattagctggacatgtgagaatttggttacctaccattcttatctcagctacctccgttctggaatatttgtcgcgctagttaatttttgaa

SEQ ID NO: 179733 - DNA, 1334 bp, Zea Mays
atggacctttgcttctccgccgtgcagagttgctcagcaggacagccaacctacctcgcagagttgctaagttggacttggtcggcccgtccgtctcgcagagttgctcgacaagacttgttcggtcagtacgtctcgctgagttgctcgaaaagacttggatggccagtccacctcatagagttgttctgcatggcttggtcgacctaggtgggctgccatgagttatgggcatactttgggtaccctgttccttggtatgcatcagcaggcctcgtgccttcgtgcaacttcttggagttgtgcggaggctttcttgttgggaactgaaatcttaggtgcacgcaagcgcatcttctagatgtagcccccaagcccccccctcgagtaatctgtgaggattgcatgggggtttaactgtcgttatttgcagttttggcatggacccttttttgtgatagtcagcatggttcccacttagcggcttcaatctcaaagtcattggctggcttttgtattaagatatgggtctgcttatcgtcctcagatagaccctagtgagcagcaactatggcctcaatctcatcagcagatagtcgtgccctatggccagaaccactacattctccatgaatgagagggttggacacgatctcgagaaaaggactttgcaacaagaaagcagtactgtcagcataaataatagagtaactcgatgattagcaatggaaaatcaagtgatcaaaacttacaaaaggaggaagattccatgcagaataggatcgaggagcaccatcattaacaatagcgcccctcagcatcaactcaacttagctcaagacatcctcctccgagattcgcctatctgttacccaagaacgatctctaacccagtatacagctatgtagggtatactctctcttttagaggctgaatgttttttaacacagaatcgatcaccaaggcttcgacagtcagaactctatccttcaaattagcaatctcgactaacaaaatcctcggctcagtcacttcagaatcagttgggccctctatccaactgggcactcgcacatctggctacctcctagagctgggaggtaggtaattgttgtggttttcaagggtaaaccattcgtatcgccaccccttaatactatccttcaggggcatatccaaacatttagctttcttgcctcaacgaagttctaggctagcccttccaaccacttgttgttgtccacccaccatacctggcttacagtggtagagatacctccacaatctaaaatgtgggctaatcccaagaaaggcttcgctgagatgtacgaag

SEQ ID NO: 179734 - DNA, 448 bp, Zea Mays
gcagagagcacgaacagacctggaacaagctagtcacggcgagggctctttcacggtggcggaaaacagatttggggagaaagagaaattagagagctatggtggctaataggaggtaggagcgggtgctctggcttcgtgattatctaacggagctagcggtgtgcttaatttatagtgttcaagagcggtggcctccaattttggaatggcgcggtggcggtcgaagtgcaagaagatcactggtggcgcaatcgtggcgttcaccggtgcagtggttcagagagggtaagcctaagtgtgccacggttactaccgcgtagtgaagagtcacggcgtggcataattgagatcgccggagtgtccacgacgacaccggcggtccggccacgtcgcaacggctacaggcacggtgataagcttcccctgcgaccacatctgcttcccc

SEQ ID NO: 179735 - DNA, 458 bp, Zea Mays
tattcctcctccacatgacatttctgctgatctttcttctgtgtgcacggatccgttccagatattgacgccggacaccatattacagcaacggtgcattcgtagaggtcgtgctttggttcagcaggtcttggttaaatgggtgggactgccgaatcatttggctacctgggagcatgttgatgatatcaagtgtaggtttccagcaacaacagcatgagggcatgctgcatgtaagagagggggaatgtcaggaccatggttagtctatcatcttcagtagagtatttgaatattcgtggttgggccgtcagcccatgtaagaactaagaattggccggcagtatataagccggggtggtggagggtttaaaaacaagaaaaaagaacagaactcgtttacctgtatcttcttcgttgcctcacggactcagccgtgttctctgtcttcctctcgc

SEQ ID NO: 179736 - DNA, 942 bp, Zea Mays
acgcaaagaccggcactctccgtcgactggcacctaattcaagccttaaccgaagtttcccctcaactaatttcactaatggcgcactaacacgcctgaccacggtgaccgtatggacaacggacaatctaatgcgttcccggcgatctacgacagctcagctcaattgaacgggtcagtgagcatcaggaacaagcaagggtgcagaaacaagaaagctgggggcaggatcggacctgaattggactggccacggcgaggtcccaagccacggtgttcttgagggatttgggggaaatcctaaattggggagttctaggggaggatttgaggcacgagttgcttcactagttgcgcaattacctagcggagcgaacgggggcggcaatttatagcctccaacggcggtggcatccaatttcacgaggatgtgttggcggccggaggggaaaagaggtattggcgctcgggacgagtggctttcaccgtggcagccctccggcgatcaccggacatgcataccatgattcatcgcgacgtgggctagtgcttaagcacgtggcgcacaacgatgagcgatcaacagcggcgaaatctatcccggacgcacgacgagcaagtgggtacggtgaatctcatccgcgcccgagcccgagctgatccattgctaagatttttactccatcgtggttatccccttaccagcgaacacgaatcgcggcgacggtgtgaatcatggcgtaaagatcaccggcggcgagggggatgcattcgggatctgattcagctactgtaccatgggacgtttcagcagacagcctgccaatcgatgtttaggacagattttctcccaatttttcatcgcaacacaaccaatgctctgcagcaaagttgtagccctacaaaccatcttcacttttgctatagcatccctagtcaaat

SEQ ID NO: 179737 - DNA, 577 bp, Zea Mays
acgagtttttacctttgaaatggctgactgcggtgaatgggtggaaagaaaaacggcgtggtcaccaccttcagtgcaactgacaagagaaaacttgggcatctctgtgatggttagtggagagttggaagggtcatggcaacataagctattcagttcaagtgatctaaactgaagtaatggaagtgaggcggtaatagtttcagacccaatatttcaagtaaggcatagcaggcacgacggagttcagtgggagccggttaaagaagactctagagtacccacatagacatggctatgggcacgtgttgcactgcttcagtctaccaaggatccatgaatagaggaacctaatgtgttggttcaacctggttttgacagcaaaacacaagcagctgagtcacccctttcaagataaacttcagttctgcattttcccccttctctccttttggtcagtgaaaatatatccaacgtgatccattttccagctctccaggtctcaactcgttttatctacaacacagcagaaatatctagagagggtggtgaggagagatatttgttttccagacgt

SEQ ID NO: 179738 - DNA, 504 bp, Zea Mays
acgactggttctggcttccctcattggttaataaaggaaggagggaaaggagtagtgcacaactttatgggtggagtactagccgagttggctggtccccaacctaggtcctcggagagttcggcggcgtgatcacggatggttacgtggagagcgtgttcggctgactgggtaggtcctacacctgtctccgagtatccacatgcgcggtacggaactgggtcaacggacccaacagcacagagaggatgtccatatcggcaggcgccgttaacagctgagcgcggcccacatgcaagtgaactagggacaagaatggaggagagaggcgcgcgcggtgactgacgtcgaggtcccaccggtctgtgtcatggtgagagagtttcctggtgggccaaatgaaggatccgaggcctaggtgagtttttctctttttcttttgtttttatttcctgtttcccgtttttattcctaattcatttgaattcaaattttgaatttaac

SEQ ID NO: 179739 - DNA, 423 bp, Zea Mays
tcaattgctcctatgcaatccttgaagtggggccaaaatctcgcctctcgcaaacgaggatgaatctcgatgaaatttgggtctttgggcttgattatgtcagatgacatcttatacagtgcattaaggacttcactatacttgcgactaatagtttccaaggagtgaccaaacttattccttatctgcctaaatgattgtggacccccacatgcccacaagaaaatgcctagagcttccatagtactgacaccccagcttggaagcagaccataattttccaccaacgtatcatgcaatcgtctaaaaacagtacgtcgcatgcgaaacatgttgaagcagtcgttactattctccaaagttctctcaacccattgaataccagtttcaaccattgttcttctaggaacctcactgaaaggc

SEQ ID NO: 179740 - DNA, 655 bp, Zea Mays
ctcggcccaaccacactcccggcccatttttgcgccgctccaacctgcgccgacacgtgggccactgtcgtcagtcgctgccaccgacttgtggggccacaggggcagaccggcatcccgcctcggctgtgtgggtaaccgtgttcctgcgtagacgacccgcgtcgtcaactctatcttctccttcctttctccccggtaacaaactctgttcctataaaccggaagccgcgcggatcgcgttgtagctgcaaccgaccttggccacgcatcctccagactcctctggcctcgggtctatatatgcgtgagcgccgcgtcactagccatcctggatttgccagggtccgctcacgccgcgttagccaccgtagccggtcgagagaggagagagggcgtgtgagccgtcgccgatgggatcatcatctgctggcgtatggacctcgggaggcgggcgcatgaggtcgtggatacacgccgttcaaatccacggcttcgatgagcaaggagagagctaccaggcgaggcgcaccagagagcagaaggcgccgccgcgagccatcttcgcctcaccgacaacttagcctcggtgggtgcccaaggatcatcgccggggaaccatggaagcatgcgtgtggctctctcgagaccaggg

SEQ ID NO: 179741 - DNA, 506 bp, Zea Mays
gttttagtccctctaatcacatccgatttttagacttccaagctagccctgggattagaagagttaaaatcccctcttctcctaaactagcactaagtggtgctagggtttggaaggcagaccagtggtgtttttgaggtcggtttggaaggcgaatccagcggtgttgttgaggtcgatgcgcacgaacatggtggcggcgttagggttttgttatggggcttgggatcgaatcaatctgaatggaatggaggcggggatggaagggaatggggacgtcacgtggtgcccacactgcaccctactatcgctgccctgctgctctccgtagtccactcctgtccaagaactggttgtcaaatattgtagctcctcagcttatccattctcatcccatccaatctacaaacattgcaaagcttatccattctcaccccatccactctacaaacatcgtagattaaaaaaaacaatattaacgcatggaattcaattcaacaataggc

SEQ ID NO: 179742 - DNA, 493 bp, Zea Mays
cgacagagagggttagaaacaaagcttaggcccccaaaaaccagtgatgttgtgtcgcagtgtcccatcgtcaatcggcattctccccgctgcactgccactgttcccttgcccttgcccgcagggaagagcgacggagcagctgctttcctctttccacgtctccctacacctcattgcctcatcataaaatcccctcgctcccgcactctcagctcccacctcaccacaccacgccacactcgcctcgtgccctcgtcctcacacagtcacagtcctcccccggcagcggctctccgctgccaaccaactccaccaacaccccccacaacagcaggagaaaaaaagggacgagccatggccatggactcttcctcctccggctccgagcccacgtcctcgtcctctgctgaggctcctgcgtccccaaccgcgtcgtcctccgaatcctccgccgcgggcagcaagaagcggcggcgcagcaaggacgggc

SEQ ID NO: 179743 - DNA, 776 bp, Zea Mays
atataccttcaggtttggagaccaatttatcgaaccagacgatgactggctgaagtgcatcgaagctacaagtgatgaactgcttgggccgtattccaaagtgaaagataatgcattatctgcggccttcggaagccagaagaagaaaaggctaaatagtgtttttgacgctattgggttcatgtaccctgattaccgttacccgccacgggtgcagaagagaaagagtgcaacttccgggaaggatgctgcttcagctgctccaagcgagcctgcgccgaagaggaaaaaggtgaagcttcttactcaccggccgcgatatattgaaccggtcgtagtgcccgaatttggcggtgagacctctttggctactgaagccaaggatcctgcgcctacgcagaagattgaagagccggctgtaatgtcgaagacatccttagccaaattagctgagccaaaggccgataatataggggccgaaggaacaaagatatcagaaattacaagcccttcgacagaagtgacagtgccgaaggcacaaaaaggtcttacagcgacccctaagaggaaaagaatggtcaacgtactagatacgctggagacaataaagacaagctctactccaaggaaaactgccgaagctccaaagacgcagtctgagacaagagtaaccaaagccgaagctgcaaagagccaggccgagaccgaagctgggccttcagagcccgccaaggagaaatccttggaaatcggagaaaaagaaacggaaaaagaag

SEQ ID NO: 179744 - DNA, 582 bp, Zea Mays
atacggggagtcgttgaggctaatcccagagagtacattctctaggtaggacatgtctgaaattactctgcctgggggagctgaccatgtagagatgacgcaagcccctgctcaggaggtcagagacgctaattgatttgtcctaggcatgctcgaagaggaggggaaaagggtggccaagtcttcgctggcgcaccaggcatcaagtcagaaggaggtgctgcagcagtctcccacatctcaggttgtgatggaatggtagagagggaggactttattgaggctattctagtgatcaccctagagcatgtttgccatgcacgtttgatcccgaacctagatttcccaggaggaggatgttgaggtaaatagtctgtgaagcatcttcaggagcaagtaggagttcgagatcaggatatttttgaccctagactgcctctggctgtagacatcataccaaggaactaagcagttggcgccttttgcttgcttagagccagcccagaggaaccctctccgcttcctttcgatcctgtcaattgcggtaggggtagcctcattgcacctataatgcggttgaga

SEQ ID NO: 179745 - DNA, 549 bp, Zea Mays
gccgggctcttggatgaaacaatggtttatgtcaagaatgatttgagtaagagggaagatgtgaggggtataatccagcgccccatacggtcacgcttcggcatcaggagaccatcgatcgcaagtgggaacgaagtgcaagcatgtttgatggccttcaacatggtgtgtacttacattggcaccagggatttggttcaagagcatattgcttaaaaggtgtggccacttgttagtgactgggagatgccgaaggagactactgctggctccagcgaaggtggtctggtttgtctaagatacacctatcactatagaagccaatttgatgagccgaatgatgactggcttgaggttgttgaagctaccagcgatgagctgttgagagcttatacgaaggcagaggacgaagccatgaccactgcctttggtgctcacgacaagaggagactgaacagagtttttgatgtgatcagagttttgtatcctgattactgctttcctgcccaaaaacaagggttgaaaacaaaaatggcaacttcatcttct

SEQ ID NO: 179746 - DNA, 628 bp, Zea Mays
cattgagacggccacattgccgaagctggatgaagggacatcttccattgccgaaacaaaacaacctgctcctgccgttcggagcgccaaagaatcagttgcagtatcgaaggtttctgcaaccggattggctaaagtgccgatacaaactgccgaagctgaagaagagacaaccgagaagctagaccgagaggaaaaagcaggaccgtcagagatagaattgccgaaggtggcaaaaactctcgcaataacccccaagagtagaagaatggcaggcgtgctagacgctgtcatggagacaacaagggcactaactcctacccctgcaaagaaaattgtcgaagctgctataagtcacgctgaaaccaaagctgggccctcagtgcttgttgagacggagcctgccgtaactgaggataaggctgagcaagaatctccagatgttggcatggctatggagaaggatgtggccgaaaaagctaattctcctgctcccgaagcaccatccgaagatctcgactttattattcgacatgcttcggaaaaaagactatctgaagaagaaattgcagaagccaaacactatgcccgggaactgaaatacccgaagggggccttagtgttcaac

SEQ ID NO: 179747 - DNA, 1358 bp, Zea Mays
gcacatcactagggtaagtaaactatgaagaataccagtgctgcatcatttgcccctaaaaagtgttagggaaaacaccaaacatccatggccccgaattgggaaagcgaccaccatgagaaggaaaccatgttctgttgggagagtaagaaccaaagcctctaccacagggtccttggccatatggcacacaaccaacacctcgtcgggcacgtgtgatctcattgcctgaggcctagcagcaagaggcaaagcacctctaggcatcgcaatacatctttgagcaagaaaatcatgaacaccatgggaggggcaatttgtgttccttctactcgacccagaaacccgtcgctcatctctgttcctcctaaagcagaaagcagccaaattaccctccctttcataatagtcatagtgaaatctcacctctctcttaggtggagtctgtttgtgagttttgggctttttaggtggttgaggggctctaggaaggggatcactagatatgtcgggaagggtatcaagtgtgttcctgaggtggtaaggttttgaaacccacacttgctttttatgaggggttctcataggctgctcaatcataccatgtctctcaggggtgatagacttagatggagtgattttgataagcttaggagtggctgagggtttcaaggtttcaagccactccactaaccaaccttgccaaactgaacatcactcccagacctagaagcaaagagtattctcagtccgccagttctcctcttgaactaactgaccaccatgcccaattgaggctcactacacgacacccaactcaagatcaatcgactccgatcccttagtcaagttccagcactcgtccttcaccactcccggtccatcgacccgagacgctacctattggcaatcactcatcatcaattcgaaccataagggaaaagtcagccttgtgttcgcaaaggctcattatggtttcttgttttcatttaatctatgaaattagcttggcatacgaggcatctgtgtgtactttaaatgtcattatgtttaaactttgttgggtgtgtttaaagatccgggcattgttgcgtctgacgggaagctcaacgagagtccaattcaagcctgtgcataccatctaaaggagtcgttgccactagacctccccaataaagcttttgagtttaaaaggatgtgcggactttgtggcggaggcttatttgcctttttcattagattctgtctttgttgtgttgagtagcttttttgttggttgctcgtgttgtcggctgttgtgtgctcctgttgctagagtgttgttgttgttggtagggttggtgtagttttttgctcta

SEQ ID NO: 179748 - DNA, 519 bp, Zea Mays
gtgtgatcagtgtgctcagatactcggtggatagagtactagaatgtgttcttggtgctgaaaactataacattttgtttctgttgttagaattcaatagtcattatgaacgattgcagaagtaagtgcggcgtgctggttttggagtcttttcctaatttatgccaattgatcagctggtaaggcatagaggtcgccctatgaagactagttgtgagcatgttgcaccgtcttaggccgattgctctgttagtagggtatagtggtcaccctaagtcgagtaagcgcgagcatgttgcaccatcttaagtcattgccgacttaagccgattgctccgttagtagggtatagtggtcaccctaagtcgagtaagcgtgagcatgttgcaccatcttaagtcattaccgacttaagccgattgctccattagtagggtatagtggtcaccctaagtcgagtaagtgcgagcatgttgcaccgtcttaagtcattgccgacttaagccgattgctccgtta

SEQ ID NO: 179749 - DNA, 735 bp, Zea Mays
ctgtgtctgtgcgtgtaaaccctaaacctaaagtcgctctcagctgcgggcgattgggcgaactctcctctccctcgttccctcagccgcctccgctcagcgcttcggtctccctctccgcctctccggtctccggctctccgcctccgctcggatcgatcgtcggagatcctctccccggctccatcctcaagacctcaacgaatttgcgcatttgtgaaccgggtaactcatatccataaccctagcttcgttctccctcatatgtctcctatctcctgtcttcttctccccctccggtgtcatctacaccaactggcactggcacacggcgcatcatcatcctcgtctacctcatcgtctccctcgagcagtcgagctcatacgccatcggcttgtacggtgctccggaataaatccgtcgaggaaccgggtgaccggatcggttgttcgtcgacggtcgaccggtcgacatcgcctgcggagatcccggtgctccggcttattaggaaacaggtaaccctaaccctaatctcttttattatgtaaccctagctccggtgcctgtctccctctcctctctcctatcttcttctccccctccggtactgtccggcattggcacacagcatcatcatcgtctccctcgagctcatacgccgtcggttgctacggtgctccggattcaaatccgtcgaggaaccgggtggccggatcggttgttcgtcgatggtc

SEQ ID NO: 179750 - DNA, 835 bp, Zea Mays
ataacttctcgatgaaaatgtaccttgtttcagcatccaccagcctccgacttagctaggttaccatgtgttccttttcttcggtctcttatgtcagaacaacttcaataactctatcttcggctgcaatatataacctgaatgacactcttgcatgtggtgcttttaatacgggagatgaaaacaaatattttctaataagatcaaatgcttcctattgttccacccccaggtgaattcgacatcatttttaagacgaaggataggagtgaaggcatcaatcttcccagctaggttagaaataaacctttgtaaataatttaccttgctgagaaacttctgcatctcaagcttataggtcggaggtcccacattctgaatggacttaattcggtcgggatctatttctataccatgttcatgaatgatgatcctaagaacttaccagccgacactccaaaagcacacttatgtgggttcatctttagaccttaccgacacattttatcaaaaactttgccatatgagaactaaactcagccgatttgactacaatatcatcaatgtaaatgtccatagtgtttcccaatagctcgtgaaagatcaaattcatagctctctgataagtagagccagcattttcagaccaaacgtcataacaacccactcgaataaaccaatgaagcatggacatataaaggccgttttagacgtatgttctttggacataaacatctaattatattcgacattaccatcaagaaagctaataattctattttctgatgcattattaatcaacatgtcggctataggcataggatattcatcctca

SEQ ID NO: 179751 - DNA, 1654 bp, Zea Mays
gacaggactagtactgtgttgaatcacaccactgtctagcatctctttgacttgtttctctatctcatccttctgctgaggggtgtaccgataaggtcgaagcctaaatggttgtgctccaggtaacaattcaatggcgtggtcaacctgtattttcggtggtaggctgtctggccggagaaacaagtgctgatattgttcaagtaattgctgcacagcttctggggtatttttaacagtcaattcagttacagtctacaattccaaccaatgctgcactgcttcttgctttatcatgaaacccaactgttccccgttcaggccgtaacaggtctgaacctttggtaacacaccctgcaggtgaactctcttcttatcataatcaaactccatccattttgcagcccagtgaactgacataggacagtggcgttctagctagtccatgccaagaatcatgtcgtaaccccctagagcaatgaatttgaaatctgttgtaaaagtggtgcctccacacaaccatttgcagtttggcaaccagtgttggctccaaagaattcccccatctgctactttaacttgcattggcttggtcaacagttcaatccctggtaagacattcatcaagtgactttccagaaaactagcagagctgcctgaatctactagcaccagcaattgttgacaataaactgaagcccaaagtcggatagtcctgctgccctcaccaccctcagtagcagcagcagacaatgctagcacactgtcttcattagtttccttactgtccccgatacagtcctccagcttctcctcttcattgacagccaattcccacatttcttccaccaagtacagaggaacattagttgagcagcggtgttcatagccccatttgttcccacacttgaaacacagtcctttagcctttctgtacgccttcagagctaatagcttgccctcatctcttctgccttgttgtggtccatggcctcgacgttcttcagtgttgctcaccgccctgttgccccccaatggtggtaagggtagtggcataggcgttggcttaactgaatgtcggctggaataagcaccaaatttagttcttcgaccatctcttcgccccgagtgcagcagcacatcctcctgcaataaagccaaggatccagcagtatcccaatcggatggacgctgaataattacagcacttttaatctcgtctttcaacccatctacaaaccgaccagtgatcatagtcgaagtgaggtggttctcatgggctaataattgatgcataagctggtcaaattgttctacatattcagctactgagttggtttggtggatgtgatagaagtgtctaataagcaggttatgctgatctctaccaaacctagtgttcagcgtagcacagagcgcttcccaactcagttccctgattctgtgctccatagactgaacccaatacatggcaggaccctcaaaatgcatagtagcaattctaacccatttctcaaaaggcgcagcatagaaatcaaaataggtctcgcatctgtgtttccagagctttgggttggatccatcaaaaacagggaacaccatattgggcatagttgggccactcatctgtgaccaatttgctactgagttccgg

SEQ ID NO: 179752 - DNA, 811 bp, Zea Mays
ctgggttcctgtctgacactatcttccttgggatgccgtggagtctgactatctccttgaggtaaatccgggcaagggtggctcctccaaaggtagttttcactgggatgaaatgggctaccttggtgaggcgatctattattacccagatggaatcattccctttttgcgtccggggcagtccggttatgaagtccatgcctatttcttcccacttccattcaggtatcgggaggggttgtaataggcctgcaggtttttggtgttcggccttcgtccgttgcagatgtcacatcgagccacatactgagctatttctttcttcattcccttccaccagtatctggttttgaggtccaggtacatcttggtagttcctgggtggatggagtaggccgagtcgtgagcttccttgagtaggacttcccgggcctccccttttggtacacacagacggtgtttgaaccaaatgactccttggtcatctgtcctgaggtccgggagttgttccttgcgggctttctccacaagccttgctatctctgagtctagtcgttgagctttacagatgaggtcctctagcattggtttgacttcgagactgtcgttgttccccagacatgcatttagctgtgctgactctttcttccaatcttctagaaaattggttccttttattccgaatggttttcgactgagggcgtcggctaccacgttggctttcccggggtgatagtgaatttctaggtcataatccttgatcagctctaaccatcttcgctgacgaaggttgagttctggttgagtgaat

SEQ ID NO: 179753 - DNA, 494 bp, Zea Mays
gatgaaaaggagtgaatccagttgcccggcattcagtcatgtttagtgcccagactacttcaggtagctggtcggcccatttacccttcctgtcgtcaagaagccttttcttgattgcagtgaaaatcttgtcgttggcgcgctcgacgacgccgttggattgcgggtggtataccgaggcaaaggcaagcttggtgccgatggagaagcagaagtccctgaagtcctagctgtcaaactgtttaccattgtcgactgtgagctcggatgggactccgaaccggcaaacaatgttttgccagaagaacttctgggcagtcttcgacgttattgtggatactgccctggcctcgatccacttggtaaaatattcgatgccgacgaaggtgaacttgaggttcccttgagccgtaggtagtggcccgacaatatccagcccccagcgttgaagtggccatgtgtggacaattagcttggtgaactgcgaagggttg

SEQ ID NO: 179754 - DNA, 471 bp, Zea Mays
ctcattgtaagccacatgaggaacaaggcggaccatcttgttgaagcccacttcatactctgtgatagacttcttctcttgcttgtaggattgcaaatcaatcttcattttctctaggaaggtgaccgggtagaacctcctctcaaactgcctgatgaaaacatcccaggataggactcctggtgaagaagagtgagctgcctgcacgcccctccactagatttgagcctctcccttgagcagctgtatgccaaagcgaacacgatcaccatacacaatctcaaagacattcatattatcctccacgtatgttagccaatccgccgccccgaccggagtaccactgccatcaaaagtgtccaacttcatgctcatccactgcatcagcgaaagaccactgacgggaagaggcacctcaaccccgccatctggagcagcacccgcgggaacagcgcccccgggcactcctcc

SEQ ID NO: 179755 - DNA, 527 bp, Zea Mays
cgcgcattgaatgctcatgtccccttggggcctttggctaaggcctggctcggggttgtcttccttgctcgagacgagctcgggcgaggcagaaatggtggttcagcggagagggacgtcggtcgggacaaggatttcccctagtatgtaccttgtccgagggcaggctcatgcgaggcagagttatgagtgaccgctgagaggggccttgggcgaatcgtggtttactatttcttgtcctcggggaatgtttctgacagtggtcttggggttaagcgcgttttaggggcgtaatctatgtacccctacttacgatacccgacatctagcttctcaaaatcaatggtgaaccaaacaccactgtacttttgtataactggccaaaccgattttagaaatcgaccttactatttttttagttcagcctgagaaagctctagggcagaagcaaggatatcacacctacttaatgaggaacaacaaagtttacaagcaaaccatcaaaggtaactgaaagtcgattcgaa

SEQ ID NO: 179756 - DNA, 1564 bp, Zea Mays
cctgaaaccaaacctaggaaactagacaaatcaaggtagacaaataagatccacaaagatgacccagacaatgatgtcattgagcaaaatatgacatggatgaagcaactaatgcagagccgacagaactggcaggtgtcgtggaaggaagatgaagccaatcaagctcccaaaggcgatgagagtcattactcacgacgccgagggccagtaccaaccagacgacccgtggaacgatcctgaacataatagaaatcaggatcaagaataacacaatagtcatgatcaataagttgactgacggtcataagttgcatggtgatatcaggaacataagaaacttcaagaacacgaaacgaggtagataaaagagtgccctgtccagcaacagacaaaggggaaccatcaactgtatgaatagtgagagaacgagatggaacctacatggaggaaagatgggtggaataaggaatcatatgaaaagaagcaccaggatcaagaatccagacatgagtacctagaagaataggtggtcccttggtagaagacagaaggccagaagcaacaacataacctgtcgaagcggaaaactgagttactgaaccagcggctcccggtggtgtagagacagcaaggcgacagagcatgagcatcccctgggtagctgcattagtagaactcctctgagaacctgcagcactagaactactagtagtatgtgaagaacgacgagcaagccgttgattctttttcttgtaacagaaagattccacatgtccatcctgtccacgtccgcaatgatgacaatgaagaccactaccctttccatctccagaaggagaatgtgctgaagacgggaacgaccgcgcgggagcaacaggctgggaaggcaagaacgaagaccgagcagccaaaaccgaagctgaagaaaacaacagaccagttgtacgaaatcgagtctcattgcgaacatcagcaagagcatacaccagagacacaaggatgacaaacatgtaaccggacacgaacgaagagggtcaagtcatatgtgcgacaaaactcaaggtcaatattttgatcgagtcagaagaactcacgtgctaggagacatatgtggaccaagagtatcaagctgagtagctgacgccagacaacaaacatctagctgtagaactcattgactgtagaatcagcctaacataaggactgctcctgagaaatagcagcaagataagtagggtgactagtacgcttctagcgatcatgaagaagggtccacatccgatgggaactgtcacactcattcactcaatgacctttgcagcaaagcgatcttccatattagcagtgagaatagtaccggctcgagcatcctcatccatccatatccgatatgcattatactgagcctcatatgatgccaagtgaccatcataatctgcaagcaactgctccttagtcttaggagtcaccttgttcgatatcataggttggacaagagccataggtaggagtagtaatgggctttaaactttatgctgcaaattttaaggatcgaatcgga

SEQ ID NO: 179757 - DNA, 586 bp, Zea Mays
taaaaacctaggaaaattcttttccaagaagtcttgagtctcccaggtagcttcatcttccgtatgctggttccactgtatcttataaaatttaagagtcctttttcgagtgatcctgtccttttggtccaaaattcgaatgggatgttctgaatacgttaagtctggttccaaggcaacatccaccacatcgatggttcgatcaggaactcagaggcatttcttcaattgagatacatggaacacattatgcactgcagataatgtttctggcagttgaagtcggtaggccactggtccgtattgttcaagaataagaaataggccaatatattggagtgtcagtttcccttttaccctgaaacggtttacacccttcattggtgatactttcagatacacatggtcattaacttgaaagaccaaaggttgacgtcacttatccgcataatgcttttgccgagcttgtgcctctttcaagttgtgtatgatccgttggactttttcttccgtttctataaccatgtctagcctaaaaaaccatctttctccgggtttagaccaatttaagggtgtccggcaccgt

SEQ ID NO: 179758 - DNA, 693 bp, Zea Mays
ggcggtctgggcaggccagggaggctggggaggacccgacgagcattatggcgaagcttgggtcgcgagaatgggaccaaggcgggcagacatcggagaagggtctcgggtggaccggagagcactctagtgagcaatccctattgtggtgggggacaatccggtgcaccgaggccggcatgagtttcagtgaggggtaggggtgttctatgcccaggtttggacacggggaagggctatactagccgggcgccaagaggatgcggtggtctgatgaggggtggttctggtgagccgaagttccttacagtgagatgaaatcagtgcagacgaagggcgaggaaggttccgttggaggggaagcttggcacgacggttggaggcttcggttggctagacgacgaggaatcacaacggcggtgaactctggtctacgcagaggagaagttaggcctggaccgggctgaggagtcactgaaaggggaaacctaggcgggttcctggtgcatcgagctcaggcgaagctcactgtggctgaggcgatggcaaaggctcggcgggatggcggaacgatggagcaatggtggtggcgacactgtgagctgggtgagtgcgagtgtagggagagagtgaatcaagggcagggcaagctgagtgggggtccagggtcttcacctaggagctccagcgacg

SEQ ID NO: 179759 - DNA, 294 bp, Zea Mays
tcttttcctcccggggggtgaggtttttaacgaggcggagccatgtaatatacctgcaaaaatcccccgcaaaaactaagatgcaacatgtcaaaaaagaccgcatcaacggtcttcggcattcgaccactccgaagtcaccacgagaggcagcacagactaccctcgcgtgcgacaactccgcgcaaaagtcgcataagggtgcagccggaatagcacaacaagtgcgttaatcagtcttttattcaaaagacactccgcgcaaaagtcgcctaagggtgcagccggaatagc

SEQ ID NO: 179760 - DNA, 767 bp, Zea Mays
gttttgtcaggatagcaagggcatactatggttcaaagaccaacttgttgttcccaaaaatcaagatattaggaagaaaattttggatgaggctcatctctccaaattttctatacactctgaaagcaaccagatgtatcacgacctttgatccccatattggtggactaggatgaagagagacattgctaagtacgtgtccgagtgcgacacttgtcaaaggtttaaagcaagtcacctgagggcagtaggtaccttgcagcctctccctataccatcctaaaaatgggaagatatcagcatggattttattgttggattacccaatgcctcctaacaccatgattctatctgggttattgtggacaggctaaacaagacatctcattttctaccagtgcacacaacttactaggccagaaaatatgcagaattgtacatcgatcgtatcgtctaactgcatgaagtgcctaagactatcatctctgacagaggtacccagttcgtggcacgtttttgggagcagctacaagaagaacttgataccatgttaaccaggagctcagcatatcatccctagactcacagccaaacagaaagagtaaaccagattcttgaagacatgttgagggtatgtgtgatccactatggctagaattgtgacaaatgtctctcattggccgagttctcttacaacaacatctaccaagccagtctgaagatggcacccttcgaagccttgtatgggaggaggtgtcagacacccc

SEQ ID NO: 179761 - DNA, 505 bp, Zea Mays
gacaaatgccgacgtgttcgcatgggagccatcgcagatgcctaggatccccagggaggtgatcgagcactgcctgaagattaaccctaacgccaggccagtgagccagaagccacgcagacagtctgttgagcgaccgaacttcattcgaaaggaggtccggaaactgctagacgctggcttcatcgaagaagttcatcacccaatatggctggccaacccagtcattgtccccaaagcaaatgggaaacttcggatgtgtatcgactacaccagcctgaataaggcctgtcccaaagacccgtatccactgccacgtatagaccaaatcgtggattctacctccgggtgcgatctgttatcattcctagacgcttactctggtttccaccaaatccagatgtctagggaagacaggaagcatattgcttttgtaacagtggatgggctgtactgttatgttgtaatgtcgtacggtctgaaaaacgccctaccaacatttgtg

SEQ ID NO: 179762 - DNA, 671 bp, Zea Mays
aaattcctacaatttttttgaaaggtttgtcacttacattttctccattgtaattgactgaaaactaaaattctccaacctctctatcacatgcgtgctggtaaatctgaaaaagctcaaaaacaaatacgtatcccaatcttacttcttgatttatgtttttccttgcattctacctttttctctcatcacataaacattttattactctaatgtttatcctatttagttaactgcaattgactaaaaactaattttccctagcctctctgtcacatgtacattttattgttttgttatttatgcggagaaatccgaaaaaagctctaaggcaagtatctcaatctttttttagatttatgtttatttccttacatagtagtttctttgtatttatatgtacaagaccgtccactctaatactttattactctaatgcttgtcctatttagttaactgcaataaaaatgctttccattagcctgtcaacgattattttcttcaacctttgctcagcttcgtggttttagggtttgttccattcgtctgcgacatctatggggaaaagtatttggattactaccagctgcgtattggagaatcttattctaggaattctttctctgtccctcccacccttttcaatttgagaatggaaaggaatagcatgc

SEQ ID NO: 179763 - DNA, 621 bp, Zea Mays
cgggaaatgttctatccacctgttgacctgtatgcggtaaatggtcggtctttgttaatgctaagaccggggctcggacctagaactccaaaaaaaatgcaaagtaaacattaaactcatcaaaataatggttgatcacttcaataccttccggaatgatgccgatgcatgaccaatttctttcttgttcctcggatccgcctcaacgatattcagttttaacgaattctcctgcagcttatgatcctacacagttttcacaccatccctgcgagtgagcacctgcaccaggaattatcaagccaccatgagttagcctgcaagaggccttcctgaagtagaaaaatgacgacacctgctaattgctgccccctcgatgagctggcagacgaagtgctatgtgtttaacttcccaccatcagatctatatgcgtggtggttctcgctgcacttccacccctcctgaactcatgtcacagcaggctctggcttccactcctcactgccatgcttctttattattcttgttagtctagattgctaacattcggcgtacaaacaagctgcccatctcctccgaacaatatttggcatccaagatgtacttcaaacaagttcttg

SEQ ID NO: 179764 - DNA, 585 bp, Zea Mays
agcgtatttaggcttcgtgtaggtacccccaaagagagcagaaagctaaagagacgaacagtaaaagagcaagagatgaccccccaaaaaggcaaaggcaaacaggcaatcacaaagcaaaccaagcgagcgcgatgcaaatgccgctttgtttttagaggctggccataccatatcatatcttcgccagcacgctcactgctcacacagtcacactcacacaactgaacacacccagagctagaggtaaaagggaaccaaaatgctgcgcacacgaacagatttctagctacggagctcgatctggagctggaggcagtatgtacagctctgggtgatcttggaacgctcgctcatgctgtcgaggatttttgagcctccgccgtacccgaaattctgtccgtacgcacggccatgaccgtgaaaaaaaaggcggttactcgtgccggtcgtcgtcgctgaggttggcggctgcggcggcggcggtgaggcggaggaggaggtcggtgaaggcgctgacgacgtacttgtgcgcgcgcctgtcgttgagcgcgaggtagcagagcagcagctcgtggaggcgcg

SEQ ID NO: 179765 - DNA, 494 bp, Zea Mays
gttgaagtttgggatgcttgtaagaaagaatattttaacttgagggccttgcttttttgtaccatccatgactataaaggccttggaaacattgcaggattatccactcagggatacaaagcatgctatatttgtcaagagaatacaaatagtcgttatctaaaaaacagtagaaaaattgtatacctgggacatcgtaggtggacacatagaaatcatccataccgaaagaatgttgatgcatttgatgggagtattgaaaatgaaaaggctccatcacgcaggtatggacatgtggtttatgagagtgtgaaggacattgaaaataagttcgggaaacacaatttagcattgtctggaatgtggaagaaaaaatccatattttggaggttaccttattggcacgatctaagtgtgcgtcattgtcttgatcttatgcatattgagaagaatgtgtgtgaagctttgattggtacaatttttaacataaaagg

SEQ ID NO: 179766 - DNA, 569 bp, Zea Mays
taggaaacctatttttaatggtcagataattcagtttctatagtacacacaaaacctccaactcccatccttcttctggactaatagcacaggggatgcaaagggacaaatactgcgcacaatcaaccctgcagataacaactcagctacttgcttctctatctctattttgtgtaagagaaaatacatgtaaggtctggagttaacaagtaaatatcctagtaccagagatatatggtgatcatacactctagaaggggggagttcagtaggaactacaaagacatcttcaactcctacaacaatgcatgcaaagaaactaggaactgctaattcctccttctctacctcctgctccagcatcattggtgcccacacatcacttcccttcaaccacttattcacctacaacatagaaacttcttgagatacctctctctttgcatgtacccatctcccttcaattggactggaaccctttatccacaaaggttagcatcttcctttgccaatcacactacatgaggctatgcgactgcaaccaatcataacctagaatcatgtcatac

SEQ ID NO: 179767 - DNA, 753 bp, Zea Mays
gtcaaatcctccttaacattgagttcttccatagttaattgttcctccggtaatcttaagcatttcttaagttgtgacacatgaaatacgtcatgcacatccgacaaactattgggaagctctaactggtacgctacttcaccttttcttcccaaaattttgaacgggccaatgtagcgaggagtaaccttaaatcttttcatgcctctcatcagtgaaactttaaggtatacaaagtctcctacttcaaatatcaactctcttcttctattgtgagcatagcttttctgtctcgactgtgctgttttcaaattctctctcataatctgtacttgcttttctgcttcttggagaatttctgtaccaaatacttgactttcttcggtctgattccaataaagcggtgtcctacacttttgtccataaagtgcttcaaacggtgccatttttagacttgcatggtaactattgttgtacgagaattctgcataaggcaaacttttatcccagcttctaccatgctttagagcgcaagctctatcttaacatatcttccaacacttggtttgttctttcagtttgcccatccgtttgcgaatgataagctgaactgaagtttagcttggtatccatggactcatgtagtcttttccaaaagcgcgaggtaaattgggttcctcgatccgatacgatcttctttggtactccatgcagacaaacaattcttgacatgtataactctgctaactgggc

SEQ ID NO: 179768 - DNA, 602 bp, Zea Mays
cccgattaaatggtggttttaagtgaactagttagcgttgtagttcgtcagatcgtcatccaacggcttaaagccgaccacgccacccggctaagctacacccttagatcaccgatctacggtcaaggcatgatccaccaaagcaatatgcccgatcagatctgagtcgttcatcaatggatcgacgacagcgcttggcttcgccattgcgacaccagcacatggcggcgccgcccagcttcctggtggtggagcacgtcggaattgcgtggatcgaccactacggcactattcccccaatcgtaaggtgctacatgtggaggagacgatggcgaacacaacaaagggattcttaccgatggtggggatggagagaaggttaggcatggtgattggcggcacccaggctacagcgagtgattcaccacgaatctgtaatgccccgagtcctgatgcccacggtatggtctccgcaaagcacggtgatgttcccaaacccgagagtgaaatctagatgagggtgtatgcgtgactcgaccacggcggaacgattcctctctgtgctacactcttgaccatggagaaggggggttggtcgatgc

SEQ ID NO: 179769 - DNA, 573 bp, Zea Mays
cgggaatatgttcgccgctgaaggggggcctagacatataccccagcaacagcaaccctactatgaaccttggtcatcttgtggtggatggaatgtggaacagcgtccttgcttgatctacctgctcgaattcgagagaaatgaacatgccagggttaatgtaatggccagggcctagtaatggctagttggctggttaggggttacaaatactagacttcaccaatcgacccatactagtgttcttgttcattttagtcattgaaccaatccatcgtgagtgtaagaaagtgcgaaagttcctttgactaataagggattttgtagttggaaatcgcttgattagcagcctcattaccgcatagagcacccattgatctctttggtcttgttaaagtcaagtgatagtttgtttttattactcttggtgatcgacatcatctagatggatcgattgtgatcaaaagtgcagtaatcaccaagagagcttgtgagtgatctaactcagaattgtacacggttgtgaatgattcaccatactggagtggtaaagaaccaacttatagagtgcac

SEQ ID NO: 179770 - DNA, 497 bp, Zea Mays
gtgacagcatatagtactgcattacatattacacctcacctaaccttccacatacgcctgatgcagcagtcatgccgttgcgctctgaagaagcaccaaaagtgatggcacagcacagacaaggctagcacataaaagctaaagctctctgatgcaatgcaagaaaccaaaggggagatgagaaaagacgagcgctttggacctttggtggggctgaggtgaattaatgcctttgttctcatgggctggatgggctataggctggcacggtcctactcgaatccatcacaccgcgcaaccgattgtgcacccagtaaagtgaagatatgactgtcccaaccacacaaacaacgttaatataataatagcataattaattttccatatgaaaaaaaggaattgccaacacatccacaaacgacaaagcaacaaggattccagagagaagtaccaagtactggtccagaggttttttttagatcggaccaagcggttct

SEQ ID NO: 179771 - DNA, 637 bp, Zea Mays
tcgccgtcgtgcacacgccgccgtggacccgccattctccgtggccaggcttgcccgcacaataatccgtggtgagcatgccctcaagctattcgtcctactcttcgcttcgtgtagcgccgttaggtttgttgtttggcgctctgggtggcgggagcagggaacgctggtgtgatccccgtcggtgttcgggcggcgccgccgtcttgggatgcctggggcgggtgagctcttggactgtcgattcgaactgggcggtctagatcaattcacagagtgggcagtcgcgtgaacaaattaggaccgtaggattgagatcgtaaagcccagattagatcgtatctatttaaatctgtgccgttgattcctaatctagcgctcgatatcgcgtaccggttcatcacggcgcggatgtaatctggaccgtagggtgtggatcgaacgtctctgattaaaagataccgcttcggccgtgtagttttacacatgtgcccctgtgtttttcctatatagaacccttcgtccacatacattgttcactgagtctaggattttatgcgagcagccccctgacctttctagaaaatgaggccctgtccagagaagattaaaaacagagaaataattatagaaattc

SEQ ID NO: 179772 - DNA, 949 bp, Zea Mays
gaaggtttctgatatgactgtctcatgcttgacacactaacatcgagtttgtccctgaacaacccggctacctattccctaatcttttctacaacatctgacaaccatccactaagcttcagaatgaaggttttaggtggccgagcattgttatgtaagtctttcaactaaggacgctccaagtgtgtgctcagtgtactactagtgccacctcccattgcccctgtatctctctagcaccctggaggctaaagagtattctgtcccatgggcaggaggtggtgttgaatggctataatgtgtagtagatgagatggtgtaatgcttctaggatacttgtggaaattgtgcatacgttattgctccatgttctccctacatatagtcagttggtctgagatagggtgccggacggtttgactaaactctagatagtctggcgtgcgtcgtcggatggtctgctattgagccgtggagtccggatctatacttggattgtctggcgctacatggctttgcctgggtggcgtgcatgtagattttcttagggtcagatggtctggtgaaagctgcctggtagtccgtgaggtggctggatggtccgagattaggttcgggtggttcggtcatgcctagagcttatcgtgtgctagaagctggcgatgcgtctgtggttgtgttgtgaatgtgttcatcgacataccatacgatagctaggctaatgatgacctaaatatagccaatgcgttgggtaatgctggctctgtattaggttcatatgacatgaatcttgggatagtagattttttgtacgaacatgttaacctcttaatagattcatctatatattgtttaactgatgcccccactgatggtcacatgcattgattcctaaaggggaccaaaatgggacaacacaattagagataacagatcttcgcccccaatc

SEQ ID NO: 179773 - DNA, 514 bp, Zea Mays
tgcgcataagaagaatcggtcgcctccttctcaactactccgcccgcaaccctcctgccctcctatttcaccagaccaagccggagccgcgtgccaaattcgaacggagagggaccgagtgccgccgcagccgcagaacccgctgtggctgaagcacgcgactgccgtcgtcgggctgacctgagccattgagggagcttcgcctcgacatcctgaggatatccgtagtctttccacgcaagatttggggccggtgtggcgtgaattggtcgtcggaggaaaagctccgccgtgcgcctgcacttcaccgtggacagctctgttgcgtccacgattcgtggtatgtattcatcgcctgtgcctgttttcgttactgtatcgtgtagcactggtccaattagatgtagttgcgtcatcaccggagattcgcttcaccggtgttgggttttcgccgtggccgggccgcggcggacgggggcaaccaacgcgcgtggtgacgacggatccgtggccg

SEQ ID NO: 179774 - DNA, 583 bp, Zea Mays
gacccggcgaccaagcttcaatctataaggttcaataggccgcggagcatcgcatggggccatacctgcacttgaagtagagcagcagcaaacgatgttgggcggcaacgcaccgacgaggtcttgcgagcggccgagcggagttggcagtgctcgccggagcagcaagtggtgatggaccgcagcgggagcaggtagcagtaacgcacgcggcgcggggactgggctatgctcggcgcccatggtgcagggaggcagatacccgcagtcgaggcaactgcgccacgacgtgcatgggaggaggacggagcatgcaagtaggggcgaagctccctagcagaaaggagcagggtctgcgatggcggctaatctttcggtattggcaaaacacgccttggcttgatagatatgggtgctcacgactaggatatataggcacgatcgagcgagcagcagcggagtttgtttggatatgctgtagtctgttatgatctatttagagggtgggaaagacgtgtggcatccaggttcatgcatgcagcaatacgtggaatacttagatgatgtcatgcctgaggtcatg

SEQ ID NO: 179775 - DNA, 701 bp, Zea Mays
ggaaatctttgcaaagatgaacaaacatagcaatttgaagcacaaaattgggattcagatgagtgagatttagagagtaaaaatcgagaagactgcgaaagatgggagaaactggtagggctagtccccggatgagaaaaggcacaaagataaccgccttgtgagtatcctctttcaagacagtaaccccatgctagatccgctaggaacatagttccttcggcgatagaacaccaatttcaacaagatgcagaaggtcagcctcagaaatgacagaaacatggttaccagcgaaagggagttggctgttgggattgatcggagggatgtctgggctggtagcactctgttttcttttcctgggtgccatcacgatttttcaaacggagtaaaaggatccgagaactcagaaatctagagagcggcggagaaaaaacaagaactagggttcagagctcaagaggatgtcaccagaagtatgggttagcacactaagtcgggcgcaaaggggcaggtcgatagcttgggagagttttggttgtagcaaaataacatcactcgggcattacctctaaatgctagcgaactgtgagacataagagcggagtatgcaacagtagattggcacaaaaacaggttttcattcaccaatgggggaatcattacaaaattgagatcgactcattatgagtcggcctccc

SEQ ID NO: 179776 - DNA, 291 bp, Zea Mays
ctttctttactccttgcggccttgccggactttgcatgcatgacatcagcatgcacatttgcatttaagccgtcagtcgtgcatgcatgttttgtcgccggaactcatgctgctgacatatgggcccataaaccataagcttcttctgtttgtaacaaaacaaaacgaacgccacatgctctgccagtttcgtagagctctgaactcccgcgtttttaagactatccgcaagcgttacccctaaattttttcccataaatgttactatacagttacgtcagcaagattccc

SEQ ID NO: 179777 - DNA, 660 bp, Zea Mays
ctagggaggaaaccttgaagggatgggggccacccaactgagtggggactaaaagtggggggcacaccaatcaaagcttgccaaagaacaaccatctcctcctgaagttgatgatgagcacctcacagacggcacatacaagcactacaaagtgccatccaacgcccttaaaagggaggaagcctctagggggagggtgacattatgggactacctgacataagattgatgtcaccgccaacaggagactgatgacgaagcagaggcgccaatggtcacgtagtacatccattaccggctacaaacaaccgctagaattctcctatgagcactgcaaccgaatgccatacttgcccgttcgacaaagatcattgtcctacctcaccacccttcatagctacacctcgctactgttgccctccaacatccaacgagaggaaggagagagtcccgaaggattgagggaccaccacagcagagaggggacctagagcagaaggagcacactaatcgaagcatcacaggaaactctgatctttcttagagattggaggcaccatggaagcacatccgaggcccaacctaccgccccctcaacacccatttaggtaaggaagcctcaatggagggatgaaagggaaatagggtttaaccttttcc

SEQ ID NO: 179778 - DNA, 516 bp, Zea Mays
ctcagagctagccgctcgggacacacccccaattccccttgctccttctagtttgttctaccctcattgaaccgctagttcctgtgcagtcccaaagccgctatcgtcgacccaagtcgccaccgtgtcgttgccacctctgtggggatctcaagactcacattgaggtaaggaatcttccctaccccctctggtcccctcccttactctctgtcaggtgcaatcgctcgtcaaagttccagcgccaccaacgagccacccaaccatggaccaccaccctccggtgccctaccttggttctgccccaccatggatccccagcacccttccccatcttccccgaccatcccagcagccctaaacccatggcattcctacacccctcgtctctggtgagcttctcaccgtggacgtgggcggcgtcgcctctagttgctagaggaaagggccgaagccggccgcccgatccccatcgttcactgcagatccataggttggattctaactaacccgagc

SEQ ID NO: 179779 - DNA, 555 bp, Zea Mays
cgccaggtagggggtcgctgcatgttgacaccacgttcccaccaagactctagatggacaatcatgggcaccctttgcagctcggcacggtgatctggttcgggagtctcgagttcatgtcccttggcttcggctatgacatggtgctcctcccatctagacacccatctgacgtcgactaccttttctcccaaccagggatcacgaccatgcctgctcccctggctggaggagggacatccagacctccgttgtcgtccttctcgctagaggagacgtagatggaacaatcacaaccacgctttgggtcgaccagccgatgcttccaggaaagctgacgacacagactccctcatgagggagatgttgtacgttagcttcgcgcccagagcgtcgacatcaacatacattactctaacatcgactccactagctccccctcctatgggtcaggaggtgccaactccaccaatagattggtaggaaccatcggtattcaatcccatccccttccggtttagctttgatcctccagactacccccatacaacaagc

SEQ ID NO: 179780 - DNA, 425 bp, Zea Mays
ggtcatcgtctatctcgtggtcgtggtccaagtgaggatcgcggtcgcaggacatggcgcagccggggtggtcgatacggaggaaggccattccatggagcattcagagctccacaggacttcgctgaatccagtgaagggggtggatcccgagttagagaggaagcagagaagaagcgtgcgactgttgatggtcctcttgctgatgatcaaggaaagaaacgcaaagaagagttgtgctgcgaaatttgtgaaatggatcacactccacaggtctgtccgacgttcaatggccctaaaccacacgctcttctatgtggttttgcaggaggcgattcgggtttcttccaaatccccacaagtggaggcaagggcatggcgcccaaaaaagataatgcaaccgcttttattactgcaatggaagg

SEQ ID NO: 179781 - DNA, 1633 bp, Zea Mays
ggagagataaataggggggttagattaggggccaacctcgggttgaaaatctgggatgttacaaacctaccccacttaaaggaatctcgccctcgagattcagacggggctcgagaaaaggtaagggtattccctcctcagagagtcctcactttcccaggtagcttcctcttctccttctctgctccactgaactttacggagtcttacttctgagttgcgggtctttcggactgctgagtcaagaacctttattggcttttcccggtactagagatctttttgaatctggattatctctgcctcgatgtggttatctggtacttgcaagcacttacggagctaggacacatgaaacacattgtggatatctgacatggattctggtaattcaaggtggtatgctgcgggtcccactctgccaatgatgggataggggccgacgaatcacaatgctagctttccttttatttggaaccttttgacaccacgcatcggggagaccttgaggtatacgaaatctccttcctcaaatctgagttctctccgcctgttgtctgcataacttttctgtcgactctgagcttcaagtaatcttttgcggatcagggcaactttctcttcggcatctttaacaaaggcaggtccttctagtgtcatttcccctacattggaccacattagggggggtctggcactttcgtccatacaatgcttcgaacggtgacatcttgatgctggcctgatggctgttgttatatgagaattcagcatacggcaaactggactcccagtttctatcgaacgtcaacacacaggctcttaataaatcctcgaggaccttgttgaccctttccgtctgaccatctgactgggggtgataagcggtgctgaaatctaacttggtgcccatagcttgctgaaggctcttccagaattttgaagtgaactgtgtccctctatctgtcactatcttccgagggataccatggagtctgactatctctttaagatatatccgggcaagggtggctcctccaaaagtggttttcactgggatgaagtgggctaccttggtaagacggtctattattacccagatagagtcattccctttttgcgtctggggtagtccggttacaaaatccatgcctatttcctcccacttccattcgagcactgggaggggttgcagtaggcctgcaggtttctggtgctcggcatttgttcgttggcaagtgtcacactgggccacatactgtgctatctctttcttcatccctctgcaccagtatctggttttgaggtctaggtacatcttggtggttcctaggtggatggagtaggctgagttatgagcttcattgagcaggacttcccgtgcctctccttttggtacacacagacggttcttgaaccaaaggactccttgttcatctgtcctgaggtctggaagttgttctttgcgagctttttccataagtctcgccgtttccgtgtccaggcgttgagctttgcatatgaggtcttctagcattgacttgacttctaagctgtcgttgtctcccagacatgcattcagctgagctgattccttcttccaatcttctaaaaagttggttccctttatccc

SEQ ID NO: 179782 - DNA, 765 bp, Zea Mays
cgaaatgttttatcaaatccgtaaaccatgttaatgtatgccaaagttcgagaaactgaattccgcgcgagactaaaacggcagcggttttagggcataggtagcactaactaaagctatgtatgttctatgttcgttcttgggaaaagaagtgtactgagccactaagcatagttagtgagatcgccacattccaggttagaaaaaaggtcttggactacagatgctaaagctaaggaaagaagggaaaataaaaatccatccgcgttgtgacaccgcgcccacgcgttcatcaacagatctatccccaacagaaacaaacatgtggagaaaaaacaaagcaaggaacacagaaagatacgtggaaatacgggtgtacagagtgtatatataatgtccatgcagctaagctagcatcactttaaaagagacagtacagtatctgatccctgactaaacaaagttttgctcgaattgacctcgtgaacatcgcacgcagaagagaaccgtacgtacctacctttcttttggaaagataacaaataaataaaacactcataataaacatccgaaatgcagggcatggtgaggcactgaggcagatctgagatcagatcatgcatgcgtaccgtacctccatgtgtataaatacaaatgaatgcatgcagcacatgcaagattgcagtgacgacgctcacctcacttcatcagaagaaaccaacaatggccatcaccaggatccagccgctctccgcccacctccac

SEQ ID NO: 179783 - DNA, 697 bp, Zea Mays
ctgcggtgttcttgagacatttggaggaaattcaaaattgaagctctctgatgatcgattgagggcacggtttgggtggcttggtgcttgactaccctacggagctcacggtggcctcaatttatagtaggcaagagtggtggacattgaatcggacgacgacgcgtggcggtccgaggagtgggaggtcactggcgcaaggaattcgtggcatctaccgtggcagccctcaccggcgatgatcagacggccaaagtgagtcacgacgatgcggtgaatgtgcccaggtatgtggcgcaaggccgtgaagcagctatcaccggcaagctcatccgaagcgaccgtgacaaactcggtacggtggccggagtaaactattggtcgaaagatatccacggtgacgatatttactcaatcctaagcgttatccaaccgatccaagcacgaatcaagacggcgaaggcacgaatctgcgcgcggcttgtcggcggcgaggttctctgaacctgatcccccccgttcactgtaccatggtgattaccatgcagtcagtctgtcagagcaaaatcagagccacttttctcctcatttcatgtgacaaccccatcatcccactgcttcaaagttatagcccaattaaccaactgcaatcttgctatggggtcatgcccaaacttgcgctggatcatgttcaaat

SEQ ID NO: 179784 - DNA, 598 bp, Zea Mays
cggcgcttctgtcgcttgcccgtgggccccggtcgccaggcaccttgtgcgtgcgcgtcttccttgtgccgctgacagctgggtctagtccgtcagctctatcccctccacccggacttcggcatacatgcattgccacgtacttcgcataggattcggtgccgtccattgtgggggacataaccggaatatatacccgaccttgggtacctttttcaccccttgaatacccgagcagtacccctaggagccaccatcaccgagagaagcgagcatgcgtaggtagcgccgccgggcctccgccgacgttgatccccgcctccaccgtctttcggagtctgttgggtggtcagggtcgttcgattgggtgtgctgatagagtacggggaagtctcaaggcgctcgaggtcaagattaaacactaatcgctcgtcggattcgggtggatacggcgaacctgcgctgtgccgcggataactcctctcggcctctcaatcaccggtaaattctaccttcgtctcttcgccctacttcgtcctgcatcttgcacctgtccgttcgtggttgggtgcacccatggcgcatatgcgcaatgccg

SEQ ID NO: 179785 - DNA, 504 bp, Zea Mays
aaatatacgaaatctcccacctcgaactggagaggtttccttctcttatcatggtaactcttctgcctggcctgagcaacttctagattcttcctgattagtttgactttccttacggcttcagtcactaagtcaggtccaaaaacttctctttctccagtctgagaccaattgaggggtgttcgacaccttcttctatatagagctttgaagggtgccatctttaggctggattgataactgttgttataagtaaactctgccaaggagaggtgcttatcccagttcttgccacaattgatcgcacaagccctcagcatatcttcaagaatttggtttaccctctcggtctaaccatcagtctgcgggtggtaagctgaacttttgattagcttggttcccaaagattcttgcagttgttcccaaaatatggcaacaaattgggctcctcggtcagagacaatggtccggggtaatccgtgcaaacacatgattcggtcaatg

SEQ ID NO: 179786 - DNA, 690 bp, Zea Mays
ctggtagatggcctcggatagaaccatgcctaccgccttaggaattggagtaaggactcccctaggtatcgaaggagaggacggaggtaaagggagtgagacccacctcccggcacctccggagatgccactagacctagcccaagttctggccaaccagactcgactcattgaggtcctcactagaagcctcgagaactagcgcccgattggaggaagacctcaggacagaatgggagaattcctaaggctcaagcctcccacgttcggtggatctagcaacccacttgatgctgatgattggctgcgcacagtgaagaggaagttagaagccattggatgccctaagaaccagtgtgttcacttagctgcccaccagctctccgggatggctctatcctggtgggacactttcagtgctgcagtgagagatgctacctaggcagagtttgaggctgcttttcgagagcatcatgtgcccttgggaatcgtccagctctaggaagaggagttttgagagttgactcaaggagggcaatccgttagtgagtacatccataaattcacagaacttgctcgttatgtaccagatgatgttagcacagaagtcaagaagatggcccgtttgttgaaagggttaagaccagaactcaagaccatccttgccagccaagacttcctcagcttctc

SEQ ID NO: 179787 - DNA, 862 bp, Zea Mays
caacagttaaccgtgccgtccctcggcccagctattttggctcggcccatgacgggtttgggccgtgctggctcggcatggcccattggccacgtatacctgggtgctccaaagatcaaatccactggtaatactgcctccgatccatatactatgaagaatggggtgtttccatgcaaggcctagcttggctgggttcacaggctccagaccacatacggtagttctctgatccattttcctgcaagcttttcgctcttgtcgaacacctttttcctgagtgcatcaagtatcatcccattggctctttccacctgcccattagctcttgggtgtgccactgatgcatacttgatctggatgcttctctgctcacagaaatcaaaaaactctcagctagtgaagttagatcctaggtctgggataatgttgttaggtatcccgaacctaaacattatttcttgaatgaatttccatcgctttgctgaggtcaaagaggcaatgggcttgtactctatccattttgtgaacttgtcaatggcgacgagtatgtgagtataccccccttgagattttttgaatggctcaatcatgcccagccccagcacgcgaaaggccaggttacaggaatagtttgcaaatgttgggcaggcaagtgttgctgctttgataggaattggcatgcttcgcacttctgaaccaactctactgcatcattctttgttgttggccagtagaacccggacctgaaagcttttcccaccaatgtccttgatgttgcgtgtacgccacattgccccgcatgaatttcatccaggagttgccttcctgtagctaagtgaacacacttcatgaggactcc

SEQ ID NO: 179788 - DNA, 490 bp, Zea Mays
tgatgatcaccagcgcgacccccgggtttcagcttctgtttatataataataagaggcgccaaaaggcaacagatttctgttggtttacaagaagtcaagaataggcgatgcgttcaagatgaacaaaaagatctcaggtttataagaacaacttctgtttatacttactatgtcgccatatttaccagacatgtactacatgttacaaccgttgatgtattgactagtaaccacagctgaggcctaacttttctatgagttgatagtacgtataggtgttaactgaaaacaatatcgcttgaaagcagagacactgtgcataaatttttgctctggcgcaagtcaacatgactgtgtagaggtgctcaactgatagattacagtcctcagcttaagcttcatggcaagttacagtagtaacgaagttgatttttccttgcaggtaacaattcatttgcaagttcataacagtccatttgtgtcccatct

SEQ ID NO: 179789 - DNA, 441 bp, Zea Mays
gacaattcggtgagcatcaagggcatgggaggatgttggaacaatagcacagagggcgagatcggacctgagttgagctggccgcgacaagcttgatcttcgtggtggcggagaccagtttgggggaagttttaaattccagagctcaggtgagtgattaagggtgggagcgggtgctatggcttcgggattatatggcgcaacagccccggccatcaattttaaggaggcttaggcggtggcgcgtaatttggtcgagcagtgctggcggccgagatagagaagaaccttagctcagtggattggtgtcctcagtcgtggcgaactcaccggcgatgattagacgggtataaagagtcacggtgccgcgacggaggtgttcagatacgtggtgcaaggccgtgcgacggcagtcaccggcgttcttatcggtttccaccg

SEQ ID NO: 179790 - DNA, 690 bp, Zea Mays
tcggttcctagaaaatttagggttacatcctcttttacgtaatctgctaatattactactctaagagcatctccactagttcccaacaatgtatcctatactttggattaggtgaatattgacaaaaaagttgctccaaccgttccttaagcaagtttctaaatttaaaaagttcctatgtaaatctatttccaccctacatgtagcaacagagctggaactcccgaaaataatctgccgccaatttttagcctaaacaaactgcgcgccattgtttcgcgccctcaaattctattgctgccacaaccacacacctttttatcattgccacacctgaagcagacgacctgctgcttcgtcaacaggcgctgcaacaagcaacgagcacagcagtttccctacgggacagcgcttccggcaggggtggcgagggcaagcccttttggtgcgtgaactctgagatcatggagccattgtccctcagcgagcaggcataggtcgagtgaacaccgccggtgatgagctcgtatgcgccacaacaaaggactacaggtgcaacactctcctcctttgaaactgctagttcttgtttgtgtcggaggtgaaattctaaggtggctttgaaagtggcctcgattgctcaatgcacgcgaaggaactacttattgtgcagtgtggaatacagatcga

SEQ ID NO: 179791 - DNA, 571 bp, Zea Mays
gttttgggctgggaaacggcccagaagggggggaaagggtttttctctttttctttttttattttccaaatcctatttccctttttgcatctttttcttttgaacaaattattttgtgggtaaactaggtgctggaaaatagaatctaagtgatgtgcttgtgatcaaccaaggtgtatgcatatgatgaaagaagatctaagggagttcttggaattaaaggaagaaaagaagggaaagggtagattagggtttcaaacctaggttaggatttttgggatgttacaaacctaccccacttaaaggaatctcgccctcgagattcagacggggctcgagaaaagataagggtattccttcctcagagaatcctcactttcccaggtggcttcctcttcaccatccctgctccattgaaccttacagagtcttacttctgagttgcgggtccttctgactgctgagtcgagaatcttcactggcttttcccggtactggagatccttttgaatctgaattgcatctgcctcgatgtggttttctggtacttttaggcatttgcgaagctgag

SEQ ID NO: 179792 - DNA, 646 bp, Zea Mays
gaacaattttgcttaagagtgtaagcaaggttgttatgaagaatttggagataattaaacctaaagtcaggctgtcaggctgttaaagtctgaatttcagactgacagtgcaactgcagtgactttgggcatgaattcaagcaggattgagcaagaatttgcttaggattgctataacaatattgtagctggatcttagagctaaaactttgctaaagggtgatgatcatgttacggcacaaaattgggagtaaacagccatgcaaatcgctctgtcaggtgactgaatgggctttcccatggtacagtaacctgaaacagatcagatcaagcgctcagctcaccgccgacgatctccaccgcaattcgtgtcgccggcgtctcgattcgtgctcggggtaagtggataacgtctcggggtagaaagatcatcgccttcgttgagctggacaccaatccagctagccgccgtacctcccccttgttcaccgatcgctcgggtaggatctcaccgccgttgatccctcactgccgtccgccgcgtgtccaaacactttaccacgtcgcggctaactgtgctacgcacgttcggtaatcgccggaggagcagccacggtaatagccacgttgcgcggccaccagtgac

SEQ ID NO: 179793 - DNA, 1212 bp, Zea Mays
gagccttcgagttgttttggttgttgcattcatgccgaagcatagctttgtttgacataacattaaaattattttaatatggcttaagataaacaaatacgttcatatgcatataaatgtgtatctatattcatgaaaaagaagtaaatacaaaagaaaaataaataaataaataaataaagaagaaaacaaaataaaaaaaactagcggccctgctccccacgtcccccacgcgcgcggcgcgtctgcgcccagcctcgcacctggccgttgcacgctggatcccaccggtcagctccatcctccctacgtaactgcagcgcccacatcgctctctcccctcggcgaactgctctgcccgcgctgatcgctcttaagaagttagccgcgagacctacagcacaatccccttctccactcgcgcttgtacagccacagggtgccatgcatctccctcgcctctgtgccgccgtagttcgtcgcaccctcgttgttgtcgccgggtagtcgccgcgcacagagcctcgccagtaccctcgatcatgacgtcctgtcgccaaggtacttgctatgcttccctctctctcttgtctctcttctttggcgtagttggccacgaaggcctcatgcgcgtgtcccccgtgcgtcttccccctcgactctccctgcacgagttgcagcgttgctatcggtgaagcacgcagtgccagccagtctatccctgccaccatctgtccccacggccttgggctggtgtcccagcccggcgcgcgtgattccttcccctggccgaatcagtagccggtgaaacccctccgttgtcgcggcagcagcaccgcccctacgttgcagccccatcgtgccccttcttggcctcgtgctcggccccggcaagcggccagactgcctcgccaccagccgagctcacgcggtcacgctccctgtagtccccatgtcacgtccttccccgacccgaagcagaacctgccggcacccagccagcgcccaggtcccagccatatcctgcgatcgtgcatgcatggaaattctaggagaagaaaccgtcacctatgggccccaccattcatgcacgtccatgcaaatcccatggttgcatgccaccaacgaaagattaggaaaacaccccacatggtctcctgcaggttgcacgtcacactcctggaaatttgctttccccacactggatcgtct

SEQ ID NO: 179794 - DNA, 699 bp, Zea Mays
ccgctacacaatgcgcgatgcacaacgaggacaaggatgggcttgttaccggtgatcgatgccacggcgacgctggtcgcgacgaatagcggaccgcggcggagaatcgaagtccgatgagcaattgcgccttgctcggcgaccgatctcacccgcgaacgacacgccacccgcccagaaggcccacggacgctcctaggctaattcctggggtcccaacgccggtgaccacctgatttggatgcggcggcaagcttagtcctcacggcagagaggaattctcggcgacgagaaggcactagtggtttggatggcggggcacggtcaaagggtctcgagtagttgggttatatacccatggcgaggtggaggaggtcgtcagcttgagcccaggtgagccgccgcgcattccgtgctgtttgttacaacggcgggcgtcgggatgacaagtggggccctaatgacagcgaggagaccgggtcgttacgtgggcgcgacaagcggcgctgagctggtcccacaagtcggtgtaagataaggagcaagcaggcgtgcgcgtgaccgacgggcggggtccacatgtcggcgcagaggtcagctgggccgcgcgcgcgatagcgaaatggcgagatgggccgaaatgagacagtcggcccatgtaactcttttattctttttatttttattttttcttatttt

SEQ ID NO: 179795 - DNA, 273 bp, Zea Mays
tgttgtacctatggaagcatgctctcttttgttgggtagaccttgggaatatgataatgatgcacgtcaccatggtcggagtaatacatacactttcatgcataagggcaagaaaattactttgcttcctttgactcctgctaagattgtacaagctgacaaggatagagctgcaaatacaaataatgaaccacctgttaaatctgaaaatcagaaagctattcatttgaaagctcctctaatgcttgttacaaaatctgatcttgctaaaat

SEQ ID NO: 179796 - DNA, 408 bp, Zea Mays
cccgagagagctggccgagcacaaactgaaggtctacccccaagcgaggccgatccgacaaaaattacgccgcttcacgcccgacaagagagaagccatccgtgctgagttggctcgcttggtcgcggcatgattcattagagaggtgttacatcctaagtggttagctaatcttgttcttgtactcaaaaagaataaagtggattggcgcatgtgtgtcgactatacggatctcaacaaacactgtccgaaggatcccttcgggcttcctaggatagatcaggtggtagattcaaccaccggatgttctgtgttgtctttcttagattgctactctgggtatcatcagattagtctggcaaaagaagacgaggaaaaaacagcattcatcactccgttcggagcctt

SEQ ID NO: 179797 - DNA, 360 bp, Zea Mays
gtcgtctggcatccaaaaatcgggctgggggtgtgcgcatcagctcaggggtgttctccggtgagacattttgtgccgtggggtatggttcaactgcgatttctcgccggacatgggattccgccgcagaaccactccttaccgtggccggtgcgtctgggggcatggactgcgtcatgggtccccttgactcgatcgccttgtcactctcgtcgtgttgcaccatccacgtcgaggtttgggcggttgtgcggggatcctgtgggttgcggccatggcaccaccgcgatggcgacggcgtcaccgcctggtctcggcgtggggaggaagacacacgatcgccgttgatcttctgatgag

SEQ ID NO: 179798 - DNA, 460 bp, Zea Mays
ctgaatgtatatttcagtcggaccatgtcaccttcgctagactcggtgacagtctccttcggcatttcccagttctctacaagcggccatactctgaatgctatatgttcttgaatcaagtctcttgtaccaatgaagaagcatacagtaccaaaggccttctggcatgcttcggcggcttcatcgatttcaaccttcggctttcgaaggccgaagcgggaccatttgggacgcataataacctctttaacatcctccctcgctaccaagtcgttcttcacataaaaccattcctccatccaatttctcggccacctcttctgaaatgttggcactgggtgacttgcgttgggacgggcgataaacccgtaacaaccgaggttgttgtgatactgttccttccccgtggccttcgtctcatacataagttcgtgcatgctgcagaagcattttgcgcttg

SEQ ID NO: 179799 - DNA, 524 bp, Zea Mays
tttttcccaaagcatgtcatacaatataatcgagaacttcggaagatgcttcgggagtaggagtggcagctttttcagacagaatttgttttgtagcttctttttctgcctccttttctttgatttccaaggattttttcttggcggtctctgaaggtccagcttcggtctcggcctggctctttgcagcttcggttttggttagttttgtctcagtctgtgtttttaaagcttcggcagttttccctggagtagagcttgaagtttttatcgtttctagcacatctagtacgttgaccatcctttttctcttgggggtcgctgtaagatctttttgtgccttcggcactgacatttctgccgaagggcttataacttctaatatctttgttctttcgacctctatctcttcaatattatcggccttcggctcagctaatttgaccgaggatgccttcggctttacagccggctcttcaatcctctgcgtaagcgcaggttctttggcttcagtagccgaagag

SEQ ID NO: 179800 - DNA, 904 bp, Zea Mays
atctaacattaggcctaaacctagggcaaacactatatgtggtggtctaacactctaactgtcggggggtaataattagggatacctgaaatatcccccgaagaacgcactcagagagataagaacgaaaccctcgaggggaaacgactgaggcctctccccgaggatctcctgcctagggtggaactccgcctcgcccgaggtcgccaccgccccgactgtcttgttcgagccaatctcaggcagataagacagaagcgcccgataacaggaagggaacacctgcatttaatgcgcgtacctacccaacgatgcggcagcagagcacagtggttgacaagacgacaatcacatctggacgcaacaacatgattacgtctccgctacagtacgcgcacgccgcctgccatcccccgatgggacatctaatacgacaagcagagcagaccggccctcgggcgcatttctccgcctcgcccgacgccgagtccaatccacgggcgcaatctccgcatcgcccgatgccgagtccggccctcgagcaatttcttcgccacgcccgacgtcgagtttagacctcaaatgaattcttcgcctcgcccaagctcagcctcggccacctactcctctacgaatcccgcggacgaccactccgccaaaactgtggcgcacgtcaagggatggctcgtccaacacctcgggaagacttccgcctcgcccgagcggggctccgacctcgataagcgccacaggaaatctcgacgtcatcccgcgcaaggacgctgatgcaccccgtaagcaggcctttagccttaccccggcgctattacaacaactacataatgggcagcctctcccctgggggctcgggtgtacggataatccctcggtctctgcctcggct

SEQ ID NO: 179801 - DNA, 442 bp, Zea Mays
cagctttcggacggtcgtgcaatacttgcccatagagtcattcgagcaatcccattctttgtttatctaacttatgaccaccaatgaatctccgtataccatcaacctcttaatgcccagtgatatggcaatgttcaatccgtggatcaaagcttcatattctgctacattattggatgctgagaataacaactgaagaacatatttgagttgttcacctccaggtgcaatgaagaggatccctgcgcctgccccctgcagctttagcgagccatcgaaatacatctgccatacttctgcagtctccaagttatctggtacttgttgctcgatccactctgatacgaagtcaactagtgcttgagtctttattgcagtacgaggtcgaaactcgatgtcgtgagctcccagctcgcaggcccacttggctattcttccaata

SEQ ID NO: 179802 - DNA, 1379 bp, Zea Mays
gcatggtaatgagtcctctgaaattaagcttcggcatgacgagaccattgtgtaacatgcagctcggctccccatgccaattagccgaagtagaattcagagttgtggcagagcacattagtactcgagatttgatgcaaaaatatctagctaacaaaacatttccaacatctggtgggtggggaatgccggagaagaaggaagaagggaaaaatttgagcttgttcggttgccataccggtttaagtttcaggactcattcctcgacccttgtgtcgaatggttggaaatgatagagacaatgtgcaatgagatccttgggaactagacgaagaaagaggatcaattgatgatagctgccttcggcactcgaaaaaaatggaggctgaactgggtgatggatgcccttaacttggagtatccagaatacgaaaggcttgacgcagaagctgggggagcaaagaaaatgggaattgtaagcattttgaaaaggcgagcaatgtgatccattgaagaagacaaaaagagagctacttccaagaagcaaaaaaattcagtggagccgaagctttcggctcccaaaaaacgaaagtcctcaactttggcccctatcaagacgaaggtacaagatccaccagagaagattgctggcacctcttcatcttcttctatcggcattacagaaatcctgaaggtaatgactgaacccttcccgtttgctatgttaagtcccctggggtcagatctgactagcttattacagtcaaaggaggaggggttgaaaaaggtgtggaagaagagaagaagactacttcggtgaccgggggaaatgagggtggtcagaagaaacgacgcatgatgactgtgatgagggctatccataagaccccacccccggtctcagcagaaaaaattgttgcccctgctgatgccgaaactgatgaagcgaccgctgaagctgaaaatagcggaggccctcttggaaccacaatgtcggagattgatagaattatagctgatgtggttcccataagggaaatggatgaagtgaccactagtagagcttcgcccttagagatgaaaaaattagaagtagtttcttcggagaacaaagagttggacctacggcacttgggtggctaggaactctccgaagaagatatctctgagctgaaagaattcactattgctggtgattacaagcctagatctgtgctctttggtggtgttgacgaagaaattctagggtgcatccctgatcgtgccggagcaaagattgtcaacactttatcaaagagcatcagattctcgaagctctaacgagatctaagcaactataggaggcaacatattactggaagcttgttctattaaaattt

SEQ ID NO: 179803 - DNA, 529 bp, Zea Mays
ctaaacctgtacgcaacccagacccttggatctgagatcatcgcccaagatccggccatgcccgagccatcccctagccctcggatcaccaatcggacggtccccgtttaatgaagcgtgacggtgtaagcgttcctaatctcgtacgtcagctcaagatccaatggttgtcgatcactcagacgaaccagtacttgacaatctattcctagccatcaattgcaagatcaatgcttcatgtgtcctccacccgaggcgacaccggcgtcggcaacgtatctcaccccacggcggcgccatgaccagcccgcaccggcaaccatcccccaagtgtaaatctcacccccgaatgctgcataaccgcattggagatgcccctaagcaaataagaaggtccttaccgtggatttaggcgcaaaaacaatcacccacgatggaacatggctccgtggcgtcgcagtggttctggtgagcaatctccgctgccccaatggtcaatccttgccgtcgagcccacaaacgacttcac

SEQ ID NO: 179804 - DNA, 515 bp, Zea Mays
gcttggcctcccttcccctctggtgagcagctcaagatcttccctcttttctctctgtttcacagctcaatcaagcctctcaccgccccttgtttgctcaagttcaaattccttcccaatcttgtgaatcctatgcatggttgtgtgccctagtgctccattgaattccctgcaggctcctagctcctttgggagggtttaaccacctcaaataggcatttctccagaaacctaaccgcataccacgtgttcggtgaaatgcccaaaccagccaaaaatgctccaattgaacccaaatttttcaggcaccttcacaatacctccagtaacatgttcaacaaatttcacgccaatccgatgtaccaggcttcaatttcacacattttcctgtttcgagcgatcgtttccgagccgagtgcccaaattccattttcttcgcctaaattcaaaccaagcacacacttcactcatatttacccatataaacctattcatgaagtatcggctcaatttcc

SEQ ID NO: 179805 - DNA, 845 bp, Zea Mays
ccgactgcgaagctgacgtgggagagcattcgcctcatgcggatcagagacgattgcgcgaggaagacaagcgtgtaacgtgtgcgccgtcagtacgaggagttggcactcaaggacggtgagggtgtggaagacttcgctcttcgcctcaccaacatcgtcagttagctcaccataccgggcgatcctgaagagcctacgaagatcgtcgagaagtattttcgcatcgcccgcggaaggtacaaatagcttgttgtttccatggaaaccttgccccctgccgttcgaagacgacccagagcccaagcaaaatcaagaatccgggaaggtgtaccgcacgtgccgcacgtcatcaggacctcgccatgctcagagtcgactgggtgacggcgcaattgctcgtcggagcaacgtgaccaccatcaatccacgctgcaccgggaactggtttcatcgcaacctaataaacgataaagactcctcctcaagctccgccttagtcttttgttggtgcaggaccttttgatttgagcgatgggggtcgggatcgtcggattaggtaagcccagccatggcgccaccgcgcctcgacacgccggccgtcgtatgggcatcaggggtaggaaggagaagcgtgggccgtcgtttcggcctcagacgtctgagattagtgcaacgaatttccgtttggttaagttgaatccggtgcattggttcgaagatgaacgcacaatattagatcatgggattttaaatcgtggtcatggattgtagatcgagtggacgtggtcatgtaccgattggatctaatctccgccgtagatttgtattaggatcgagcggcc

SEQ ID NO: 179806 - DNA, 2418 bp, Zea Mays
ttgatgcttcgaagacaaatatccccgtggtaaaattggtcacataagtcatagaagtcctgggaaataatcggccagcattttttgataaagttggtattaaacccatcaggtcccggggatttatcagaaggaagggccgccacaatactatcaatttcttgctttgaaaaaggctcatctaaccaatgcaagtcactgcggcagagcaacaaactaggaaggtcaaagacattatccacaaaatcggaggatcccaagcgacgtttgaacacattccaaagcaggttagctttgagatcatgctctgtaaagattgagccactgtcatctgagagcaacgcaattgtattgcggccatgccttaccgttgcatgagcatgaaagaatctggagcagatatctccatccgtaacccatttgatagaggcccgttgcttccaataaattttttgaagctgaagcaactcagcagccttgtgttgcaataactcacggaaattccattcttcaatcaaaaggtcacgatgctcttcaataatatcaatgaattcaataatcaacttaatttgtctcacagttttgtcaatttttggcagtgaccgctgccactcttttagaatctttctggtgaacttgaattttgctgttaaattcttcgctttgtctaaaaggcttggcagacccgtccacgaattttgaaaaactgccatgaactcattaaactgcaaccagaagttttcaaatctaaagatcttgggcttagggacctttgacttgaaagaaatcaggcagggcacatgatcagaaatatccctaggcagcgttgttgcgagagtgtcagggtagcagaccgaccattcttgcgacatgaaaaaccaatcgagtctctgaagaaggggctccctttgtttgttcgaccaagtaaaggagaggccatggagagggatttctaacaggtcgagctggctgattgcctcgttaaaactcagcatcaagttaatgtcacccccagcggtatttctattttcaggcctacgcgtaaggttaaagtccccaacaatcaaccagcgcttttccgagggcatattaatattggaaaaccagtgaaggaattcaatcttcccagttggggaacagggcgcataaacgttggtgataatccaagattcctccgacgaaatagcagaaaattcaaccgaaagagcatactcgttttggaagataacactgccatccagcttcgaactattccaaacagtaatgaaaccccctgagtttcctatcgaagggacaaaagcaaactcatcaaaagaattgggacagaaccttcttaggtctgccctatcaaaagattccttcttcgtctcctgcaagctgatgatatcgcaattggattccctaatcacacaatgaataccattccccttaaccaccgcgttaatacctcagacattaaaacttaaaacagaccagtcggaataattaatagcattgcgactattcgtcaaaagggtcaagttcgtcgatgggaaaggacccaaacccaatcactgggagggcaaaagtgtatctgttaagacgaaacagagcacagccagaaaccaccaagttcgtgaacacaataagcagatagaaacgccagggccgagacagccaaaaagcctggcgaagttgagacctgcaaaatacccccacccgaagcagaattaacatatcagttgtcatcatctgaagagtcttgtttcttgtcccccttatcttttttgcctgacttgttggagccaacacagccaggcggattcttctttttcttcagggctttgtcagccaattcctcttctgacagattacaaaagcgctcgcctaagcgcctgatagttttagctgaaagtgaggggggaccctcacacttgtgctgacacatcaaacagttcttcttttggcaagagccctgcctgaatccagcccgggcatcacgaagcctcttgcttctcctcaggtcagattccacaacggcaaattttggcgtggaggaggtcgggtccgaggggacagaggtgtcgtcagcagattcctcagaaatgaccgaatcaagaaacttgtcatcaggacacttcctggggacgacaacagggagtgtcacggtctctggctccaacaaagctgaaggaatatctgaagataggaatttttttgaccaactaaaggaatcttcgtgcatcaagttggataagaaaaagggcgcccacttcttgggaacctgcaccgaggtcatcgagctgccagccggagcaaaatatctctcccagatcctgtaaaactgggcattccttttcctttctaagtggctcagcaaaacaggatccgattgccagtcatgcgaaaacataaagttcaacctcacgttgttgtgtc

SEQ ID NO: 179807 - DNA, 621 bp, Zea Mays
tggggggggggtcacagcggtgtttgacagcgcacaggtgcgttccggtgatgggcttcgatcaaattctaattgctcagtacagagatcaataggagactatacacaagctagaacagagagtaattgagaaattacccacccgaagagtgctgtccacggtggagtcccttgcagcggagcaagaacagaggaaagagctcgtgggttctccagtgtcaagtgtttagtcgcaaaggcacgggatgtggagaagaagctaagcccgagcgcaatttataggccaacgaccggcgttggatgaggaccgcagtctttagacggtgcaggtgagctcgccgcgcggcagaacccggtgatggcacggcgaccgccgtttaaccggagtccgccaccatagagagttactgccacgtgaccaaggatatttaccgcggcctccagtccatcccgaccaccgtggcgtccttatcgctggtgaggtccacgtccttatccaccgcgcgatattttctgaagacggtgaacagtgcactggattcagtaaaaagcttgactgactgaccaagttggagcatgattttctcccaaattcctgtggtaacacgagttaatctttgc

SEQ ID NO: 179808 - DNA, 349 bp, Zea Mays
gttcatcgcactcaaccgaagcaccgctgttggttttgcttcgtcacaagaggaagagcttcgggaaaattaaaaaagttaacaacttcatcaaaaattgtgaggaattcatcatcaaatggcaagggtacgttccactgctagggttacacgtgacggagaagaagccaaagctgctgaaaccgctccgatttccgaagtgatgaaacagtcggggctggtagtgccgggggatatttctgacgaaggtgcacctgccgccgaaactgagcagattgttgctgaggaaagtgattctgcaaatgattatagtgtcgtgccatctaaacccaaccacctggagtttggg

SEQ ID NO: 179809 - DNA, 403 bp, Zea Mays
cggcggatcgccggacgtgagtcacttgcgaaacaacgacgaggactcaggtgagttggtttcaggtgtctattctatttcatttcttattcccctatcaacaactcattacatcatttatagatctcgaattcaacttttaatacacctaatgccttggctaattcacctattacagcccataaaaagattaatacgacccaagcactaatactcgaaagactcagctaatactctatacctgctacttaattccaccatactcgcctatgcgctgccaccttgggtcatcacatcccccagatggatggaggactctcatttatctcccctagacctctagatgtaggagcccatcattcttccccttattcctcctctctttccataaatttgacaatcc

SEQ ID NO: 179810 - DNA, 451 bp, Zea Mays
aattggcagccatagtgcacgccctaaaaatatggaggcactacctaattgggaacaaatgtcacatcttcaccgatcacaagagtctgaagtatatcttcactcagccatacctcaacctccgtcagcgaaaatggctggaattgatcaaagattatgaccttgagatccactaccaccccgggaaggccaacgtggtagcagacgccctcagccaaaaaccttttgggaagaaaggaaccaatttcttggaagattggaagaaagaatcagctcaactaaatgtatgtctgggagacaatggcagcctagaagtcaagccaatgctagaagacctcatatgcaaggctcaacgcctggacactgagacagcaggtcttatggaaaaagctcgcaaggaaccactcccggacttcatcacatatgaggaaggagtcctttggttcaagaa

SEQ ID NO: 179811 - DNA, 633 bp, Zea Mays
gtgacgcatcaggcagtggcctcggctgtgtgctaatgcaagaaggccgagtaattgcatatgcttcaaggcagttgcgccgacatgaggaacattatcctactcatgatctggagctagctgcagtggttcatgccctaaagatctggcgtcattatttgctgggtaatgtctgtcatatttatacagaccataaaagcttgaaatatatcttcgcccagtcagaattgaatatgagacaaaggcgatggctcgagctgatcaaggattatgaattagaaatacattatcacccaggaaaagcaaatgtagtggcagatgcactcagccgcaaggcttcctgtcattgtctaacagtgaggacttctgacattacattatgccaggagatggagaaattaaaccggggaatgattcaacatgggacttcaaatcatttgaagctggagtcagtcatcttacaaagaataattgacgcacaaaaagatgatgagggtatgaagcacatacgtgagaagataagggctggaacagccaaatgtttcaaagaagacgatcaaggtgtggtatggttcaataatcgcatggtggtgccgaagaatgaagagatccgccagcaaattttagatgaag

SEQ ID NO: 179812 - DNA, 525 bp, Zea Mays
agctgatgtcgagttcgttgagctcgagggaccacttcgtgatgcgcccggacgcatcccgattccggacgatctcgccaagggctgtcgtggacaccactgacatagggtgtcggtcgacgtagtggaccaaacttccgcttggcgatgaggaccgcatagagcagcttctggatctgagggtatcgtgtcttggactttgtaaacacctcgctgacgaagtacacaagcctttgtaccttgagtacatgtccctcgctttctctttccactactagtgcagcgttgacaccctgggtggtggttgcaacgtaaaggaggagggtttcacctggatcgggcgcaaccaaaaccggtggcgaggtgaggaacacttttatccgatcaagtgcctcctgggcttcggtcgtccaagagaaatggtcacttttcctcaagagcttgtagaggggcattcctatttccccgagttcggacacaaatcgactgagtgcggcgacgcacccgaccagtcgttgtacccct

SEQ ID NO: 179813 - DNA, 817 bp, Zea Mays
cacccagccaaatccaccgcgaggaagcagagggatcaagcagagtgcagaacgccgctaccgaggacctgtgtatgcatcgtcagtcgagggtcatcgaaggaacgtggagattctttaggtgtcaaggaacgtgatggcggggtgctccgcgcggagtggtgctcttcctgggcaaccttggtattcggaggcgtcagaattcctcgccgacgttgcccaacaccattgctccacccctcaccgtgattgggatcctctactgcacgacgtccggtaagaccgcgcctatatgattcgcgtaactgtatgctatgagtagacgatctagggatggtcgtggggccctatagcgaagaaccgacgggctcgccggtgctttctgcaaccgtgagctatgcgccaccgcctgggttttgtctgagggtagaagaacgtttgtggaccgtggatccatacgtggtcggccaagattagagtagagaaaatcgtttgtgcgccgtcgatcccgtgttggacggccatgatcgtgtgtagcgtaccccttcgtcaaataaatctgagccgtaggatggtagttcgatgaccgagattagatcccatcctcatgaaaccctagccgcaggattttaatcggatgccccacgttgggtaccggttcggagtgaatcgggtctattccgcatcgtccatttgcgattgtgcggcccagatttgatcataccccttcgtgggtatgttttactaaagagcccctgtagttttacggaattaacccgccgtccaactcggggatttctgagtctgcgtaaatctt

SEQ ID NO: 179814 - DNA, 356 bp, Zea Mays
gaggaagttgggataaaagtctaccttatgctgagttctcatataataatagttatcaagccagtctgaagatgtcaccttttgaagctttatatggcaggaagtgcaggactcctctatactgggatcggattggagaaagacagttctttgggcctgagcttattcaagaggcagaagaacaagtcctataattcgggagaatttgagggtagctcaaaccaggcaaaagagctatgctgataatagaagaagaccactggagtttgaggaaggagatcatgtgtaccttaaggtgtcaccacttcgtggaatgaggagattcaaggttaagggcaaattgtcccctcgcttta

SEQ ID NO: 179815 - DNA, 676 bp, Zea Mays
gtaccggccgattggggcaacggctaggctctccgagcaatagacatgaaatcggggctaccttgatcattttccccaacttaattgcgcttatgatcaactacggagctttggccacggtggccgtgaacatcacggcaataccgtcgtgttcccggcgaccagaggacctctagcttaattaaatgggttgtcgagcatcacagagctatgaaaaggcttaaacgagggagagaagaagatgagctgaccggagtacggctggtcgcgatgaggttgggtttcggttggcggagaatggatttggggcgaattcaaaattcgcgagttcgagtgaacaattgctagcaatacgtggtggctgggtgcacgatgatgttgtgaagctcactgcggggtcaatttatagaaccccggggcggtggcgctgaatttgagcggacagtgcgggcgaccggagatgaggaagaaccctgggcgcggtgaatacgtgtccagtggcgtggcagttgctccggcgatcaacggggagccgctaaggcttacggcgatgcggtggaaagtgagagccacgcggcggacaacagcgacggcacaacggcggtgaaatccttatccccgggcggtgagcaaggggagaagtaccgcggctggccggggtggcgtccagcccacc

SEQ ID NO: 179816 - DNA, 375 bp, Zea Mays
caatgaagtgcacatatttgaagaaacagtcgacgacgatgaggatgacaaacttcctgtggaccttgtgaaggccctcaatgaaatcaatcaagatatctgcctacacctaagatggtacgtcgagtgcttgtaggagatcgtccaactacagggtcaatgtcttgttgcattgacacatgtctcacatgcgattgaagtcgcaaatgagtactctatcgcctggaggtcagcgttgacccaatagtagcaccccctaggatgattgtagaacaccgtacctagattacctcatccgcgatacactcttgacggacaagactggggctcgacgactcgcacgacgcatcaagtctttcgtaatcatcaacggag

SEQ ID NO: 179817 - DNA, 694 bp, Zea Mays
cggggaaataactgagttatgttgattggacgtgatgtgtaaatttaaaaattgtaggtttgtgtgtagggtgtattattgaacatgtatgtcgatgtattataatagtgattgcgttagagtcgtttgaagtattttgaatgcatcccgaatatggttgcattcgaaatagggaaagagacatgtagtgcgctgaaaaggctagattgattttataggtcgtatgaaaaacgttctattaagtgtatacgtcgagtgtgctaaatggatcctacgtatgcagagtgtagtgtattggttaggcgaagagttttggaatagacgagtatgaggcgtgcagttaagtcgtgattgaagtgcaaatcctatgcaatgtgatgggattcgtgattatataggagttgtatttgttgatgtgatgagtagggttaaatatatatatgcttgtgcgaaggatgtattattgagcttgggtcaaaatgcgaggtactagtggtacgctaggcaggcggtgttccaaataaataaatcggttgatgtggtagttgtcgtgcgtggtttattgttagtgagtagttgaattacaagttatgtgagaatcatgttagaaactagtatgcggcgtgtaactgtgttcgtgtggttaaataataataataataattggaagaacagtcgttcaaattggtcagtc

SEQ ID NO: 179818 - DNA, 562 bp, Zea Mays
cgagaggggaactagcggactagggttaggctttgctgctaaggatgcaagtgtcgctcgctttgggaaggttggtgagtgcagtggtttgacaccatcagagaaaccttcacccactcccaagcttataaaaaccacccctgctaagtctatcacccctgtgagagatggtgtgattgatgaacctgtgagagctcctcctcagaaacaagtgtggtttccaaaacctaaccatctcaggaacacacttgacacctttcccgacatctctagcgatccccttcctagagcccctcagccatccaaaaagaaagccccctcccacaaacaaaatccacccaagagagaggtaggtaccattgtgagcattgtgagagggatgggcatctagcatcgttttgctttaggaggaagagagatgagcggcgggtttctgagtcgagcaggaaggacatgaaccgtccctctcatggtgttcatgctcagcctgttcagagacgtcctacaaggcctagaggtgttttgcctcttgccgctaggcctcaggcagtgagaccacgtg

SEQ ID NO: 179819 - DNA, 976 bp, Zea Mays
caatgcataagggatccaccaaataacttgcaggagttgtaccagctctttgaaaagtatgcccggtcagaagagctccactagaggaaagttgagtcttagtgaaaacataaggagaccccgcaatctagtagaacatggatcaagacttagcacgccaagaccgtgttgagccctaggtacacaatattgcaaatcagtagcaactaggagataaccccctcatcgtcaagattacccccacaacaaggtcgcggtggcaacgcggccagggtcagagacaggggtcagggaccacaacaacagagaagattctattgtcttttccacgacgaagactcaacatacccaaccagagactgcctagagactaaagcaacaaaagaccgaatggctagggtcgtgccagctgacaaccaaagagtcgtcgctcacacctatcaaccccaacaatacaaccaacatcaatttcaaaacgaacaccactattacccccaacatcaaaaccccaacctctttccacatcaatggcgccttcaacaccaagaaattatagtgctgccacctccaccacctcagcatccaaactaacccctaccacccccaccactacctaagtaagaagacttcaccgatcaacccttcaggggagtaatccatatgatctttggagggtccagctccgagttcgaaaccaaacgacaaaagaaagaccactatcgaagggtaaaccatgtagccctcaccgggcccgtcgtctaaacaaagtggtcccacgtgccactcaccttcaatgcaaaagatgtcgacctccacagtgcgtcctgtaaagcccaaaatttgtataagtggaaaataataaaataaatgaatagatatatgcatatgaaagtgttttggggattatggaaccttggcaaattatttggtgatttattcttttttgtttgttgctgcatactaaattggaggaatt

SEQ ID NO: 179820 - DNA, 469 bp, Zea Mays
ggctcggaaacgatcgctcgaaacggggaatttggtgaaattaaagcctagaatatcggatgggcgtgaaattttgcgaatatgttactggaggtgttgtgaaggtgcctgaaaaatttgggttcaattggaacacttttggctggtttgggtatttcaccgagcaggtggtgtgcgaggatttagggttttggggaaatggctatttgaggtgggaaaaccctcccgaaggagctaggaacctgcaaggatactcaatggccacataggaacacattacaccacatggattcactgggattcacaggattttgaatttggcacaaaagggtggaaataaggggtgcactgcctagagaaataaagagagagagagaagacagagggagaagaggctgctcaccgagcgagggcaggagaggagcactgggtcgaggtcgccggagaacagtggacgccggtgagggga

SEQ ID NO: 179821 - DNA, 638 bp, Zea Mays
taacagtggcgctggtctgactttagaaataaattaaggacgattcagtgggtttaagtctgaggtcactgtgaggaagttggaggtagtatatagaagcacaactttgctaaagtaaggttgggttgtttctgtacgaaaaccgaagtaataatgccttgaagtagcgctgtcagtcggtttgatggggatagaaatgtgatcactgcatctgactgaagctagggttcagtgttatagaaccaacttgggcatcgtcgcgtgcttaatccatggggattttcggtatgatcgtaataccaaagtgaaagaacgttgattaatgcacaacttcgatgcggaccgatttgcaagtaaccacatgaaatagggcgcaatgtctatctgaattcgagctagcaggcacgatgtcgacctatgttcagtgaacctcatcggggataagaacgccaccattgccgtgtgcactgctcggacttgcggccacggtaaaaatcttccgggacgtggcgcatgtaaccatgaggtggcgccgttcggccaaagcgtttcacctgggcgctcgtcgtggccttacccacgcgcgagctcgcaagcgcacatggagatcttttgaatcccgtccgattccagccagc

SEQ ID NO: 179822 - DNA, 519 bp, Zea Mays
cgcctttgccagatggccattcgacagtcgatcaacagccaggtggattcgaattttgaaggttagggtctctgtccagcagtctctaggattactcaacacacaagcaatctcgacgcttcttcctctgctccttccctgaacccgggcagcatatactttgctgcatgttgcctgaaagaaggtcccccgtgcaaactatgatggacgatgataatacttcctaccttccccctttaattctctggggtcttatcactttgcctgttcaaccttttctagggtggatggtgttgttaagtcacctaaacatctaacgagtgatggggtctgtccctagaatggggtcagaaggctagaatgcatcagctgagctgcgctccacctcatcccttcataccacactgatgctccatgttgtgaatcatctttgtggaatgcatggattttaaaatattttagcttgactaacttttgttaatggtttagtatgatcaagacatccattagctccaacca

SEQ ID NO: 179823 - DNA, 557 bp, Zea Mays
ggagtcccgagagagctggtcgagcacaaactgaacgtctatccccaggcgaggcctattcgaaagttgcatcgtttcacgcccgacaagagagaagctattagtgccgagctagctcgctcagtcgcagaagggttcattagagaagtactgcatccctgagtggttagcgaatcctgttcttgtactaaaaaagaataaagtggattggcgcatgtgcgtcgactatacagatctcaataaacattgtccaaaggatcccttcggacttcctagaatagaccaggtggtagacttgaccgctggatgttctgtgttgtcctttttggattgctactccaggtaccatcagatctgcctggcaaaagaagacaaggaaaaaactgcattcatcacctcgtttggagctttctgctatacctccatgccgtttggcctcaaaaatgctggagcggcttaccagagagccattcagacgtgcttagccgatcactggggcaagcgtgtagaagcttatgtggatgatgtggtgattaagacagaaaacttcattgaag

SEQ ID NO: 179824 - DNA, 994 bp, Zea Mays
aaaagatcatgcgatgtctgggttcatgggattacagcaaagggagctctggaggtgccagtgaacgcatgggtatggatgcatggctcaaccctaaagatccacgccggtctcctgagcacagcaagacagggatatggtagagtttaccacggcagagggtaggcagataaggtttcactgaagcagatattcttttcggtccaaacttgagatattttggtgatggccaaagttctgaatatccctgctatttcttctcatctctatcttcattttatactaaagtaagacacggcaagggaaaaagatcaatggcagatatttctgatcatcaggatctacagcacttgactgaccccccactgttcagccacctttttctctctatatttgttaagagctgattagtctatgttaacagaacttgttcacttatccaagatcttcaaagttactatagggttcttggacctaaacctcatagatcagaagttatggcacccaaaaaccaactacatcacactggtaccattccagttttttctgaatttcggtctatagtctccatcagatttttccttttgatagaggcagtttgagcaccaatatctcctaaattcaagcgaggccctccctaaaaaacttgctcatcaatactagctctcaaacttttcttacaccaacctagctcctaatcagatagaatagtctctgtaaggctctaaagttgatccaacagacaggaatttagagtaagtcactcaggttgacagtcagaattcactagtctgacagcgcaactttgaacatcatttcccctaatttttgcacaggatcaagcccacttaatttaagaatatttaatcaccttctgatggtctctaatttgtctatatagctcacaaccttaaaccccctagattggccacaaaagggcttcaaaccaagcaccaaacactgaatctcaagttttcagattactgttcctagt

SEQ ID NO: 179825 - DNA, 538 bp, Zea Mays
cacatctttatcaccttatttcttgtaactcgagtcaaagtgtccaaaatcttgattgggtactcagcataagtcagatcatcttgaacactaaggtcctccattggtagttgctcctcaggtaccctgaggcacttctttagttgggacacatgaaacacatcatgtacatctgacagatgattgggtaactccagttgatatgcaacttctcccactcgctttaagatcaagaagggtccaataaagcgaggggacaactttcctttgactttgaatcttctcataccccgaattggtgacaccttcaaatagacatggtcaccctccttaaactccagtagtcttctcctgttatcagcatagctcttttgcctggattgtgcaattctcaaattttctcttatcattcgaacttgctcttctgcctcttgtataagttcaggcccaaagaactgtctttccccagtttgatcccagtatagtggagtcctacacttcctgccatataaagcctcgaatggtgacatcttcaaac

SEQ ID NO: 179826 - DNA, 548 bp, Zea Mays
ccctaagttatgtatgtgtgaacgtgctgcgtcgacttaaggcgttttcaacttaagccgatcactacttgagaatttgtttgtatgtggacgagcacaaaagctttattgataacaagatctctggtttacaacgtgtagctcaccatctagagtttacggtgttactacgggtaaaatttcccgagatgctcgatattccacgagtttcctacttgagtctcgtccatctgggttagtcggtaggatcttggtcgggtgacttctgcgatgatgaatggtccttcccatggcggtgataatttgtgtcgtccttctcctccaatatgcggtggagtaccaggtgtcctactgcgaaggatcggtgccgcactgctttgtcgtggtagcgcctcagaatctgttggtacctagccgattggatgacgacattcaaacgctcttcttctagaatgccaacctcctccagtccggttgctttcgcttctgctatgctttcgaatgttaacttgggtgctccaaaaattatgtctgatggcaacactgcc

SEQ ID NO: 179827 - DNA, 740 bp, Zea Mays
ggccctcgacagacctcacaccctcgttcgttattggaactgctgacaggcggggcccgtcggccagtttcatgtgccacacacacttgcttctggtggtaactgttgacaagtgggtctattggtctaagatgtaggatacattggcctcccgagacctgatgaggtccacttccgggttctttgcgagttcgttgccgtgggccgtgggccacggagcctcagactcgatcctccacgggtacatatgcaaccctggcgtcgtcatcaaatctctccgccacttcagttgccgagagttcgtgcgatcgggaaccgagagagagagaaagggtgctgccaccatagaaacttgcctccgtggtcatgtaggccgctggggggtggtgaggaagcgtcgtcggggtcttccacacgttaggagttcggagtaggacgggattcgtcgccgggccgcggatcctccccacatcaacaccatgtcgtcctacggtgtatcacaaggtgataaccatctaaaccgattcatcttcgtctccacactctgtatcgaaggacatgctaagagatagcgtaccagatcagtagaaggccttgcgccggtgaggtttcgccgtggtcaaggcggcgccgtcgcctggtggcatcggaggggggtacaagaagatgtcagagcattgatcctgaaagcaacgactctgattagaatccaaggtaatggtttggctgggggtttgtgt

SEQ ID NO: 179828 - DNA, 790 bp, Zea Mays
cggggaaatcactgcgtgcaggcagaaacagcaattaatcagtttcagcttctatacaattcaagaattgacatgttctagagactgggattaatctaacactttaccatttgttagagttaaattatcaaatgaggactaacaagtagacttactaatttttatccatgtcatttcgtgcactagaattaccacacacgtttaacaaatgcattcaccataaccatgcgcatttaaaccataacaagcaatccaccgtgattacgagcttaaccacacgcctagataagcatgatttgaaatcaaattgcccatattttaaatctcggcataagcttggctattggctaacgacgtgacccttttctaattaccaacatacaccacctttcaccatttttggatacttgcacgtcccaccgctattgtaatacctaacaagtacattcaacccctcagtaaagcactagcacatttcagaaaatttcctgagactacgacgacaaggcatcgatcttatcatgtacataaaagcatcacaagcatatttttggaacctatcggttaacttgatcgacacactacacatgttcttcgcccttcaaaatttatcgcacaaccgaaatcatcccacttgccaatgacacctacaaatacctactgatatatcattcacatcacgagcacagttgcacgccgtatactagtttctaacataatcctcatatagctcgtaattcaaactactcactaacaataaatcacgcatgacaactactacatcgaccgg

SEQ ID NO: 179829 - DNA, 552 bp, Zea Mays
aatttcacttggcagtatttataggggctgggcccatgtttgttttcttaaccacaagcacaaacagaaaaatccccccttctgattatcatcctttaaagcaaaatcaacatgacacttgaatgccagcaaacatttgtttcagtgccataaatatactctaggcatcattgtcatgttccttctaaaccattgttgaattaaacaaccacataactccaacactgtttcaactatccaactcaacactacgttgccaattaatccaaaggtttatcagcgttagcaaagacaaatattgagtttatatgaaactaaaccaatcagcatttggtgttgcagaagttaggctggaaagaaaaaccaatgtcactgttcacttgttctgttgttcaggtgctaacctgctatctaatacttgtatatctttggatcttggaatttccctttccgatcaaacgagttctctctctttcttccacaaaaaacataattaaggtaaatatcctgccaagaatagtaaaaggatataaatctaccacataagatatg

SEQ ID NO: 179830 - DNA, 518 bp, Zea Mays
ggtccgccactgcacacgcataccatacgaacgaaacgttagacacggtagccgagagctgtcgatactagtccaagagtcagtgatgtctaacattgcgcgccttcgtggagacagcagcgacgtgaacctggattctggcgcggaaacgagaaagatggaatattaggaggtagggatgacaattttttatctgggtccgccactgcacacgcataccatacgaacgaaacgttagacacggtagccgagagctgtcgatactagtccaagagtcagtgatgtctaacattgcgcgccttcgtggagacagcagcgacgtgaacctggattctggcgcggaaacgagaaagatggaatattaggaggtagggatgacaatggggagttcatgtcaggaaatagttctccatacctgttttcgcgacacaaaaaaaatccgtgaggatctccaagagcgcttatgggggatatttctttctcatccccgttctccgcgggaataaatccctgacaag

SEQ ID NO: 179831 - DNA, 782 bp, Zea Mays
gtttatagcatgcttccggtatatagaggtcgatgctaattcttagataaacaaatgatagttgggaggcttagctggtagcatgctttttgtatgttgcacttgcactcgcccacaattctttctctcaccctcttctcttcatgcttcttttttggatctaccatttagcgcaagcgaacacccttaagggaaagtattgttgcttatatctctttttctaaacttctttagtgctttccttttagtttgagtcctgcttgttcaaccacacaagatgagtaaactatgcgccagctcatgtccaggaaactaatctccatcaacaacttcgtatccatcaacaatttcgtatccatcaacaacttcctcttacaatgtcaccatcaaacattgtaatgtgcaaatcattgcgtgttacatgactcctaggcatttagaaaaatgtgcgaatcaacgagtacgcccaacacaaagaggttcagcttattgttcagtcactggccatcttctatttgacaacaatttctggagtatgagagggcctgtttatttattagtcagctgaggatttcgatctaggcattttggaggcagaaacaataggccaaatacaaaataggatgtgaattcaaataacctgtccttgtaaagttaaactgtaaataacctgtccttgatgaaaatgtctgtgaattgttgaacaattgcaacttgaacagttaaactgtaaatatgagacaataagatcagcaccttaacagtataatcactggaagctg

SEQ ID NO: 179832 - DNA, 667 bp, Zea Mays
acgcagaagatggtaactatagccgatatgccacactgccgacccgttggagcaccttgtaagggccaaaatatttgtaggagagcttatggttggcacgagtagccactgaactctggatataaggctgaagcttgagaacattcggacccgcgtttatccgcctgaaatttcatacgttgttgtgcacgtagcagatgatgaaggacagcatgggtcatcagctccctctgtgataaccaagactgcaagtctgaaacaggaactgcatcggcagtggatataccaggtggtgtggaggatagtcgtacaatacctcaaatggggatttacctagggatgaatgaaatgaggaattgtaccaaaattctgcaagaggcagccacttgctccattggctcgggtgagaactgacaaagcaacgcaataatgtttcgaggcattgattgactcgcttcgtcttaccgtctatttgtggatggtaagatgtgctcatgcgtaactcagttcccgaaagcttgaacactgcttgccaaaatgcactagtgaatatccggtcgcgatctgaaataatggacgagggcataccatggaggcggtaaatattgtccaagaacacttgagctatcttcagagcagtaaaaggatgaccaaggccaatgaaatg

SEQ ID NO: 179833 - DNA, 500 bp, Zea Mays
tgtcagaatgacggatcgatgattccaaattttcaattgataactgttgtgaaaacgtggagtatgaatagaatcgtatatccacggttaactaccatggaaaggttccagctggactacaatcatactaggaaagtagggaagagctgagcgcgtcaagaaggtaaagctagagcaggcacgaccagaatgaagcccacgcattaatattacacataataggacagcatatagcagaatgcagcggcccagtcccgccgattagcaccacctcgcttgctcagatgagggaacgctgatttaaaagcttggttctcgagcccggtaacacgaccttacttgaacaggatctgttctataggatcgtactgttgtatccttgattgataaggaggcaagcacttaaacctggttgatgatccatgacctgtgggtcagagcgtgattaacggccgccaccggctctgatgcctgtgtccggtgctgtagatgatcgttcc

SEQ ID NO: 179834 - DNA, 385 bp, Zea Mays
agcagagacgactaaaacggcataaggttaggccaacggagcaagaagtgggaatgaggcaaggtagacatggaggtcgcggagcgcagcgagacaagcaacaagggtttggtagagtgggagcggtgatggtggttgggaggggagtgcatagaaggagagaacgcaggatggtgtcagcaccacgcagatagcgtggagcacgaccactaggtccttgggtgggtgtgaatgaggtgagaaaggggaagaggagtggagccggacatagagggagtcgatgaggcgaacacactagaggtagaggatgacacgattagtggtggacaccgcgagcaggggcacatagtgccggtggagagtcgtaacatgggggcaaagaagg

SEQ ID NO: 179835 - DNA, 1007 bp, Zea Mays
aaatttcatcgtggggcacggaagttgccctaagatgcgtgccaagcgtgccgtgctaatttaaatcagcgtcaatttaaactgactgctccactagtagggcatagtggccaccccgagttaggtaagcgtgagcatgccgcaccgccttaagtcattgttgacttaagctgattactccgttagtagggcatagtggttaccccgagttaagtaagcgcgagcatgtcgcaccgccttaagtcattaccgacttaagccggttgctccgttagtggggtatagtggtcatcccgagttaagtaagcgcgagcatgtcgcaccgccttaagtcgtagccgacttaagccgattgctccgttagtagggtatagtggtcaccctgagttaagtaagcgcgagcatgtcgcaccgccttaagtcattgccgacttaagccgattgctccgttagtagggtatagtggtcaccctgagttaagtaagcacgagcatgtcgcaccgccttaagtcgttgccgacttaagccgattgctccattagtagggtatagtggtcaccctgagttaagtaagcgcgagcatgtcgcaccgccttaagttgttgccaacttaagtcgattgctccgttagtagggtatagtggtcaccctgagttaagtaagcgcgagcatgtcgtaccgccttaagtcgttgccgacttaagccgattgctccgttagtagggtatagtggtcacctcgagttaagtaagcatgcaggttgacagtgaacaattcgagtgcctttgaagtctttttattgatgatatatttcccagtttatagagtacattgttgccccaatagcttttgagatgtagctaggggtaaaacttcctgagatgttctatgttccatgagttcccaatttccgtgccgtccatttgagtgagacgatatgatccaggccgagtgacttctgctactatgaatggtccttcccatagaggcgacagtttgtgccgtcc

SEQ ID NO: 179836 - DNA, 437 bp, Zea Mays
ctaagcctaacgatagcgttaggagttagctgatgaaggtagatcccaaacttcttcaatacaacaacaatcatattgttcaaaggaaatcttaaaccagctttaaagaaacttttgaagactactacttcatcctttcctggcttcggagtagtctcttccccaccaaaacgaaccagctctttcttcgcttcactaaaatagcccaaattcaacagtttaggcaaatcaccttcggagatggtggatttctcaaaatccaggtggctgggttttcttggcactgcgctgtaatcatcttcagactcagtctcctcaacatcagcctgctctgcttcagcggcaggtgcatcctccgatgctaccagccctgagcgcttcatcactttggagattggggcagtttcagcaccttcggcttcctctccgtcgcgcgc

SEQ ID NO: 179837 - DNA, 719 bp, Zea Mays
gtttccgacttaagccgattgctccgttggtagggtatagtaatcaccctaagttatgtaagcgtgagcatgtcgcaccgactaagacgtttccgacttaagtcgattgctctattggtagggtatagtaatcaccctaagttatgtaagcgtgagcatgtcgcacggacttaagacatttctgacttaagccgattgctccgttggtagggtatagtaatcaccctaagttatgtaagcgtgagcatgtcacaccgacttaaggcgtttccgacttaagttgattgctctgttggtagggtatagtaatcatcctaagttatgtaagcgtgcaggtatgttgtgccgatttaagtcgtttctgacttaaaccgcttgttgattgagagtttgtatatggtagaacacataagctttattgataatgaaaccttttgtttacaaagtacagcttgcccaccggagttttgatgtactactacggatagaatttcctgaggtgttcaatattccacgaatttcccacttcggttccatccatctgggtaagtcggtaggatcctggccgagtgacctctgcaatgatgaatggtccttcccatggaggtgacaatttgtgtcgcccttctcccgttagcactcggcggagcactaggtctcctattgcgaaggatcgatgccgcactgctttgtcgtggtagcatctcagggtttgctgg

SEQ ID NO: 179838 - DNA, 368 bp, Zea Mays
gccttggaaaaattaagattccaaagagtaaaaattacattatgttaataacaaatgtaaactggaaattttgattgaaactcaccatcaccttcatcattggaactactgtcacctgactcagcataaattgggctgccttgttcttgtgaagaatcagtttcatagtcttctgcggtaccttcagcatcttctccatcccattgcattctctgtttgtttttacaaccttttttccccatataaaggtccctcttaaattcagccacctcttctatgcccatttgtaaactttcagtgacaaacctgctaggtgtgctccaatcaagatcactatcatcatattcatccagagttggtgcagaatc

SEQ ID NO: 179839 - DNA, 504 bp, Zea Mays
ctctggttcgcgctcaccgtttctctgccacagctccgccgccattgacttgcgttctcgtagtgccctagacaccattcgagagtcccggtgcttcccctcaaggtaactgtcctaaccccgcccctaatttcccccgtcttgcacttagtcgcacgcgattgctcactggagtgttccccgatccgctgaggactctccctccgccgtctagtcgccacagccccgttcatgcaacctcgaccccgtcataacgctcgtcaggtaatccccaacctctccagatatccagaccaacccctagcgccctaggagccccggtctgcctcgcctccgacgatggcgccgctgtgtccgcggagagcgccgcccctggctgaccgacgaagacaaattctctgacgcccatcttaaccgctcattcctaatcagatgacccgacttcaattaaacccgatctaatcatgactgtctgattcagatctggctgctcggatccactcc

SEQ ID NO: 179840 - DNA, 751 bp, Zea Mays
tcgaaacattccttcgttgctttgtccatgcctgtcctactcaatggagtcattggttgtctgttgcacaattttggtacaattcttcgccgcattcagctacaggtcgcgccccatttgaagtattgtatggttgtcgtcctagacagtttggcatctctgataacgttgttatctcttctactgagttgtctgcctggttgcaggaccgccagcttatttctgatttggtcaaacaacatttggagagggctaaaatgaggatgaaacgtcaagcagacaaacagcgttccgagagagaatttacagttggtgattgggtgtttctcaaattacagccatacgtccagtcttcagttgctcatcgggctaaccagaaacttgcctttaagtttttcgggccatttcaggtgatccaacgtgtggggtctgtcgcctataaactgcaacttccttcatcgtcgcgtatccatccggtttttcatgtctcacagttgaagcgagcgctggggaaaggtttggtggcctcacctgcattaccatctgatcagtaccgtttcagtgttccagttaagattttgcagcatcgttcttctgttcgtgggctcaattcctgtccccaagtgctggtgcaatggtctgctatgcctgaggagctggcaacttgggagaatgtccaagatttgcaacaacaatttcctaatgaagctgtctggggacatccagcaggcttagcaggggggaatgttag

SEQ ID NO: 179841 - DNA, 666 bp, Zea Mays
ttcgacatgtgaagggcacacccatcacattcagtctcatcggacaccacaactgaagctctagtatacttaagctccctaagcatgctctcatacttcaatttaaaatctttcctctcacgaacaacaatcctaagaaacttgacctaattcgccaaagcagtgttcaactcttctatctcaatagtgaaatcattggtggaatgtgatacctcagaagtagagtcatcaccgatgtcctgcctttcactacccaccgcatcataaccaagggccatggtgcaaaggcctcctatggtgttgtcgatgaagcaaagtctgttcagcttgtccttgacttgcctttcaatattcttgtcgctcgaggaagaacctacgtcatcggagttgtggtcgaggttgctaagggaggtgaggaaggcacgctccttgatctttgccttctggaggcacttcttattgagcgcctccttgtcgaatcctctcttggacttatactttccagaggtgtactcccgcttgcccttgcgccgaccatagtggtggtcgcgtgagataaccttctgcttgaccttcttgaggcaacttgcgatgaagtggtcggggtcgccatagttgaagcatccatccttcgactcaccacgccactggttctggcggttgttg

SEQ ID NO: 179842 - DNA, 439 bp, Zea Mays
gcaggtaaataactgcccctgattacagcgacaaaaaaccgcaactgcagacaaataagctacactgatgcaacgacagtcaccgtagcatgtttaattttaatacaggaccttgttttttctcatctcttttttcctgtgtgcttcagtagttcagtgtatgcagcccctgattacaacaatttatcagaggttggattctgattgccctctgcctctgcctcgcacgattggttgatctcgccagggttgatagggttttgatgagaactttggatcttgattgcagcattagaaagcctggcaatggccacggcagacaccagagggtggtgaaccagcctgacaccactggctaccagcctgcaccagcgcctggcctcctccaaactcctgcgcgctcgccacctgcgcctcagaatgcagccatgcatgttcc

SEQ ID NO: 179843 - DNA, 483 bp, Zea Mays
tgtttaaggttagcttcgtcaaacggtgaaatcattgaaatggccagagtgcgatcaactgctagagtgtctcgtgagggggacgaaaccgaagctgccgaaacaacgccgatttcagaagtaatgaagcaatcaggtctggttgtggcagaggaggttgctgacgaaggtgcttctaatgccgaatctgaacaaactatggttgagggtgaacatgatgatgggagtgaagaagactacaacattctgatcccgacaaagcctagtcatcttgaatttggaaaatctactgtaacagaagatgacatgcctatgatgatgaaattgggctattttggagaggctgagagcaaacttattcgatttgccggggaagaagtaatcccagagctgaaggaggatgaagttgtcttttttaagagcttcttcagagcagggctccggttccccctgaatgaaatgataggggaagttttaaagcac

SEQ ID NO: 179844 - DNA, 807 bp, Zea Mays
gattgcaaatgacgctagcttggttcgattggggggtgaagacttggcgtcaatgcctacagaagaagaagttgttctctttcaaagctttttgagagccgagcttagatttccattggacaaaattgtagtggcgatatttaagagatttaacatataccttcaccaactcaccccaaacgccattatgaggttgggagtttttatttgggttgtacgaagccagggtgttgagcccaatgaggaggcattttgtaatattcatgagttacattactagatgaaggcaactgaataccttcataataactttgggtgtaacaactgtgcttaccgaaaggaagctcaatttctggcccttgcgtatcgtagcaaatggtcgaacacatgggcgaagaaatggttttatatgaagaacaatttggataagatggaagatatcaaggatataatccaaaatcctatccatcctagctttgggtttaagaagccaacttggtacataaacttcaaagctcaggcctctcttattgccttaaatgttgtctgcacccatattgggacaagggaccttgtgcaagaacatctagcattcaacacatggccattgagggctgagtggatgcctgagatgaaggaggatgctttagaaacagagcctggcttggttaggcttcggtacaaatataaatttgaaaataaatttggagaagcatgtgacgaatggttggagactattgaggagaaatgcaatgagattcttagtaactatagtaaaaaagaggacgaagccttaagcgtggcctt

SEQ ID NO: 179845 - DNA, 518 bp, Zea Mays
cagtgactgaagagcgccaacccccacggggtcgcgctcctcaaacagcagcaaaaagaaggcaacacaggtgcaccccatctaggggctcggaaggtggaagggcgcgatgaatgcaaggagtgtgaaggcatggctgctgctcgggggatcgcccctttttaaaggcagatctcctcactcgcacccccaagcgtcacgggcaaagtctccaccgacgtgttccagggttctcaccctctgacgcgggggctgggtcccacatgtcatgcgagctgacccgaaacggaagaagccaaatcgccgcacacgaagcatgtaatcgccctgtggttataagcattcccccatcctcgccgaaaccagcggtcgaaagggcggaccgccacacaggaagcatgcaaccgcaccacggttgtgcgccctttcggcttcgtcgcatccagcgaaccagcatggaggcccgggcccacatgtcatgtaaccagcgcaacggttattacgtgcaaggaaaccgc

SEQ ID NO: 179846 - DNA, 820 bp, Zea Mays
gaacctcttcatattttgggtatgagcaagtggaatagttaatctaagtacaaataagtcacaaatttgaatttaaatggagatgttgaatctgaaattcaaatgagaaaaaatagaaaataaaagtaaagagaaagaagcctaatgggccgaattctttcctttgcccaccttttcttttcctccttgcgccagcccagtccacccctttgtttttttcttctctttgtttcctccgcgggtgaatgatgcacgggtcccagggttcggccactaaccccgcgcacgctccctggattgtcttcctcgcgcgggtttcgctctgtggaccaaaccagacctcgtcaacctcccgaccgattcggccgctgttgttgtgccctcgcccgagctataggaccgaacccaaccgagccatgtcgccgccttaatccccctggttggtccagttgcatccagcagaagaaaagccctcgcctccattagaactcgacgacgtgggagagagagaagaaggggggagtgcgtagtggtccggtgcgggcatctaggcggaggtgcgcacgggcagagctacggggaggttccaggaaggggcgcatctaggcggaggtgccgcacggcgtggagaagcgcgttcaccttcaggtcgttcgacgataagacgtcgctcctgattgaactgcattgccagcttggcgtaggatctcgttgcgcggagcttagttcgccggggaatggaaatcgccaccggtgtccatggccaccaccgcgctgggtgttgttgcgccgccgccacatcacctcgcgccgtggcccg

SEQ ID NO: 179847 - DNA, 504 bp, Zea Mays
gccggtcgccatgattcatgccgcagggaagtagattgcgctcggccgtgaaaagatcaagtcgcggatgagttcgggctattatggcctcgctgttcctcgaccacttgcaccgacgacgtggcctcgcggccgtcaccggagtttgcgcccttcactgcgattgtgccacgcctccggccattaaccacatcgtcgtgagttgtgatcgttacacagtgatcgtcgtggcttcttatcccgcaattgccacgaatcactgcaccagtaacctctcctcctctccggccgccgcgcgtctccttcaaattcattggccaccgctcaggagacctataaattgagcacgcaatgagcttcgtagggtaattacccatccaaagcatcagcacttgcctccaattactcaccagagaccacgaattgctcatctcccccaaatcgggtttccgccaccgtgaaaaggtcctcgccgtggctagctcgattcaggtccaatcttgt

SEQ ID NO: 179848 - DNA, 599 bp, Zea Mays
ccggcgatctaaggtggtctagttcaattggccaggtcgagaagcatcaagaggacacaggaatgctaaaacaagagcgaggagggcatgatcggacctgtggagagctggccacgacgagctcacacacgcggtgttcttgacagatttggggggaattcaaaattggagcgtctggtggatattctgaggcatgggcttgtgcgttgggtgtatgattacctagcggagctgatggcacgctggcggccagagagaggggagagcactagcgcaagagctacgtggctttcaccgtggcaggcttaccgacgacgaaccaactatctagagcggcttactgcgacgtggtgaagcttcaaggcacgtggcgcccgatcggcaggcgcccatctccggcgaacttatctagaccggcctcaaggcaagggggtacggcggcccgccccgagtctcatccgcgacgaagattttttcaccctgaagcgttatccgggcatcagtgagcatgaatcaccacggcggcgcgaatctaggcacgggggtcaccggcggcaaggtgcactgaaccaaggatcttcttcagttcactgtactat

SEQ ID NO: 179849 - DNA, 519 bp, Zea Mays
ggggttggcggcggcgagtttgttgttgggaagaagaggtatggatcccggtggagggggttgcgaaagaggacgggtgtgcctaagcgtcggtgaagtgacgaccggcggcgttggcttaggagtgggcggcaacgcctacgccagcgacacgacgacatgagtggttgtagggtggcgcggaggagggggcaggctaggtggcagttgtgacgtctgtggggtgcgaggagacgcaggtgcgaggagaaactcgcggggcagcccgagaaggaagatggcgggatgggggcgacgccagcggcggctgccggtgaggacgagggagcggggaaggattcaaagaagcatggatgtgaacaacggacacaatgcacgactcaaacagagcgaattaaaatctcgggtccgaggatgcggccacgcgtcggtatcaggatggctggagaacccgctgaatgcggacagagctccaaacggggtgaggttttaatatctctgataacttctttcttttta

SEQ ID NO: 179850 - DNA, 932 bp, Zea Mays
ggctgattaagttctgaatttcagacaagcagtgcaactgcaagcactttgggcatgaattaatgcatgatcgagcaagtatttgtctaggattgctataacaatattgtagctggatcttaggactataactttgttaaagggtgtcgaccatgttgctgcacaaaattggaagttattggctctgtaaattcccctgtcagaagcactgatggagcattccatggtacagtaacccgagtggatcagaacgccagcgtagcttgctcgccgccggtgaccttccctgcgttaagattcacgctgccgccgtctcaattcgtgctctggatgacgtgataaacgctcggagcacaccgccgtggataagcccggccattaaagtatcccggccaccgtacaaagttcaccgcggtggaaccagataacctcgccggtgcactgccccttccggccttatgccgcgtgtcctatccgcgccaccgcatcgccatgactccctctagcctctccgttgatcgccggaatgaccgccacggtagaagccacctagcgcttacgccagtaccttcttcatttccggccgccgcgcgtcgtcgcccaaatccacggccaccgctcgcgggctctataaattgaccgtgcccccagctccgccatgtacccaagcacctaccgcacccaccagcatcccaaatccctcactagcaagcatgaatttcggattctctccaatccggttctaaaacaccgtgaactcaaccccgccgtggtcagcccaactcaggttagctcttcccctctgctcccttgtttaagcattcttatgcgtctgtgatgcttgccgacccacacaatcgagctaggagccctttggtcgccgggaacgcgactgtcttgccgtgatgttcacggtcaccatggctagagca

SEQ ID NO: 179851 - DNA, 660 bp, Zea Mays
aggaaagctgtggcggtgtcatcgttccatgagaatccttccttcttcaaaagcgcagtgaggggagccgcgatggagccgaagttgtggacgaacttcttgtagtagcctgcgaggccaggaagccacgcactgcgtgcgctgagcatggtagtggccactcatggatggcttggaccttggcgggatccatggccactccggatgccaagataatgtggcctaggtagccgacagatgcgacgtcgaacgaacaattggacctcttgacaaagaggcggtgttggcataggagggacaggacgacacagatatggcacaggtggtcggccagacctgctgtaaatcaggatgtcgtcgaagaaaacaaggacgatcccggcggaggtggggccacatcacatcattcatgagcgcctagaaagtcaccggggcattgcacagcccgaatagcattaccaggaactcgtacaggtcgtcatgggtgaggaatgccgttttgtgaacgtcatccagccgcatccgcacttgatggtaccccgaccgtaggtcgagcttggtgaagaagcgcgccccgtggagctcatccaaaagctcatcgatgactaggatggggaatgcatctttgacggtgagggcgttcaaagcgcggtagtcgac

SEQ ID NO: 179852 - DNA, 295 bp, Zea Mays
gtttcccacaaattccaaatccccaaagtgcatcacccgaatgagaaaataacaaaaaagaataacctccaacttctcttctttgcaaactgggtatcacactctacccccctttaaaaagaattcgacctcgaattctgacgcttctatcggaacgacagaaggaaagattaatgagtcaacaacacttacccacaacgaaaagttccggatatttctgccgcatcagctcctcaagttcccacgtagcctcacgctcagactgattagtccataagaccttgacatacttaat

SEQ ID NO: 179853 - DNA, 623 bp, Zea Mays
gatgagttagtcagccttgtattgttgtttggggcaacattgttgtgatctttgggatcgaccattgtggtcgatctaataggtttaacctaacagatgcattctaatggatggggtctgatagatccgatcttttcgtccccggtggagtcgccaaaaagtgtgttggtgactttttagacaaacactaacgatctctagatccgcgatcgtagtgagtccagactttggggatgatccctaggtcccacccacggggagtcgagaccttggtgagcgaggtagtagataagatgtaagaaaaataacactacatgcaatgcggtcttgaactcgacctctattcctgtttatacgacaccacctctatgatggctaccacctatttcgggccaaacagcaacaaaccctagggccttctagtgatgagctataaattggattcggctctaaaggtggacggtggtggcggtctacaacgggtcattgggtcgcttggtagggttccctgtggcgacgcgaatggttcgtagcctaggggcagatggtccgatctggcggcgaaagtggtttcttccctgcgtcgagccgaacggtccgtgctctaggccgaacaatccgtg

SEQ ID NO: 179854 - DNA, 717 bp, Zea Mays
ctgatgtcattgtagcatctggctacgtattttaccagtgccttttttacatttttaccctcgtacgtatatatatagccaacaatatcagagaacagaaagtacaataatatacatgaagccaaacatgtgatgtgatcacaaagtcacacgctaacttccacagctgcaccgaacaaaaagcctccgctgacatcaaacctgccctaccactttggatcacctgaagttgctccagtttttttcccccaagaattttcagcatgtgatatgtctcctttcacatcttacaaatcctttgacaataaaattttacagcaatggtaaaagaaaaaactggcttacactaactgagccatatggaagcaaatgaaaaattgtgaatatatcataaagaaaatggagatcatgtgctgatctttgccataaatacattctagagagagagagagcaggccttgtaacagtggcatggggaaatgatcagattcagatgttgtaaatactagaaaacaaagtggtaaatgccagttccatatccagcactaatggagatcagttatagcagaacagttggctgtaccaatagttgacgagtgcagtgcacgcggtagatcacaatggtggtctcaagagcaagctatagtacgacagccctttctgataagacccatgagtgtgcaggacatagaagcaaatgcaacaaacagttcctgc

SEQ ID NO: 179855 - DNA, 528 bp, Zea Mays
agaagcaaaacaacaaaccaaattctgcctaatctcattttgtttacgatcatctactaagttatttctataaatctatcttgacaatgtgccctaactccagatggtgaatacctcgacaggagatgttgatctacctacacatgtacgacgaagaagggcagtaattaattcagaatcgtagatgaatcccctaaattctccacccgctcgggcggaagccttcttcactacccaaatccaactactacaatagatgtccaacacaatggccaatatgcaagcccaacaaaacagtaaccaacatcacccacaccaaccaccacctagaatcacagatgaatcccctaaattctccacccgctggggcagaagccttcttcgccgcccaaatccagctactacaatagatgtccaacacaatggccaatatgcaagcccaacaaaacagtaaccaacatcacccacaccaaccaccacccagagataaacattgtgagttcatgagctagaagcctcccacattct

SEQ ID NO: 179856 - DNA, 436 bp, Zea Mays
gcaccttatgagttgagcagatcttcggcaaatggaatgacagggaagatgcgttgagagtgggggtgggttgagaaaaactggtccatccttttaataggagtcacaacgatacccatggggaagatgttgggtggaaggttgggccgaattaggaatgcgcgcatggatgggggtgcggataggggcatggtgcatgcgcaagttacctactatggaagggggccgcctactatggaagctccacctgtggcacactaacgatgtgtaaggattgaaggtcgcctccatctatggaaggagacgctgaggttggaaggaggcgtgcttcggaggctgggtccatatgatgttgagggagtgagatataagcgagggcatggcaggggttgggtgcatgcacaggtgagatttgtgggcgtgggcggtggggctg

SEQ ID NO: 179857 - DNA, 913 bp, Zea Mays
tacatgagcctcaggaatcttaaagccacacacaagaaatatctcattgctgcaaaggtatgaaattaattgactcatctcgtgtgcactcattcagcattgtcgttagtaaatctttctttactctttattcattatgtgaaggaagaggaggtcaccgaagggaagaggcttcctctcgaggaggtggaagagaacgcatgcatcagccactgaacagaacaagcaggcgatttttttgtgtggatggcgtctgccacaaaaggattgaatcgaggagtgtgctctggttgtgaagtgataactaggctaccacatgttcattttcaaaagttttcgtgtgtgatcgtgatcaggggtgaaactgtggtttcagccaacaaacttgcagttcctattgcttctccccacttttttcctttatatatattttgtatcggttacagaacatggtttatccagtggtatgctgatgaaagatgctaagtttcgcttaatataatgtatatgaaggtcctgggtacctcaaattttgtccacattgaaccagtacgaatgacatcttccttgaaagttatagaaatgcttcaaagttcaaatggcattcagcatgttccatgtgcttctatttcagcactcatttcccgtgatggcaatgcaaactggaactggtcattagttagcattgactgaaattttctagcctgttcgttttttgtttcgaggaacctgttttgtatcgttgaacggagtatagttgaaatatctctaatatatgtgtagagcaaaaaaaagtgtcaccaaaattcttatatagttgtgtagggcccggagtgtcggtgctctaccctcccccttactccacgcggacaccgccgttgcccaacaatctgcgtcgacttcgccggggaaa

SEQ ID NO: 179858 - DNA, 1504 bp, Zea Mays
cactggttccacacacacattcatcacagaggcaatggtgtctaagatgtaacttccactagaaaggcgccaaggcacagtgaaagtcgccaatggggacaaggttaccaacctaggattatgtacatggttatcagttcaaattgttgaagaacagttctccctaacttgctatgctctaccactggaaggctttgatgttgtgttgggagtacaatgtgatccttaggtctgattccatgggacttcgaacgtctatcaatgacattctggaagcaagaccacaaggtttgttggacagggatgtgtgactataagccacgctgttgtgcattttcagaagggaaggaattggtggacaaattattgtactcctacgaagacttgtttgcataaccctgcggcctaccaccagcccgacgccatgatcaccacatcaaattactgcctggcacgacaccaatggttgtacgttcgtaccgatacccctagctcttgaaggatgaaattgagaagcaatgtgaggacatgctgcatcgaggaattataagggaatgcacgccaacattctcttctccggtgctccttgtgaagaagtcagatggaacatggagattctgtgtggactaccatgaactcaatgggaagacggtgaatgaccatttccccataccagtggttgatgaattgttagatgagctttagggttctagattcttcaccaagctggaccttcggagtgggtaccaccaggtgcgaatgcaccccaaagatgttgacaaaacaaaattccgaacacaccgaggccactttgagttcctcgtcatgccattcggcctcaccaacgccccgtccacattccaaagcttgatgaatgatatcctcaactcattcatatgcaagtttgtgctagtatttttcgatgacatcctgatttatagcaagacgtgggcagctcacctccaacacgtcaagtaagtgttccaaacactgagaacacataagttggcattgaagcgctccaagtgtttttatggggttactagtgtgtcatatttgggccatataatctcggcatatggtgtggctatggatcctgagaaggtagcaacattagagacttagtcgcagcccagaactttaagggtgctacgtggtttccttgggcttacaggatattaccggaagttcattgcaagctatggcgaaatcgcagcaccattaactgtcctattgaagaaggaatcatttcagtggtcggaggcatcaacaaaggcattcctcgcactcaaacaggcacacatgaccgtctccttgctgcagatgcctgacttgagcaagagttttgtggttgttccgacgcgtcaggttccaggtttggggcagttctccaccaaggtgcacgagcgtgtggcatattttagtaaagcggtggccagtggcggagctctataaaattaacatcccgagccactctataaaacttgaaggttactttaaacag

SEQ ID NO: 179859 - DNA, 879 bp, Zea Mays
cagggatgccaatattcatgctgcggccgctgcatatatgatagttatacattaataagtaaaaagaagatttaaatgcaaattatgagtaataaggataaaaaacacacattaaggtataggagtcacaactgactgtactgaacctcctagtaaaccgcctcgacgccctcacaattgcaaaaaggcccattttctgcaataagctatccatcagactaatatacaacttcattaaaaagaaccaatatagggacatcatccaaaaacgtacaaaatttacaaaagcagggacaacaataaatcttccatattaacagaaaactgctaaactaaaagaatgatatcataacaagggctaactcattgtgtaaccgtggtgtttaccacacaaatttttttaatttcattctcgtcattacataatacaagcagaatggaggaagagatggtgtttaccacacaaaattttttaatttcattttcgtcattccagaatacaagcagaatgaagagagtacctctgtgtctgctcggttcttctgggtgacagggcggcggctcctctgcttctggtgacagggcggcgactcctcctcagcttcaatgtgacaggatagggtattagggttgctcctcggctctgaaggatgcgcacagggacagagaaattacaacccgtcaacgaaaaaaaggcaaggactcaccttgggagacctgctcgacactgtaccccgctggaggattggttcaaagcaaggcctgtcatggaacttattccaacacaaagattgataacaactgtgctggctgacagaaagtatcagatgttagatgacaacaggcatgtgctttggacaggactaattcagatagagt

SEQ ID NO: 179860 - DNA, 416 bp, Zea Mays
attctactccggtcgtcgtacccgcctgagtcacggccgcttcggatagactcaccagagttagccacctcgcgaccttgcgccacgtgcctgggtgctttaaccacgccaccgtgagtcaccttagcccatccggtgatcgccggagagcttgccacggtaaacgccaccaattgcttgcgccagtgcacccccttctctccgaccgccaccacgacatctcaaattcacagaccacagctcggggagcctataaattgagcatgccgtcagttctgcaaggtaatccagcatccaatcccgctcgtgcctccaattactcaccagagaaccccaatttgggatttcccccaaatcggtccgaaacaccgcgcatagtgacctcgccgtggctagctcgttccaggtccgttcat

SEQ ID NO: 179861 - DNA, 674 bp, Zea Mays
ttatgattgtctgtggacacgaatccctaggggatgccctgtatgtggaatttatttggaagaaagattaacgtgcggataccgatgttagctaaggggttaacccaaccaacactccttaacccattatcacatgtggatcacttaggaaaaaagtcaccacatttttggatcaatgctctaattaggtgctaaccatcctagagggttttacttgaccatctcatagtaatcaaaggaagggaattaacccaaaacactaagttcaccccttaagagcataggaagcaccaaacataagtgatcaaggaagcttatcaaatcgcctaatcacaaggtggaccattaacaaaagttgtagttcactaaacacttaacaaaagttattgaggtttggacaccaaaaaggcttgtcaaagatccctaatcatgtcaaatgtgtgtaagagagggaaaatcaggaaattcattaactcaaaatcaatcctacaacaaagaccacacatgttcactaagttataagccttaaaccaaagtgatccaattacaaaaagtgtgtcaaaatatctcaagtataccctacaaaaaatttcaacccaaggtgccaccgtttggcaatgccatgacattagatttccctcgggatggagcagctggatagatcagcctttccc

SEQ ID NO: 179862 - DNA, 510 bp, Zea Mays
acgagcaccttacaaacatatccaaatctcagcatggccgtagtgagattggtcgtggccatggtttggatttagcctgtttctctgcttcagcctctgtggtcatggtttggatttctgcagagattatccttattagttatgtatggttggatgatgtgtatagtgtattatccttattagttcttgcttttttcaattccttgatgtgccatcataattaagtattctgcaatttatagttatgtactgctgttgaaatattattcagttcaccaatgtgtggtcacatttttcagggatttggacacctttcattaattacatacccttgctgctaatatgcttgttggtgagttttatctattgttgcattttttctgataagtggtaaaggacatgaaaattgcttactgctgagttttatctgttgttgtattctttctgttaagtggtgaagggcatgaaaattgcttgctggtgagttttatctgctattgcatttttctg

SEQ ID NO: 179863 - DNA, 537 bp, Zea Mays
tttgaagccatttattacagcgaataaaaacgctagaggctagatcaatgatctgatgttattgtgagcatttgtgatcctagtccacttgagtgagtgcgacatgctgtggtggaggccggagacttttgcatagtacatcatcaataatgcacaaaggcattctttagaagtgaagatatttgatatgggttgcctagcactggtaaacagaagggagatgcgtgatgtgtcatcaggtctgatctggagatggacggctggagacgcttgcccatttggtgtggttgggatctgctcaatcgcttgataaggactcagccccatagcttttgcctcctagctcctaactctagacctctcgttgtttatattataagccatctctgataataacatcctccatagctcgatcatccctcaaaaacagcaacgatataacctttttgacggtgtggccacgtgtacgtagtatacgtacctatccatgcaatgtcttgctgctgactaataataggcgtccctttcttacctggc

SEQ ID NO: 179864 - DNA, 820 bp, Zea Mays
gcgcaaccaggtagttccgccaccgctcaccgacatctaccgtttgttccacggtcaccgtagaactccccgccgtgttcgttgtctcagtaagctccgccctatcacccgccacctggaacgcccttgagtttgccttctccacctttggtttgtctggtccgcattcaccggagcatttcttgtgcagccggagaaccgccgccgtcgacccgtgaactcgccgcgcccagccttcgttcgtgagcccctgagtctccacttgaggtaaccttcctacccttgcccttattttcccctgatgtgcgctttctcacccgctcgccggagtgccccggtccgctgaggatctccctctccaccgtcgagtcgcctcaccctcgttcgtgctaccccaatcccgccgtagtgtttgccaggccttccctaacctccctggccatccagaccacccctagaaccacaaggagccctagtccacttcaccgccagtggctgcaccatcgtgggtgcgaatggcgccacccttggctggccagagaagacaaaaccctttctccgatcctagtcgtccagtcttcatcggatggttcggatgcgcggataacgcttcgcgtggaccgtggagccggagccgttgatccacgatctagcggctagcacgccccatgctctcagcacctcgctgacccgtggggcccgtgcgccagtgcctcagcccttccctaccccacctgtcagtcgcacccgcgcgctcgctcgtgggatttaatcccagccgttcgcttgtgatcgtacggtccagattacccgatacccc

SEQ ID NO: 179865 - DNA, 617 bp, Zea Mays
gcaagaggaggaaagaattgagtatgacaaatgaaatacctcattttcaaattcaaagttaacttttatacctttatgctattatatgctaggctgtcagcaagttcatccttcgataaaatcgaaaggccgtcttccagcttcgggaatctgatgcttttacctatctcacggcaaacatatatttctttattatccgggagacagtacagaaaatcttcttcgtcacaaccattgaacactaacgcccccttcggatatttcaatttttgggcgtagtatcgtgcttctagcatttcttcttgggatagttcttttcccgaagcatgacgaataatgtagtcaatgcttttgttcgaagcttcgagagtaggagtttcgatcttttcagatgcaatctgcactgtcgttttttccttaggatcagtaggctccatctcggtgggcactgaattcccagcttcggctttagtttgagcttgcgcaactttggtttctgcttgcccagttttggcttcggcctgcgtctttgtagtttcagcaactttctttgtagtagcaggacttaaagacttcgtagtttccagcacaacatccagcacgttggccatcctcct

SEQ ID NO: 179866 - DNA, 881 bp, Zea Mays
cggggatcttcctagtgcgagtactgtgtataggcggcgaagggtggtgtcgaaacacagtgtgggtgagttttcgcgaagtggtaggcgccgtcgtatgggtatggagtgtggccgtcttcgggtagaccgggttggtaaacgagaattgttgtcctcgccgattggggcgagcataggtgagggagatctgcaaaatctttttgagggtgaggaattaaggataatgctgttcaattatagggagatgggtatcatcccgaaggttgagccgatgtaatatgtcatgcccttgccgtgtgtatgtaactgtaatttgtatggtaatgtggcctgttggccgtattcgcacgcctgtactgatccagttgcacccgtgggcgacttttgcacggagtgtcttttagtgagagacttcgattaacgcacttgtgctatcccggctgcacccttagttgacttgcgcggagtgtcttttagataaaagacttcgattaacacacttgttgtgctattccggctgcacccttaggcgacttttgtgcggagtgtcttttaaataaaagacttcgattaacgcacttgttgtgctattccggctgcacccttaggcaacttttgcgtggagtgtcttttaaataaaagacttcgattaactcacttgttgtgctattccggctgcacccttaggcgacttttgcacggagtgtcgcacgtgaggatagtctatgctgcctctcgcggtgactacggagtggtcgaatgccgaagaccgtcgatgcggtctttttcgacatgttgcatctgagtttttgtttttgcgggggcttttgcaggtatattacatggctccgcctcgttaaaaacctcacccccgggag

SEQ ID NO: 179867 - DNA, 607 bp, Zea Mays
tcttttgcctcgagcaccaaaggcagtggtcatggcttcgtcctctaccttcgtataagccctagcagcccaccactggttgcctcaatggcttcaagccaatcatcattcggctcgtcaaactgacttctgtagcgataggtgtatcacagataaaccagactaccttcgctagagctagcagcggtctccttcgacatctcccagtcattaagaagtggccacaccatataagcaatgtgctcctgaaccaaatccctggtgctaatgtaagtacacactatgttgaaggccatcaaacatgcttgaacttcgtttccacttgcaattgaaggcctcctgatgttgaagcgtgatcgtatgggacgctggattatgccctttacatcctccctcttactcagatcattcatgacataaaaccattgcttcatccaagagcccgaccatttttttcgaaacgttggcacaggacacctcacatcagaccagtacacaaagctataacatccagagttgtgatgatattgtctttcccaactgtcttcgtttggtagaacaattcgtgaatgttgtagaaatagttggcatctggcttcagcccttg

SEQ ID NO: 179868 - DNA, 699 bp, Zea Mays
tcactggtgaattcagtttgatgatttttgttatgtggtgatataaactgttgggcatactctacgtgtgaggggaaggttggaatgatgttttttcattatctaaaaaaatagacatctattaatttagtagagtccatgattcttcgtgctagcgaagagtcaaagcacaccaaagcagcagtcgcaaaacttcgcattgatccatttgtccttcagatcccaatgcgccccgaacatgggccttttcatcacttgaatttggtaatcctcactacaatttggtaaagcactaaaggaggtggctcgcgtgcagacatgaaccacgattctagcacctggcatgttacttaaacaaatatgctaaaaggttcctttagttgccattccgcctataatgtaatccaccactcatttctcctttgggggatctcttttaacattgtttccgtacatctggcattagaaatatcgaagggcggacctgatgtagcggtaagagctgtctcagccaccaggttccagacccaattacccactgtaaataaactcttgcgttatccatagcagcaactagcaacctgtaaagctgtcactgtccatcggctaatttatccatctattgatccacaggctttactcaggtgggtgccagcactctcagtgactgaatcctaacggcagtatccaaatccaacg

SEQ ID NO: 179869 - DNA, 354 bp, Zea Mays
gaaatagttagaataggatgccgatctgttcaatgtttcctataatgcacatgcaggagaaataagaacttcactatggggctgattagttgtcgtgccccacgcgcccaggctcgcaccgtgcattgacgcgcgcaagcgcgtgttcggttgcgtgtgccttcgtccaccgccctgcatgcgcgcatgcagtttagcgcctttttcactgtctggcctgcacgcgtggagaagtggggagtgggcttccctcgcggtccaggcccgctcgaagcaggcatgagatagcccgagaaccaatcagcccctatgtaacctaccggacttgaatgtaaagtgtggtaggcaagggag

SEQ ID NO: 179870 - DNA, 975 bp, Zea Mays
gccttccctggtggtcggtgagaagaatagtcttatctgcacagtctatgatgccattgtgccgggtcaaccaatccattcctaggattacttcaatttcgtgggatggtagtacggctaagtccgccaggaatactaccccacttaaaagaattctggcttgggagcatttgaggtggcagagaaggtctgaccctggggtccgggtgaccagagggacttctaatggtgtagtggggatgccatgcttttccacaaaactagtggcgatgaaagaatgagatgctccagaatcaaaaagcatagcagcaggggtaaattcgactatgaactcaccgagtactactacaggggcttgctaagcttcctaggcgtcgacgtggttcactcgagccctaccgtggaactgaatcttgcttaactgactgttggtggagggtgccttggaggcgggtgctgtaacattcttggggccattcacagagttggaataggcaggtaaggatgtcttcaagtgcggataattattcttgaagtgacctgggtctccacagtgccaacaagcattggctggaggttggctgcttgaaacgtgacggagcggatcctgctcgcttgctgaggtttgaccccttggacggaaacccaaaagatcgatccctctggtgcctgtcctattgttgagctcggagaatttgaaaatttctcatgaggtgacctctttcctcttctcgtgctctttccacctggatggccttgtttgagaggtgcgagaagccgaggaagtcttggctggcaaggatagtcttgagttttggtcttaaccctttcaagaaacgggccatcttcttgacttatgtgctaacatcttctagtgcataacgagcaagttctgtgaatttatggatgtattcactaacagatcaccctccttgagtcaactctcaaaattcttcttccttgagctggacgatt

SEQ ID NO: 179871 - DNA, 633 bp, Zea Mays
atgtgaagcacggcacgatttgattgcccggagactgttatggggagtgacattcacgtgtgtagaggaagtgctacatttgcaattgacactgtacgatcctgtagttccaacaatcggttgagatgttgctttcagccagtagccgaaaggcgtttatggttattcagggattcttagcatttattgagatgtggaaatgtaggaacgcgggggattggaactgtctctgtactagaatgtttcaactgaatttgagacaggatttctggcacttgacaattgctcaaaccgacatctactgctattgccctacagttcatctgtcctggacagaaatcaacaaaagagtggcaaagtcctatcactgtttcataccctacatgaatcgggcatggtttttgtggtggtatatgaacatgtaggataggctaggtggtttgagttaattacaggaccatttcatcattcatgaacttttacgggagaagtgcatttttatgcactaggttactaacttactatcatcatgggttcataatgaatcatacaatcaagaaaggtttacattggaacatgcaatgtttttttacatgggagtgacaaggtggatgtgtgaccataagggtgacg

SEQ ID NO: 179872 - DNA, 456 bp, Zea Mays
cttgtgctttggtaaccgcatttggacttcctcccatttcagtcgatctctcccctttgtcgtggtatattcattgcgtatatgttgcaggtatcaccgcttcaaaaagtcttggagaatccaggcggtacacccaacaggtgtgcccaaagggtgtctgcccagtaaaaggcgtctatcgcgttgtcctaaagtagtaacttgacatgacgaagaggtataatactctgcctgagcagttgacttgattccatccagtgtcgtgttacgcgaagcggcgccagacgcctgactcatttctaggcggcttgaattgcttattgaagtcttgtgactgttcggtgagcgggtaggaagtggacggtcgtctcccgacctctttaaatagtccgcccatgcccgactgctttctccactcgttgttgttcgcttgtcttccttttcttcttcacttcc

SEQ ID NO: 179873 - DNA, 696 bp, Zea Mays
tctttagtgacatacttcttttcatctttttggggctggtctcctggatcggccttattttttccacgtagcccggtgcctcgcaggtcccaccatgttgttgtcgcacgagaagacctgatccacacactctaccatgctgactcttgggaatggctgaatatcgaccttcatgcagaaccaccctaggatcagccgacccttctcaatagccgattggatttgtcgtcggggttctttggaatcattggcagcaagtgtgaatgagttgttccacttgcagtatggtctcccttgtagctcttgcgcagaggggaacttgtgatcctcgggcaacttcaactgcttgtccttcatgtcaaataattgctcggtgttgctcacatcataatcaaacactttcgttggcccttgttgcttcacccacttgcaagagacgggattttccccctgagcccattgggccatcacaacgtcctgttcatctgcattgtctttagctccaaccatacgcacatggtgcatgaacatgtcctaaagtttctcttgatataactctaggagatgttgctcataagttgtaagcttctacactaggtgcaccaaggatctgagttcaagctggaaagccagatctttgattggctttgcgaggccgagtgttgctagcttgatggcctccttcttagtgatgcg

SEQ ID NO: 179874 - DNA, 389 bp, Zea Mays
gggggctttaccttctccggccggccaggggcagcgccatatgcgccctcggcggtgtagctaccagagatgaggtagactggggctcctagggcgctaggggtcggtctgggttgccagaaaggttgaggaagacctggcgaatcctatggtggggttgggataacaggaaaggggttgaggcgatcggacgacggaaggggagtcctcggcggaccagggaatactctggcgatcaatcgtgcgcgactaagggcataccaggggaaattaggggcggggttagatcggttaccatgagagaaggctcggggactcacaaacggtgtccagggcacggcgaggacatgggtcgatgtaacaccctgaatttgggggtagaatttttt

SEQ ID NO: 179875 - DNA, 504 bp, Zea Mays
agccccattcttttaccctctctgctcagcgagtaaagatctgcttcaactagtccttgtgcttggggttatgtggggtatttttactgcccaagtgccagactgaaacttatcttgaaggtggtgacgcagctgcttgaaattgctgtcaaagccatactaaaccaccacaccgtgtccctctgttcatgaatcctgggtggaagatagtagtgcaaccacgtgccataactctgtctttgttggaattccagagccctccttaaccggctcctagtgaacccatcgtgcacactatgtcttgcttggagtattgggtctaaaaccattcctgcctctctcccattacttcgattctggtcatttgaaactgaataactggtgttctatgaccattccaactctctactaaacatcacaggggtgtcccagtcctatatcgttggttgccttggacgtgatgaccacgccgagccttttcaccctttcaccgtggttagctgc

SEQ ID NO: 179876 - DNA, 851 bp, Zea Mays
gggtttttggctaactgggaacgagttcggttactgtttttctgagtcactgacgatttacataaaaaccctccggtttctaattcttcaccgcactgagtccacgacggcgtcgcgcgcggccgagctccggcgagcacgcagactggcaggaggaggccaagaccagtgttcagcttcggactaaaccaaattcgctacctggagaacgtttcccctaacttaattgcacgaatggtgatctattctcttctgtccacgagaaccgcgaaggccatgagcatttgatcgcgttcccgatgattggtggtctctcagttcgaattggtgactcggtaagcatcacagagctatgagagtgctcaaacgagggagagagagggataagctgaccggattggggctggccgcggtgaggttagtttctcggtggcggagaactgatttggggcgaaaccaaaattctagctctcggatgcacggttgctagcgattcttggtggcggggtggatgatgaccttgcggagctggtggttgcttcaatttatagggctcaacggcggtgaccggaaattcggatgataatgcacggcggtcggaggaaaggaagggcactggtgcagtggtttcgtgtcctcagtcgtggcgatggctccggtgatcaacggagagcaagggtgagtcacgatgatgcggtagatggacagagacacgcggcgcaaggccggaaggcagtggttcactggcgagctaatctgctccagccgcaaagcagcagagtgcggcagtgagtcaccggagtgacctccagctcaccgacggcgaggatccttaccccgcgacgttatcc

SEQ ID NO: 179877 - DNA, 653 bp, Zea Mays
caacgaccttcgcaccgatcagctctactgtcattgcataagagaccccacaccaaacctccaagtgttgtaccaattgttcaagaagtatgcattattggaggaacttcattttaggaaactagagacctagctcacacctaaagagactttgcaatccagtaagccaagggctagaggtcaacacaacgactgcccaaatcaagatccatcttagcagctacaagtacacaacattaccaaccagcaacaagcaagcgaagtgcccctcacggtcaatatagcccccacaacatggacggggaggatgcgtaggaagaggttgtggccaaggtagaggcccccggtaatagagaaaactctattgtgttttccatggcgaagacatcaatcattccacaaaggattgtcgagtaaccaaggaggccaaggatcgcatggccatggtggtccccgacaacaaccaaagggtcatagcccatacttaccaacaacacctcctcgttacgaagacctccatccacctttcccacggtaccaccaaaacttcaacgcacatcatgatagatcccccaactccctcaactcccacaccaggagagatcgccaccccaccacaaataaatcagcaaggccaccaactacccctccac

SEQ ID NO: 179878 - DNA, 874 bp, Zea Mays
gtcatattcaagtgggatatttaatatgaatacaagtttgccacagaattcgaatttaaattcgaattggagatgtaaattgaaattaaaagagaaaaagaggaaaaaagaaagaagtgcctaattgggcctcggtgctcctttctggcccaccagggtttctcaccgcgcggcccaccccaaccatccgcacacattgatggggcgccgacacatgggtccggtgcgtcggtctctacacgcgccagctcctgcgttcacctgccaagcgggccccgagcgcagacccctcttccggacctggtgctcatccctctgacgtcgggccctacctgtcattccgctgcgccgtcagctacggtaatggccgaacggccgcgcgattctgccgtagtcgtcgtggttgttgcgtcaacatgcgaaaccaggggataaaaccccgcatgacctccacaaccgcgagcccagagccctacatcccctccagacccgtcttccctcttcctcgtcgagaaaatcccgcatcaagggacaccgacgtccgccaccatggtcccgtgcctgcactgccgattgggggctagtgtggtgtcgggattgttcatcgatgggtggggatcaccggcgtgatgtattgcgctcggaggtccatcgtggcgccctgaatttctcaccgttgccgaactccgccacgcaccgcaaacgcccctgctcagccctcgatccccggtaagcaccttcccattgcgtgccttaccgtttttactacctgtaattaccctcggataggaattttatcgtgtgaatcgcatttgggcgcagcaccggcgcggtcgtgtccgtcgcggtgaagcgccgccctatatcgctgggg

SEQ ID NO: 179879 - DNA, 305 bp, Zea Mays
gactaagcagctggttcaacccccatcgcattcatatgggacattatgaattttcgagctgtcgaacaagtccgagcacgagtacgactttagcttaaaattaatgatttaggtgtcactacgtacgagacggggtcaactgtctcattgcccgtccagcgccgcggtctcactctcaagtcagcgtagctcatcgatgatacctgtggattcatggcgtggtagctggtgtttcgaggtctcagaccaacgacaatataggatgatatgccatctgcatcaatttcacctcgtggggaattttt

SEQ ID NO: 179880 - DNA, 507 bp, Zea Mays
cagcacgccagcacgtcgacatcgtgcctcgcctagcagtggatgtacaatgagactgaagaatccccagcacggcagttcagccagatctccatacaagcaccccggatccctctcgtccatggtccaccgtatcccaaccggtagcgcctcggggccaaagccggtgcagaggtgcatcaccaacgcaccgaacactggaatcaactcttgatctgtaccgctgcaacagttaaccaaaacaatccaagtgcccaatcgtctctagctctctacctggtctggcacctaggtgacaggtgttgtataaaaactcaagagcagtagagcctatttggttcgttggttcgtggctcaaaagcaacatacctcataagcagcaagtgtagctcatcgccaccggaggatatggcacgacgataaaggaagaaacaaatcaggtggcagcgcccgactagggaggctacaccggtgacatttgctgtgtcgtcagggacgacatggttg

SEQ ID NO: 179881 - DNA, 685 bp, Zea Mays
caactccagatcatgggtgggataattctgctcatgaggcctgagtgctctggatgcgtaggcaataattcggttgtttgcatcaaaacacaacctagtccagtgcccgaagcatcgcaatatacatcaaatgatttggtgttgtcaggctgtgcgagcacgagtgctgtcgtcagatgctgcctcaaggcatgaaaggcatcctcacatttctggccccaatcaaatttcactcctttcttcaacaattcagtcattggtttagcaatcctggagaaatccggaatgaatcgtcgatagtatcctgccaatcccagaaaactccgaatctgttgcactgtggtaagaggcttccaatccatcacttcttgtactttctcaggatcaactgatattccatcctgagaaatggtgtgacccaagaacttgatctcccttagccagaaatcacatttggagagtttggcatacaaatgatgatcgcgcagccgctgaagtactatgtgcaaatgcatagtatgctcctcttcatttcttgaatataccagaatatcatcaataaagaccaccacaaatttgtccaattccggcataaacactgaattcatcaaatacatgaagtatgccggagcattggtcagcccgaatgacatcaccaagttctcgtaaagcccatatctggtag

SEQ ID NO: 179882 - DNA, 829 bp, Zea Mays
cccagatcaacatttaaggctccatcgccgtagtaggtgatttatccccgcggcggcatcctctctgttccatctctctcccatggattcactcagcaatatggatcacggcggctactaaccctcttggcgagcacacgatggcgacgtctagggttcttataccagaactgagtccgattttggggaggatcgtttaacggtgcgcgctggcgagttttgcggcacggttcctacggtgggtgcgcgattccgttagggagggggaccggacgactcggtcccaagaagcggagagaaaaatgcttcaccaccacgctatccacgccacccgcgcagaagtcggccatggagacccggtcgttgcggaggtgggcggctgctgacgctcgggaaagaagatgtgcagtgccgcaccctcggttgtggagctgactcaatgggcccacgccaggcgtggatcgcgggaagcccggagaaggcagtcgcgcatcacccgccaccaggggacgaaatcccgatcaggatggggaagagggtagagctgtcaccgacgatggaggggaattcgttggggaaaaaaagaagacgtgcagaggtggtgcgggtcccacttgtaggcgaccgagcgcagaagctggagactgggatggcgcgtggactgaaggactggtcagaggggcccacatggaagtgactgaccgcgttagggcgctgggccgaaaggaggagattagggttgggccgaggcaggagaaaaccagcccataagggttttattcttcttctttttcttctattttctgtttttctttattcatgcttattt

SEQ ID NO: 179883 - DNA, 701 bp, Zea Mays
gtcacgaatttcaggtaagcggtggtcctgttgcttctttgtttccacgtgtcgttaagagtgataaacactagaatacgctatagtctattatatttaattttgattcgtcaggtaagtgtctgggcgatctgtctgtagttactacaagcaacatgtaaatttggggatcggatcccctgacgtcgaagtcacctgacgcacctatattttctgcagctgggacttcacttatgcagagtacgttgtagctgctggacatcatcatcgctcaattgtgtggcaggtaccttactcacatagttcgtgaattgtgacacctacgtaagatggttgggctggtggggtgtaaagcagcacaaatgataaaatttagatccaagcttctctctgggagcaaatttaaaaacgcatgggttaaaaggcacactttttcagtagtgaatctgagttatacatgtaatcacctaatgcgctttccgtgagatgcacatggtcacagacatgtgttctgcccttctgggtgctcagtggccgaccttctggtgtttcacgacctgtgtgtgagaagtatcttcttagtgcaatgcagttgaagctgttttctccctccgtaggtttttttatagttaaagcaagattgctggctacaattgcctaaccttgctaaattccaacattcatgaacatagaagtttttt

SEQ ID NO: 179884 - DNA, 399 bp, Zea Mays
caatgcacaattctatcacaaggtggtataagtgattagtaagccaatcaatcacacagaagcacagcagtgcgatgaacatcaacagtgcagacaggaatcacaggattttttaaaagcagacctgctcgagcacacggagattgctcttttccacctccctggcgagcttctccagcttgctgagcatccctgcgtacatgtcatcaatctcggccgcctgccccgcagcagcgccgaggagctcctgcagccttccgatcccaaacccgtccaccatttcatccaccgccttctgctccacgagggtgtgagcgtgcccaggcgccggagccgacggcagccagggcatgggcgactcggcggtgaaggcgtggtactggtcccggaatccgggcc

SEQ ID NO: 179885 - DNA, 751 bp, Zea Mays
gggggataaaattacaaaaaattaggatctggaataggtcaatttggagttcatatgcattttctacaatttaaacaagttctaacatttatttatgcactaaaaattgatttctgatattaatttctgattttcaatgctctctgaattgggcctcaataaccagaaaagacaggggccctggcgcaattgctactaagactcaagcgaaccccttttcggacggcgggttgataatcaataaggtcaggggttcatgtgcaaatgcgtatccgcgaaggggtacaggaggattcggaccgttcagatcagatccaagggccaggatcggatcacgatattttaaacccgcgagcgcacaaggccgtccgatcaccgatcgatggcccagatccaatcccacgaaggggtatcgctcgatctaatcgcgaccgtcgcttagaagatcaacggcccacgcattagctcagctgcatcacccaactccggccgccagggcaactctacgcggcggcgccatcgccgacattccgccattagcgcccccagctcacgaccttcgctcggaacactactaaatgaataggataacattgcgaacgcgttggtaaggttcttaccgggatccgagtggcgctctgcccggtccgcggcgcacggcgaagatgcagcgacgacgagcaattcaaggtcgacctcgcgcaatctgccgaaggcgaagtcccggccctaacctgctcgacccgacgaa

SEQ ID NO: 179886 - DNA, 279 bp, Zea Mays
acccaaatttttcaggcaccttcacaacacctccagtaacatattcgccaaatttcacgccaatccgatataccaggcttcaatttcactcaattctccgtttcgagcgatcgtttccaagccgagtgcccaaattccattttcttcgcctaaattcaaaccaagcacacacttcactcatattcacccatataaacctattcgtgaagtatcggctcaattccacgtcatttcatacctcaattcgaattccaaacctcctatggcactatttctcgt

SEQ ID NO: 179887 - DNA, 369 bp, Zea Mays
aggcgcccgggagagggagagagatggggggaacggcaagcgccgacgagctcgccatgatggcgggaatggagctaacggcgattgggacggctcgggcaggcgaggggtgaggggacggcttgggcatagtggcggggtggttgctgaggccggtgcaagccttaatggcgaggcgacggggcgtgaggcgctcggcggcgaacgcgccggtgaggcatgggcgagacgacggagctgacaggcaggcccgagctgccagggagagagagcggcgcgagagggagggagtcgagtcgctgactggtggggccgatctgtcagcggaggcgcgggcgcgcgaagttgggccgcctgggccggggagag

SEQ ID NO: 179888 - DNA, 675 bp, Zea Mays
aacaaactctaaactcctcaagtcttcttacatgaataatgaaggttgctaattgatcttttattgcttttcgatcatcaagagaaaaaatcatccaaatatatctctgtgaggtgagcaagcttattcacatcaaacttagaaaatgactctcttggatcaaggcaagcaaagcaagtaagcaattatgtggatacctcattgaagcgatgatcaaattctgttgtaatagagtccatagttgcatagaagatatcaacacggaagtaatgatcttgagtgatattgtttttccctccctttcttgatctaccaaatcttggtacactatcttccatatttgggattagaatatcatttttctggcaaaatgctttggcttcttcaagtaatggctcataaccttcacttcttaaatttgacaaacgtgttttcacatcaacaaccaaagacatggcttcaacaatattttgatccttcttttgcaatagaaaagataattcatttgttatgcgaaggatctgcaacatcatcttcatgataaaaacaaagctaaaggactccatggtatgcactaaacctcctgcccttgatggattacgttgatcatcatgtatgactgatagaacttctattattgggtcccacaatgtttcaatacgaagcaaagtctta

SEQ ID NO: 179889 - DNA, 860 bp, Zea Mays
ttgccaagtactcttgcactagatctctagtgctgatttcggctgctaccactctgaattctacttcggctacctggcatggggagccaagctgcatgtggcacaagggcctcgtcatcccgatgctcaatttcaatggtctcatgaccatagtcattagcttctcccttctcttctcgtctgcctttatataaaaccactcacttttccacccggtcggccacttggtacaatagccgagaaccggggccttcgtatccttccgatacgcaaagttgtaactgccgaagttctcatgaaaaccatctgctctggccttcttttgatagtgcagctcgtgcacccggtagaaagcttcgatattgggactcataccctggcttcagagggcccatatgtagacgctaagtctaacaatcgcattgggtgtcagctgatgaaagtatatctcaaaatttttcaaaacttctccaatcatctcatgtagggggaaacgaagtccggccatgaagaagcttttaaacactatgacttcatcatcttttggttctggaatcacctcttccccagcaaatcggacaagcttgctctcgacctccccaaagtagcccaatttcttcatcataaccatgtcgtctgccttcatggtagatttaccaaattcaatgtggctgggtttcactgggctcaaaatagtgtagtcctcttcatcttcattctcacttcctccttcaactgcgatctgttcagcttcagcaatcgagctaccttcggcaacaacctcctctggcacaccaagacccgattgcctcatcacttatgatattggtgccatttcagcaactccgacctcgtctccc

SEQ ID NO: 179890 - DNA, 861 bp, Zea Mays
ggagagcacgctgcatttgggaggagagagaaaagggtagtgcgcgcctgtaccatagaggatgctttagggtgaaccattgaagcttttagcgtgttcctgtagccgctaccgtagcggaggggtacctccggcgggaaacggtgaagacagtctgacggttctttctttcctgaatcaaaaaagggcggctagggcttcgtgattagggagttagggactacggtggaagagcgaacgttgcaggatctgattctctagcggctggctgttcatggtgctgactctacagaagcccaagtttgtattactgctctgcagctggcatcggaatcaaggttttgccagaattatttttggagatcggctcaatgaacatggtgaaggcctcgcactcggatgatccgggtttgtgcccttcctccgtcctctatagagaagtgcggtatttgattcagttgtattttaatttggtgcaaagtttacatgtctctatgaattagcttgtccgaggcggttgggccccgaatcaaccgtacatatggcttcatcccctccctagttttgtaggactcagattcggtgcagcacggtaagtgcagtaccagtcactgcgtgtgggccttgtcgcacgcgaggctcactgcactgaatccgcgcggagttttgtaaccgatttggtggtttgtgattctggtgaagtgttataaccggataaaaagacctagttgtgatgacaaaaaaaaaggaactcggaacaatgaacaagacgtatagtgcgctaacagattatatttataactaaactggaaggagagctagctgagaagatctaaaaaaagggtgccttgcagatttttg

SEQ ID NO: 179891 - DNA, 296 bp, Zea Mays
ctcgactggccaggacgaaggtgccgaaactctcacccgacggagaatcacaggcgaggccctcgttatgtgccccgatgcccgattcccaataccgaatggtcccaaatgaagcttaagctaccgccaattgctttaatgagatgcttacccattatagcggctggagcagagcagcccacgtgacccgatggcttcaccatggaaccgtggctcggacgagaaattgagccctccccggccaccgaacgatcccgagctcaccacccgcgctacactatccccccggaactgcc

SEQ ID NO: 179892 - DNA, 580 bp, Zea Mays
gcacgatcctggaagtcgtcctccacgtgcagtccaggctgttacaactgaccgcacgccgcgcgcggactgcctcctcgtgcggcaatacaagtaccgccaccgccttgcctctgctcgaccggttgcatgccattgggaaaagaaatccctcatcgccattaacgctcgacgatataggggagagaggaggaaggaaggggcgcagtggtcgggtgcggtcaacagagcggtggtgcgtgcgggcagagcctcggggcagacctcggcgacctgctataccacgcgggggaggacttcggttgggcatcaccacacgctgccatcaaactgtccactcccttgcggcggcgtcggccagttctctccattggcggtgagttcccctgcttggtccctgctgaaccttcgatgtgcgcgtagtgtcgggcaagtccacggacagggtcgcgtcggtccatttcgccagagtggtacgcgggccgccgttatcctagccgcggcgtgttccgaggaagaagacgatcgcctccaccattagatggtcattggatggtgcagatcatactgggcgtacccg

SEQ ID NO: 179893 - DNA, 479 bp, Zea Mays
ctggtgtatagagctacaagtttgttacagatggattggcaagttctcacacaaaaatctgagatctaggcatttcaattatgtctgtcagacactctgaatcaggattccgatggtacagtgttcggattagatcgttaggttcatttcatctcgccgccggcgaccacacgctcggattcgcgctagacgctatgattcgtgctcaagggagtactaataattgctcgaggtagtaaatatcgccgtgtggatgaacttgagccactgtttcactccggccgccgtgtccgcctgactcacggccgattcggatgaactcaccggagttagccacctatcagccatgcgccacgtgccttggtgtcttaccacgtcgcagtagctcgtattacacatgtccggtgatcgccggtgagctcgccacggtgaaagccaccaatctcttgcgacagtgctctcctctctctccgaccgcc

SEQ ID NO: 179894 - DNA, 740 bp, Zea Mays
cacagcgctcccacccttcggccgctctcgcgtcgggcagggctcgggagtcgggactcctcgcacgcattggagacttggaggccgtcgggactccatatcggcattgacgtcctccgccacgattgtcctgttcacgattgtgtccctttatcccaccggtgcaatcgcgggtggttttgtgtttagggtttaacagtaacactccagtgcggattgcctccaaggtgggatcttggcttttcatcccgttcgctctagttctttgcactttttttgtttgcatcttcttttaaagattctgatagcggtaatgcttatacttaatgaagattcgaatcatttgcattatatataacttttatctgttgcgctttgaaattaggttttttcgcttccctttttactcccaataaaacttgcattatttctaccttttatttattgcactcttaaattgagttttttcgcttccctttttactccccgtaaaatcgtcgttcttgcattctactactacttcattttctctctattaatgtgcatttatttgcaccatcgatgatcgattattactttgggttttagtcctccctcctgtttggctctctgagttctttccggaggttgattggtgtcacgagtcacgtgaacagcatcgcctatctgatcatcgtgtgaattgtgatattctatggatctcagattgatctgtgacgccgatgacctgagtaccgggc

SEQ ID NO: 179895 - DNA, 666 bp, Zea Mays
gagctttgtaccgtgattcgtgtagcggttcaccacgcccacggaggatgacggatttacgatggaggagagctccgacgagcggccatggcaagcccatgtctcctgtgaatgccacagaccaatccggtatgtcgaatgatcacgcctggccctccaacaagctcaacgcagccatgtaggtgatgaaccacgcggtgctgtggcacgatttatccgcgcaactcccattctctacttgagccgctactcctttcttctacttgtttgcccagatggcctctgcccaatggatccgtgatgcggagtggtgtggccgttttataggaaacgagtccgcggcgggggaggaaaattccgcgaacggatcggagattgttccgctaggctcgcactccgttggagacggaggcactgcagagggggcccatgcgtcggtggcgggcgaccagagcgcgcgcgcgtgaaggctgccaggtggttgaggggttaaagccaagatccacccgcatcccacgcaggttgttgggatccaaatccgagcggacagcatctacgggtgtggcgaatagcagctggaggatagggatgacgaggtggtcccacacgtcagcgagctgagcacacaaccgaggcaacggagacaccgacagagatggcccgcgt

SEQ ID NO: 179896 - DNA, 670 bp, Zea Mays
attggaatcgtcaggactagaacgctagacctaggatgagaggccttagaaatagtggggaaaacatgtggctaattaagtaggccatatgggccagttttagaattgtaaggatgccctaaaagcacccttctgatcggtgaggagacgttcttttcagcatgcatgcattataaaacatgaaaggattagaaattaaaggaaagatgcatctaagtatgaatgtagcaaaaaaggataataataaataacataaggagtagaaatctaacccacctccttttaacaacccgagctcacatgtttttcctttccactaccgtaatgtttacgtctaatcctcttccacagatgacttcacccacccctgccaatggaggagacactcgtttcagttctgatttcctttcccacgagggtttcccttccatcttgtgggaggtgctcagctccaccggttaccctacaccccctctgtacatggtgcagctgtacgaggagcatcgggtgccacgttaccgagtctgactgactctggaggctcaccccctacagccaggttggcgttcccttgactctgagactattggattgaggtcggacgacaccaccgaggctgcagctatgaagaccctgacgactttctgcggctaccatctcttggagatgg

SEQ ID NO: 179897 - DNA, 613 bp, Zea Mays
atttattccaagaccaaggccgagcatgagcagcatctctgtctcgttctaggtgctctaaggaagaatcagttctatggcaagttgaagaagtgtgccttttggctgtccgaagtggctttcctggggcacgtgattaatcaacagggcattgcggttgatcccaagaatgttgcggcagtggtggagtggaagagaccctctagtgtctctgaaatccaaagtttcttggggctcgctggatattatcggcgctttgtaccaaatttttccagcattgctaagcctttgactagactcttggagaagggtgttctcttcgactggttcggcgattgtgaggtcagttatcagacattgaagagcaagttggtggatgcccctatcctagctttgcctgagagcggtaagcatttcacagtttatacggatgcttcgtgtattggtcttggctgtgtgttgatgcaggaaggcagagtgattgcttatggctcaaggcagttgaggaagcatgaggggaattacccaactcatgatcttgaattggtcgcggtggtttttgctctaaagtcgtggaggcattatctttatggcgaggcttgtgacatttaca

SEQ ID NO: 179898 - DNA, 586 bp, Zea Mays
aaaatgagaaatgtgttgtgacctcgagcgagtgactcgctcatgaagctccccgatcatctgctgaggtgggtgacggcgctaaatatgttgtggagcctcccttgaggaagtggcctccccctcaacagcagcttcaattcctccagtctcagcaggagctagctcgagcggactccaagtggtggaaggagtggggtcgggtccgtcaacctagtagtggaagcagtcttgactggggcgggcggtggagttggctcgagagcaacccaatcggtggcgttgtgctcctcctccataaagatggtctgtcccatctgatctggacctgcaggctcaaagacaggggatggacaaggtgcagtctcatcgaatgtaacctcataagtctccataatgcggttagtctctaggttaagaacacgataagcatgagaatgtaatgcataacccagaaaaactccatcagaagaccgggactcaaacttgtccagattacctttttttccacaaagcatctgcagccaaataccctgaaatgactgaccttgggtgaccgtccaaatcgcagttcataagaagtttt

SEQ ID NO: 179899 - DNA, 553 bp, Zea Mays
ttaaataatgcccctgctgcctttatggaagcaatgaataggatgttgcatgaattcctggatgactttgtggtcgtgttcctggatgatattctgatttattcaaagaccgaggccgagcatgagcagcatctccgtctcgttctgggtgccctaaggaagaatcaattctatggcaagttgaagaagtgtgccttttggctatccgaagtggctttcctcgggcacgtgattaatcagtagggtattgcggttgatcccaaaaatgttgcggctgtggtggagtggaagagaccctctagtgtctctgaaatccgaagtttcttggggcttgctgggtattatcggcgcttcataccaaatttttccagcattgctaagcctttgactaggctcctggagaagggtgttcccttcgtctggtccggtgattgtgaggtcagttatcggtcattgaagagcaagttggtggacgcccctatcctagctttgcctgagagtggtaagcgtttcatggtttatacggatgcttcgcatattggtcttggctgtg

SEQ ID NO: 179900 - DNA, 340 bp, Zea Mays
ccaggctgcatgtatatgcgtggagaggaacccgcgaggctgttcggtggagctttaccaagctaatggggatcagtgcaccgactcccattaccatgtgtacgtgtgtttgcatgctgctacgacgactactttcacgcacgcgcacacagaaaacgcgatgctaccactccatatgactataagatgttttgacatggctgttcggttgcttgccaataaagagtcacgtgggccgaaaggagaaatcataaataatagaaagcattatatggacatgtgtttctgggtaagtttgtttctaatcattaatgtattaatatatagtatctacatctaa

SEQ ID NO: 179901 - DNA, 1629 bp, Zea Mays
ccacccatataacatccctgccacggggggaacgaggtagacccaccacaaaatccatggtgatatgctcccatttccactctagaatttctaatggcttcaggaaaccagcaggccgcttatgctcggccttcacgcgctgacatacttcacaagcggccacatacttagaaacgtcaaccttcattcgcttccaccagaagttttgcttcaaatctcggtacattttggtttcaccaggatggacggtgtaaggcgttttatgagcttctctcaagatatccatcttcacctctgatttctgaggcacacaaagacggcccctgaaacgaaccaaatcattctcatcaatggtgaactcccgtggtttaccatcaccaaccctctttcgagcttcctgcaatagacgatcctgctgctgagccgcacgcactctctccatgagagaggattgaataagcatccgagtctcctcgctagtggtaccgacataacacaaagcgattccaaaatggtccagatcagcgatcaacggcaaggccacctttggaaccccggacctgctaagggcatcagccactacattagccttccccgggtgataatgaatggacaaatcataatctttaatcaattccagccaccgacgctgcctcaaattcagctccttctgagtaaaaatatacttgagacttttatgatcggtgtcaatgtcagaagcctcgccataaaggtaatgcctccacgactttagagcaaaaaccatcgcggccaattcaagatcatgagttgggaaattcccctcatgcttgttcaactgccttgagccataagcaattactccgccttcctgcatcaacacacagccaagaccaatacgcgaagcatccgtataaactgtgaaacgcttgccgctctcaggcaaagctaggataggggcgtccaccaacttgctcttcaatgtctgataactgacctcacaatcaccggaccagacgaagggaacacccttctccaagagtataattaaaggcttagcaatgctggagaaattttgtacgaagcgccgataatatccagcgagccccaagaaacttcggatttcagagacactagagggtctcttccactccaccacagccacaacattcttgggatcaaccgcaatgccctgttgattaatcacgtgccccaggaaagccacttcggacagccaaaaggcacacttcttcaacttgccatagaactgattcttccttagagcacccagaacgagacagagatgctgctcatgcttggcctcggtctttgaataaatcagaatatcatccaggaacatgaccacaaagtcgtccaggaattcatgcaacatcctattcattgctttcataaaggcagcaggggcattagttaagccaaaagacatgactatgaactcataatgcccatacctggtgcaaaaggcggtcttctcaatatcctcctcacgaatcctcaattgatgataaccagagttcaaatcaatttggagaacacctgagcacgcctcaactgttcaaaaaggacctcaatacggggaagtggatatttattcttgattgtcacttgattcaaagcgcgataatccac

SEQ ID NO: 179902 - DNA, 810 bp, Zea Mays
gcgcagggcagggcagaggtgatcgacggcgtggcgtgattatgctgtcctaattgggcaggagatgccatcgggacttgtttcgctgcaggaggcagcgctgtggccgctgtcgtgtggaccggtcctactaaatggtagggctggaccgcatgccccctagggatggcaatggatgtcatttatccgcgtacccgcggataaaaaacccgttgggtacggttttaggtacgagtctgtacccatggatacggatacggatagcacttgatatccgcggatatttttaaaacggatacgaaaaatcaatatccatacctgaatacccgaatatccgttaaaattacacccatcccacaggcccacgggccacatcgccacagcccacaacgccacaagcattctccaggctcccgggcacagagcgcagatctccagctcgtcctcagtccctacgtcgctgactccctgcacagctcgttctcagtccctgcatcgctgactccctacgcgcctggccgcctgcgacctgctcccctcagttcctgcatgtgctacctcccctcagtccctggctccagcgcggctgtcccggtgtaaagtacaggttattccagatgcaacgacttgttgattgttttttcacccaaatacaagtacatgttattccagatgcaacgacttgttgattgtttgaatttgttagatttatatattttgtatgtgtagtgggcaaacggatttatccgcggatatccgttacccgcgggtaacggatgtggatactgtttgttatccatggcgggtaac

SEQ ID NO: 179903 - DNA, 641 bp, Zea Mays
gctgaggtctgactgaccttcctcgcttcctttattactgttctctcacacctctgctctgcctcttctttctttcaaaaaagcgaggtctcgttgtattgtatggattccctacagcagtagtagtccattgttgcagttaataacggtgagcttatccggattcaggagctgtgacgtggtgggcgatggagggcgttctgctgcggattgagtagtatagatctttgtccgttcggtggtcccacccactcagcagtggcggaggacagtgaaagccaaggtgggccatgcctacgtttgtgcttttgctcggtgcagtttaatctctactacttatctatactacttcttaagtacataacgtagacgtccacagctgtccatagcgcacgttctgcctcccgtgctcacaaccgcgccccttgtgcataaaatgaggctgcagtgccttcccctgctgcctcctgctcctgccttccataatatccatgcggcgccttctatggagagagcgccaaatccgacaccaccatctacgtcgatccaaatccgcccttccatcttcggtgccgagacgaaaatggacggcaatcccatccttcggcggccctgcgtcagccacgcagccatggccgcgg

SEQ ID NO: 179904 - DNA, 488 bp, Zea Mays
ttcagaagcttatcgacaacttcgtcaatagcgtcattagcaattttgataatgtccaacgcctctttgacggatgggtcagcttcaggattgtatggttcgggagctggagaaagctcagatgcattgaggcacaaatatttgtcagtgtcgaagatgaaaaacttatgaaaaaagttaaaaaatgcataactataagtctagcctgctcggcagcttctttagcccctttgccacttctgaagcatcattagattccttttcatttcttttgatggcttcatcgtcgatttcttgtccacccttaagctatactttggagtaaaatttcccacctagggtagtagcttcggctgaagggtttctgatatcatcatctcagaaggcgaagtctaactgagctacagccttagcatgatcgcaaccagccttctccaagatggacgtggccccacaggcactagtaaaggcaccaaaatctcctcgat

SEQ ID NO: 179905 - DNA, 371 bp, Zea Mays
ggcaaattaagtaggcactgtgggccagtctttagatttttaaaggatgccctaagagcacccttttattcggagaggacacgttattttcagcatgcatgcattataaaactaaaaggattagaaactaaagaagtaaaaatttgagctaacctgcttccttttaaaccacccaggctcttttattttctttgttccaccataatcgttacatctgatacccttctgtagatgacttcacctaccccccgccaatggaggagacactcgtttcagttccgatttcctttctcacgagggttttccttccatcttgtgggaagtgctcaactccgccggttaccctacgccccctttgtacacagtgcagc

SEQ ID NO: 179906 - DNA, 527 bp, Zea Mays
tgcatgacccacgtgagcctcacttgactgctctcaagcgcatccttcggtacttgcagggtactccggactttggccttcattttcaccgttccgctacgactgagctcaccgtatacactgatgctgattgggcaggctgccctgacactcgccggtctacttcaggctatgcagtcttcctgggtaacaatcttgtgtcgtggtcctccaaacgtcagaccacagtctctcgctcgagtgctgaggctgagtatcgggctgtggctaatggtgttgcagaagcttcctggttgcgacagctcttgatgggactacattcccctttgactcgcagcagcttggtctattgcgacaatgttagtgccgtctacatgtcctctaacccggttcaacaccagcgcaccaagcatattgagattgatcttcacttcgttcgtgacaaggtcgccgttggggatgttcgtgtccttcatgttccgacgacatcttagtttgctgacattttcactaaaggcctgccatcc

SEQ ID NO: 179907 - DNA, 605 bp, Zea Mays
tggggtcgtggtacaccgggaattcctcgccgcggtgggcttccgccgctctgggtgcgcgccgccgtgtcgggtgtcgcagggaggaagacaccgatagtgccgtagattaggaagctagcggctaggattgtctggcgtactcgtataacaggaaatcaatcctgtccgttgatcaaacgacctaggcgtgggatgtgattccgggctggtgaactctcgtccgttagtttttgatcggatgaccaccagtgcgtgcttgttttgtagttgaggatgtaatctggatcgttaaattataatcgggtgacccgtgtggagcgataccccttcggctgatgaatttgcataagagaccctggaaattctagtaataaacccacagtccgttctgatgataacctgagtcttagttacttttgcgccagggcccctgcacttcttgagaattgacgtgcaatccaggaaatagagaaaacaaggaaataattatagaaattggattttagtgcaaaaataaattcataaacttggttaattcatagaaaatgcatagaaactccaaattaatccatttcagtttctataattatgtaatactattt

SEQ ID NO: 179908 - DNA, 651 bp, Zea Mays
gcctccatgagaaggataaacaccctaaacatactgggaaattgtccagtggcctttccagtatggtggtctgggtattctcaacctggagatgcttggatgggccttacgtgccaagtggctttggttacagaagactgatgcgttaagaccatggtctccctaaccgagtgcaccgtaatgcaaaggcactctttgatgtggttgttatctccgtggtaggcagtgatgaatctgtgaagttttggtctgatcgttggcttcttggtaaaactgtggctgaacactgtccaactctgatccaaatgatttctaaaagggctttaaagcggagaatagtagcataggggctcacagatcgtaaatgggtgtcagatataaggggaggcttgtttctatcagttctagtggagtatctgcagctctggaacttggttgatggggtagatcttcaacctgacatcgcagaccaacatatttggcgcctctctgctcatggtacttattatagcaaatcgtcttatgatgctttctttgttggctctatctcttttgccccttggcgacacgtctggaagacctgggccccattaagatgcaaattatttgtatggttcgcaatcaaaacagggtttggacagctgatagatt

SEQ ID NO: 179909 - DNA, 314 bp, Zea Mays
ggagaagaaacgcttggggttaaagtgggaaagggaagagacggacgactgctggccgagcgcggcgagctccgctcacatggagacgaacagccggggaggcagagagacgcggtggccggtgctgaaatggccagcggtggcggcttgctgtccgtgagggagaagaatggttgcattattgggagaggagagaggtgcggtggggcccacatggaagtgagatatgagggaggagatcaagggacgtgcgtggctagcagtaggagttagttcaagcgtttagttttcttttgttgtttgatgcatgcatg

SEQ ID NO: 179910 - DNA, 337 bp, Zea Mays
caggcggcggttagttagggtttgcccatctgccatccgtccatccgcctgactcctttccaccatctccgaccatcctttcctccatctctggccgacgacttcgtccatctctggcggcttcttctccggccggcggctggacgcaggtgctagaccagacggtggccagatcttgctgccacacgacgttgttcttgctgcctagaacaagacctctgttgctgcttccacacaacgtcgttcccactgcaagaagacattgttcatgctgaaagatattgttcctgctgcatgaacaagaccgcctcttcggttgttcctgctgccaaacaac

SEQ ID NO: 179911 - DNA, 437 bp, Zea Mays
agttgaagaagaacgagcgtggagaagtggtgaagcacagggcaaggttggtggcggaagggttcgtgcagcgcgagggaatatactttgaggaggtatttgcggcagtggcacgaatggactcggtgtgcctgctgctcgccctggcagccacaaaggactggagcgttcatcacttggacatgaagtttgcctttctcaacggggagcttgtcgaggtggtcaatgtgcgacagtcgcccgtattcatcgtcaccagagaagagcaaaggtgttgcgacttcggaaggcgctgtacgggctgcgctaagcgccatgagcgtggaacttgaagctggatgctcaccacgctcggcttcatggagtgtccatttgagcatgcattatatacccgacgcacgaaggagggagtgctcatggtcagggtgtatgtttat

SEQ ID NO: 179912 - DNA, 371 bp, Zea Mays
tgattttacaggatcacctattcaccccctaggtgctctcacttccctctctggtgagcctcctccctctcctctctctggtattctctacagtgagtagctccgccacctccttgtattccactcaaattcaatcaaatactatgaaatcttgtgaatccatgtgtgcatgtgtgtccctagagcttccctgcaggttctcctctccctctgggaggtttcacaccttgaaatagccttttcaccgccagtctcaaacctaacacgccacgtgttcggtgaaatgcccaaaatagtcaaaatcgctcaaatcgaccccaactttttctagcacactcctaccactaccagtacctcacacaccaattttc

SEQ ID NO: 179913 - DNA, 797 bp, Zea Mays
gtcgatcatgaacaaactgagtattcttgaagccttttttattgatgacatatttcccattttacagagtacattgtcgtcccgatagcttttgaaatacagctagggataaaacttcctgaggtgttatatattccatgagttcccaatttatgtgtcgtccatctgagtgagacgatatgatcccggccgagtgacttctgctactatgaatggtccttcccataagggtgacaacttgtgccgtccctcccccgttagaattcggcggaggatgagatctcccactgcaaaggatcatcgtcgcacggacttgtcgtgatagcgtctcagagtttgctggtatcgtgctgattgaattactgtgttcagccgttcttcttcgagtacatcaatatcctctagcctagtagcttcggcttctgctatgctttcaaagaccaaccttggcgccccaaacttgagatcagcgggtaatactgcctctgacccatagaccatgaagaaaggagtatttccatgcagagctcgactaggttgagttcttatactccaaacgacgtagggcaactcccttatccattttcctgcgaacttttcatttttatcgaagacctttttcctgtgtgcctctaatatcatcctgttagctcgttcaacctgcccgttggctcttaggtgtgccaccgaagcatacttgatctgaatgctcttttgctcgtagaaatcgaagaactctgaacttgtgaagttggatcctaggtcagttatgatactgttcggtattccgaatctga

SEQ ID NO: 179914 - DNA, 554 bp, Zea Mays
atttgtatcaggtattgcaactatccttttatagaatgtggcctcggcctgggagttaaaactttaaccttcttcggcttaggcgcgatggaagaggatgaggctgccattttcctttccaacccttgttttcaggcaggaaagcagtaatcaggataaaaaatccaatcacaccaaaaactctattcaacctcatctttccgtgaacgctgaacgctgtggttatagcttcatcctctgccttcgtgtaagctcccagcagctcgtcattggtagcttcgacagcctcaagccaatcatcattcggcccatcaaactaatttctgaaatggtaggtatatcttaggttaaccaagccaccttcgctagaaccaacagcagtctccttcggcatttcctagtcattaacgagcggtcccaccttgtaagcaatatgctcctataccaaatccctggtaccgatgtaagtgcacacagtgttgaaagccataaaaacacttgcacttcgttcccacttgcaattgacggccttctgatgctgacgcgtgaccgta

SEQ ID NO: 179915 - DNA, 395 bp, Zea Mays
gggccagcaacatgcacttcatctctcatcctcttttctggttgttgtttcccttccctctttggcacctgggatgcaggcttcgtgtgggcaatgaggttcggggcccactcgttggcggtgatgtagatgtttgcctctcagaaaagctgttccaaggtggctagagccttttagaggatggctcggatgaaagccgagtcattaaacccacgatagaagtcctcggtcacgacgacctccgtgacatcggggatgtgattcctcattgtttgcaaaactttaggaacgagcggagggactcgtcactttggtgtttgatggatttgaggtcccagggttgcgttagtttgccagaaagggattggaaattcgcaacaaactggtggtagaag

SEQ ID NO: 179916 - DNA, 488 bp, Zea Mays
ttgtcagtgtttgtggtatgtgcttatttacagcccatatgttagtgtagttaggctttcatgaagtgcaaataggactacaaagtggtaattatgatatattagggtctccaaggtatttaggcggtcatgagaaggtaggttatgtttccaatgcagttgggttgaccttgaatgtagaagcaaaggatattcggaatggtttgaacttacagcaacttcgtgctcaagtttgctgatagtaagatcttttatgtgtagaattattataaataggacttcatatattcgacaattcgatgaatatatatgatatttacttcttggctatgaaaggctaactggcagctaggaggctgcgggtgaaaacaatatgaggaagcatggtggaaattgataatcaacttccaactgagcttttcttgtaccacaaatgtgctgtgagccgcaccattgcttttccatgtattgatgttcttgcgttgatc

SEQ ID NO: 179917 - DNA, 487 bp, Zea Mays
cccaatgaccgacgctgctggtcagggagggggaggaggggaaggtggaggttccatgaatggctatggttcaggatctggctccggctacggatccgctggagctaccaacactcctggtgggccatatgggaccggtagctccatggctagtgtagacggtggcgggagcggcggcggcgataatggtgggtctggagctggttccgggtcttcggcaagtcgtagctacactgttggcttctatggtggagggtactcagatgcacaaggcagtggtggtggtggtggccgtggaggaggtccacaaaacgggagtggttccggctctggttctggaagagggatctcttctagctacgttgctggtccaaacggtggaagttctgccaatggcgggggaagcggtggcggtgaaggcggtgggcatgacggtgggtatgccggtggatacggaggtgcatcaggctctagctctggccaaggt

SEQ ID NO: 179918 - DNA, 1070 bp, Zea Mays
ggaactctagtagcgatgacagcgggtcgggggcggatacggctttggcgagcggcgagcgttatggcagtgcggtgccgttcacgacccggtctcgtatcgtgaagcggcgggcggaggcgagccctcaggcgggcggggaggtggggatcgggtcggctggtcgaggccaggtgcctgacgaaatgctgcaccgggacgtggggacgccgtcgaagcggtgcaggaccgtattggtcggaggagtggagacagtgtatatgtctgatacagagagtgattctgatgaggattgcatgatgctgggtccaagtgggaccgaactgaatcctattgctgtggatatgactgaaaatgggagtctggatgatcctgccaatgcaagcgacgtggagtctttgcagacgcataatctgctagggacgacaaatgttggggtggttgagcaatcagtatatccttcaggaagtgcttcaagttttgaagcaagaatctctgcagatatgtatgtctcgagccattacagttctagaaagggaagcaaagtgaacgggaagcttgttttggagaataacagttctcgtgctgatgctaatgtgggctctgcagttggtaccagtccccgcaaattcaatccatacagcaaaggaaagggaaagatggttgcagaagatactttatcatctctggtctccagtgaggacgagccagatttggatccagtgcattccaaagagactcaggttaatccaggatcagtttctgcttctatggtgtcatatcgcagacaaaaagcaaaagagagagctatcaggttggctcctgaatttgctttctttaaagcagataaagatgagcatagtgaagatgatgatgaagaactagagcctggtcctgactctcaggactggccaggctcattcgtaactgctgcaaggatgtatgaagaaagagaagctaagttgagagctcgagagttgaattcttcaaagctgaacaaatctgcaaatagggtcattgtttggtcgccttcaaaggatgagaagaatccagcacgagctcaagctgcc

SEQ ID NO: 179919 - DNA, 474 bp, Zea Mays
cgcttacttaacttagggtgaccactataccctactaacggagcaatcagcttaagtcggcagtgacttaagacggtgcaacatgctcacgctcacttaacttagggtgaccactataccctactaacggagcaatcgacttaagtcggcagtgacttaagacggtgcaacatgatcacgcttacttaacttagggtgaccactataccctactaacaaagcaatcggcttaagtcggcaatgacttaaggcggtgcaacatgctcacatctactcgacctagtataaacatgcttacgatcactcattttagggcgatctctatgcctcacaaaatagggaaaagattcaaaaccagcacactgcatttacttctgcaatcataacaactgttgaattcaaacaacagaaaaacaaaaatagcattcagtaccaagaacacgttctaacagagtattcgggcacattgatcac

SEQ ID NO: 179920 - DNA, 462 bp, Zea Mays
cggtgaggcgctcggtgcgcaacacctcgaagagctcgaaggagggcgtagagatggtgtggagggaggccaccacctcctcgtcatgcgatacagcatatcagtcgtgccattcatcttctctggcttgtactcgacggcaatgtcatatccgaagagcttgctcacccatgtgtgctgaggaatggtagagagacgttgatccaaaatatactttaaactatagtgatcagtacgaatagtaaaaggtcgtccctaaatgtatggcctccaatgacgaaccgccttgaccaaactgatgagttcacgctcgtaggcaggcagcttctaatggggaggcaccacggtcctgctgaagaaggcgatcacaccgtcgccttggtgcaggacggcgccgaaaccggcacctgagacgtcacagtcgatgtaaaaacgccactcaaagtctggcatctgtagcaa

SEQ ID NO: 179921 - DNA, 546 bp, Zea Mays
cgatattctagtgtacttgaagaatgaagcagagcaagctaaacacttgcacacattactccaacgtctgagagagcaccgtctttttgccaagttgtccaagtgtgatttcttgctaacggagattaaattattgggtcacactatctctaagggaggaatagctgttgatccagataaggtgcaagaggtgatgaattggaagccgccaacaactgttcatcagattcagagttttctgggattggctaggttttaccgacgattcattccagatttctctcgaatcgctaaacccatgatagaattgttgaagaggggagcaaaatttgaatctggccaaaaatgtgaagatgccttccacactttatggcaacatatgaccacggcacctgtgttggcgcagcctgacaacaacaggccgtttgatgtgtattgtgatgcctctggcactggactgggttgtgttttgatgcaagacaaccgagtcattgcctacgcatcaagagcactctggcctcatgagcaaaattatcctactcatga

SEQ ID NO: 179922 - DNA, 541 bp, Zea Mays
cctggtcggctccgacgaacctccagcgaagccgcccctcccccagtcggagccctcctgccccgcacgttcctccctagtcgtgttggcccctgcgcatcgccctcacgcgccttgccatgtctcgctcccgttgcttgacacgccatgtgcctatcgagtcgtgtgcgccccgcagccactaaatcgtgccctcgcggccatcatcgtgcccctcccagtaccgcacttgtgttcgtatacgcgtaggacatcgtcgggaatctgacgacatccgtctacctctccccccggtctaccatccgtctacccctcgcgtagctccgtcacaccttcgctgtcgtgtgattcgtgtcgcacgcatcacgtctgatttgcacacaatttgtgtgttgtcgcgtgtgtcgtacgtgttgttcgcccgctttggtgcacatcatttgcgcgtgtcacgtgtgttgttcgcacgggttgtcgtgtgtcgtttgtacgtgtggtgcacgttgtttcatgcgttgtcgcacgcgttattaaatttttc

SEQ ID NO: 179923 - DNA, 1147 bp, Zea Mays
tctctgctgcgtactcaggaggacagctccctgcggccttggtccgcacggagcatctcggccacctgcgacgatccctacaatttcttggcgactgctgcactactatcggagctcaaatcttggcaggggcaagctctggtataggagtatactagctgttggttgctgctgtcgctatggaggagtagacactacattacacacttcgctggcttgcgcgtctctatctcccaatctcccgccatgcaagctactaatgctgttgcctgctactacctctgtgtaagcttgtactgtagtaaattttaggtttcaattaatttcaggttttagttagcttcaaagcttgtactgtagtaaattttaggtttcaattaataaactgaattttatccaactacctgtcgcgtcctttctgctgaaattacacaagcagctcaggttcgcggaagcggaatcggagtccgcacgacgtcgatcatggcttcaccatgccttgcttctacttctgattctcgttgcttttgctgctgttgctggattgctgcagggagtaggaagaggaggaggaggagcctcagcaccagcggcatcacctgcggatgccatccaaatggacgcgcaggtctcgactcactgcggggtgccatacacagcttcactactcgccttcgatcccgtccagcgcctcctcgctgttgcaactctgtgagccccattccaaaccccgccttcacattagtacatcacaaccaaccctaaaccactgccacacaattcattcagttgtaaactagagctttgctaatttatgttctccatccctccaaatcagttaattgcgttataacaaaacaaagaaactactttgcataagcatggaaacaggttatttagttgttgtatgtctcaaagacctagctcttattgtgtaattgttgatagctgttcttcactacaaactgcagggatgctaggataaaaatatttggaggtgataacattgaaggcctccttatatcatcgaagagtgtgccgtacaagtttttgcaggtttggctcttaactatttctcttgtccaccaaagataaagttatacatagttacctcgccttgttcaaactagctatgttctttgttgcc

SEQ ID NO: 179924 - DNA, 405 bp, Zea Mays
tagcaaaggagttcgacagattaagtctcggatttctgaacaacactcaaggagtgacaattgagttggaacccactctagagcaagacatcaggaaaggttagaaggatgatgagaaaatcaacgagatccaacagctgatcgtagatggaaaaggcaaggatttccgtgaagatgcagaaggagtggtatggttcaaggacagactgtgtgttcccgacatcaaatcgatccgggaacttgtcggtaccctaaatcaggggtaccccttactatagtatgaagacatgggcccgtacggtgatctctagccgcacggcgaacaacacccgactcaaccacatggacgaatcaagaggcaccacgtggcgaggaaaggtgacacaccccaggatgtatcagttg

SEQ ID NO: 179925 - DNA, 812 bp, Zea Mays
ttgaggagttattttgtattatataaatattaatcgtagtaagttaaaaacctagggagttattattgttgcatcacatgatggagcacctaattttgtatgatgttttgtgttgttgtgcctccatttaaactcatgaagcatgtttgactttgaatttaaaagctagagctaaattaaaatagaaagaaaagaataaaaggagaaagggaaaagcccaccctagctttccccctagccggcctgcttccccctccctcctgggcaggcgcgagcacagcctagtgccctcccccgtagcccaccgaccgcgcggcccatgcgccttcacccccctaacctcgtggaccgcttccagcgtgcggcccacccccgtgttcccgcccactcacgcccgtatacgtcccaagccacgactcgcccatcccgctcgcgccagcgcgcttgcccagccaccgccgagctcacctatcaggcggagtcttccccaaccgcccacgcaagctaggccgagaaccatggcgccacgcgcccatgtcttccccaaccagccacgccaaccctagttgaggagcctcgacgccccctcgcccaactcccctccctcatgcctcctctcccaaagctgcctccttgtgcctcgcctacacgccctccccttgccattagcgcctcatcgtgcctagcacgttgtccaccggaggccacgtcaagcccatgttgttcgtctctattcgctcgtggtgagcccctcccattcctctctccatcccctcttcctctccccttgttgcgctcgacgtggtaaccgc

SEQ ID NO: 179926 - DNA, 872 bp, Zea Mays
tccctctttgcaatttaataacacatctttaaaatcatcatctaatgcatattgtcccttaatcgattcaagtccaaaaatacgataatcaagttgagacaacaaggcataacgtctagataaagcatcagcaatcacattatcactcccctttttgtgtttaatgatgtagggaaatgtctcaagaaactccacccacgtagcatgtctacgattcagatttgtttggctacgaagatgcttattgattcctgaatgaataacaaattccttagaccataaataatgtttccacatatgtaaagaacgaatgagagcatacaattatttgtcatatgtagaataattaagaacaggtccatgcagtttctcactaatgtaagcaacaggtttacctccttgcaacaaaacaacaccaataccaactccacttgcatcacattcaagctcaaaagtcttaccaaaatcaggaaattggagtagcggtgtgtgagtaagcttctctttcaaaagtgcaaaggaatcctcttgtggctgcccccaatggaacgaaatgcccttcttggtcaggtcatgtaaaggggcaacgatggtgctgaaatccttcacaaaacagcgataaaagcctgcaagtccaagaaaactctgcacttgtgtcaccgtcgaaggcattggccaactctgaatggcatacaccttggtctcatccacctcaatgccctgtggagtcacaacatagccaagaaacaaaactcgtttggtgcaaaaggtgcacttctcgaggttagcaaataaacgcgcagctcgcaaagcgccaaaaacagcacgtaagtgatccatatgtgcctctaatgacttgctgtaaatcaaga

SEQ ID NO: 179927 - DNA, 605 bp, Zea Mays
caacagccgacatagaccaaccccgaatatccaccatcttagttgcggcaccaagactcaaagtattactacgagccttggagcgccgctcgcgccaaaccaagggaagcacatcttcctcttcctcttgctcatcatcttcctccaccacatacctagtcgttttcaccctacttccacttttcatgacattctccaaaccaacatccattaggttgtcattggggttcagctaggcctgagcagtcgctggctgtaggtctgacgaatgccaaatttcttcttcttcttgacttatgtgggcttagcctgggcatctgtttggcacgatcgcttgcgtcgtggacccatgagattacctacctttttctctccatctctttactactcgagggcttcgcaccccgactcaagtcgcaccaactcagatgactcccttgccgcaactgttgtcctggccatcgtcacccttgctatagtcattgccgccaccgctgctaccaccgctcttgctccgtacaccgccattgtctctgctactgccgccctcatcgcccttgtcgtagccactcccgtctcctccactgctgccctcctccttcgag

SEQ ID NO: 179928 - DNA, 628 bp, Zea Mays
cggggttctcgctgctcttgggcggcggaacgcgtccaagaacagaactaaacgtgtgcttcggaaccggcttggacaggaaccagtgctcgatctttaactgcctgactctgagctagccacacgcccagacacacacacacactagagctggcggcagcgtgcaatggcacgtcgacataaataagtggtgtatgtatctccccggtcgcatcgaagagccagtgtgatgaattcaattggcagccgtggagcgcgtgtgcacgccgaagaacgcaaggtcgccagtcttccggccgtatctgtcggatgaaagtcttgcgacgaccagattactattgggcttggaattaaaacgcagcaggcccagaccacctcgcccaggcagtgcttgtttttatttagctggtacggctttcttaagttccaaaatggttccaaaatgtattctctccctcgttaaaaaaggtgatcttgatcaaaattgtttttatttagctggtacggctttcttaagttccaaaatggttacttctaggaagccaaatggctaaaaaatgtgttgctccgtgatgagagtgaagtgaatctagtcttcattttgtactagagagtggaagccaaagaa

SEQ ID NO: 179929 - DNA, 1060 bp, Zea Mays
tttttgcattccatcatgagaagctaaccagtttgtacatatatataatgttcagccagcaaaatacatacaagcaaacatgcatcatgagaaggtatgcctggtgtaacttcccacccgagttttgaattaaaaaacgaaacaacaacgaatcttaaatcctaggcaagtaaccagagaaatgtattcatccaacatatatgatgatctgtgctaagtgcgcgtggtatgatgcaatcttatgagtatgcgtggttagtgactatgattttcacagctatatcaattgcttgccccacaaatgatcagccagggtcaggtaaaccatattgtgtaaccatcactataacactgcaatcattttctaaatagtacttttataaatcacaaatcgaaggtataaatacaaaagtctagaaaattataaaaaaaccttcataaagctggcttcatcgcagtaccaaaagagcagtaccaagtgagaaaaatagcagtaatttgttgtctggtggtaagcatgaagattgagattgcaacacaaataaacactacctcttgatttgcatgcgtcccaagattgcaaccagatttttacaaataaacactatgcaccaaatgcaccagacaaatgtacatttgtgtgaaacagactacaagaaacaactgaaacaagcacatacggtgactcgctggacgcaccatttcacattaacagaagcagaattatcagtcaaagcacacattatagtctgaacctctccaaactgcctcatgttggctcaagtccaggttccccctaaacctcccctcataacaaaaacaggagataaggagaattgagagagctaagagttcgtgatgatcaattttagaatacgagcttataatcttcttcatatttgtattcacagagtattgtccactgatcagaactctctaaaattgttatcctgttggttcccgatcgtatccaaattcaacacaccagtggccagcgtatgtacaggacgaactcaccattgcctagctcactgttacattcatccattacatctatcca

SEQ ID NO: 179930 - DNA, 492 bp, Zea Mays
ggatgagctgcgcagggagttagcgatgcagggactgaggacgagctggagatctgcgctctatgcccgggagccgcgcagggagccagggacccggaccggtagggggcagcggctgcgggagtctgggagaggtgagatggagtgggcgacggcggtaggagtgggcggcggcggtaggagtggccgagtgggagaggacagaggaggagagaatgagaccggagaatggactggcggagcgagggcttcgctggattgctggaagcctggagattggagaacgcttgtggccttgtgggctgtggtgatgtggcccatgggcctgcgggacgggtgtaattttaacggatattcgggtaattgggtgtggatattgattttttgtatccgttttaaaaatatccacggatatcaagtgctacccgtatccatatccatggatacagactcgtacccaaaaccgtgcccaacgggttttttatacgcggg

SEQ ID NO: 179931 - DNA, 746 bp, Zea Mays
ggatggcgggttgaatctctagtttccagggggttctttaacaaaagtgcccgcgaaggggtatggcagaacatgggtcgttcgattcacattcgagggctcagattagatttgacttataccgaaacggtaagcgctgttagccgctggatccaagatccacggccacggtttaatgaagctagagcttgcctgagccgaaggatggcaaatctacggtgcccgtttgattgcgcgaacgggtaaggggatacctaatctcggccgttcacaacctatccgacggctcgcaccattcgtccttccctcggcagcttgcaaccgcgccacccccaaccgagtaccacggcggtccaccatggatggaaagccaattgcgctccgcggtaccccattcccccgtatctcgagagcaaaatgaaattgagaaggtaacaaacatgggaggtgtgcttttaccgtgattccggccgtcaccaggtctgcccgcgacgacccacggccctgctacggcggcgatgaattaagcgcccctcaggtcaccttctgagcccacaatcgccacccaaccggtccaggggcttgggcgaagccttctgtccgcacgcgaggccccaatttggcgtcgagcacgaccgacgacggggaggacgactttccgcccgcttggttaccacggccctggctctctctctctctttctctctcaaccccccaggtggacgcgagctggactgaaggttagg

SEQ ID NO: 179932 - DNA, 731 bp, Zea Mays
tgaagctggcatgatggacaacaactttcatgtagttggataaacaagttgtcacgtaaaaatttgagaaaagaactccttaaatcgctccgtcaagcgcgctgaacgaacattgccatggtacagtgaactgaacaagattatgttacgtgtgctcgccatcgacgtccctcctccataattcgagctcgcgccacgattggtgccgctgagacgtggatcaatgaagtggtaaaagatctctggctcggatttggtgatcgagttaccgctctagccacagacaccacgtgccctcaccgtgcttcatccaccaccgccgtgcaagccaccgaacgctttggccatccatggagctagttggaggctcttgtgttggaccgtcgtacagggttcgcggtaagtccgccaagttactggcatgtggacaccgttgaggctaacatggagctcctcgggcaatcaccgccgtcatgattcaacgttcaaatttgaccaccgtcatggtgactccctttaaattgagcctgctctcagtcccgcctctcctttacgcacccaagccactctttgtttcccatgttccaccgttggtacccaagaacaccagtttttcccccatcggtggtcactagtgccgccgagtggtgcaatcgcgtggtcaacctttcctaaggttagtcatagttgtttaactcatgttttgcagtctatagatcatggtgaagctt

SEQ ID NO: 179933 - DNA, 613 bp, Zea Mays
agattttttacaggctcgaaagattcaccggacagtgggcagtcgagctacatgtagtactctggagtctaggaaccacaccatctagagcaaccggttgcacaccattcttcttgacattcgtcatagaagttgtgctccccgcggagttagaatatggctctccgaggactgaaggattcgacgacgagcgagcaatgaccgaagcacaactcgctattgacctgattgacgaagcgcacaacgaggtcgtgcttcgctccgccaaatatcaacaagatttacgtcactaccacaaccggcaggtgcaaggcaaatcgttcaatgtcgaagacctagtgttgcgaagggtgatgaccaccaaagataagcataagttctcgccgccatgggagggaccctacattatcgcccagaccctagcccgggagaataccacctcaaagacagtgacgacaacctactgaccaacgcatggaaaattaagaacctaagaagtttctacccgtaaggagcaagttgtgctcccctcgtctcagggcgaaagcaagcaggacctaccgaccaggtcgccatgtgtcgctctggggctggcaaacactctggtcacaac

SEQ ID NO: 179934 - DNA, 1434 bp, Zea Mays
aaactatcctaccagaataagctatcatgctgcagctgacgacgctttctaggaggcatctcatcgcattggcttgccccaccatcatcatcgctgtcatcgtcgccactaccgtcgctgtcctcgtcactgctaccgtcgtcgtcgttctcatcatcttcattgtccgaggagaccatgcacatccaatgtccagacatcgggtcgtcatcgttgtccaaggactccacatctaacggttctccgtcgtatgcccaagaccactcagtgctggtgtcggagtccagctccccgtcaatgaggaattggaggtcgtccccgtcggtgaggtcgccgtcggattccgatgcaactgcaaagtcccatccatctgcatcccagtgcaaaggtgcctgtttttcatatgccgctataggatcccactctgggttggttcacggctagaagaatgggagacaaaagaagcagaggaatcactcggtgatgtcgacatgggtaaagctaagcgttgtggcgatgaatggaaatgtggaaatgtgcttgttttttctgagtgatattcccgtagctctactgccggcttgcaccgattgtacaaccgtcccaagctctattgcgtcaacgggaaataaggtctattatccaattgatgacataacaaggccagtgacgtgcacactggttataagatatggtattaacaataatcgcacgaagaaagtaggaacaggcattgcgatcccacgacgtaagtttcatgaaagtgacataccagatgattattgcagggtagaagtgacgatggtcgtccaaggatctgaggacgacatgctagacatccttgggcccgaaggaatcgagacactcggacaagccatcaaaaatttcgtcctttggcctcgaagggatgtcgaattggttgatccaccaatgtcgtcgtcatctcatccccaaccatctccgcctcttcaaactttagtacctttacatccatcatcatctccacaatcttcccatgctgctcctcatcctctttctaatccatcgtctccgccacaggcatcaacatttaggacaccaccaccttctccacaaccatcaagggattcacgacaatcaaagaaatctaaattccctctacgaaaattggtgtccacattcgagaaaaagaagagtaaagctactactgctggcacaactcgctttttgaaagggattggacgggacctcacgtcacgtactgttgatttggccgagcacgaggagtctgcagaaaaggctaaggcaatggccgcaaagataaagatcccaactacggcagattataaaaatgtgcctaaacattatgtgccggccagacctctactaactcttgagaaactgaggaaggtccctgctggtattaaaaggttgcatgactggtacatgcgtgca

SEQ ID NO: 179935 - DNA, 974 bp, Zea Mays
ataatgggtctctctggcgtgaagcaggaaccgattaaagtgatggaacgctgtatagtgcacaagcaaactcgtcgcgcaaatgttgtgcgaaataaccgcctggagtctgaagacgcgtcttgtgcacagcaaaacaccgaattagtcggaggataacacggagaagaaaaccaaacaccaaaggaataggaatgctggtaatggaagagaatagacttagataaactcaacaatctgtacagggatatatctccagtcggttatataaagctatagaggtacccctacaaaaactctcttgctcgccattagattgataggagactacatcttccacctcccgcaaaccatctataagatgcaaactcaaggcaattcaatactcagcaccacactggatgtagggtattacacattcacacgacttgaacctgtataagctttctgtgttctgacgtgcccccgcacgtaccctcgagcagcgatcgacgtcgtcgtcctcccaaaagcactgcatgagctaccctgtagtgcgcagtcgggaccaaacatcaacagctggcgcaccaagtagggggtgctacgtcgattcacgacagctccatagcaatcatcttcaacaccatgatcgtctttgacactggagaggttttgcactttgaatccctctctagcattgttgaccgaaagggagtcctgcaccgtgtcacggacgtaggaccggaactgccaggagccacaccatcgactcggccaagaaggagttctctctgatggccccgatcgtggatgtaggctagccccacctaaccatggcatgggccactctgatgagctccaatactcagggattctaactagtctgcgccccacgacggcatgcagctatgccagccagggtgagagccacactaatgcctgcaccatgaccgattgatgcagccactctgacacggtgggctccattgtcc

SEQ ID NO: 179936 - DNA, 371 bp, Zea Mays
tgtcagacagatggaacccgtacgggtgggttagctgaaagttattatctgaaagactgcaaggtgggaccatggagcagcaagatggaactatcacaagagcacggctgagggggtagtttcttcttcataacttgtcgtgcatgtgtgcagaccaatagtccgggttcatgggggcagaccccaccgggttatcatacacgtttgtgtcatttagttataaaaaagggaaacagactcgacccctttgtcttgctctatggatagaacttatagagatatttggcatcggggtaaggtactcctccagtcgtagctagatggttgcccctgggtcggtgcactcccgttaccttggagggtccttccca

SEQ ID NO: 179937 - DNA, 429 bp, Zea Mays
ccctctggttatttccctttcctttgccacctgagtaggacttcttctgctcactacggccaaagacatataaagcttctccactcaagccgacagcatcttccgagttaaccatctgtctcatctttttctttcgcagtcaaagcttcatacacttcagccacagttagtgtatcacgactgtataggatggtgtctcgaaaattgctaaacgatgcagggagagaatactggagaagaagagctaggtcttcatcatcaaagtttacctccatagacgtcagatcggccacgatctccttaaacaacaatatgtgtgtcagaatagagcctccttcttgcaacttgtgggagaacaacttcatcttgacatgcatcttgttggttagatccttcgacatacagatcgactccaacttcaactagagt

SEQ ID NO: 179938 - DNA, 404 bp, Zea Mays
cgggtcaggaacatcagtggcagtcaattcatcttgactaccatcgatctctatatcctcatcggtatcctcatctgatattttttggaaacaatgagtaagacatatgtagttatataagcattggtatcataaaaagattgaaattagtacattgcccagcgaataggtatccctcgttctcatcagcatcgtcttcaaatatgacaccatcatcatcatcaactgtagggtgaaaatacaatccacataaaatacaagggcattcaggataacagggtggggaaaatatgtaacccgaataaagattcttaacaattaccattggaaatgacccttggcttcgactgggtatgatccaccccacttccttgttcggtcatacttgcactctcatttgttgc

SEQ ID NO: 179939 - DNA, 542 bp, Zea Mays
gtgaactcctgtatacggacacgggagccaccgaccacataactagagaacttgagaagctatccttcagagagaagtacatcggcagtgatcaggtgcatatggctaatggagcaggtatgactattaatcatcatggtaaaactactattcgtaccccacatcgtaatctaaatctgaatcatgttctgcatattccacaagccacaaaaaatctcgtttccattcatcgtcttgctaaaggtaataatgtatttcttgaatttcatcctaatttcttccttataaaggaccgagacacgaggagcacaatccttagagggagatgtcagaagggattgtatcatctaccagcagcaccaccatccataaaaatgctcttggagtgaacaagtcgtcttttgacaaatggcataaccgcttgggtcatcctgcagccccattgttcagaaaattatgagtagctttaatcttccttgtcatgttgagtctaataaagagttagtgtgtaacacttgttaacaagcaaaaagtcatcaatt

SEQ ID NO: 179940 - DNA, 335 bp, Zea Mays
tttatgcatctattatgccgcttcggttttatgccatatctttcaacatcttatgcttcatgtttttttaccttccgcacattacttaccatgcaagatccataatttacgcgcccacgtatcccagtaatcacgtttgcatgtgacatatattccctttaattccgcgcaatttccttaccattcaaacaaccgcgtcacggcgccgtctgtcctgcatgcctgctctcagccccacgttaaaacacaggcgcgcctgttccatcggccagacctcgggaaccgacctgggcttcctttaatatccgaagcccagggctcccgttatacctgcc

SEQ ID NO: 179941 - DNA, 538 bp, Zea Mays
tggaattggattatttacattgagcctctcagacactatatagagtttacatgacttgggccaaagccggtacacaaggatcctaacaccaactaactctatcctagtcgtgatatactctaacaatgttaagtgcaactaagaacagcagaagtagattcaatcaagatcctcagtcacaagaaacaatgtatagtttgacaaagcaaagttgagatcaggtccatatgcacctgaatagtcgcaagaaacaacagataggtttcaatcccaaagaggccaagtacattttgggatgtcgccgcatttccacgccatggtgacagaattagaaaagagtaactcagttgttagtatgtcatctaaatgacactaatcttggttcgaatgaactccacgatacagtactcatactctagttgtctgcatagaatggtacgatgctagggtggggagaaccagaaaagcatgtacctccgttgaggtggtcgattgcagcggcgtccccgtcgtggatcggagcgatgatggccgcccg

SEQ ID NO: 179942 - DNA, 563 bp, Zea Mays
ctcgttttttatgtatctgataattggttccctcccgtcgttgggatctgcttctgcctaacctagaacgtggcactcctcaacctgctctgtggtgacgcttggctactgtatctcttggacaaaaaccccaggtggaacttgggcttgactggaccccaacttcgacaatgcatttgttgttgcgttgcgatccctttctatgtgatggaattccaaaccctcgaatttgtcctccagctttcgtagcactgcacagtatctattcattgagtcggttgagcagtcccagtctttgtttacctagctgatgaccaccagtgaatcgtcatataccattaatcttctgatgtcgagtgagatggtgatgctcagcccatgaaccagggcctcgtactctgcagcattgtcggacaccgaaaacaggagctgaagcgcatacttgagttgatcacctccaggagcgatgaaaagaatccctgcccccgactccttgcaatcttagcgagccatcaaagtacattttccagactttagcagcttctgagttttacgaaacctag

SEQ ID NO: 179943 - DNA, 796 bp, Zea Mays
gttgtgcaagtccttcaccctacattgagtgtgtcaaatgatatgatgcattattatttctttgacatttgtccactagatgcttgactttctcctccaatcaacaaagactccggaggtccccgctactacttcctagatcgctaacttcttaggtagagcctttagcttttcctcctaggattgataagcccttactctcctctctaggcccactttcttgtcctcaaactcctttagggtgatgtagagttctcgagggcaatagaggagagcttgttccctagcacccatcttctccttaaaggaacgctttgccgcttgtagcaccgggggcctcttagatatctatagatctttatagatcaatgcctgctcctaggtcgtgagaacgataaagttggactatagctcctaaactcaaagttctaggtcttcactatccctgatcttgatagcctcccatttagatttttggttgcctataccttaaaacggcccgcaagctcctttgtcaccttagtcgaggttgcgtccctttgcatggtagcctcaagctgggccaatgtctcctaccatcagtgctgcaacatgtcttgaatttcttcattgctctctcgagcctatgttgcaacatcactaacggctagggcctcttcattggtatttcgggtcgtgttggtcacttgtttttattactgaatcataaaacaaggcaacacaattgttaaacgtcaaggaccttcgtctttcgaagcattatctcctttcgggcataatggatcttggacgaagg

SEQ ID NO: 179944 - DNA, 535 bp, Zea Mays
tgtttaaaagagttagcctaccacctagactcaaaaatctaccctgccacccagcgagccttttttccaattttcaatcatgggcacccagagacttttatttatcttcttattatcaattggcaccccaagatatttcatagggagacaaccaataggacaggtgaagatatcagcatacaaatagtcaatttccttagcttttccaaaacacaaaatttcacttttgtgaaagtttagtttcaaccccgacatgctttcaaacaaacacaaaatgaatttaagatttctggcaccttctaaacaatcttgaataagaaaaatggtatcatcagcatattgtaggcagcaacatcattttggatgatatgaggaatcaaaccctcaatcagaccctcaacttgagctttatgaatcatgcacgccaagccatcagcaaccaaattgaacaagagaggagaaaaaggatctccttgtctaacccctttatgagtggtgaagtaaggccctaatgtatcattagttttaatggcta

SEQ ID NO: 179945 - DNA, 672 bp, Zea Mays
agcacgctggccattctcctcctcttgggagttgcggcagaagctttttgtgccttcggcggttttgcctatgttgaagggcttagaatttctggcatttttattgtttcttccgcctatggctcttcggccttatcatctttacatatggttggcccgactgtaggcaccttcgacactacagttggctctttagcgctctgcacaatcagagcagtttgttttgcttcgacagctgaagaggaccctacgccaaaatcaggtactacgaccggttcaatataacgcggccggtgggtcagaaccttcacctttttgctcttcggctctgttggggtgaccgaagcggcaaatttcctctttttctcttgccctcgcagcgggtaacggtaatcagggtatacgaagccaatagcatcaaataccctgattaatcttttcttgccccgacctccaaaggctgcggacagagcattatcttcggccttggagtatgctccaagtagctcatcgctggtagcttcgatacacttcagccagtcgtcgtttggctcatcaaacttctccctaaatgtgaaggtatactttagtcagaccagaccaccctcactagaatcgacggtggtctccttaggcatatcctagctctccacaagtggccataccctgaag

SEQ ID NO: 179946 - DNA, 842 bp, Zea Mays
gtgccatcactgtggttctgccatggctagctcgtcgtgcgttccttgctcatcggtcggtcggataacctcgccgccgtcgagctgtcatcgttgcgcgcccacgtgcttatgcgctagcccttaccgtggtgactcactgggtgcatgtccggtgatcaccggaataactgccacggtgaaagccatttattccacgcacaaagctcgtctctcctccggccgccagcactgctcggccgaattcgtcaccgccgctcgctacgtctataaattgaccccgccgcgagcttcgtaaggtagttaagcgtccagccaccaagaattagcctcaatcgttcacctgggtgcgcgaatttggaacttcccccaaatccgcgcaagaacaccgtaggaaagacatcgccgcggtcagccccctttccggtcagtccaaccctccctctccctcgtttaagcattctcacatgtctacgatgcttgttgaaccgcccaattggactaagggtccactgaccgtcgggaacgcatggatccttggttcatccacgcactcaacgtggccagaccgcagtagttcacgatttgtgcaattaacttgggggaattactcggggtagcttggatttggtgtccgtcgctcgggtgcgccggtcttggccccctccggtcggtctagctcgtcggtgttgcgctccctgtgctcacccgtcgttggggagctagcacggtaaagaaatagaacctcaggaactgttctgcaaactgtcagagactcgagaaaacagtaacggagcccacttcgagttatccaaaacgacgagggcctctgtgcaagtctg

SEQ ID NO: 179947 - DNA, 876 bp, Zea Mays
accttttggtgtgccacgacatcagctagcttccaggcatgaaggaagtagtagtggcagtaatgacccaattggagacctagaagccagggtggaacaactttggtcagaactacgccacacgaatatggctcgtgagcaagatagtcatcgtatagcggaattgtcagccgaagttagccgcttacagtatgaaatctcggaacgagatacgactattgattgggtcgttaactcgcgttctttcgcttgggactgcgaagcaaaagctctagctcgtgtggcagagcttagtgcatccctcgaaagcctgcaagtgtactgtaatactttacatgaagaagtgcatgtattgtatgcttgactgcacccggacgtgcctccagacatcgctgcaatgggagccagaccatcgggaacaactaatgaaggacctaatgcggagctggacctttttaggccctctccttctatgaaccttgctgacgaatggtctcctgcagcaggaaatggaccaacaaaggatgaagaagactagtatagtatagtttagatattatacttatgtaaaataagtaatgaagtcaagttgtacactagagtctatataattattacattttggtaatgtaatatgatggtgtatgctggcatgttatattttttccaaatgtttatttgcctcagatgccatcacgaactcgtgcacatgatggtgcgagaacttcctgtggtagggaggatactcccaacccgccaccagtaccaccgactttggccaaggctatcgctgccctcgtcaatgccaccgctgataatacgcgattcttgcgcgaaatggcgggcaatcagttccaacagcatggaggaagagct

SEQ ID NO: 179948 - DNA, 812 bp, Zea Mays
ataatctgggcagttctgccacatgcacaagccccatgctgattgctttgattatttatcacctcacgcagtgccctcacattttctgcagttgcgttgacaagagcggcaattgcatctgctaatgtgggaggaattggtggtggtggattgggagtaaacttctcaccctgagacgaaccagccccatccgatccatgcgtgcacatcgacatctgaatcaaaacatagctcataaatacacatccaacatccatgaaatatattacaaggatcaagtacatggtgcattattcattacattacccaagtcttacacaaacttcctagcgttactattacaacagaggagatgacaacatatacatgtgctaatcctagtcctctgcatcaatggctacctctgaaacataactaccaccaggcagatcatcacctaaggacactagaggaggaactgcctcaacatctaggtcctcatctgcctctccaccatcctctaaaactgcaccaccctccatctctgctaccctaggctggtcatttaggtgcaactgataatagatctgatgaacctcctcatgtaacccattagcatactactcgaggtcatcataagcaaacaccaaatcctggaaacgatcccttagatgatcctcatgggcccaagccgctttcctagactgcagcgtccatgccaagtggtgcttgcactcagccaactactatctcaatcgctccaacttagcctaaagctcactaatgtgagtagcatcatgggcatgctctctagcagcacagtttagctgggc

SEQ ID NO: 179949 - DNA, 474 bp, Zea Mays
gttgcgcctcagtgccgcgcgcatgggcggcgccattatgagcgacagctagctttggcagtgcgccctttgtagcaccgaccgaaggcgatagctcgggtctatcaccataactcctgcacacgtcagcataaccggctctacacacgttagcatagtcgtctctgctccacagccaactcgtagtggcatgcggcacaaaggcacgcttggtcggaagatccgcatgacggcgagggagaagatctccatcggccacaacaattaaggctccatgttgtacattagttaatactagatcgttggacccacctatcgggactcagcgcccctatatgtgtccctcttggactataaaaggggaggcatacgcaatatgaacggaaggattttcaaacacaagctctctcaaagctctcagacatcaccagcaatagaactcacaagtgtacatagggtattacactacgcggc

SEQ ID NO: 179950 - DNA, 442 bp, Zea Mays
ctggcaccctggagaatactctccactgcttaatattgggctcacggatgtctgtccctggatgcagtcaccttagggcttagttttgtggagtctttcccctgcccttgaactcgagctcgtgtccatcgcgtgagaggaggagttctggttttcaggtctgagtaacccctttccatcaccaagtccggtctgccccggagctgtgtgccatctctgcagtttggtgaccacgcccagctgaccctccccctcaccgcggcccaggttcctcgagagctttctcagtcgtgtggtgagtgtcccatgctctccttggaccagtgaagctcatgcaactcagcttttgaactctaccgtggtctgctgcttggaacagggtcgcgccaccgcagatcggtaccatggacagcctcaccgtcgaccaaccagcgtgcttctt

SEQ ID NO: 179951 - DNA, 694 bp, Zea Mays
gtgcaggttgatagtaaacagtttgagtgcctttgagaatgaagtctttttattgatgatgtatttcccaatttacagaatacaaggctgtcccaatagcttttgaaatctagctaggggtaaaactttctgagatgttctatattccatgagttcccaatttccgtgccgtccatttgagtaagacgatatgatccaggccgagtgacttctgctactatgaatggcccttcccatagcggcgacaatttgtgttgtccctcccccgttagaattcggcggaggacgaggtctcccactgcgaaggatcgatgccatatggctttgtcatgatagcgcctcagagttggtgatatcgggctgactgaatcaccgtattcaatcgttcttcttctagtatatcaacatcctccagtctagtagcctcagcctctgctatgttttcaaagattaacctcggtgccccaaacttgagatcagcgggtagcactgcctccgaaccatagaccatgaagaaaggagtgcttccatgcagagctcggctaggttgagttctcaggctccaaacaacatacgacagctctctgatccactttcctgcgaacttttcattcttgtcgaagactttctttctgagcgcttccaatatcatcccgttggctctttctacttgcccgttggctcttgggtgcgc

SEQ ID NO: 179952 - DNA, 399 bp, Zea Mays
cccgagtcctaggaaagacgaagttatcatctacaagagctttttcaaggcaggacttcagcttcctatgcacaagatgattgtgaaggtattgcagcgatatgaggtatatatgcatcaactgactccgaatacaatagttcgtcttaacgtttttatttgggatgtacgaagccacggaggtcgcaccgatgctgatgcattctatagagtgcacgatttgcattatcagacgaaggccaagggccagacatgcctcagtaacaactttgaatgctataactttgcttattgcaaggacacagttggtctggttcttgcataccgaaccaagtagcatggggactggacgaaggagtggttctatgccaaagttgattatgaacaacgtgaagaatt

SEQ ID NO: 179953 - DNA, 2570 bp, Zea Mays
gtggcctctccgacaagaagctagggctcgctggttcaccaaactcgccgaccgccgagaatgggtcgcatcgtcgcgacgagcgagatgggacctgccagatgtgtcggcgtcgtgatgatgaaaaatggggtgagggtgtcaggagggtttggggtcgaacgacgtcgcgtgtcgggaaggaggcagcggcaggcggcatcggggcagactggctcgaacgacatcaattttcagtgtgtatttgacagaggacaagttttatagccagaaattctactgttcatgatggagaatctgaacagaagcaaataggcacattgcttagtaggcacatagaatagaacataggctcaaacttgcttgtttgtaagcatacctcaaaaattgttggacgcttgatatatagcttctcctatcatttgttgtgctgaaaaatctggttatactcatcagctttcttagtgccatgaaagaaagcatgtcatgcaacagaaataagttcatagcaacttaggcattttctgaccaagtcaaccccatttccattaacaacaaaggcaacctaaccatttaacactatttcattttcataactatccaacagtaccatgttttccattattctaagtaactcatcacgacaatcatcaatgcgtgtgtggcattcatcgtctgcagaaaacacatgtaccattttctcaatctcaatccagctaagcccaggctccttttcaatcatgagccctctgatctttctcctaatttcagacacactatcccattttcctatagaagcataaaggtttgaaagcagtatatgtgttgagagatcatctggatccagctccagtgcttgttcagcagcatgaacaccaattgacagatttttaaatgtcacactagagcttagtagaattctccatagctcaggatatctcttggcagaaggggatttattaattaactcaactgcttcctccaataaacctgccctactcaacaaactcaccatgctagtgtagtgtttgaaccctggtacaatgccgtcatttatcatgcagaaccaataaagctttcctttctcaaccagtccacaatggctacaagtagaaaggagtgagatgtatgttacatggtcaggttgcagatcactacgaatcatgtcaccaaatagtttgaatgccatttcagaatccccgtggttgccatatcctcctatcatagcattccagcacttcaaatctggcttctgtatggtgcagaaaacagaataggcacgaagaagagtaccatttttcgcgtacatatcaacaaggcttccagagacacaaatatttccttcatagccactttttaccacttgagcatggagcatttccccttgcttaagacctgcaagatctgctgcggagttcaaagcactgctaagagagaaattatcagccttgtgcccaacctccagcatgccaataaaatatttcaatgacaattctccttcacctagtgcagaatggccagctaccatctcagtccacatgataacatctttcaccataacggaatcgaacaaaatgtgagcagactctggatcctcatttgtgaaatacatattgagaagtgtattcgcaacaaagacgctgctctccaacccagccttgatcacacaagcatgaagcggtttgccgctacacattgctggtaaagaagcagctgcagccaccactgccgcaaatgtgtactcatctggagccagccattcagaggacacagccttgagcttcacaaaggcctgcactgcggtccatccgtccgcaacgccagaaaatccagaaattatggtattccatgacaccaagtctggtgtttcgatcctccgaaacacaagtactgcagtgtctagatcaccacagcagcagtacatatcaagcagcgcattatgcaaaggcaaatcaggatcaagctcctctgatttcaccacccatccatgtagcgcacgcccatggtgcaagtccccagagcgcccgcacccactcagcaccgaagaaagggtgctctctgtaggcgccagcccagtgctcaccatccggcagaacttccgcagggcgcggtccaggtaatcgtaccgtacgttgcagtgcatcacgcagttccacgccaccacatccggcgtcatcatttcgtcgaacacctggttagcgtccctcggcgacccgcacccggagtacatctggagcagcgcggtcggcacaatgtcgctggcgaggaagccgagcgccgaggcatgcgcgtgtgccgcggcccccgcgcggccgtcgcgcagtgcgccggcggcgcggaggacggcgcagaggctgggggcggtcgggcggagacccgacgagtgcaggccgcggaagagcccgaaggcgtcctgcgcgtgccttggggtgcgcgagagagcggagaggacggtgttgtaggagatcacggaggggcacggcgtggagcggaggagggcgagggcgtcggggaccgcggagaggcggcagtagagggcgagcagctggttgacgaggaaggtgggcggg

SEQ ID NO: 179954 - DNA, 277 bp, Zea Mays
ggacggaggggatcaaaccggggaggggcgaacggctgcgggcggcactgctcctctccacggcggtgaggtcgccagagttgaggcaggcgtgagctagggggttccaaggtcgccggagttgggcagagagggagagaacgccacggcgaactcaatggcggggaagaggccacgagtctgagggcagagaggggagaacggcggggaggaggtctcgggcgggccggagtaactccggtgaggaatcctgaccgccagagagggtaatcggccg

SEQ ID NO: 179955 - DNA, 430 bp, Zea Mays
cctgaccaaattttgaaagatgatcttactagggctgctaaaactgtacaacacatcaaatcgacatcagccgcacctattaaatctgaaatcaagttgcactctcctgttttacttgctacgcgtactgattttgatgatctccatgaagctcatatgccctgttatgcacttgtatgctcacgcatgcttgttccgcttgatgatgcaccgtctttggatataccccctgctgttgttaaccttttgcaggagtatgctgatgtttttcctacagacttaccaccgggtcttcctccgctccgtggcattgagcatcagatcgatctcatccctagtgcttctcttccgaaccgcgccccgtaccgtacaaatccagatgagacgaaggagatccagcgccaggtgcagacgctgcttgataaaggtt

SEQ ID NO: 179956 - DNA, 847 bp, Zea Mays
tggagatctcgcgggggagctctggccctgcttgtggttttcgcagcagccgctgcgggttgatggattccacgtggttgggtttgatgaccagttcatagttcggtggttgcctggttggcgtgcgagagtctggagcatggtcgtcgtgactcgtgaggatttcgtagaaattctagtgtccggatctgttctcaatttcacgaacacacggctggacatcgttgggattccaccgggaggaatgagctttgctttcgggttgtttcctggtgctgtgggaatcgtccgctcacattttagtttagcatagttgagagagtttgctttgatctgctagtggcgtgatttcagctcaactactgtggttacttggcagagtcatgtttgcttttggttccatgcattttctcctgttcaatggtgtgataattgagtgattatcatgcatcgatgcttgtgtgtgatgtcgctttggtgcgagatacatttaagcatttggcatgcctttctgcgctagggtagtgtgggcaggcagcagaactcgtgatacttctgaattccttgcagtaaatgaaggtgttagtttgctcaattgagatcttgtctaatcgagttggatctgacaaatgggtgccccattccagattagtttgtgcagaagtcttcaattgtttaaaattgaactattttgtgtggctgtcctgaataacaaaaacagtggtgagtcctgctgttcaccagctgtataacttcatcagaataccataatggatgatgttaaaacttctcttgttttaaattctgggtctgcttcctgctagttttgttctgaattgttgctttc

SEQ ID NO: 179957 - DNA, 518 bp, Zea Mays
taagccccttgctcttcgataacatttgagtgaagctacccgatcaagcatcgaagtgtgtcaagctgtatcagaagttgctttgtccattactgctgcctgaattggtatccgttctgtccgagctgtctctgcagatgctgatcccgatttccaaaccttgctggctgatggttcaaagcgtcgacgccgactggattccacagcctcctcctgcacaatagcgagagaacaagcagtatccaagttgtgtggtctctaaaccataacaactgttttgatttcgtccctagaccgtctacaaaacgcatcacataataaagtggatcggtatgggactcataagcagctaactcgtccaccagagatgtgaattgttccacatattcagagacagggccattctgcctgatatgaaaaagcttacgaatcagggactcatgttgttctcgtccgaaccgatcatgaactaatccacaaaattcctcccaaccgaactggcgcaaccgcttttctac

SEQ ID NO: 179958 - DNA, 926 bp, Zea Mays
caggacatggttgcaggctgacagacccagagtcttttggaagccctgacagtttagtgggccaaacaaacaactgagtaaatataatcttctctatgactctatatatgacagacaagttgcattggtttcctttccacttagagccaccgacatgagttcccttctccttcccactagagcctcgctttaatttggaatgacgcacagtttacccagattcctgctgcataaatcgaactaattaagttctaatctccttcctacgaaacataattccttttccctgtcgaataatcagagtcccttcccttatcgaatagtctgcaaagcaagtggatcccaggagcttctgcagatgataaagcccgacatccacatgggcaactctctctgagtctaaaatccctccccaataaataaagcgaaatattccctcaaattctctggacgaccagcatacagctcattgtatgcattgcgcgtatgcagctgcgacagaggccgcaacaactcagctttctttacgcgatccgattgctacttcccaaagagaagccgagagagtaaacactcaccagcctggcagtgcttaattcagctgagtgatgcaccaatcagtggccacccaatgctattatatatagatgatcacagatctatcaacaccaccaaacccaatccctttccagcacactgcaaaacaccaaaaggaccgaaagcaatggcatgcgttgcaggaacaccaaacctgcgtgattcagagtcagaaaggcaattgtatgagtccatgggcattggcattgacagggcaaagatacctacacagtttcacgagaaaacatgcaccgtcgcgcgctggccactggacacgacaacaacaacttgcctatattggcataggcagagtgataatgttggttaag

SEQ ID NO: 179959 - DNA, 518 bp, Zea Mays
ggaccgtgcgcgagttagccgccgcattgctgaactgtcagcggaagttaatcgcctacagcaggaaaatgtggaacgagacacgactattgactgtgtcgtaaattagcgctctttcgcctaggattgtgaggcaaaggctctagcccaggtagaggaactaagcgaatccctggaaaatctgcaagcgtattgtaacacccttcatgaagaggtcaacgtgttatatgaccggttgcatccgaatgtgcccccagaagttgcagcaatgggagctggaccatctggagcagctagtggagtacctgatggggagttggatctttttggagcccctccttccatgaaccttgcagatgaatgttctcccgaagctggcagtggaatgatgaaggacgaagataattagagtagtgtagtttaagtagtgtccttatgtaaagtaaataaggaagttgagttgtactaatgagtatgtataattattacagctcagcacaatgtaataaagatggtgt

SEQ ID NO: 179960 - DNA, 978 bp, Zea Mays
ccgggggattaggtagaaatctaccctctcgacctgggtataaggacctcaggtgcagccgcctgctccgatctatcctcgcgtgaaaatcgttgaccgccaccacgattagggagggaatttggaggccgccgccgccgtggggctctgtcacgccgctgcagttgacctccgcgttgtgctgttgtacgtgcgagtaagggaggtgcttgagctgcagcatcgcgtggcgttgctacgcgcaacgttggccaacgaattacgacctcgtccgcgcggtattgctcgccggagcttggcatccgccgcttaccgtgggcggggctctctgcacttcgattccaggtaaggaaaccctagaccatttcgccttgatctcagtaccgtgtagcgcgtttcaacttgcgagttggggcactggttcgccgattggatgaccacggcggagcgccgccgtggggatcgcggcgccgcgggagtcctgtgtccagaggtgggggaaggatctggggtcgtcgatgcgtttatgctcggccaagatcagatcgggataggattgtcgtgcaccgtcggatccacggttgaccgctaggatttaaagctgcgtatcgttttgctcgggcagtctgagaccgtagatgtgagatcctgcggtagaaagcgattctgggttgcattaaacgcctaccgttagatcgggatcggagggggcctggtgacgtaccgattcataaggctcggttctaatcgtggccgttcatgcatgatctggcggccagattcagaccataccccttcgccatacacatttcatagaaaagaccccctgttactttagaataaacccgccatcctcattcactattcactgagtcttggtaagcttgcgccagagcccctggactttctgaaaaatgaggcccagtccagagatgtttaaaaacagagaaataatattagaaattcatttttaataca

SEQ ID NO: 179961 - DNA, 662 bp, Zea Mays
ttttgcacagaggacctcggctgttcgaatatctgttgaagagtccctagttactattccctgtctcactgacaagtgcatcgagccccttcttctttcttatcttcgcaaactcgggtccccgatggtgatcgctggtgagcacgccttccggtgaacctgtacaggccaaggcgctcaacgaccagaaccctagtttggccaacacctaattccaccctcggtggcactaatccctcaactaattgcactaaactggcccccggagttcgtctgtccacggtggcgacgaatactggagacatttcatggtgctctaggcgattcaaggcggtctaattcaatcgaacgggtctgtgagcaacagaagacatgagggaggctagaacatcacactgaagggcctgaactaacccgtagatgaccggccacggcgagatgtctcgcggcggcgttctgaccgatttggggaaatgggaaattgagaggctctggtggacgatcagaggcgagagctggtgctttggatgcataataacgtagcggagctcactggggcatcaatttatagagttcatctgcggtggcacccaattttgagaagatgtgctggcggccggagagaggggaggttcactggcgcgggttaccgtggcaatcac

SEQ ID NO: 179962 - DNA, 795 bp, Zea Mays
ctcgatgtcctgtcgcggtaatattcaatcggttgggccgacaagctatgttaacattcaaggacgctagaacatggcacagaggggaaggaacgaacctgggaatggttggtcatggctgggtgcctcacgacggcgtaaatgacgacgatgggggaaaactggaatttgtgagctctggtgggtaattggaagcgaggaagggtgcgctaggcgcataaccagaaggcgtatcagggagagcctttaatttatagtaactacatgagtgcttcgcaaatttgggatgagaagatctcacgaccgaaagggaggtgagtcaccggagggcaactctcgtggcgctcggtgaggtaaggcccctggcgggttgtccacaatgacttattacgacgtggtaacgtctccaagcacatggcatcctcgcggcgagcggcggacaccgacgaggacattccggccggtcacaaagcaagtggttacggtggccagctcacaaacttatccgtagtcacgatcttttcatttgcccagtaatatccacgttgatccgtgcacgaatcttcacggcgagctcgaatcgcagcgcccgatcaccggcggcgaggtacactgcatcaagaatcttcttcagtgtactgtaccatggcaatgttcattcagcgcgcctgacagagccatttgagagtcatttctcttcgactttcgttcaacaacctaccaagccgaccataacaaagttgttgtccatcatgtcagctttaattttgttatagggttcttgttcatacctcc

SEQ ID NO: 179963 - DNA, 825 bp, Zea Mays
ggggggtatagagaaacattcagaccagctgtcattcttcattatttaacttattttgcagattataatatttggagataaagttattctcgacgatcctattgagatgtatgtaatgagaactcaggttattgataacaatcataattcttttgtgcataggtttatctacattctttgtgcaacagtcttgacctaaggctatgcatgtactgttgtcttactgagtttaggaattgggaatagcatcttacaccattttgctttcagttggccaaactgtgattgcttgattgccttctattcctctggttttcctctgcaaaaggttcaagcatatgctgctttgagaaggtatattttttattctctatttctttatatatctctttcaaatggtaactattcttgtaagcacgtctccattttcttaataatgtcttaatgctgagggagagggatgtaggggcatcaacatttatttgtttgctttgcaagtttctaacaacctcatccttcgagtggcttatttgtattcagtctgcttatctgttttcatataagaagcttaataaaggaataaaagaaagagactcatgttgcttagtgttggggcacaatttgtagtagctttttccttaggaatgcaaccacctctgggaaagcagtactatttaggagggcaactattaatatttggggagacaacttatgcgcctttatgggcacaatagttaccagtttagaaacgcaactgttagttgagtggatactttatgtttgggctagtaaccctacaacttttgccaattggctgcgtccctc

SEQ ID NO: 179964 - DNA, 329 bp, Zea Mays
caaggtgtcgaacatcggtgctcctattgcatactcggcctgggatctgcctccttccaaggcttttaccaatttcatgtcgaatccccctgctggtgatagcggtttgggccttagagtgcgaccctctcccgaagaggttagtactttggttgcctcacttggtgaaatccctgatgacgagaggcaggttcatttcgaggtacctttgaatccaagtgatgctgagataagtgccatgctggatatgttggctgaagattcctctaacgcagcccctgctgaaacactggatgtagcgcccatcccagaggctggcaaagctttag

SEQ ID NO: 179965 - DNA, 437 bp, Zea Mays
ggtggacacgattagatctagaacccattcagccgcgaccgttggatcttggatttatggctccgatcggatctggcgatggttgatcggtggtcgttgatttgcagatgaacgcgcgggattagatcgcatcttcataaaaccctagccgtagaatcttaatctgatgccccacgctgcgtaccggttcgggattaaaccgatctaatctacactgtccgcttacaatccaacgaccgtaaaaaccccgtaccccttcgtgggtacattttactaaagagccctcggagtcttggttatttaacccgccgtccaccctagggctaggatgagtctgtggattacttctgattttgcccctgtgctttcctgtatttgaggcgcagtccaggaattaaataaaacaggaaaaatagatttagaaattgaattttgag

SEQ ID NO: 179966 - DNA, 576 bp, Zea Mays
aggatcatagtttacttttcggttctggcagaagttgcatgagtgcttggacacgcagttgaattttagctcggcctaccatccttaaactgatgggcagaccgagagaaccaaccaagtactagaagatatgttaagagcttgttctcttaaacatggtggcagttgggataagagtttgccctacgcggagttctcttacaataatagctacggggccagtttgaagatgtccccgtttgaggctttatatggcagaaaatgtaggactcctctttattgggatcaaactggtgaaagacagttctttaggccagaagttatacaagaggcagaagaacaagtacggttgataagggcaaacttgagaactatgtagtcaaggaagaaaagctatgcgggtacccgaagaagactgctagagtttaaggagggtgatcacgtgtatttgaaggtgtcaccgatccagggtatgcgaagatttaaagtcaaagggaagttgtcccctcactttattggacccttcttgatcttaaagcgagtgggtgaagttgcctaccaactggagctacccga

SEQ ID NO: 179967 - DNA, 1317 bp, Zea Mays
caccgtttgagcttggatgaccacgagttagcaagttccaacggtctctttaacaaaattacctggccgaaggggtatgtttcgaccaggaccgcatgatcttaaatctacggctaggatcagatcgccagcgtgatgaatcgatatgcagtgccattcgtctgatccgaaatctatggcatggagttcaaacaacctgaaaccttctaggtatgcctgatcggatctcaatggctctggttcatctttcctgaatcggtacgtaggccccaatctcgctcgtccgcacaacatccaatgactcagatctgccctatcccaaccaatacggagatctaatctcgaccgtccactaccaaatcaatggtcacccgaactccccatggtcaccggtaaggcgaggcggtgcgagcgcccagtgtggcgaagggcgtcgccggagaggtaaatccacggccctagcacgccaatcctagatccgataggtcctactcgttgcggcaataaagatgaatatggccaaggagttattaccgaggttcatgtgcgcaggcgtgcagtccacgacatcttgcagctccacggcggcggtgcaattccgtcgagcaattacgacagtgtcggtggcgattcgtgagtggcgcggccaagaatagcgtcccccgaccaagagaagctcctaggcacaattttgagagtgcagttggtggcaagtcgaggttcacaaacggcggcctcctcactctccctctggtggtggtggcgtctggttaatcggtgataggtcaaatcaatgtgtcaagagccgaggcttatatggccctcacgcttcttgttacacttgatggtgtaaccacagatttattacaataggtcgaaggttaagcctccttatattgtcttttggaagggaaatataaagatagaaaagtaaaaaaatacattgatctatgaaactttctgatcgagtccttgtgttgcttcagtaaatgagtcccgattcgggcacaatgttgttgactatgcgagcttcggactcctcttgagtgtcacgctattattgtgcttggcgatgcacttctggctgctggttatgagcaaaggtaggtgccaatggtggtggtggtaactaagcccatgcagcttgagaatgacttgccgaagcaactgatgtcgtgggttgctggttgcccacatattcagggatatatggcgaatagcatgaagcagtatgcaagacctacttcggctgattctgtcgtgctttggcttcagcgatgtccttctacttttggatcgtgacttggcacgtccttg

SEQ ID NO: 179968 - DNA, 611 bp, Zea Mays
gagaggaccagaccagggggaaacaaacggctgcgggcggtactgctcctctccgcggcggtgaggtcgccggagttgaggcaggtgtgagctagggtggctccggggtcaccggagttgggcagagaggaagagggcgccacgacgaactcaatggcggggaaggggccatgaatccacgggcagggaggggagaacagcggtgagaaggtctcgggcgggccggagtaactccggtgagccattccggccacggggaggggacttaaggcgcgctaaggcctgggctaacttcagcagaggcaggggtgacacagggacctactccagtgaactagaccgggctaaatcagccggccaccgcgcgagcaccggcgaaggcgaaattggccaaacacagggcgcaatgagggaaattgggcacggggacgggtgtctcacctcggggcggagctcggtgaggcttggggcggtctcccacgagctggatggcccgggaacacgggcgtgggtctccggcggtgtcttgcgacgagggcagagcgcgagagagggtgaagctgagcaaaatgaggcgagggttgtgcgcggggcactggcggggctctaag

SEQ ID NO: 179969 - DNA, 588 bp, Zea Mays
catggatttcaaccgcaggatcaccatccgacggtaaccagatgatcaattcacttaatgaaccagtacctaccctagccatccgatctaggatcaacgactcgaaaccttccgcgccaaattctcttccctggccctcgatctctcgatcaacgcttcagattctaagtgctgaaagggtatcctcacgttctaatctgagccgtttgctatggaatcaacggccctcgacccgtcatctacctcacgcctacagccgagctccccacggcggcgctccatccaagcacggccagtaggggccccggtaccctaatccaacccaagttcggtacatacactggtgaggacaaggagcacggcatggaagcattaccggtgtcaggatttgaggaggtgctcgaccacgtactggaggaggtccgccgcgcccaacgacaacaacgcaagcatcgaagctcgccgtcgaccaacgaaccgaggccaaccatcacgcgctcgttaaagatccgcacatgagcacgatctctctctctccctaaccttctctctgccccgctcgactcaccactttccccgacgttcgtg

SEQ ID NO: 179970 - DNA, 697 bp, Zea Mays
tcataatcataagcaccaaatttatcctccacatcggtcatgaattgggcccaggaaggaaaaccccctttgaggcgctgcacctccatccacctcccagcattatccctcatatgcattgttgtagaagtaacccaaaggtgctcaggaacattgtagaacagaaagtaatcctcacagtgccggcgccagatacgtggatcgcgcccagtaaactctggaaagttcaacttgggtgtggtatgacgatacccttgcatgccttcattccaatcacgaggaataaccggtgggggtgatgatgatgatgctcaccagggtggtaaccagagggacgtggtggacgctgatgcagagagggttgcgcctccctagagaactgtgaggaagtgtcccactccgccgaaggtcggcgctcgcgtgtgagaagatccaccgccttgcttgtggcttcgagttgttgcgcgaaggtggcttgatctttgagaacctgctccatagccttcacccccaagtcctggtggatctgcatctgctcttgcgcgcgcgtgacgtcgcccagccttgtaaacaacagatcaatgctctgattgaggtgattccagcgttcctcttcacgttcccccgcggcggccatctcgtctaggacgaaacgagtctggacagaaggtttcggcggcgccgtggtgactacccg

SEQ ID NO: 179971 - DNA, 628 bp, Zea Mays
acctcgacatcccactcaaggacagcatcaagggatggcgcttggaatggttcatcgtggagaatcatgggaattccctccccccacggtcagggagacagtcggatgttcgcactccgagctggaccgaatcccccacagaccaggaggtggctgaggcaagggttctgttagcagaagttggattgttgaaagaaaggggtttgactgcagaagctatggtcgttgactttgttttcaagaacattcagccattgaaagacagagcatatccagcctatttgtaccgaggcttggctgattcaacccgggtgaccaacagaagaattcctactgtggacttggtgaaccggctcgagatgatgctcagaggcaaggtgtcgaacatcgacgctcctgttgcatattcggcctggaatttgcctccctcccaggcctttatcattttcctgtcaaatcctcctgctgatgatagcggtttgggccttagagtatgaccctgtcccaaagaagttagtgctttggttgcctcactcagagagattccttacgacgagaggtaggttcattttgaggtgcctttgaatccaagtgacacggagataagtgccatgctggatatgttagc

SEQ ID NO: 179972 - DNA, 384 bp, Zea Mays
ttcgtccaatttcaccttcgccggtgctcgaccgtggcggtccgccgtgctcgcgcggtggacggccgattcagcccgatctagttccgcggagtaggtttctgtgtcgcccctgcctctgctgaagccagcccaggccttagcgcgccttaagtcccctccccatggctggaatcgctcaccggagtttctctggcccacccgaggtcttcccatcgtcgttctctcctctctgcccgtggattcgtggcctcttccccaccattgagttcaccgtggcgccctcttcccctctacccaactccggcgaccccggagccaccctagctcgcgcctgcctcaactccggtgacctcactgccatggagaggagcgacgccgccc

SEQ ID NO: 179973 - DNA, 744 bp, Zea Mays
cctgtcctaggatgcatgtggcacaacctgtcctttggggtctttaaaatcttaaccgcttgacatgacactgatggtccccgctgaacagattactctaacagatggaaaacctttatcaccagagaactccactcggtataggagtgttgtgggagcactccagtaactatcgctgactcgaccagatattttgttctcggtaaatcgtgtttgccaatatatgaccgccctacttcagtgcattggactgcagttaaacacattcttcgttatctctgagacacaactgattttggcttacgttttatcaagactggatcattgctacttgacgcattttcagatgcagattgggctgataatttggatgatcgacgtagtaccggtgggtacactgtctttcttaggcaaccttatttcctagagatctcgcaagcaagctacagtgtcccagtcaagcactgaatctgaatataaagttgtcgccgatgccacagcagagatcatctggctttaggttcttcttcacgaaattggcatttctctaacacgaccaccgagcctatggtgtgataacataggcgctacatatctcacgtcaaaatcagtctttcatcgtcgtataaagaatgtggagattgattatcattttgtatgagagtgtgtttccatgaaacagtttgaggttcgtgccatatcgtcgaaggatcaagtagccgacatcatgacaaaggcgcttcg

SEQ ID NO: 179974 - DNA, 433 bp, Zea Mays
ctagcggggagatggattgggtcgcgggcagtagcttatcggaggggcttggtggctgtgcgacatggccgaacggtcgtggttgtcataggtcgccgacgagctcgactgcgccacaccgtggtcctttaccacatagtcgtaaccgtggcatgctcaaaattactctccctacgtttgtatgccgtcgagcgccacggcgtgctcgccagtgcaatgtcttgtcaccgccgccctccaaatcccttccaaattcggagtaaccgtggccaacctctataaattgagcacctccctttctttgccccctcataacgaacccagtgcaactctaacctcggccggtcatccaccatagcccaagcgattccgttttcccccaaatcggttctgcgcgccaccgtggacacccctccgtcgacccatcgtcctg

SEQ ID NO: 179975 - DNA, 643 bp, Zea Mays
gccgcgcgaggggcgagtcccgaggtccgaagagcgagcatgagggagaggggagggtgccgggatggagatcgtgggggtgcggttgaggtcgacgacacgacatcggtgagggtggagggagcgacgcatgacggagacgttaggatgagaaggtaatcgcgaatcacgatctgcgggtgtgagagagaaagcagagagagtgaggagacgagcgggcgtgggcagcgaccgacggatgacacgggcagtgtagattgatcggaggtagaacaagggagacagcttatcccttaccttcttcatagtagtagagataatagatctatgatgccatttagtgataaagctttggagtctgctgtacggccttcgcctccagcgacggccgcgcctacacgtagtggtgccactgctagaatttgtcaggaacacaagcacacaagaatccgaaaatgaaaggcagcagccagcagggaacacgccgggcctggaactaggtcagtgtcgtctacacgtggtggacgcagtcgtatgtgttgatgtcgtctgccgtgcacctgaggcccaggcgccgcccgcacgagtactgctcgccgcgcgcctcagcgccatccgcagtttgctcgcgccgcctgagcac

SEQ ID NO: 179976 - DNA, 1187 bp, Zea Mays
cgccctcgagatttagactgggtttgagaaaaggtaagggtattccctcctcaaagagtcctcactctcctaggtagcttcttcttctccttccctgctccactgaactttacagagtcttacttctgagtttcgggtctttcggacagctgagtcaagaatctttactggcttttctcggtactgcagatccttctaaatctgaattgcctcttcttcgatgtgactttctggcactttcaggcatttgcggagctgggatacgtgaaacacattgtggatatctgaatggattcttgcaattcaaggcggtaggctgcgggtcctattctgccaatgataggatagggaccgacgaatcgtggggctagcttccctttcacctgaaatcttttgactctgcgcattggggagaccttgaggtagacaaagtctccttcctcgaacctgagttctctccgcctgttgtctgcataactcttctaccgactctgagcttcgagtaatcttttgcggattagggcaactttctcttctgcctccttaacaaaggcaggcccttccagtgtcttttcccctacgttggaccacatcagaggggtctaacactttcgttcatacaaggcttcaaatggtgacatcttgatactggcctggtagcttttgttatacgagaactctgcatatggcaaactggactcctaattcctgtcaaaagtcaacacacaggctctcaacaaatcctcgaggactttgttgaccctttctgtctgaccatctgactgagggtgataggcggtgctgaagtctagcttggtgcccatagcttgctaaaggctcatctagaattttgaggtcaactgtggtcccctatctgaaactatcttccgtggaataccatggagtctgactatttttaagatatatccgggcaagggtggctcctctgaaggtagtttttactgggatgaaatgagctaccttggtaagatggtcgattataacccagatagaatcgttccctttttgggtccgaggcagtccggttacgaaatccatgcctatttcttcccacttccatttgggtactgggaggggttgcagtagacctgcaggcttctgatgctctgccttagttcgctggcaagtgtcgcaccaggccacatactgtgctatctcctttttca

SEQ ID NO: 179977 - DNA, 329 bp, Zea Mays
caaggctcagcgattggacgctgagatggcaggacttgcagaaaaggctagcaagaaacaactactggatctcaggacagatgaaaagggggccctttggttcagaaatcgtctgtgtgtaccgaagggagaggcacaagaaatcctgctagatgaagcccacaactcagcctattctatccacctagggtctaccaagatgtacctagacctcaagaccagatactggtggagaggaatgaaaaaggagatagctcagtatgtggcccggtgtgatacttgtcaacgaactaaggcagaacatcagaggcctgcaggcctactgcaac

SEQ ID NO: 179978 - DNA, 926 bp, Zea Mays
ggcaagcttttgtcgaaggtcttcaacctcagctttatgagcttcggtctgggcattgtatttcatctcatcttccttcactttattcaccaatgaaattagaattttgtctttctccagggcttcgtttctcagctgaattacctctaatcgaaggttgccaagagctattgtgcagctttgatcctcaaaattcttttgaaccctcagggcattgctcagaattaagccctgtgaaaaagaaggataaatgtttagtatgagaataaaaactttgttcccaaattcataaactagtttataattcctgtacctttaggatgttgaatgcaaggttgtccgcgaggtcatcctttgacatggcggagaggccaacttcgagctttggaaatcccatacttttagccatctcccggcagacagatatctctttgttgtccaggaaacagtacaagaaattatctttgtctgtaccattgaacaccatggccccttttgggtatttcagtttttgggcataatggttggcctctacaatctccccttcagataatttctttcccgaagcatgacgaataataaaatcaagattcttggatagagcttcgggatcaggagatttagcttcttcggttatttctttctcagttgcagcgggctccatctcaacagacgctgaaggcacaacttcggcttcagttttggcttcagtttcagctttggcttcggccgtagcagcttcggcttcagcctcagccgtagcagcttcagcaattttcattgcgggagcaggagttaatattcttgcggtttctatgacagcgtctagcacactggccatcctcctcctcttgggagttgtggcaggagcctttgtcaccttcagcaattctgcctctaccggtggactcagaatttttggcatc

SEQ ID NO: 179979 - DNA, 564 bp, Zea Mays
gccgtctgtcattttcgcgctacgaccacgagaaaacccgaaacagacttggttttagccactggtcctttctgtggtccactcaaaccatgcgtgcttccctccgaaaatatttcagactacttatctgctccatacggtttgtagacatcggtttcggagctgttcatcgtcaagaattcctcaagttttccgctctttggactaggatggggtgactgctgaatatatttttcctctggctccggtgcttcttttgactggagctatgactttgaattgtcgtcttctttggagacagctgggagccttgctgttgcctaggtatacctgtcaccactagaaaaatccatgcataagaacggatccatccactgtcatccacagctttaaagtattcagtcttcgaaactttatgccttctggatgcaagaatgggttgtccgaaatggacctgtaaccaaaacaaaaggatcaagggacatccggacagggaacagagatacttgaagatcttaccatggtctgagcaaaatccttccagagaggtgaagaccatataat

SEQ ID NO: 179980 - DNA, 765 bp, Zea Mays
aaagcggcgagtttggcgttccagggtgcagtgactggtgtttcagcagaggcgagtttggtgtcaccaggattgctggatcctccacccccgaatcatgcacctatataagaaagaattcattggaatgctcgggttgcaaaggagccctcgtagacatcgtccttcctcggcggtttcggtgcatgattttgatcgatgaaatgaattcgttaagtttaagtacataagagtttcaaccatccgtgcaggtttcggattttgttttgggggaaaccaaaccatgatactagcattcaccggacaatctgtcgatatcaagtacatgtgagtgatacaacaatgtgcctcctagactggaagcttttagcaagagcgcatttcggcgaggaagtgtctttaggattgtgcacgagtatcgatccggtcaaggaaggctaactcctcacacttcagattctatgatgcaattacagagcacagagagggctatctcccagtcttcgatccggccaagcacacgtgagacgatcagcgacaccacagccgcacgtcgactcaagaaacttcaccaagcaagtgatgatttttcctcgctaatttgtgagcctcgcaaacggtagttggctggtaagtcaatactaccgctatagagcgagtgtctataacggcatggagcctctcgggtttagccgtttagttataacaagtaccttctatctatgtctctcttgaaacaaccgtgaaaaagttcttcactccgcc

SEQ ID NO: 179981 - DNA, 731 bp, Zea Mays
tcttacagagttgcgcgctacgcatggggatccgcaagaagccggaatatgtctggaaagaataccgagaaaatggagttgagaagtgctctatggcgatctacctaggagaaagccgaagttacccaaaccacccacccttccaagtcaccttcatcgggcaccgcttcccagacacttgccaaaatgttgcccgaaaagcccttaaacagctatgccaaaactacaacagagaggtctttgaaaccccccttcgttactttccacctagcaacaaaaatacccccgcctggaggaaaagacttcaggccctgttagagagagatcctaccgaggatgaccccaccatcgtctacatggccggatatctccacactctcgataaccactacgacgacctttcctcccactgcacccacctaaactcctgggtggaaagcttagagcagcaggtcaaggaacttaaaaaggagaaggcgtccctccaagagtgtctcgaaatagcagaaggcgaggaggccaacactcgtgaagcctaccgaaccctgaagatggattacgataagaagctaaagaagctcacgcccaagaagaaaatccaaaagaagaccaagagccaaggatgtcagactgagcggaagaagaaagcctctccagcaccacctcctgtcaggatagagaacttgtccgacgtcaaggatgtgtccctagctagccttgatgaccttctc

SEQ ID NO: 179982 - DNA, 370 bp, Zea Mays
ggttgtggcaatttattacatggctccgccccgttaaaaacctcaccccctaggaggaaaagagtgcgggcctgactgggatattgtttgcaaaaatgacaaaggcgctcaggcctcgggactaaacaaagaatttgcgtaggttatccacattccatgagtgctctaagtcttcgccggatggtgaggtgagcctgtagtcgtttggggatgttttcgtcttgacgatgtagggcccctccattttgggttcgagcttgccccgagactctgttccagtagttctggtgaggattgagtctccttcattgaactctctagggatgacagtgttgtcgcgccatgccttagtctacgcttggtatttgtt

SEQ ID NO: 179983 - DNA, 342 bp, Zea Mays
ccgaaggagactgttgccggatccagtcaaggtggattaattcgtttgaaatataccttcagatacagagaccagtttgacgaaccaaatgatgactggctgaaatgtattgaggctactagcgacgagttacttggggcatataccagagccgaagatgatgctttgtcctcagccttcgggggtcggggcaagaaaaggttgaacagggttttcgatgcaattggttttatatatcctgattattgctatccctcgcgaaagcagggaaaaaagaggaagactgcaacttcggccatctctgctgtgccgaagggcaagaaaatcaaggttttgacccac

SEQ ID NO: 179984 - DNA, 464 bp, Zea Mays
gatcaagaatttgtatgccttagaacatggaagctttattgataatgagaccctttgcttacaaagtacaactcgtccacaagagtctcaaggtactgctatggataaaatttcctgaggtgctcaatgttctacgaattccccactttggtgccatccatttgagtgagccagtaggatcctggctgggtaacctctgcaacgatgaatggtccttcccatggcggtgacagtttgtgtcgtccctctccagtcagtactcagcggaggactaaatctcccactgtgaaggatcgatgccacactgctttgtcgtggtagcgccttagggtctgctagtatctggctgactgaatgaccacattcagccgttcttcctctaatatatcaatgtcttccagcctggttgcttttgcctcagctatgcttttgaatgttagcctaggtgctccaaagatcagatc

SEQ ID NO: 179985 - DNA, 315 bp, Zea Mays
cataactatacatacattatgtcataacaaaaaaagactatctatatattatgtaccggatcaatgactgcattcatagctccaaccatgtagtcgtagtgctgcatatatctcataacaaagaatccacaaccattagacctcaatttcattgttgggcagttattcaagagttcaatagggtacttcaaaaaagcagggagggctgatcttggtcgagcattttgtatggctagattgagcctactcattattaacctggcccatgaaaccttcctatcacccatatccataggtatacaatggtaattcttc

SEQ ID NO: 179986 - DNA, 1087 bp, Zea Mays
tgacaggcggggatgggtgttagcgactggagggggaggcgggctgaccgatcaggcccaacgccagagggcgcaagcgctgactagcgggacctagaggcagagcgcgcgggtgcgaatcattatccacggatctgaggcgttggatcaggggcggatggtcgtgatggggcgcacggggcttaactacttggtggccggcgttgtctccttcgcggcggcgagatcaccggagacgaggcagacgcgatcaccaggcgggctggggtcgctggggagggctagaacaggtccagagggccttgcgaacacactagcagacttccggccgcaagaacggggccagtgaaggaaggacgacgaagggaaggtgctccgggcaggtcggacaattccggcgaggaattccggccgaggagaggaggtctcaggcgcgctaaggcctgggctagctacaacagggtaaggggaacactatgggctaacacagaggcacgggatcaggctaaaacaaccggccactgcgcgggcacgccaaaccaacacgaccatcattggcgaagttaaattggccaataccagggggaattgggagaaattgagtgtggggacggacatctcactttgggacgggactcgaggtgggttggcgtggctcggggagactctggttggctggacgtcgaagaaccatgacggcggtgaactctgacttgcgcggggaaaaagataaacacggatcggacggaccaggggtgctaggggtgaactgaggtgtgtgtcaagtagctgacggcgaggcggaacttacccaggcaacagacgtggcatgggctcaacggcggtcgcagaacggatggtgggctttggtgagctgcagcagggctacctggtgcgtgcgcagagcgagaggggacgagagagctcagctaagggcgcaaatgagcagggggaggtgggtgagcggggtgcgaggtctaaagggccacgggcgtgaagacgtggctggagaacgagcggtcgtgggtgcgtccacgacgggggcgtgggcgagaggttaggtaagcgaagggggtgacgggtgggg

SEQ ID NO: 179987 - DNA, 901 bp, Zea Mays
gacacgatttggcatgggttttgtctcggattgaacagtgtagacagagccaacttcccaccaccgtatcttctcacccagaccatatctttactcgggactcacacaagacagagatcccttggcacagtgaagagacgatacacaggatccttggcaagatatgcacgtttaggtcgaccaacatacatttgaacaagggcagaaacaaacgtccacgtgttcgatcgcgtgctcaagcgctcggccgcgcactggccgctctctacacgtgtgccacgcacggtcggcttttgtcacccacgcctatgcccagccattgcccgagggcgcctataagtacccctagtgcacaggagtcgacccctcactcctcctcactccccgagcagaaactccaacttcgacgagctctgcaccgcctgccatcactgcccgagcacggctgccatggctagcccttcctatcaacctccagccttgccctagcccctacacggcttcccggagaggcgatgaagctttcccaagcttgagccgagacattgcctcaccgtagaagcaagcgcgacttcaccagacttcggccgaccgcctccgcgcgtggaccgggtcacacgttgagccattctccaatttcttgcacccacgtcatcatggacctcccatgaagctcctcgagcactttgatttgactctaccgcaatgaggaggccgaagcacgcaccgtcggcgagcccgaccgcctgcgcacgtggccagcccacctctagccaccaccaccgatgacccgcacctcgacgtgatcgctagagacccccggacctcacccaaccctttgccggaactctaccgtcgctggtaagccacgccaccgctttttcctcctcggttactattc

SEQ ID NO: 179988 - DNA, 1527 bp, Zea Mays
aaacaacatctatgttgcaacaaaagtcgagatgcggaattcataaattttgttgatgcaatgcatgatagccgagtgccccagcattgcatagttgattttatatcagacatgcatgatgggccagagaacgtaacagtaactgctcaagatctgaaaaacatgtaaggaatcttttgttgttgactatgtatatattgagtgccatagatattgctatagtaaatgtttggatgttcattttttgtacaacaattgtaggagggcagcaaggagacgagaaaactgcgcaaatgatgtagccaaacttctgtctttcttcacggaatgcaagaaacagaatccacaattttcttgtgatttttagctaggcaaggatgggaaaatagtgagtatttttggtcacacacaagtatgcaggggcaatatgcagattatggtgatgttgtgacctttgatacaacacacaagaccaatatatatgataaacccactgggcatgtttattggagctaacagctatctgcagtgtacagtgtttggatttgtgttgttgggagatgaaacagttcagacttttgaatgggctttcaattcattcaaaacatgtatgggatgcgagggaccgagagttatgctaacaggtatgtggtatgtgaatttgttatgctaacacgtcaaatactttattgtgatagtcaaataatggtttgtgagcaattgcagatcaagatcctgcaatgccaattgctctgagaattgtatttccaaaaacaattcacagactgtgtttatggcatgttcagaaccgatttataccattcttaaatgaattatatgcatggtttgctgataaggattttaaaacaaaattccaatctattatacatcatcctttaactcctcgtgagtttgaatgtgcctaggaaatgatgctagaagaatacaatctgcatgaagatatgacactacacaagttatatgaaataaggaaagaatggataccaacattttttaaaaatgacttctgtggggtaatggtgtctacgcaacgcagtgagagcatgaacagattagtgaagaaatcacatgtagatgcgaacacccttctgcatgagtttgctaaacaaatgatgaaaatgttgcatatcaggaaaatgaaagaatcaaaggaggcattgatgaacaaggtatatcgtgtttgttatcaataatcaatggcatacatgtttatgtaaatatgttatttaattataatgttaacgtcttatagggaccaaggacaaccgatacgttatgaatagatttctagggcatacactagagctattatgaatagatttgaggaatcaatgaaatatgccactgcatacagaatattgaaggacacagacggttgtgataaagattggatcgtacaacatacaaaaagatctaataaaattgtgtggggacaacatcaattcaagataaaagcggacatagaagctggagagtatacatgcgagtgcaaacagtgggaacata

SEQ ID NO: 179989 - DNA, 531 bp, Zea Mays
gtttcaaacgggcattgagctagtatctgaccacatgtacaggtatagatgaggttgatggttccagccagtagcacgaagccacgaactgttaaatccttatttggtgctagtgcgtgaagtttcaggtccctttgcgacctagccgacacgactgttattttggcatttatggggaaggaaaggttagatgagttttcattctcccggctgggttgggctgaacagtacggttattttcgactagtatatagttcgtgctaatgcaatgatcctgtaaaggggaggagagaggtcaattgcgacgtgtaagaagagaggttgacggtagcggtggcagagtgaggggaaagggaatgaagaaagatgatccaaataatattgacaattggatttgagtaagttagtgagagttatccattgatctgaaccgtttgttttgatggtatgttatgtttgggttaaatttgtttgtggatttagtgaaggttataggtgtgagtgtgatttggtcgggagggtttcgcaaag

SEQ ID NO: 179990 - DNA, 371 bp, Zea Mays
tacgaagggcccaaatgtaaacacttaaccgaacaatagcattaggggtcagctgatgaagataaaccccaaacttcttcagtacaatagcaatcatcttgtttagggggaatcttaaaccagctttcaggaaacttttgaagactactacctcatcttttcctggctttgggatagtttcttctccaccaaaacgaattaattccttcttggcctcagtgaaatagcctagcttcaccattttagggagatcagcttcggagatggtagactttccaaaatccagatgactaggtttacttggcaccccacagctgtactcatcttcggaaccagcttcttcaacattagattgtgttgcatcggcagca

SEQ ID NO: 179991 - DNA, 511 bp, Zea Mays
tgttcccggacaaacatcgaccggaggaaggcgacgagcgtcgggtctagctactgtggttactcctctccccttgatttcttcctaggcatgcactcttaatggcttgtgaatctctctctcctctcggtggtagctttgtttccttgcacatatgtagaccagctggcgtaaggcaaggaccgaagggggcgcaggacacgcctatatggctatatggtcgcgggcggaggatttgtgcgatgaacggattcctgcggatgcggagggctgttatgcgcgagcgagtctgatttgttacagggggaagaatttgctgactaacatgggccgctagtcgttgacagagacacaagactaggctggcgtgtgtgccctagtgctagggaacgcgcacaacacgcgtgagtgtggtgacacttccccgtggggcctgcctatcggcgctgacgtgcgcgagtctgggctggggtgcgggctatgctaggccggcaggatgcagagggccaac

SEQ ID NO: 179992 - DNA, 484 bp, Zea Mays
gtgatgaattgtgcaagttgcacctggaagtggtttcttcaggtgatttaaattatatctcggtggagcccacattacaagagcaaatagtcagggcccagattgaagacaagggtgttcaggttatcaaggaaatgatcaagcagaaagcagaaaaatacaaatgcttccgtcaggacagcaagggaattctatggtttggagatcgattggttgttcccaaggaccctgagctcagaaagaagatattggatgaagctcacctttcaaaattctccatgcaccccggcagcaacaagatgtatcacgatctccgatccttatattggtggaccagaatgaagagggaaattgccaagtacatatccgagtgcgacacctgccagagaatcaaggccagtcatttgaaggcagcaggccctttgcaacccctttccataccatcttggaaatgggaggacatctgcatggattttattgtggg

SEQ ID NO: 179993 - DNA, 956 bp, Zea Mays
ggctagatgctatagaggcaactagtgatgagctacttggagcctactcgaaggctgaagacgaagctatgacgatcgccttcgacgctcaagggaaaaagaggctaaacagggcttttgatgctatcgggtttgtctaccctgattactgttttcctgttcggaaacaagggagaaaaaggaaaattgctgcttcggcatcctctagtgcgtcgaaggcgaagaaagtgaaggtcttgacacgtagaccgagacgcattaagacggctaatgtgccaaagcttattgaaggtgtagaaattgccctttccgccatagaattaggtcctatcatgccactcaaaactcatacagatccgggcgaagagtcaaaatcagagaaggcagcagaacagctgaaggtactgagcctagcaactacaacagaactaccgaagccatcaagtgtttctgcagcgaccctaagaaaaaggagaatggctagtgtattagacgctattttggaatccacaaagatgtcagctcccgcttttgccgaagcttctagcgaaaaaactaaggatgcaaaagaagacgttgctgcgagcgcggctatcgctcctaccgaagctgggccaatagaactggtggaagaaagtgctcctaagggatctaaacatcatgcccccgaaccacctcataaagagctagaattcatcattcgacatgcttcgggaaagcagctgtctacagagcagattgccgaagtagagcattatgccaaggacctaaagtacccccgagggtccttggtatatagaggggatgacgaagaggacttcctatattgccttcctgataataaggaaatcaacgtctgccacgagatgatgaacaacatgggatttccgaagctcgagcttggtttatctgctatgtcaaaagatcaacttgcggacagccttgctttcaatagc

SEQ ID NO: 179994 - DNA, 828 bp, Zea Mays
ggggacgagcctccaatacgtccatgcgtgtaacaagttcagcaactcgtcgatcaagctgctcataggatgtcgctgcagagtcctggtatttttttaaaagcttcagtcatcacgcgcatcatctccttcaattccagatgagagacacactcatcgtcgttaagcttaagccccatgtccttgtccatttgattctttggtcctttcattgttagcataaaacagagacaaaaaggcaacaaacaatgtgaaccctacaattatctctcagggtggtggtggtggtggaatacaaaatatgaagcgtcttacctcgctcttacaatgttcttaccagcactacatgtggcaaatggtgaccggtgtgactgtccaacgagcgtgggtgtgattgcaaaggagtacctattctgctcgagagaaagctggagttctgggaaggctgactaaatatatatatgtggcacacaagtcagtaacagatatcaatgctgaataattgttccaagtactcgtcctagttgctggcctagaaaatataatagaacagttggaccaaggcacaagaaaggaggtacaagtatatgggtgcaacaagaaaacaggcttggggcaaaataatcacacaggtgcacagaacactagcgtttctggttatgtgctacccgtcttttttttgcgattttttcaaatatttttttatattttttctattttgcagcagcacataagaagataacacaccaagtttcagattgttttgtgcattgacgcgtcctctggaatttctgcaagtttgccctaaaatcggaataaatgtttgga

SEQ ID NO: 179995 - DNA, 665 bp, Zea Mays
aaggagatgggcgagagcttactatttgatgaggataaaaaggtggtaattagagatatcaacaactgacaccaccagtttccccctatggaacctacttccaccactttggctaatcaagcatccacttattcaacctcattcatctcatttcaacatctactacccctagtgcaagcataatttagaagcggagtttgtagctattgaggaggaggagatcacttcgagaggaaagctcccaacacatttagattgtcaatacacctcaatagatctaggtcacaccaaatgttggggaaatgatccctggtccctaggacctgccagtcagtgagcgcgctgaaggaagagcccttgatcgctaggtcctgttactcattcggaagaggcaggtgtgccaaccaaggaaggacccaccctcggtcgaaccccgcggcacaaagcccggggccgggcgtggcgaagcatgacaagggaggacgagcatttcgaaagggaaccactcgagtggatcctgtccccggccctagactgacccaccataaatgattggccgcattaaccacgcctggtgccgaaccacatcatgggtgccagtccacttcccactcatgacctatggacccctcaggtcgcattgtactcatgagctacgagcccct

SEQ ID NO: 179996 - DNA, 536 bp, Zea Mays
ctaaaacatgatcaaagagagcgggagtagacctgggaatggctggccacggtgaggtctctttcacggtggcggaaacccgatttggggaaagtctcgaattggcgagctctggtggccgatttggggtacgagttggtgttttggttgcttgactaccatgtggagccgactgcacactcaatttatagattccaggggtggtggcgcctgaattggagatggcgcggtggcggccggagaggaaagaggtcactggcgcaagtaaatcgtggatgctatcgtggcaagaccaccggcgacgagtggatacaccaaggcaatgtagtgcgacgtggttaagggcctggggcgtggcacaatcgccgtgaaggacgcaaactctagtgacggccgttaggccacatcgccagcgcaaatggtcgagggatagcgtggccacagtgttccgaactcatctgtgacgagatctttttacggccgaacgcaatccacctcccagcgacacgaatcacggtgatcaacgcgaatctgag

SEQ ID NO: 179997 - DNA, 274 bp, Zea Mays
ttgatcagactcttgaagatatggttccagaggatctgttatcagagccagcggatggtggtgcgacggatgtttgtgctgatgtgctcgacgccgggttggggtcatcccgggcagcgtcccgcgcctcatcgaccttggagcgtggtcttgagggtcaggaaactgatttggatcgtcttgttcccatggaagtaactgagggaccttcagccttagaggcggctactgcagagaacttggtcctcaaggatggtgttgacacttacccagc

SEQ ID NO: 179998 - DNA, 314 bp, Zea Mays
tttggtttcggaaccacttcttccgagcaaaacggacaagtttgctctcagcttctccaaaataacctagcttcttcatcaaaatcatgtcctctgccgccacagtaggttttccaaattcaatgtggcttggcttcgacgggctcaaaatattgtagtcttcctcagcttcatcatcactcgcgtcttcagctgcagtctgctcaacttcggtagcttcacctttggaaacaactttttccattatcactagacctgatcgcctcatcatttttgatattggcgctatctttgttatctcagcatcatctccc

SEQ ID NO: 179999 - DNA, 506 bp, Zea Mays
ctttttccaaaatcagagcggcatccgaaggtccttctttaatatccttttcaacagtttcaacaggccctattactgcgggaactgaggcctcaacctcagcttcaacacgagttgcaacagcttcgacagtctcctttatatttctttcactcatactgggcacttctataaaggcaggagttggtacccttgttgactccatgatagcgtctagtacgctggccattctcctcctctttggagttactgcaggaatttttgatacccctgtcaatttcctcaattctggctcttcagccgattttgcctttccttcggtaggacacttcggcacatcggctgttgtagcttctacctgttctgctatcgtcttcaaaattagttctccggttgatcccactgtggcttcagtagaggcggggaactctggctcaacagcggaagaatcctcagcaagcttcggcactctggctgtttcaatgtacctaggccggtgtgtcaag

SEQ ID NO: 180000 - DNA, 381 bp, Zea Mays
acttgaaccttaaagtgttacccctccagtgctatgacgttatcttgggtatggattggctaacttcacgaagtccgatggaaattcactgggaagaaaaatggttggcgttcacagttggacagcagagaattgtgttgcaaggtctggtcccagatttattcacaatggatcacatttcagctccccatctctgtcacttggaaaagttggatgaactctggtgtacagttgaactacatacaaaggttaactcagatctcacaactgctgtcccagaggagatacagcgccttgttcaagaatatagctccctttttgacaaaccatcaggcttgcctccccctcgttctcactgtcactctatacccttacttccgg

SEQ ID NO: 180001 - DNA, 835 bp, Zea Mays
cttttcgtagtcgtcttgatcctgaaatggttgaagcattgatatgcacaaaagactgggttgcttcagaaagaagaggtattcttgttggttttgtgagtttggttgctagtctatactaattatgctggctgatttttgactgtttttttttaatttacagatagtaagattggttcaattgtctgtgatcttgatatgatagagatgcttgcttcaataccaaagtttgaggtacacataagacaatgtttaccttcaatatactttttctatccaagttgctcaattgattacaaaaaatgcatgtactttgcagcttgcatctcttttcagcttgttgtttaactttgatactcattttaaattcatggtttcatgttgataacttataggatgaccaagtggcacatagtgatgaagaggggctgttgggcactgatctctgaggcaaatgattgatgaccattaaccaaatagaaataggagtacgttgtaggcaagttcgcaagtggcagtacgcaggactgcaacaggaaacttatttattgagtttagaacttagatgctggtaatgttgcagacctatattatctctatccggccaccaaaacatatttacttgtggctgtaatgttgcagacttgcaccaattaagttagaaactttataactatattgttctgtggcaactttggctgaaaatgttgctttatgtttggtgtaatgttgccataatatgtctgttgaattatttatctgttctaatgatgcatgcttaactttaatggcaacatgttgaccaattaactatataataatggttgcatttgtt

SEQ ID NO: 180002 - DNA, 540 bp, Zea Mays
aggaaaccttaatcctgctttaaagaagcttttgaacacaaccacttcattcttttccggcttcggagtaatctcctccccgccaaaacgaactagctccttttttgtttcactaaagtagcccagcttcaccatttttggaagatcagcttcagagatggtggactttccaaagtccaaatgactaggtttgcttggcatcccgcagttgtactcatcttcggaaccaacttcttcaacatcagcttgcgttgcttcggcagcaggtgtgtcttctgatggaaccagcccggaacgccccatcgcttcagaaattggaacagtttcaatagcttcggtctcatctccatcatgctcaaccctagcagtggagcgtattctggccatttgattttaaattttcttgaaaaatactttggaagtcaataaccttttttccgaagctatcctcgcgacgaagcaaaatccaaactggagcttcgttttgaatgcaaaaatcaagcttcggctatgattaaatttttggcagcaaaacagtgc

SEQ ID NO: 180003 - DNA, 1107 bp, Zea Mays
cgcgacacgacgccgacccgttaaccacatccgcaaataaacgcgtatagggcacggctcgtaccgtcgcgtcgacgtcgcgtaaccctagcatccactattcctctctcggcctctccgtctcctgtgggcgcgtggcggcgacaggcgactcggcttcggtgtcctcgcctccggtgtcgacggagcggtgaactctggtgtcctcgcctcctgctcctctcctctcttgcttcatcctctctgtgaactctctacatctctccatcgaccctcgctaaccctaaccctaaaactcgatcttcgccaagctcgctcctctgcctctaccgtcagccatccggttcgtggatccggtgctccggtgttgcaggtaaggttttcttggtcttgctctcgtctctctcttaatcctagtcctagtcttcttgttcttgatcttgttgcttcgattcgtcgaggtgtgcaccgtgtgtgtgcgccgcgcgccgtgaggagccggagaagccgaccgaggcagtggccatgtccacagtctcggctgacgacgagctcagtcttgatgcggtgatcgaggagcggaggcttgaagcgcagaacgaggcagacgatgcccggtgcctcctccttagtaccacctccgctggtgccatcgatctggacggcgccggtgcacaaacgaggacgggctccacaagcccgacggccgacgcgagcacctctgtccctatgcctggtaaacgttctagaaggagaggtccgacctctaaggtatggctgcactttgaggaggtaactgcgattcaaaatggtaaggaggtaagagtatctgccatttgtcttcactgcaagaatagcatgtctgctaaatcttcatctggaactggccatttgatccgacacctggatgtttgccctgctaagaaagaaaaagacagatctggaaaaacacagtctttgcttaaatataatgcagatggacctgttaatcactgggagtattccccttctgttgctagaactgagctttgtcgtttaatagctaggctagacctgccactttgttttggtgaatctagtgcttttcaggagtatataacccatgcc

SEQ ID NO: 180004 - DNA, 638 bp, Zea Mays
ttcaaataggaggacgaagagtggctagtacaactcttgcccaagatggtagctctcgatgaaatatactatagtcacctccattcataagtccaaattaagagcaaccaaagccaaattcgagaaattaagtatgcataagcaattacaagcaaggaaattgtttgattagaaagcaaaattagaaaacccaaaaaaattcccatcccaaaaccctaaccctaagatgagaagggacctacctagttcttgttctatggtatagcacttcatagcctactgcaatttttaacaagaatacacatacttgaagtaatcatacagatgaaaacaaacaaggaaaacagaagcatgtagagaatagcaaaggaaaaaccaatcaatttatcacagacacgctctgctactactctaactaatgtaacaattggaatagcgtcaggagaatgggtagctacatcacaaagtgcagccaccactcccatccgcacattttgttcataatccaacaatctgtcacaaagtgcctctgccaggaagacaatcatcagacaatcatcagaccatctacgagcactttgttttgtattaatctttgagaaaaatgtgacagtttttgttcgcagcttacatttaac

SEQ ID NO: 180005 - DNA, 1980 bp, Zea Mays
atgtcaaatggaatgaggagaatttaaatgacattgagttaaacaaaccagaaagagagaagatcactgagcctaagacaccttaccaccctatgctcgatgaagatgaaggtattaaatctggggtttgcacactaaatccagattgctgctgttccgtaatgcatccctatccattatcaaacaacataaatatgatgacccactctgatcagcagggcctgtttcaccattacatctcagtgaaagttcagtggataaatctgctcatgctgatgccataaagaccgctctagctaaagctgtttcaagtgggaagatttttgacagaaatagttgggatacgtgtgacagtgaagaagccataaaacaagggaaaggttatcaatttgacatctttgattatatcctattatgcatttcaaagctcaagttggagtactcatagctcttcttatcattagcggttgcttgtgcaaattctttatcatcctgtttccatgtaacaatttgtcttctaccttcattttatttttgccataataaatccaatgaaacgacatatgaaaggaggtagcataagtgtttaagtctcaaatgacctgattttgttatatgctaatgtgaattttacagatacctttagcacactcttcaactgatttacatttctggatccagaagatattaacacatagaaacaacaccttgataatatcatgatcaattgctacatatattaatatcaagttccttccgatcagcctgctcggttttctcttcacttcattcagaacttttctaattcacggagttttaactattaactgcatggtgataatagaccaaaattgttcaaaaaaaagggcacatccaatgccggagactcccacatcagtgggatttggggaaagataaactgagacaagcctttccccgcatgcaaatgcagaaagaccgtttcgagcctgcaatgtggtgactcaatgagacagctccaccactgcaccaggcctgcccttctaatagaccaaaatttctctattgcaatgaaaagatgtgaaggcaacttggtttgatacagtagcttcactgtttttataggtggtaaacagtgcttcatctaagatcttgcacggagaaactttaccccatgtatttttttcctatcgattgtgttgtcttcggagcaaggttgaactaacacattcccctgtgtagcttttgaggaacaatggaaggttcactatgatgaataccataagatgaaggaactacttgagaagggaaccatgaatgatgactccgatgaagatgagggtgacctagggaacaagaagggttgatggttcgatctgtcctggtctgaactcgggatgtgacttacaaaatccacggtatcatgggaagtatgttgagcacttaaggactactatcgacttattagctatgcataactgcaccatcatttcctgcacaaaacttggcagttccctcccttaggaagtttatgccatgcttaagcatcttaccattcaaattgcaaccgagagtgtttctgtacttgctagctcaaattgtaagggtgtgtacaacgggaatcttgagttatgtgtttgattgtgtctagagggtgcaggtaaaaaaaactctagagacgtctcttgagtctcgagtctcagacgaaaacacgtctcttgactctatgctcggtagaagatataattgattgatgcattatatttattgtgtcttaaagaatatagcaacatataggttttagacacactcatattgtgtcttagttgtgtattgtgtttgaagtaccgtggtttagtgctgtacttttatgatgaatgaccaatcctgttgctggacgagcatcagggccttcattgagcagtccatggagctgcctataaattagcaaggctttctatggatttgggtttgtgtggattcaagcgtgaattcaaaaag

SEQ ID NO: 180006 - DNA, 892 bp, Zea Mays
ctcttccttatcttgagtacatgcgtttttatggaaatatcctactgccgcctaggcttcggccttatcctctgtacgcagcacctcacgtccctccctccccatgggccctagccttggtggctgtgcctcccacctccgttcttggacggtaaagtatccaattcacatagactacttatgcacatatgcacacataaaatccagatcccccatctagaatccaacggcacttgactcttgcaaaaagaacctcccgcaacagctgccaacggttgttgctaatttacagaaaccccccacacccacttggactcacaggagaaggcatttacgtgctcctgtacccagctgctgcccaacgtgagtacagagggttgtcgagctcgtatgttgggagacatcagcgtggggtgcgtgtcccattgccgcacgagcaagtgattgtcgaggcgcgttataatactcccggcatcaaggcacgaccgtgtctgtacattggggcacggtggcgagctatggtccattgtggttgaggcgtcgagacgcagacctgtagacaaggtgtcgggacgtggagctgtagtcgaggtgtcggagtgcggagctggagtcttggcgttgagccacggcggcgccgacagctggtcgtcgagatgcatcgcaggagcatccaccatcgggagaatacgaacagctcgtggcttggaagccttgttctctattggaagacaaggtaaagaaacaaagatcgtggagtgcaggaggtgtttttttgcaaaatagtcaggtaccgttcgattcaatatgtatgatctggatgttatgtgtgcatgattcaatatgtatgatctggatgttatgtgtacacatgtgtatttattggctatgt

SEQ ID NO: 180007 - DNA, 467 bp, Zea Mays
tttttcccgaagcatgtcgaataatataattaaggtcttcggaaggcacttcgggagtaggggcggcaactttttcaggcaaaatctgttctatagcttcttccaacactgccttttctccaatttccgagggtttctccttggtaggctctgaaggcccagcttcggcgctagcctggctcattgtagcttcggcttcaatcagttttgtttcggtttcaatttgcactttcgaagccttggcaatttaacctggagtagagcttgaagtttttatcgtctccagcacatctagtacactggccatcctttttctcttgggggtcgctgctagacctttttgtgccttcagcaccgccactcctgtcgaagggcttagaacttctaatgttttcgtcccttcgattcttggttcctcaattttgtcagtcttcggcattgcagccggctcttcaatcctctacgta

SEQ ID NO: 180008 - DNA, 733 bp, Zea Mays
cgacatctcaaagtgagtctgcttctcagcctcgggaagattttggaggggagcaattaaggcctcaatgtcctctaaagagggtcacactctatggaccgggctgccatctcgaataggaggattggaaacaaaatcagagaagggactctgcggaggcaggttccatgcaaagtaagataaggggcaccaacattcgaaactctgccccttagcatcatatcaagtcagcttagcaggtcctcattcggaatttgtatgttggtgactcagatagaatcgttgatcctggtgtacaagtaagcagggtaggctctgtccttcagaggttggatgttcttgaagacaaagtcagaaaccacggcttcagcagttaggcctctgtccttcagcgagcaaatctcagcaagcagcaccttggcttcggctacctctgaataagtgggggactctacctagctcggcgtgcgaatgtcgggctgcctccctgatcgagggggagcgacttgttgtgattctccatggtgaaccactcaaagcgccatcccttgatgttgtccttgagggggatatcaaggtattctactttcctcccccgacgaagctccaaactggcaccaccaacaagctgatgttgtcctccggccatatcgggccgacagttttaaagataccgccagagtccaaagtggggaaggattccaagaaaggcctcgcataggtgtacgaaaat

SEQ ID NO: 180009 - DNA, 360 bp, Zea Mays
tagctggcgttacagaggtagtaggggggatagtgatattccttctccagctctatctgctcttgttagccttcaggatttatctataacagattttgatcaggcccttgaggatgtcattcctgaagatatgctattggaaccgactgttgatgatatgatggatgtttgctctggtgctccaaacgtgggattagaggtatcccgggcagtatctcgcacatcgtcgactttagagggcagtcttcggtgtcaagaagctggtcaggattgtccgactcccatggaggtggctgaggatccttcagcctcagaggtggctgttgcagaaaatccagcccctaagggtgatgttggcgg

SEQ ID NO: 180010 - DNA, 607 bp, Zea Mays
ggtgccgcgtaatgttcgaggaaggttacgtgagggctcgcgaggcacgcgcggtgtgcggctcacagtggaattgctcaccggagcagcgcaaccaccgaaaggccgcacgcgagcgtggtcgggtgggggcatcgccgctctttccgcaggtgcgtcgctctccttgggtctgtgaagccgttgcttgatgtatagtctcgacaattagacgggtgcacggcggggtacggggttggcgaacatcggccatggctccgccgcgtggcgggagcgcgccgccactctccggtggatacaaaacgagttagggtattcaccgtgggatctgcaatcaacgtcccagattaggacttagatacccgttcagcgtggtccaatcgtgaccgtcagcttcggtttgtgcgcgcgggattagatccgcaacttacctcttcgcgccttgaatttgcaccgtacatcccagatcctatggcctggggtggatcgtgggtcctttgaatatcgggcgtcggatcttgaaccgatggccaaccctaaataccgactcgcagcataggaatgtttatcctggccgtaggatctgatcttgacgaccagatttctc

SEQ ID NO: 180011 - DNA, 353 bp, Zea Mays
gcatgtatatcgaggcgaacatgttaaagacacaaccccgatttgtgatttcgttgccatggtgacaaagaagaaggatggtctactccccccgccggtgcctctcagaaggagaaataaacagttaccgcctgattttatccctcgccgaagtagcagattggcaaagcggaggaccccaaatgatgcaaccaggcagatccaaattgacttactaagaacaatggatattgttgatgcggatgaggcattcagcgatgaagctcttgaaaaatatggcaggctgttcaactcccccctgtctgaatcccatattaaagccttggctgctttgttcggatggtcagtgcctg

SEQ ID NO: 180012 - DNA, 677 bp, Zea Mays
ccgcgacacagacttgacgccgacctcgccagagccctcctcgaagcctcaacgttctacacctatggcatcccctcctccaatctcggaggtgattcatctttctcttggttttaggtttttttgtaagaaaagatcccacaacatatacaattctgacattcatatatatatatatatatatatatatgatagatcttttggatctcccaaaaaccctaaccatagatcaaatcacacatgcatattgtaccttactagatccgatccccatcatgttccccgatgaagctttgcactagggcaacagtggtcaggaaaacaagctcgatgttggcgatggacttccacaacattctctctagattggttagggtttgaggtggggaaccaaaaacggctacgaacctcatactagagtcgtcaatcccaacctctctatttataaggctgcacaaagggagcctaccaaccttatcttggattggacgccctcgattaggcgcaaggtcaaaaactcaattgccaaccagtggagatcaattctaacaatataatttttttacacccttaaatatatacattatatctagatacatgagagaaaccgtgtttctataaaatctagagcgacttgtaattcaaaatgaagggagtataatagcgaaagtctgtta

SEQ ID NO: 180013 - DNA, 643 bp, Zea Mays
catggattcacgcgcgccagtgctcttcctttcctccgaccgccgcgcgtcgtcatccaaattcccggccgcctctcttgcttcctataaattgagccctccgacagccccgcaaggtcatcacacacccagccaccaaaaatcactagcaatcgttcgtcagagagcttgaattttggttttcccccaaactggtttccgccaccgcagaaccgagctcaccgtggccagtcctccacaggtttaatcataccatccttgttcttgttttagcatctctgtgtgctggtgatgctcaccaactcgcccaattgagctaagatcccatgaatcaccgggaacgtgtagattgttagttcatccgcgcgctcaccgtggccagagacattggtatagttgtttatgaaattaacttagggaaaaccttcactaggccctgaatttggtttagaccaacgtagagcgccagtacttgccccaatcgaccgggcctacgagctcgccggagctctgccgcgccgtgcaccgtcgaggacctggcgcggtgaaggaatagaacgtgaagggcttttctgcaaaccatcagcgactcagtgcaatagtaattgaacccacttcggattgatcagtaagccgaggccct

SEQ ID NO: 180014 - DNA, 489 bp, Zea Mays
ttgagttttatacgggacatcggatcacaatctaagggttggaaatatagtagtgacgtggatagcacggttgcgcggttatgttcagctgattaatatagtaaatgccctgtgcattagccccggggtcatcccgcatatacgcctgcgcgcacgccggggtagccaagcatgctgcgagagtttgggagaggaacagtgggctgcagccgccatggacccttgtcgatggtgttcgcttgtgcgtgaggaagctgtcgctcgtgtcaccgtgggaaataccgccccattcccgatgaactattcgtcggagttctcggaccaccgccaaaccgcctcccgccatgatcggtggtctccgcgacgtgatctctggtatgtatagggaaccgttgttttgattcgctatccgttttgcgtagcgcttgctatagaaaggtagcatgcactggtactcggttggcggagcgcctgcggtcacgccaccgc

SEQ ID NO: 180015 - DNA, 368 bp, Zea Mays
actcttgaaaactactacttcatcattcttcggcactggggtggtttcttctctggcaaatcggacaagtttctttttagcctccccaaagtagcccagcttcatcatcatgggcatatcagtttcggatacagtagatttcccaaaatctagatggctgggttttgttgagatcagaatactataatcttcttcatcctcttcaatatcttcttcttcagcaacggtctgttcagtttcggcggcagaagtacctttgtccgttgttccctctgccacaactagacctgattgtttcataacttcagaaattggtgctgtctcggtaaccacagcttcttctccctcacgagtcacccttgcggtcg

SEQ ID NO: 180016 - DNA, 518 bp, Zea Mays
tgacaagaagctaaagaaactcgcccccaagaagaaaatccagaagaagaccaccaaccaaggatgccagacagagaagaagaagaagaaggcccctctagccctacctccccccagaatagatgattggtctgacgacgaggatgtatccctagcaagcctcgatgatcttctcaaggcatttggggacaccctagataaggaattcgctagtacctcggggaacgctctcgtgtagttccacctgtagtagtcttatgcttgtaatgtgatggtgtaatgaataaaataacttggttgaaaacaatttgcatgtgcataatagtgactctcttccctggcagatggcttcggataaaaccacgcctaccgcctctgggattggagcagggtttcccctgagagcggaaggggaagccgttagagaagaaagtgaaacccacctccccgcacctccaccactacccttagacctagcccaagttctagccaatcaaacccgactcatcgaggtcctc

SEQ ID NO: 180017 - DNA, 1768 bp, Zea Mays
ttcactcactcctgctttaggttcttgcataagaacatcctccgtagtgtagccagtcgcctccaaaaacaacgggaatggctttttggagaaatgccagcaaagtgtcagcaaattgagaagatactttaaatcagcaattacttcagctcctttgagctccacactatcatttccagcgtatatgcttgctacagataagtttccctgtaacacatttcagaagcagagctatcagaaaccttgtaggagtactggcaatcacagtgcaatctgcatttttggttcatcaaatacaggattaatcatttgtttacgatagacagctctgccctggcccctggttatgtatttttacagaggaaggctttaaaggatgacatgagcacggtatgagcgaaatgtgaaggaccaaactatatccactgcctagcttaaatgtacagcactccacattggctttcaacctccaagaatcagaactagttcaaacgggacaagattaccaacaaagtgtgagccaccaacctgtctcttgaggaggaaactgatcccgaaggcaaggtcgccgatcggccacttcccaagggtctctgaatacgtgaaccgcagcgtctctgacagcgtcgagatagtctcaagccaggtggcaggggcgcggacgtccctccgcgatacacggctcctgctgggagaaccctgtgcggccctgggtgtcacatccctgctatcgctgcactccccttccttattcagcctctctgtctgcaggcggcggttcagtgtgtagtaaagcagtgccgcggcccccgcggcggttgccattgtcgctgtcgccatattgtcggggagtagtctgcaggggcttcgtcagctgcaatgagccccggatggcctgtgggtcgcagcctcctgtgcagttgtaacccaaggttatcaatggcgcagtcagccagtcagataacgttacttagcagcccccgaggcttccactggtgatgcgatcttgatcctttggggcagggcagtatgaagtcaaacctgataccacagacagataaaccgagtttttttattccaagaaggccatcgattgggcgggcactggtcaccgatagctcaccctccccctctcctttttttggcagtggtatgaacagttggaccatccaaccacatcccatcaaacactactagtacactagatagagtaattcacacaaacaactaacaggttgaagaagtccaacgcatcaagtgaactaagaagaaatcgtccgacgcggaaaaaggaagtacggagaaagaaaacaagaaaatcatccaggtagagatattcgattggagacgttacctcgatggctcaacaattgcgcgcggcagcggtcgatctgattggcctgggaggtcgaaacccgctagggttttgggaaaagggaggggggagcgggagacgagtccgggtgagcctacctatcggtgcggaatgcgcgggaggtggggagtgagagagaaatagggagacgagagaggaggcaggatatggtgcctttaattctcgccgaatctcgcggggcagtggcggcggatggggaggggaagaagggcttccgtccgaccggacgaggcgcgtttcctttttgccctttccgggaagaagcggttgcgcttgggggctttccggacagagccggttgccgatggggtccgcctctggagccgcggtgggtgtgctgctgtgctttgcgggtgcggcaggacaaagcag

SEQ ID NO: 180018 - DNA, 598 bp, Zea Mays
cagccgcactcgcctcgctctctcgcgaccgctcttcctctggcaaacggtccccgcccgtcagccctttcgtccccgcccgtgacttcaccggcaggatccccgccgaccgccccctctctctcatcgccattactcctgcaccagtgaagttaggcaccgctccgtcccccagttcactgtgctcgcatcccttcacgatagtctgcccaagcggtctcatccccagcgctgtgcaccctcatcgccgccgcggtgtccctcgcctgtgccacctggtctttggccgcttccctccccgggtgcctataaaaaggaccgcccaagctccacctttcctcacactgccctcggccacctctctcccccttcctcgagctcaatcaagccagcgtcgccgctctctccctccgctctggtgagctctccctcccttcttcagtggcctagagtcgaattgatttggttcacaagtttcaccacttcaccacaaacatggcgcacccacctccctcacctatcacacccgtaggccttgccagcgacctcaccgccgcgggcacccgccacctcaccgcggaccgactgtcctaagccc

SEQ ID NO: 180019 - DNA, 503 bp, Zea Mays
cggtctaggatatatatatctccattaacttttctgtggtcccatcgatccacaaaaattgagtactaccgtgaagaactgatcaaggggagggattcgccatcaccaaaccatggcggatgctagctggggatctcgtgggcaactggctgggtggtccggcggcaatttcatgtcgtgatacctccgccgccgcatggtggtcgcgagtcgtggccatgaccacgacaccccggcgccatagctgaagagagagaaccgggctgtgccatcgccggtgggctcatcgttgtcgcgcccccgctgtccaacagttcggtgccgtatcgccactccgccttcctcaccgcgggtagaagaccgagcagggcgccgccgacgtcatctgcggccatcgccgccattcagtactagcgtgaagatcccggggatagcaaccacccgtcacccgctattccaagttcactgccgattcgatctctgggaaggcgctcagagcaaca

SEQ ID NO: 180020 - DNA, 492 bp, Zea Mays
catctgcgcgcatcctcatccggccgccgctcgtggaagaaaaatctccactgcctaactctctctctccctttgctatttcttcaccgcaggggccatcggccttatctcctggccacggcgctcatcttcccagcagtggagctcccatgcgcgctcctccttcttcatggtcgcgtgcccaggtgcctgctcgcctcagtccctctctgctcggcctttttctcctggccgtcgagctccctcaagtttccctgttccagccgcggacgtccatggtccacctcagctcgtccccatggcgcgcgccctgacggagttccggtcgtccgcatgattctctctactcccttgccgcggcacccctgatcggccgcgcctagccggatcccctttgagcccgacttctgctcgcccatggagtttgcccagctccccggcgtgcgcgaagtttgccaccctgcgcacatcttcttcctctatcgcgccgca

SEQ ID NO: 180021 - DNA, 332 bp, Zea Mays
cgagttttcgacgccatttttcctcttcgggtgtcgtgtgatgagcggtgagggcggcgggggtgctgcacgggtgttagatgacttagatccgaggtttggctctgctatcctggttcgaacgtggctaaatcttcctgtacgaaacctagctgctcagcccgccgtcagataagctccagtccacagtcggatttcaactcaaattttggccgtccgacaacatatatgtttgctaaatcctttaacgccagtcagattctgactcgagtttcggccgtttgacaagatatgtaactgcgtactttgatgccaatgagcttgctcagtcc

SEQ ID NO: 180022 - DNA, 797 bp, Zea Mays
cccggggtggtctatcccccaaggactgagtctgacatccaggaaaacccttgcaacaaataatttaagatattgaaacattctgagaaaagcgatgaagcattgccgcagcaagtgctccatggagtagaggtcctgttggccaggctgctgttactgcacatggcacctaagcttgtgtcaacttgatgatgacacaatcacctccagggatgctcttcctcttccccttgacctactccttgacccatgaggaagtaggagcagccgaacaggacagggtcagcagcccagcaaccatgatggacaacttcttcatgttaagagtgctggtggcattgatagggggcgtgtatgctgccatttggttcctgccaggtcagatctctagcatctcgaatttggcataaacagcactagattggtgcttgaagagatgaggtgtgaggagagaggagagcacgggaggagatagaagcaaatggggaatcagagagggatgaggtgtgtcgagcaggggtataataaaaagctagtggttgtggtggaggtttgatggtggaaattgtatgttttaattgattggagaagtggtcctatgtggaaggagtggccaatgcatcagacacacgacgaggagcatttccacaggtccattcatgttcctttgcagccaacattttggtataaagaaagccatgcataaagctatctgatgtgaggcaatttactcagttccaagagtatataccggtttgcgtggcaaaacaagctctgtgcaattcattgtccttttt

SEQ ID NO: 180023 - DNA, 683 bp, Zea Mays
cttcgggagcaggagacttaactttcttgggcgcattttcttcttccaaggtcaaaggaatagcttccgaagcatatgcctcgatgggagctgatggcccagcttcggcagtatctagtgtcataccagcttcgctagatttctttgggatttcacccttgctatcaggcgctaaagcagggatttgtacttttgaagattccataacagcgtctaatacgctggccattctcctcctttttggagttattgcaggaactttggacaccttcggcagctccggctcttgtggcgggctcaaggtttttggttgctctgctgatttccttaattctgttatttcggccgtttttccttagcttcggcactttggtcgtctcggttttctcctgttccactattaccatcggtttcagcacttcggccgattctcccttggcttcagcaagagcggggtagtttggctcaacagcagaaggcccttcagcaagcttcggcactttggccgtttcaatatacctaggccgatgagtcaaaactttagccttttttcccttcggcgtggtagagatacccgaagcagcagcctttcttttgtttccctgctttcgcgagggataacaatagtcgaggtacacaaaatgaattacatcaaaaaccctgtttaatctcttctttcctcg

SEQ ID NO: 180024 - DNA, 464 bp, Zea Mays
cggagtcaaccaatcggggataagagttgcgacgttgtggcagcttgcactctagtggaagaccatggtgaacgacgagctggtgacggtaggctattgactatgcgatgggctaataatgacagcagcatgggcgactaggcagcaggctagcgacagtgggcttatgactaggtgacgggctggtggcgatgattgggcgacaacaatgatagggcaagcgttgagcaggggttggacgttgtagacctgtggttggtgtcttcttctgtctgcctatgtttcagtcgatgtgggttgtggtctaagatggtgggctataccgtgtgggttagtgatggtatgtcgtggtgatgtttatctattttggcctcatatacattataccttttttatttatagtatatacgaaaggtaggtataaagagtttcaaaaattaaggtggggttatggcccaccttgc

SEQ ID NO: 180025 - DNA, 319 bp, Zea Mays
ttgaaattttagaacatgaaccttgatccatatcaacctgagatcatcggccattagactcaacatatcaaattcataatattcccgtcccttagatgtatacatccctttttaaagtgtcgaccaacgatccatgaccctgctcctcaatccaatcgatccaggaacattttgactatggcccagtcccattcttatcgacactgcctgatccagtccgcttcgagacatgtcgtgatactcccccgcctcgcttgtcatcctcatgacgctagctagctcggcatgtccgatttcgttcgtcgcgatgatgtgaccc

SEQ ID NO: 180026 - DNA, 479 bp, Zea Mays
gatttagggagcgcaggcgtctcaggccctggttgcagacctcaatgcaagaatcccagcggtgacctgaataccaggaaggatagaacagtacgccataccgagtgtatgtccacgacaagctgaagggtgacatagggctcatgatgacgggagacgcctcgtttcacgcgatcgctccgatggactgatccgcgggacccacacacactatcacaaagacatcagcagcatactcgctacagggaccatatggcggatgaacaggatggagtgctataccacgggaacgacaacacacgaccctatggacgacgtcaggagaaccacgcatccagaggcagcgggccaagctctcttccagtagaatacaaattcctattgtaatgtcctcccttgatttataaaatggcatgacagtctcttttctacacacgagcacaccagttgtaacacgcccttagcaatactatgatcag

SEQ ID NO: 180027 - DNA, 688 bp, Zea Mays
tggtggtctggtccgactgaaatataccttcagatttagggagaagtttgatgagccaaacgacgattggctgaagtgtattgaagctaacagcgatgagctgcttggagcttactccaaggccgaagataatgctctattcgcagccttcgaaggtcgagggaagaaaaggctgaacagggtatttgatgctattggcttcgtataccctgattaccgctacccgctgtgaggacaagagaaaaagaggaagattgttgctttggtcaccctagttgagcctgtaccgaagagcaaaaaggtgaaggttctgtcccaccggccgcgttacattgaaccggccgtggtgcctaactttggcgcagggtcctcttcagcagccgaagcaatacatactgctccgattacacagagcgctgaagaaccaactgtaatgtcgaagacgcatacaattaagccagtcgaagataaggttgataaggctgaaaagccaaaggttgaagagataataaaaatgccaaagattctgagccctccgacagaggcaaatctgccgaagacgcaaaaggcttctgctgcaactcccaagaggaggagaatggccaacgtgctggatgctgtgctggaaactacgaaggtgttaagacctgctgctacaaagaaagttgctgaaactacaaaaacgcag

SEQ ID NO: 180028 - DNA, 963 bp, Zea Mays
gcaatttcataattgtggttgcactataactgtagtttttcccctgtttggttgtggaaatctttatgcaggcttaaacaatgttcaaagtactagctagtacattgattaggcgatgtagatttacacaagctgataaacaaaaaaagtggagatattctcatctctttctaccagcaaggttcaagaaagcactaagcgttgagcgagcgttatggtggtgaaaaagcttaagcgtgattaatcgtgcttaagcatttttgttaaaaagagaaaaaaatacatgatattgggccaccctgcagcaacccttaacccccacctcctctcttcatgagtctgcagcccactaggcccacctgccaggaggctcaacgcaaaacccctcttccgtgatgacctagtactctgctacctccttccacgccccgcgccgccgccctgtgctctccgcctccctctcccgaagcctatcctcctccgtgccggacgctctccggctccctctcccgaagcctctcctccctcgtgcgatcttcacctctaccgcgaagccgctccgcctctctctcactaatctactgcctgcaaccatcgtaggtccgtccgctctctctctctctcgtcgatccgtcgatttgcttcctgctggattgaccccggaggtgttcctcctcttcctctccctcctcttctcccttaaacatgccggatgggcacaattaagcagggccagtgcttaattgcccgcttagtaggtaagcgatgcgttgaccctctgctcagcgcttaaccgcgcctaatcgcacgcctaatcgcgctttcttgaaccttgtctactagtactagaaacataagttctctactaaaacatggatgtgactgcatataacacaatgtaaggaaccaaacacaactgtatcagtgcacaatgattacataaatcaatttacaatatctctg

SEQ ID NO: 180029 - DNA, 479 bp, Zea Mays
cgccatagtgcctgaatttggcggtgagacctcttcggctattgtagccaaaggacctgctcttatgcagaggattgaagagccggctgcaatgccgaagactgacaaaattgaagaaccgagaatcgaagggacgaaaacattagaagttctaagcccttcagcaggagtggaggtgctgaagacacaaaagggtctagcagcgacccctaagagaaaaaggatggctagtgtactagatgtgctggagacaataaaaacttcaagctctactctagggaaaattgtcaaggcttcgaaagcgcaaattgaaaccgagacaaagctgaccaaagccgaagctacaatgagccaggccgacgccgaagctcgaccttcagagcctgccaaggagaaatccttggaaactgaagaaaaagcagcggaagaagaagctacagaacagattctgcctgaaaaagttgccactcctacacccg

SEQ ID NO: 180030 - DNA, 462 bp, Zea Mays
gctgtgttggttggttctttgagagtgtggttgggcgaatcctcgattcaggttgtcggttaaagacggtggttggcttcgagttttatttgtcaggttgcactagctatcgctgcttgtagcaagttatcttggcttcttcgaagctagttatctaaagattgatcctacatcatgaagaccgggcatcgtgacacatcatctggtatcaaagcctcagttgccacggtaggattctttacccttagctacatatattttgtgttcgccctatccaccaaaaagccataaaatattttttgccatagccctttgtttcaatctgttgttccagtgagttttgttaagtttcagtccttagagtctttgtttagttgctggtcactctatcctttgtgtttcctttgagcctcttatatatatctgaaaatatccacaaaaagaaaaatctgaaaaccctca

SEQ ID NO: 180031 - DNA, 532 bp, Zea Mays
tgcctcgtcgcccggaaaccgatgctttggacgcttgctgcgctgcttgattgccaaaggcatcctcttccttgtgttggcgtcggctggacctggactggactggactggactggacacgagtggatcatcagcagggggcgtctgcctcgctccacccagtggtgcgacgcggtcatgctgcttgcaagctgagggacaaagccccgatagagaggtacgtagcgagctgagggaacagcacacaattcgaactccaccgatctcattaacatctttgtgggatcatttcttgtaaggataaacctctagctacgtacgtatttgcttgattgccaaaagatgtttgtctcgcgttcaattctatgaagccaaatgaataggtttttcaaggcttcgtcgcatataacctcttgtgttccaatttcctgtgcaggcgctaagactattaaactttagttttcgtaaccaagcagacgccgaactggcataacaaattaacaatcccctgtcctacccgagcccactgttg

SEQ ID NO: 180032 - DNA, 929 bp, Zea Mays
gggaaaaaagataaaagctgctacttcagccatttctgttgcaccgaagggtaagaagatcaaggttttgatgcaccggcatgatacattgatacgaccagggtgccgaagcttgttgaagggacatcctccaccgctgagccaggacggcctgctcctgccggctccaaggaagaatcggctgaagtgccggaaataatagggcaggggaaaaccgaatcggctggagcgcagaagccaaagaaaaagcgaccaaagagcaagagctaggagaattggcaggattacgaaaaatcatgagcccgccaccagagccggagttgccgaaggtgtccagagctcctgcaataactcccaagaggaggaggatggctagcatgctggacgctgtcttagagtccgcaagggcgtcaactcctgctcctgcaaaggagattgccgaagctgctacaactcgtgttgaagccgaagctgggcccctagtgcctattgaaatagagcctattggaactgggcagagtattgaacaaggaccttcggacgtcggtctggttctggagaaagaagacgcgcccaagtaggttgaatctcctactcccgaagcgtctactgaagagctagactttattattcgacatgcttcgggtaaaaaattgtcggaagaggagattgtggaagccaaacactatgaccgggaactgaagtacccgaaaggggccctggtgtataatggcaccaatgaagatgactttctgtattgcctcccgaacaacaaggaaatatctatttgccgggagatggcaaaaacataggatttccgaagcttgaagttggcctttctgctatgtcgaaggatgacctcgcggacagcctttcttacaacagtctgaaggtatagaagttgtggacttataagcaaattatttttg

SEQ ID NO: 180033 - DNA, 427 bp, Zea Mays
tggagacatcgcacaggcggactctctctgaatccatctcgtcttttcattcgattcctttcctcctcctcctcctcctcctcctgagcgagcgcaaggagagagcaagagcattccctgactgactgcatgcactccgctgctggtttgccccgtcttttgccgcccgccctcatgatcgcccaagcatgcatgcatctgactgactccacaccacacacacggttaatcatggcctctcgagcgcgcatgtcaaaagccctgcttattattgcctcgctagctctctcgccttttcactttcatctcccggagtaatcgagtggcgcgcgcggtgtgtgtgtgcatgtatactgctgcctgtgcatgtgggtaaataaaagaggagatcgatgcgcaagggatggattaatggaggagtcatgtt

SEQ ID NO: 180034 - DNA, 712 bp, Zea Mays
gggaacttcaaaattagagcgctctggtggacaatctgaggcacgggcgggtgcgttggatgcatatatacctagagctcactagggggtaatttatatgttccatcagcggtggcggctaattttgagaagacgcgcggtggccgggaaagagagtgagtcatcgtagcggtctgtcgtggcggtcactgggcaatgagctattgcagttactgggcagtcactatgagtcgcgacgacatggtaaatggcctaaggcgtggcgcaaccacggtgaatggtgtatattccggtgatggccgctcggccacgtcgctggcgcaagtggatgagcgacagagcgcaatagtgcctccaagttcgtccacggcaagatctttttaccccgcgaagttatccgtgtgttaccaggcatgaatcagaatgtcggcgcgaatccgagcgcgaggttgcctgtggcgaggtgcactgtatctgtgatcttattcagttcactgtaccatcagaaaccctatcaagacgcctgacagagcgatttgcaatgcctagatctccaattttcatgtgataacttgctaatccacctttaacaaagttgttgtcctataatccagctttaatctttctatagcaaccatacttaaattcgcactaaatcacactcaaaatagctcccaaacttggtcctagttcactgtcagtctagtttcag

SEQ ID NO: 180035 - DNA, 766 bp, Zea Mays
cgcaatgccacaagtgcgacaaaggaggtgaacgacataccagcgcaggagacggtccgagggagactatccacggcgagaggcggattcgcggcggagctctcaccacggcgagcaattgcccgcacccggcttgatttccaggcctggagggttcgcgcccacactccgagcatcccctccccaaggaccaatcgacgatctacctcgctcctgacggtggcggcgtttagctcgtgcagcgcggtcaaacaccagggtgccaatggaagaggggcgcacgaggtaccccagttttgtactccgtagcggagtccgagcgctctgcggaacaccagaacggaatcctacaaacccgcgttgaccccaacggcttgcgacggagtgtggaatcggaacccgagttccatggacggcgagcttgggcggaaactgtggacgcggcggaggcttctctcccgcccacatcaccaggatccccgagcggtgcgccgtgtggacccggtaaacccggctggtgggtgcggaggtggtcgaggcgagttgtttgcgcgcggcgggatctgcggcgagagctccggagaagaacgtgcgacgtctgacgagatgagcccaccacgcagaggcacaagaatcacgcggtactcacggccccatacgccagtgccagagggaaagggtttggcgcgcgcgaagtctgggtggccagccagtgggccccgcaacgtcagtgagagggaatacgcagtcgcggggaagcgactga

SEQ ID NO: 180036 - DNA, 893 bp, Zea Mays
ctcaataggcgctgaaggcccagcttcggcttcagcttggactttggcagcttcagcaatttccttagtaggagcggggctcaaggcctttgtggtctctaacacagcatccagcacgctggccatcctcctccccttgggagttgcggcaggagcctttggcaccttcgacagttttgcctctgctggagggcttagaatttatggcattttttcttgtttttcccacctttggctcttcgaccttatcatccttagcttcgactggcccgactgtaggcaccttcggcactacaatcggctcttcagtgctctgcgtgatggaggcaacttgttttgcctcggtagttgaagaggtcccctcaccgaattcaggcactatggccggttcgatatatcgcagccggtgggtcagaaccttcacttttccccttcggtacagctgtggtgaccagagcggcaacctttctcttctttccctgccttcatagcgggtagtgataatcaggatacacgaagccaatcgcatcaaataccctgtttaatcttttcttgcctcggcccccaaaggctacggacaaggcatcatcttcggctttggaatatgttccaagcagctcgtcactggtagcttcaagacacttcaaccagtcatcgtttggcttgtcaaacttctctctaaacttgaaggtatatctcaatcgaaccaggccaccttcactggagtcggcagtagtttccttcggcatatcccagctctccacaagtggccacaccctgaaggatatgtgctcttgaattaaatcccttatgccaatgaaggcgcaaactgtactaaaagccttctggcatgcttcaacatcgccatcaacttccacctttggccttcgaag

SEQ ID NO: 180037 - DNA, 678 bp, Zea Mays
gggtactcttggtcagagggtcgtggagttcatgcagcagttgacgcaaccagcaggcctcagcaaagcattggcgactgcacggtactcagcttcgacacttgaccgggaaacaacactctggcgcttggaggatcaggaaacaagattctcaccaatgaaaaccgcatacccagaagtagaccgtcgcgtgtcaggacaatgagcccagtcaacatcggtgtagacagtgaggtggccacaagaagaacgccgaagaagtaagccgtcgtcaggagtgccttggagataccggagaatgcgcttgaatgctgtgaagtggggctctcgcgggtcatgcatgtggagacatatctgttgaactgcataggctatgtcaggatgagtgaaggtgagatattggagagctccagccaaactgcgaaactgggtagcgtcctgaacaggatgtccgacattagctggtaattttgcttgaagatcaactggagtggagactggtttgcaatgcgaagtcccgcgcgttcaatgatgccaagaaggtaagtccgctggtgcaaaaatagtccattgtctctgcgctccactgtaatacccaagaaatgatgtaaggtgccaagatccttcattagaaactccgaccgaagtgatgaaatgacctgctgcagtagctcaacg

SEQ ID NO: 180038 - DNA, 477 bp, Zea Mays
cgacggtccaagacgaagatgtagggcatgcagattcatgctaatggaccaggagcactgagtcttgactggggcactagaaaagtcagtgactagcaacctagaaactggtaggtgcaaacacatagatgaacaaatcttatcgccaacacggttgcaaaccaatgagacagtgcctaggacatgggggacacatatggaatacacttctcgtaggggttttagtgattgagccttaaaactgcccaatgcgacaatttatgggtttcccctagtttggatctcaaacacagcgtcacggttctagagggaatgagaggcagcacatgacgtcatcacatgtagtgcgtcaaggtgaaacaacttcttgaaaaatgtgtgcccatcatatcaaaatttcaagagttgattaattttgccatggttgagtggatatgatctatgtatctaggggtagtttagaaaagaggaataacc

SEQ ID NO: 180039 - DNA, 517 bp, Zea Mays
atgtgaatgcgtgtttagatccctagggcaccattgagagaccgattagtgacgacacgctcaccttgaggtaaacacatgcaccagcaaggggcccataggcggtgctggcacttcatcgtgctatctatctcactggagatggggaagaaggcagaggaaggagaaggagctctagcgagaggaagtgagagatgtgccgagcggcctaggtcatggactaggtggcatggggcttgtatctacaacttccctaggaggaatcatcctcatgtcaaacacccttttcttgcaccaccatttcctagaacctatgttgtctcttcctctcctcacgcagcagcaggccacacaccgtaagttgcgaccgcaggagacaacgatcaaccgacgactaggtgaaattgatttgcataaaaatgtttggtcttttttggacaatcatgaaaatgagaaaaaatgataattgtaggataatcatgaaccaaggtagctttcacgaaatggtaaaactttt

SEQ ID NO: 180040 - DNA, 398 bp, Zea Mays
ggcttttccagcccttaacttctcacgaatgtgtttcataccctcattatccttttgggcatcaattatcctttgcaagagaactgactcaagctttaactgattcaaagctccttgttggaccattcccaggtttagcttctccatctcttgacaaaaagtgctgtcagaggtcttcatcgtaagacaatgacaggaaaccttacggcttaatgcatcagccacaacattggctttgcctgggtgataatgaatttccagttcatagtccttaataagctcaagccatcgtctctgcctcatattcaattctgactgggtgaagatatacttcaagcttttatgatctgtataaatgtgacagatatttcccagcagatagtgacgccaaattttca

SEQ ID NO: 180041 - DNA, 693 bp, Zea Mays
cagaggagcaggttgccgaagctaggcaatatgttaaggatctgaagtatcccccaggatccctggtgtttaatggcactgacgaagacaattttttgtactgccttccggacaacaaggaaatatctgtttgccgggagatggcagaaaatataggattcccaaagctagagcttggcctgtctgccatgtcgaaggatgaccttgcagacagccttgcctataacagtctgaaggtgaggatgttttagcttatacacagagtttttttgtatcttttcttattattgtgtgctgatccttcattttttgtagggcttaatcctaagcaaggctttaagggcacaaaagaaagcggaagacgaaagctgccaaatagccctagggaaccttcggtcagaagttattacactaagaaatgaggcgcttgaaaaagataaaatactgctttctttagtggataggctgaagagcagcgaagcaaaacttaatgcacaatccgaaggtcataacgccaaaattgaaagcctaaagaaaaagcttgccgaaaagaatgaggattttgaagtagcgaaagcgaagcaagaaataagcgaatggactagttcaagattgcaaaagaatgtggatgagcttcgtgaatcgaaagagagatattatgagaaatccttggattgcgcaaagaaattgaaa

SEQ ID NO: 180042 - DNA, 900 bp, Zea Mays
tagtgaagagttattttgattttatgtctaggcgtaagcctagtaaaataaaatcttagaggaactttgattgttgcattcatgccgatgtataatgtttatgagtgtaaaatgttatcgtaacatgttaatattattatatcaaatcaaatgtttctgaataggtacttacttagtatagacgcgatatatgcaatgctcgcgtgtcgcgtgtgtccacacgacgttcgtgcgtgctgttcacgtgtcatcgttcgcgcgagtcgcgattcgcgcgctttaataaaattgtttattacctatgaattgttagctattccatatataatgcgccataatcctgtttctattcgtttcagtggctttaacttcgtaacctcgtcgccaacctgctagtaacgttatttcgtcgcgcgtgtcgtcgcgcgtgtcgtcgcgcgtgctattcgcacgcgttgccgcgggttgttttcgcacattgtcgcttgtcgcgcgttaaatcaacggttcagtaaatacacgttaacttttatggtcgtctgatttactctattctaattgtttcaccttcacaataatatcatgtacacgttaaaatattattttatcgtacctcatgctttagttaattaattaattaattgtcggccatgctttagcataaatcgataaatgtagtgattctcgtgtcgtcgttgtctgtgggcgtcgtcgcgcgctattcgcgatgttgttcgcgtgcgtcgtcgcgtgccgtccacgtgctgctcgccctaccgcgcgtcgttagcgcgtatctcacatgtgtcacgtggcgtccacgcgtgataatatattgttttcgttaaatactcatgagtataacacattcatctggtcgcatattctaatgaatttgtt

SEQ ID NO: 180043 - DNA, 561 bp, Zea Mays
aacatttgccccttcaaccattctcttgcacctgtatcattcttcacatttcataatcattataattctatgactcactcgtactcaccacttttgtcattttaattctaatgactcttcttgagtgatagtctttccttttcttactatacatcaggtgcctcaggtagcaagcttctttcttctatcttacattacatgattttcttcactaggtatcatttacctctagctgcttgtacctcttctatatatatcatgcagcatgtccgtgggtagtggcagtgagcagtagtgagtgatagagtctatggcaggtagtgtttagtgagatggcatggaccaagaaaatgggcacgtgtagaagaggcagtggtccacttcctccaccacaactcgattagggcaaggttgtggttctagagcaaactcgaggcaagaaacgtcacttggatcatcatggtaaggcagcacttatggtagcagtagcagctgaaagagctgagcagggtggcagtgtaggctccatccagattggagtagacataattcccactcgag

SEQ ID NO: 180044 - DNA, 797 bp, Zea Mays
gtgggtgtttaggtttggtaccacatggaattgggagaaattggagctccaaagtgctctgtcagctgctctgaataagtgctcgccatggtacagtgcctgctgaagatcagaccgacagcgcggctgacttaccgccggcgaccgattgccgccgtgattcgtgcgacagccggcccaacttgtgctcggggtaagtggacaacgcttggagatcaccgccgtggataagctccagccgttaaagaactccggccaccgtactgtgtcaccacggtggaagccgataagaacgccggtgatagccgtcgtccgaccttgcgccgcgtgtcccaacctcgccaccgcatcgccgtgactccctctagcttcccgtcgaccaccgaaattactgccacgacactgaacacgtattcaccgcatcagcgttcttcttcacctctggtcgccgcgcgtcagcgccctgattcacggtcaccgctcgctctccctataaattgagcccacggttagctgcgccatatcatcgtgaagccttagcactcactcccacccgtaatcgttcacccgagctctggaatttccaactccctccaaatcaagtttccgccaccgcgaagagtccctcattgcggccagcccctttccggtcagctcatcctcctctctctctcgtttgagcacttgcatagctccgtgatgcttaccaagtcatcaattcgaactgtgtgaccaccaatcgccgggaacacgattgccaagccgccatgctctcggtcaccgtggccagagctcct

SEQ ID NO: 180045 - DNA, 618 bp, Zea Mays
attaaccctgcctctattaggattctcctcactcttgccttgagtgttattatggatcgttgtgttctgactatacctctgattgttgctcttttgtggtgtctaaggattgcgatttgggcaattattgctataatgaccaaattcgccacatttcaaacacccattgggctgcactggggcaatctggttattcttcctggatggtgtgttcatagtgttaccctggcggttctgaggatgtccaccagacctttgtccttgttgttgattatttctctaactttgttgttgattactcctctggccttactgaactgagtgttgaacttgatgttgatagtttccttcttgacttgcagagcgaaactgagagccttggtaattgttgtggtggcgggtattgctgcttgactatccctgagattgaaatttccttttgtggtcagtcagttcttttctcttgctttctagaccaattgccttattcaaaagagtttaaaagttggggaatctgtgactctgcagctgatagttcattggtccaatcaaaccttctaagaaacactcttggcgcttttcgttggtatctacttcttctagtgcatagcgtgaaag

SEQ ID NO: 180046 - DNA, 823 bp, Zea Mays
ggcgagatttgggctcgggttccaactacttcggtcgtgctcctcggagtataaaatcggggccgctcctacccttattcaccatgctcggcgtgcgcagtggggagtttgggtccgccaggggcgaactgcggattgtgtcgagctctagcctcgatagttggcttggggattcaccgtggcatcccaatggtgcgtgtgaccttcccacccctggaactggatcatgcgccgcccaattgctcgccgaagatcgcgtggcgccgccgaatcgtaccttgtcgtggccagtgtcgctcgaacatcaatgattggtaaggattctcctaatgtattcaccactctccggacatcgcgtagtagtaatcttggtgggtctggatgggggagcgccgaattggggccgctccggccatgggcgccgccgtgaagatggggactgctgtggttcggttgagcggggaggaagaaaaggcatcggtcgttggatcctagccaacggcggagatttgagcgactagataccggttcggggaattgatcggaaccgttgaggaaagatcgagcggttaggattgaagataaagaactccctcggccaatgcgatcgtagccctcgattttaaatcaaacgtttcgggttgtataccggttagagtgtcaacctgatctaatcatggccacccagatcagatcgtgcgactagaatcatacaataccccttcggccgttacgttttgcataagtgccccgcggctttcacataattaacccgccgtccaccagcaggtcaagctgtgtctagggagtttttgtagatcag

SEQ ID NO: 180047 - DNA, 805 bp, Zea Mays
tacaaatctcgcaccaaagtggtttgaaacattccctagcatggtgaccttcatccccacatttctggcaaaaaactcggcgaccaagatctagatccataataacggggggggggggtcggatgattcatgttacctggatcagcgccctcgcccgacgttgcagtctgcagatcttgcttggtctccgctttcacctggggggggtctcaaacgccagctaaggttccggtgtcttcccaaggaggtgagttttgacgttgtggcttagggatttggcgatcccatttcgtgttcttcccttttggatccatttcagtcgagtctttagggatttggattgcaatccctaccctcggccacggatccggagaagggggaggacgaatgggaaccgaaatccaaccaccacataagctagatttcacagttgaaggcaatcgccaaagggatgagaggaaggcagcgaggtgaggaagagggcgacccccaattaggtcattgggaaaccctagttttccagactgcactaccgcacgggggagagaggaagaatgcagagaaggggaggggatacctggggagcgcaaatgtattgacgctcggactgggccgcaaccctccgacacgccgcgctgtttcctgatcggagtcacaactccagaagtccatccacgccataaaccatcgcggggagcggcccaatcctgtagcaccttcctgggcttggagcttttcgattttagggatgggggggaaagtttcccgccaatggcgattttggcgtggggagtttgaggagggg

SEQ ID NO: 180048 - DNA, 454 bp, Zea Mays
agaatttccaagactcaggattcctacagtgtggactgcgggttgaatacctaattcatcgggggttcttatgaaaaatgtgctcgcgaaggggtatgaatcaaatctgaccgtctgattagaaatcgagcactagcacctaaaacgaatcggtacactagtgatgtcgttggatttgcatcctatggtttagctaatgcacccaagctctaatctagtgcatccgatccgaattggacgaccctcattaccttgacccatacagtatgcgactgctcaatcctgagcgttacactggaatccaatggctccaaacatactattctctcttctattcgtggcatttaatcacgagatcaacggccccgaaatcttcttctaccctcgacaccttctctcctcaactccaaccggtctaacaccagggcggcgccatttgcagcacacagccaaa

SEQ ID NO: 180049 - DNA, 681 bp, Zea Mays
gccggaggtggaagagagcactggtgcacgcgagttcgtggccaatggcgtggcaacctccccggcgatgatgggatggcccaagggagtcacggcgacacggtagaaagctaggccacgcggcgcgatgccgggaagcggcggttctccggcgagctaatctgctccagccgtagggtagaaggggaggcacgggaggccgtcggagtggcgtccagctcaccggcggtgaagatttttactgggcgatacttatctgatggccacggcgcacgaatcacggcgagcggcaatcgacggcgacggccaccggcgacgagatcttttggcgctggcggtcgatctgatccggttagggtactgtcccatcgtgagctcagtaaaatgaacctgacaaccaaatttgaagccaagttttcttccaagttcatgtgacaacaggtccaagtctctgcatcaaagttgtagtgctacataccagctacaattcgactatagggtttaaacttatttgagcactggatcaaggttgaattcatactcaaagttgacccagttacactgaaaagctgaatttcagaatgaatccagcctgacagccaaagtttgagcatgattatctccaaatttctcataagaccatggcttgaatccttaaacaaagttgttctcctataattg

SEQ ID NO: 180050 - DNA, 462 bp, Zea Mays
aatgtagacacatactcataagtccacaagtcttatgattttctttgctattcattttgggcttgcacatcaggccacaaaagcacattagttcttttcataagaaccacaagagaaagggatcatctcacttcctccaaaataaagaagtgaatccccatattatgcaaagatgaaatgaacatatccaatgaacattaaggataattaagcccattaggcgagttcatcaaactctattaaataattatccttcaaatggcttaactattttcgtttgctgttgcaactttgccgcaaaatatatcatatctttatatgttggagaattccaggtgtcacataaagtgtaccacagatttttgaaaattggtgtacacaacgtagataatctccatataattaaacaatggagtagatctcccagtagtgggcaaaacattttgctgcctgaaagcatgg

SEQ ID NO: 180051 - DNA, 480 bp, Zea Mays
ttcgaccattcgctatatcgtctgtacgcgtttgttctatctcgtggcactttagctaatagattttgttgtttattacctacgcacaatcttgcccaacaagcaaaaacctgctcatgccactgtgattggcatcctagagaatcattgccttcgtcgcatctttagctgtctacatcttcaacttatttagaatgtccgcaacacatccctcgtgtccatctttcccctattacacagtctccctcttccacccgcaacgacgcctcccttctctttcacaacggatggagaagagcattgttcaaccctctagtgtcttctcgcggacgccagcgcctcgcgcgctccacaagtaagcaatgattatgttcgcccccaagtcgactgacaacaacattcgggcgagtgaacaacgacaagacgacatggacgcaagcaggcgcagtccaacccggtcgagttcgtcgacgacgagga

SEQ ID NO: 180052 - DNA, 411 bp, Zea Mays
aacagaagaattcctgttgtggacttggtgagccggctcgagatgatactcagaggcaaggtgtcgaacatcggcgctcctgttgcatactcggcctggaatctgcctccttcccaggcctttaccagtttcgtgtcaaatcctcctactgctgatagcggttcgggccttagagtgcaaccctcttccgaagaagttagtgctttggttgcctcactcgaagaaattcctaacgatgagaggcaggttcattttgaggtgcctttgaatccgagtgacgcagagataagtgccatgctggatatgttagctaaggattcttctgatgccgctcctgctgaaacactggtggtggcgcccatccctgaggccgacaaagctttggatgctcagaggtctgacagtgttcgc

SEQ ID NO: 180053 - DNA, 539 bp, Zea Mays
caattttgcataattatgttttttataaaagaaaaggatttcaaaaagataagaaaaaccttgaattgacctgcccaacccattcaccctagcttttggtcagtttctctacagcccagttcctctcgcgcgtgttgcttgctatgcctggtatctatgatccacctgttcggcccacaacattccccatgcttgtgtccttgcacggttgcttgcattcgcgctcgtgtccactcctctcttgcatgcttcaaaccactgtcacactcgtgccctgtgtttcggtgtagtggaattcccagtgtcattgtagcagtaacgccttccactagcattgccgcctcctcccctcaccttcccactccagtgagtgattactcgcgcactaatgcccttccgtatccactatgacccctatgagaaccccagagctccgacatctttccccgcgctctcattcctcctgagctctccctttctttgcctacctgctctcccacactctcactccactccctttctttccgtatccactgcgt

SEQ ID NO: 180054 - DNA, 320 bp, Zea Mays
ctagagatagctgcgcgggcaccgtgtctttaatgctgtagtaaggggtacccctgattcagggtaccgacagtggcccccgggcccgcctcaggggagggtacgagcctgcaggtggggccaaagcttgatcggcgattggcgcgccgcttccgtgcgcttgctgacataattactgtcagtccgccttcagtcacgtcaaccgccacgcctgttcctgtggctaactggcctgtgacctccgcacttgatggttttactgggccacgcgcggggtgcctcggtaccgctgcattgattttgaaatttcaccttctctg

SEQ ID NO: 180055 - DNA, 543 bp, Zea Mays
ctagtctagtaccggtactactgattttatttaactccactggactagtagcactcaccagcttgtacagttctgcagttgacatttaggtcacatcaatgcatggccatccctagccatgccacatcgggatgagaacgaaggaaggtacgcaagggaaaggaaacctcagccagtggccatcagtcccactcctcttgactgccccaataattggcctcacccctctcaaaaaatcagcactagggcttctctaaatttctccctctacatcacttttttacgtcacatcatcaatatttcatctcctactttttcatctactgcagctcatatattctctccatataccacattacaactataaaatattattatccaattatattcatcatctatcaccattttttcttcagctattaaaaaaccaccgtacaaataaacagtataaaggggcgacagactcacgctggctatggcgaaatcctatttacatctgctggctggagggccttgtatagagatgtcaatgggtaattcccc

SEQ ID NO: 180056 - DNA, 574 bp, Zea Mays
gaaagtcatggatcttgattttgtctccagagatatcctcatcagtaaatcccagaatgtgagcaaacctcctgtagctcactttataccagcttccttcaatgaaaaaattgagataagtaaagtcgtatggacttttctcatcagcatgcttaatccatagagtagaataaaactgagcaatgatttcatcattccaatcatattggaatgtcatgatggtcttcatcctcttttgctcacaggccctcaatgcatgtgtcatctcaggatctccaatggcttcgcatccatcccagtcaataaaatgatgatggaggataggttggtgcttgtttggaaggataactgaattatagaaatcaacatgaaggagagtccagaagcgattaccatcaatcctgacatcacgaacacataatgtaggattttggaagcgcatatcttgaagaagggcagaccctccacttgcagtgaaatcaatgacctgttcgttgacgaagcgacgggcctgcgctttgtgaagcactaacccttggataattggagcattagcaggagggagattaacatc

SEQ ID NO: 180057 - DNA, 555 bp, Zea Mays
ggtgcttcgggttcgcggcctcgtgagggagctgctcggctcacttaatttctcgctggaccaacggagagggagagggaggagagggaaaggacttaccggagaggaggtcgacgatggcgcttcgcgaattgtgctcggggaaggggcggagagggatggccgaggctggtgcgatgaagaaggagctcggggcgagccttttataggcgcgcgagggaaggggggggggcggtggagcttcttggctctggcgagctacacagtgccgcccataaatgccgcacagcgccgccgaggggacaccacggcggggcggtaccggcgaggacgctggtcaaggggaggggaggatggagcggtgccaaacttccctgtgcggcgagaagacggaggggaggacggaggcgatggccggaggtgactgcggtgaagggacggcggaaggacgacgaagcagctgacaagcggggccactctgccagagggagcgagcgcacgagagagagagggcggctgacgggtggggacgctttgctagagagagggaggcgg

SEQ ID NO: 180058 - DNA, 719 bp, Zea Mays
cgagctcagtcgtgcgtggctggagatattcaccggcggtcgccgtgactcagtgctttccgccgcggtgtcacccatgccttgctcctcccttactgtacctcttctatacgtggttaccatgcgtaagcaaagccttctgcggtcgctgatcgttagccggaccgccgtggctataaatagcgctatgaaccacggcgaggtattcacatctccaccagtgagttgattgatgcccaaaatttgcacagcctctgccacctcttcccaaattgagtgtgcacggtgaaactatagttccttacagccgtgtagccctaatctcacctcccaattccacctagagccgtcgcgacgccattttcccctttctcggtcaccggcgagcacaagttctctgtgctccgtggccggaccactctggtacggctctacacctctcgagtgttgttttagcagctctgtatacccgtgaagctcatcgtagcagccatttgaccaattcgggcatgagtgaatgggaacgcgggctcaacgtcacggtttccgtcgtgcgcatgggtagaacgttctattagtgtacaaaccaaaattaaaggttgttctcgaatcgcctggggtcggaaatactcaccccgtagcttattgggatagccgccggcggccatggccattacaagtcgcggggtgatcgacgacgagcgcgccgtggccagggg

SEQ ID NO: 180059 - DNA, 777 bp, Zea Mays
gttgtcttaccgagaaggaggcctagcatcgggaggcattgaagatgttgaagatggctcatcgtgttgccggcgacgctcgggacgcagcaataaccgctcttagacgcgtccataacgtagagaggaggcatgtcaccctcggatttaaggataaatccacatgcatgtcatatgtatgctgcgattaaattttacatatatgataaatcagtatatagaaaccaatgccacaaaatttattatataaataaaatatcataaaaataactaaataataaaaactaaacaaggatcatgactacgatgacaaccacaagccatagactgggtgaccagagtgacgatagcctagaactcatcaaactcataatattcttcctcttgatgacgtgtttctgagcaacaaatcccgtaagggtgagtacacttatggtgtgtactgagtaagtgtttagaaaaaagtgcagtgtaaggcttactaaggatatggctgaggcttaccaattttctatttcaaacataaatgcaacaaacaaacgtcacatatattttttattaatttatttatccatttaagaaattgcttcaacacacatataaggagggtataaagggagcccatgacttccaatagttataggaagccccagtagcccactacatcgcacccaaccagcaccaggcgcatgcatgggtgcgggcacgtcccccaccagctccatgtgatttctattttatagtagatcctataattatggtgatagtgagactttc

SEQ ID NO: 180060 - DNA, 579 bp, Zea Mays
gggctcccaggctgccagcgatggtgccactcacgcgcacggctgaggcctgccggtaacaagggcgcgtgcgtgctggggggccctggggcaccgggaagggctcagggaggttcagtggaacgtggcgaacacgggagtgggcatggcgacaacgtagaggccctagaaggtagctgtccatgacgggatggctcggtgacggcgcgaccttactctagcgagcaatcacgcacacccgagggcagaaagggaaaattaggggcaggggaaagttggttacctcgaaagaagactctgggacccttgaacggcggcaggggcacgacgagggcttaggtcgacgacggcagcgctctggctgcacggtgaaggaccggtgagcgtgtatagagagaaccagagggggagagtgtaaattgaggcgcgtctcgagttgcggacgccaaggtggaactcaccgaggcaacgagcacggcgagacctcaatgacagcggcagaatgggcacgcaacacggcagacggtggtggcgcttctcaagggcgcgcgaggagtgaggtgagtgcgggagctctgc

SEQ ID NO: 180061 - DNA, 610 bp, Zea Mays
ggctggccatggtggccggcgctcgggtggctcgggcgggtggcgcagagctcgccggagctaaggatggtgtctggccagcgaaggtgagtgcggagtgaggtaaggcacgtctaggggtggtcttaaaggtgctggcgagcacggccgaggggtggctctgacacacgctcggggtgtgcgtgggcggtcgccagtgcgcgctctggcgcctgggcacgacgtcgagcacgaggcagcgcagagtgaggtcaagttcaagcgcggattggctccaaatcttcgcgattatggccatggtcccgttgagagatctcttcccttgacattcctttatcgtttgtgtgtggaggcttatgggttttgctgactggatcaaaagatacggagggatgaagtttggtttatctcactattgaactccgagaggaaatcctagatttgatgtgtctagggcatgaatctcgatgccatcttcacacatgttgcagaggggttagtttagaacaattttgtcaatggggacttaaggatttgagctagggatcaaggtgaacgtgctcaagttctaggtgaaggctgaaattcagcaatctgaatttcagatttt

SEQ ID NO: 180062 - DNA, 1303 bp, Zea Mays
aaagaagcaagaaaagcattcataatagttcatcatcaagacagcaagccaaatggtgcatacaggcacaagcaaaatataaggtaagtgcaagtcagcaggatcaggtgatcaactgcacaaaagaatgctcgttaggaagctaccagtcagcactacttcctacttactcaaaagaactaaccaacctcaactcagaacactctaagtgtagtaatgtttgcccaagaaagtcctcatccagaggactctatgtgagtcagtcatgtgcacaaatgcagtgccatggttcttgtgatccagcagatgtgagtatgcaacaatcaaagcttcttcagtgaagccagacataaacataacagcagcatagaggtcaggatgcacatcttgctgcttggtttccctaattgcttcagccacattgttaacagcagctgtcataccaccaaagacatggacatcatcatcagttagcactgacctcttcctttttccccagacctacttccagaaccaccactaacaggcacctccttcttgctgccatcctctggccccttaacatcctcatcagacttaaatgagctcccagcaaagtctaaaggagaacccagtggctcactagagcccatggcaaacttgccagtggccaggccattgccaaagatgacctccatttgcttgtagttctctatgggtttattaagtagttcagcatccttagggtgagcctagatggttatgcgagaaatgaagtcagaattgtaaaagaggttagaatgaaatgcaagtcgggaacttaaacctaacaaaccttaacatggccactagagtgttcttcttctagggtgatcatatggttgtcttaatcaaacagagccccactaagctctctaagtttgatgatcctaacccatctctgcctccacttgcgcaggtgattatacacctgagtcccagtgacatcatgcccactgaactccttgaggtcctttgcaacctgattaaggtgcacctccttgaaccctttgtcagtcctaatcccagttgaaatcagctgacagaaacgcttaagaacaaaagcagacatcacatttgtctatctcatggactgcctggaggctggagggtttggaacagactcagtagcatcagcctgagtctcagggagcaactgggtcattttgtcagtgtaggacacaactaaatcatagacctcttgctcagtatccatgtcctagtgcaaaaatagcaaagacaactcatatatatgaagaataaagcaatcatcatagcaaattcc

SEQ ID NO: 180063 - DNA, 415 bp, Zea Mays
cgtttggaatccgatctagtagttcgttttgacccggatcgagaacaaatccatctatttttgactccccattctcacttctccacctaaaacaaatccaagtgtcctctcacgtggatcgattcctggccaagaatgagtgttctactcgatcctaggttggctggcttcctggcctggctttgatctaggtttgccgaacggaccctaaatatgatcagaattcacaatagaccaattaatatattagaatataagaatagggagatatcaattatctaagagagtattctcatgtcacgtatccatgtgtcatccaaaatcatacaacaaatcaaatgaagcctaaaatatttcctgaaggtcccgctggtagggatcaaaacggacggaaacgagcagtgaactctttttg

SEQ ID NO: 180064 - DNA, 421 bp, Zea Mays
gatctagcccatcatcctaggccacgacctatgtcgactaaaacacagaatgagaaaggcatcaaccgcacgtttgtagcatccaacccccgcttagcgctcgtcctagcgttgtgcccgctgcccaatcggcgtccaacagtcagttcatcatcgttggcctaccgcctagccgcccacccaaccgtcttcgccagccgttaggacaccgtcgctagcttgtagctcgcctgccattgccgccaacctatggtctagccgatagcccgtcatggccggctcgcctccactcggacacggccccgcactagagtgcaagctgccacaaccacaagattgacaatttaatggtgttttcgatgtttttttctatatagttttgttcttttacttatattgatgcttacttaatacttttttc

SEQ ID NO: 180065 - DNA, 582 bp, Zea Mays
cctaacctaacacggtaatgtgcaggtgtagctcccttccgtccttgtccctgccatccccgatcccagcgcctacaagcagacgcctaggcatcttctccagcaacgccaaccctattctggtgcaggagatctcgtgctaccttgggctggagctaaggcagatcaagatcgagcggttcgtggacggcgggatctacgtacagctggaagagagcgtgcacggctgcgacgtgttccaggtgcagcccacctgccctccctccaacgagaacctcatggagctcctcatcatgatcgatgcctgccgaagggcctccgccaagaacatcaacgctggcatcccctacttcggctacgccagggccgataagaaggtgcagggggcgcggctccatcgccgccaagctggtggccaacctcatcatggaggtcggcgcccaccgcgtgctggcctgcgaactccactcgggtcagtccatcgactacttcgacatccccgtggaccacgtgtccacagccagcccatcatcctcgactacctagccagcaagaccatctgccccgaggacgtggtggtgg

SEQ ID NO: 180066 - DNA, 749 bp, Zea Mays
gagccacaacaagaggcaggacacactaaacctgtggttgcacggttttttgccaggctataaggtctgatatctccacacggagtcacgccttgaatgagtagcacctgtacaagttgatggcggtgaagatgttgataggatgaaccagatgcttgaggatctacaacctgaattggccctagaccatcatgattcacaaacaccagaggttcagaagttcttcgacctcctcaaaacatcagaatagcctcttcatgggcacactgatgtcaccgttctcgaatttgtgacacgaccgatgtcaatcaagtccaagtttgaattctcaatcaattgttacaaggagctcatggatttgattagcgaggttgttcctatgggtcacaagatgcccaaagacatgtaccagtccaagaaattacttgaaggtctcagtatggagtatgaaaagattgttgttttctaggaacatggcagagagcagaaatgcttaaaatatggcaagtcgaggtacgtggatcttgtaaatgaagatggggagaaggtggtgacaaaggttgcacataaatagcttcaatacatgcctctcactcctagagtgaaacatttgtttctctcgaggaagactactatgcacatgaggtggcacaaagatcatacagacatacaagatgggttaatggtgcacccatcggatggtgatgcattgaaggctcttgacaactttggtctagagtttgccagcg

SEQ ID NO: 180067 - DNA, 537 bp, Zea Mays
tcgtctaaacttcgacagcacccaattcacacgcggttgcacaagcacgacgaccggtttcgggactggattcgacgacctgcgcatgatgcgcggtggcggtgaggctgctgttgcacacacgactgggcagatcgactgacggtgcgcaccggggagcttggccatggggccttgccgccgcaacgggctcgaccaaggccggccatggtgagcaccgagaagggcacgaaagagagagaggggtaggcgatgggcttcccctcacagcgatgaaccacagagggagtacgaacttcggcggcgtggctgcgcagcggctctacgacggcttgggctagttcggccgggcttcggccacagtgagcgagcgcagcgccgagcacggcaagaggcgaggagggttgggatagagagaggaaggggcgagctcaccatgagtgaatgaagggcgggtccgaggaaacttcaggcgagctcaggacttcacaccctgcgacgaactcgacgaggaagaattgtgggtgcaccttactc

SEQ ID NO: 180068 - DNA, 579 bp, Zea Mays
gggaactgactcaagacagaagatctgtcagtgaatatgtgcacaagttcacggagttggcccgctacgcaccagatgacgtcaacactgaagccaagaagatggcctgcttcctaaaggggctcagaccagaactcaagatcatcctggccagccaagacttcctcagtttctcgcacctctccaacaaagccatgcaagtcgaaagggcaaaaaaagaagaaaaaggccatctcaagaggaaattccaagtcctccgaccagcagcaagatcagcaccagaaaactcgatccgttggatttccacccaagggaccaagctttagtagaccaactggacccacctcgtcacggttcagttagcagagtcagagctcctttcattccccctcagttgcaagcaaccagccaccggcaaatgcgtgttggcactgcggggatcccagtcacttcaagaacaactgtccccagctgaagccatcaggacctgcttactccaactcggtgaatggccccaagaatacctcagcatccgcccccaaggcgccctcctccatcagccagcagaacaagaccctg

SEQ ID NO: 180069 - DNA, 1191 bp, Zea Mays
gttaggttttggaagccacacatgtttctgaggaggagctctcacaggttcatcaatcacaccatctctcactggggtgataggcttagcaggggtggttttgataagcttaggagtgggtgaagatttctctgaaggtgtcaaaccactgcactcaccaaccttcccaaagcaagcgacacttccatccttagcagcaaagcctaacctcgatctaccagttcccctcttgaactgactgaccatcatgcccaactgggggctcactgcatgacacccaattcaagatagatcgaaggtatgtgttttcttcctcgattcttgtcttgtcgtgtctgcaggactcaagggcagattgcaaaccctcacaaagtgcacgctgcgcaggtgcaggggcactcactgagctagccttctcaagcaaagctatcctagcgtctctctctgctagctcagactgcaagccaggaaaaatgttacacacacccaacaagatagacctagatctcaactcgttgtgctcatctagcaagggtggagtacttggtctgcaaagtggtgatgttcgacatgtgtagagcgcactcatcacattcggtctcgtcggacacctcaactgaaactctagcagactcaagttccctaagcgtgctcttgtacttggatctaaactctctcctctcacgagcagcctgcctaagcaactttatcctaactagccaaagcagtgttcagctcttctatctcagcggcgagatcatcggcggaaggtagtacctcagaagtagtgtcgtcgccgatgtctttgtcgttgctggtgccgaccgcgtcctccaccagtgccatggtgtagaagcctcctgcggtgtcggcgatgaagcacagcccgttcagcttgtcctcgacccacctctcagtctcctcatcgctcgaggaagatacaacatcgtcggagtcgtggtcgaggtcactgagggaggcgaggaaggcatgctccttgatctttgccttctaaaggtacttcttcttgagcgcctcgttgtcgaatcctcccttggacttgtacttgccggaggagtacttgccctgcgccgaccagagtgatggtcgcgcgggccagactccaatttgcccttcttgtggcagctggcaacgaagtggtcgggatcgccacagttgtagcatctgtcc

SEQ ID NO: 180070 - DNA, 593 bp, Zea Mays
tcagtgcatcaagttagaagtttccttggattggctggttattactataggtttatcccggatttctccaagatcgttaaacctattactgagttaataaagactgatgttaagtttgactggtctcccaagtgcaatgaggcctttgaacaattgaaaagattgttgaccatgcaccggtttttgctcaaccagatattgaaaagtcatttgatgtatattgtgacgcatcaggcattgggcttggatgtgttctgatgcaagaaggacgagtaatagcgtatgcttcaaggcagttgcgccggaatgaggaacattacccaacacatgatttggaactagccacagtagttcatgcccttaaaatttggcatcattatctactgggaaatgtatgtcatatgtatactgatcacaagagtttaaagtacatttccacctagtcggagttaaacatgaaaaagagaaggtggctcgagctgatcaaggattacgacctagaaattcattatcacctaggaaaggctaatgtggtggcagatgctttaagttgtaaagccttttgtcattgtctcacggtgggatcacctaac

SEQ ID NO: 180071 - DNA, 545 bp, Zea Mays
tatccgacgtgaacatccatggaggcggccaaagaggaaccaagctcggcacccttgggggctaggtcatcctcaggaccaccctcgagggctgggttatccttagcaacaccttcagaagctgaagcaccctcggtcatatccacaggagctgggtgaccctagccaacaatgtcaagagctgatgtgtccccatgatctagactgccctccaaggtcgaagaagcgtgagaaaccatctaggttatctcttgcccaacgcgattaccagccaaaaggacgtcatccgggacctctgtacgaacgacagaactttcaacctcaggaggctccgataaatggtgttcagggataatttcctctaatgcatggtcaatggcatacattgtcaacccctggacactaactagtcctgataaagcctgcattgttatgtcactgctcctactgctgcgactgttcttgcgaatcaaagggacctcttcctcctcttcatcctcatcaagcacacgaccaccaactctgacaccatcacaacctccaat

SEQ ID NO: 180072 - DNA, 387 bp, Zea Mays
aaaaatctgatccatagaatggttttattaaggatagagctattcaggactgcctagcttggtcttttgaatatttacatctatgcaaacagacaaaaaaggaaatgatcattctgaaactaaattttgaaaaggcctttgacaaacttgaatataaagtcatccttaatattctacgttttaaaggatttgggcagaaatagatagggtgggttaaaatgatcatgagcttagacacgtctgctattcttcttaatggggtccctggaaaaatgtttcatcgcaaaagagaagttagacagggagatcctctctctcccttactttttgtgctggctgtcgatctgctgtaatctattatcaataaagcaaaagatatgggacttt

SEQ ID NO: 180073 - DNA, 496 bp, Zea Mays
cgcgacaggaggtgccggcgaggaatgcaccgatgacgtcggagtcggtgatattggggagctcgatgcattgcttggaaaatcggtagatgtactcccgcagattctcgtcctgcttctatcgacagctctgaaggtcctaagaattcttggggtgcatgtatgtgccctagaaattcctcccaaaatccctgactaggtcttcccagtcatcgatttgggtaggtgggaggtgctcaagccatgctcgagcagagttggacagaaagagcggtaggttgcgaatgatgaagttgtcatcactcgtccctccgagctgacagaccagatgatagtcatcgaaccatagctctggtttggtttcccttgagtacttggtgatagtagtcgggctgagaaccgggccaagaacggtgccctgcggatggctcgacagaagacttatggacctaagggctcgggcaaggggcttcgatcgtccccactatcgtaccga

SEQ ID NO: 180074 - DNA, 1014 bp, Zea Mays
atcaacctccagtaccaaggcacccctcaaggcgccaaaggtacaaccatccggagctggtgatgtccccgtcaaagccatccagcttgcggcggactctacccagaccacttgcattgcgggtgatctggacgagaaataggaactcgcgctcgtcgctttcgtccaggcaaatgccgatgtgttcgcatgggagccgtcgcagatgcctgggctccccagggaggtgattgagcactgcttgaagattaaccctgacgctaggccaataagccagaagcctcacagacagtctgttgagcgacaggacttcatccgaaaggaggtccagaaactgctagacgctggcttcatcgaagaagttcatcacccagtatggctggccaacccagtcatcgtccccaaagcgaatggaaaacttcggatgtgtatcaactacaccagcctgaataaggtctatcccaaggacccatacccactgccacgtatagaccaaatcgtgcattctacctctggatgcgatctgttatcattcctagacgcttactctggtttccaccaaatccagatgtctagggaagataggaagcatactgcttttgtaacagtggatgggctatactgctatgttgtaatgttgtatggtctgaaaaacgccctgccaacatttgtgcgggcgatgagtaagactttcggggacctgaatagggacaaagtagaggtctacgtcgatgacattgtggtcaagactaagagagggtcgaccctagtggaatacttaaccctggtcttcgacaagctgcgggcaacccgcacgaagctaaacccggacaaatgtgtttttggcatttccgccgaaaagttgcttggattcctggtttcgtaccaaggcattaaagagaacccggaaaagatcagagcgatcgaggcgatgaggcctctcgcccgaatcaaggacgtccagaagcttacaggatcgctagctgcccttagccgcttcatttcaaagttggc

SEQ ID NO: 180075 - DNA, 401 bp, Zea Mays
gtcgaagactgcctagaaattcttctggcaaaacattgtttgccgattcggagtcccgtccgagctcacagtcgacaatggcaaatagtttgacagccaggactttagggacttctgcttctccattggcaccaagcttgcctttgcctcagtatatcacccacaatctaacggcgtggtggagcgcaccaacggcaagattttcactgccatcaagaaaatgcttctcgacgacaagaagggtaaatgggtcgacctgctacctgaagcaatctgggcgctgaacacgaccgagtgttgggcgactggattcactccctttcgcctgctatacggatcggaggccatgaccccgcaggaaataaaacatgggtcaccacggacaagcgcttcaagcgtcc

SEQ ID NO: 180076 - DNA, 349 bp, Zea Mays
agacagaacgaccaagatggtcgagaaattgaatgtgggtggttgacacttgattacttccacaagcaaatgtatatgtggagaagaatatcgtgttgaacaagtcaagacgatggttgaaatggatgtgctagaggacttagtgatcggatggtgactcatgtcgagatcgtggagtaagcataggagatatgattcttcaatggatttggtgatttgggcctcaaactcactagtaaatggtttctctggtttggacctcaaaccccacttggagtttaggatggacattgaggtggcatgaggcaacctcgtgaaactcgcgtcgaggcaaaggagagccgtgaag

SEQ ID NO: 180077 - DNA, 1186 bp, Zea Mays
cggcaattgaagtatcaagcacttccctcttgacccttgcttgaaaactgttctgtggacttgtttcataaggccttagttcatgctcttgtctacaatgtccccatacattacatacatgacttctctgttcattttcagttttaaatgtctattttcatggtctagtgtgtgtttccatttaccattgtgccattgtcatatattcacatgttggtactttgcccctcgtccgcacaatacaaatgtatgcatgtagaggattattcggaccaaactgggaccaaagaagcatctcctggcctgaatcgacacatcagtgtcttaatatcatcagatggacttattccagattcctcacgacatttaaaatgtctatgcaagaagaaattacactttcgatggtgtgaatgggcattcagaacttctgagaatagactcatcataccatggagattgcattgaagttgtttcaggcggaacaccacattctgcctcggacctccacagaagcctcaatatgtgcaactgccataaacaattcatgcagatttgttttcttctttcagcagggaataaaaggtgaggtgcactgcctactacattatgtacgttctgctctactttatactctaaaagccatcctctgccttatattccgctttgtcgtcaagtacaccgtgctttctcaggcttctttcacctttttttctgaatagcatataagactatatactggagtgtaagcaacaaatgtatgaaaatcaatacatgcttatgcatcagggttctcatttcgttccagcgatcataacaaccgcacagagacagactgcaaactagtttttgactattagataactactactttggacgtgtcctctgggaaagttgcttgaaggcatgcaagtttgcagtgagaacacaaaacccttttgaagggaatatactcaacgtctaacgatctcttggaataaaggcagtataggtactgtcctgcagatcagatgggcatctccaccaggacgtttgcaagcagaaaggtagaagatcacctttgaactttgaaagttctgacatcccgagggggcaaaaggcgccagggaatttctcccgcactgcaaacagcctacacccagatccagcttctgtggatgaactcttgccatgccagacgttggtcctc

SEQ ID NO: 180078 - DNA, 318 bp, Zea Mays
gctcttaggtgatgtgatggggatacagataaccggatctgccgagccattgtgtgcacctacatgactgtctgaggtcatcaggacaagaacatctgtaggtggacataatatcttgggaggttccgtgacagcaatcatcattcgtacgcaaagaatagggagtcccgaacacgatggtcacgggcttaatggcgattacggcgaatagttttctacccagtgaagggttcggatcacagcggcagaggggctccaacgaccaattcgcagcgattgagagcgcctccccggttcttatggctaaggcacaatctg

SEQ ID NO: 180079 - DNA, 513 bp, Zea Mays
gtggaagttgggataagagcatgccatatgcggagttctcttataataatcgctaccaggccagtttgaagatgtcatcgttcgagactctgtatggcaggaaatgcaagactcctctatattgggatcagactggagaaagacagttctttggacctgaacttatacaagaggcagaagaacaagtgcgaatcataagagagaatttgagaattgcgcaatcaaggcagaagagctatgctgatacccggagaagactactggagtttaaggagggtgatcatgtgtatctgaaggtgtcaccgatccggggtatgaggaggtttaaagttaaaggaaaattgtcccctcgcttcattggacctttcttgatcttaaagcgagtgggagaagttgcatatcaattagagctacccaatcatcttgcggatgtacataatatattccacgtgtcacaactgaagaagtgcctcggggtacctgaggagcagctaccaatggaggaccttagtg

SEQ ID NO: 180080 - DNA, 742 bp, Zea Mays
tgatgcatgctagtcgagtatgctttgtggggaaaaaaactagcagcagtgcttccgatagtgatctcgatctcctcgtagtgcttttacgtgtggttatacttgtagtcgtgtttgtgacgattgttgtgtgtaaagaatatattctcgatcgtccacgtatgcgtttactttaccattttcctggtgtttgagagaactagagctgtagatatgccgctagcttgtgcggtcaaaacatacaggtcgatcacgttgccatgcatatatacagtttcactgaatccaccattaattaattaaactcaatgtgtgtttattgttgtttggagctgtggatgttaatatatttttatcatagcaaacttgatcagagtaagaaaattcacttcggatgaaaactcatatatattttgaaaaaaagagggagctagtatggcttgcattggactttaaacaacgtgttgcatgctgtgcatgcattcacacctaaaatttaacggctgaacgaaccaaagatccttttttttcccttgagaagtcgccaagagtttttccgagctaatttattaaaaagaaatgtaaggatattacaagacaaaacataataataatagcagcaaaagattaggaaaatgagcaacttaattagtggatatgaccagataatcatcagcctaccctccactcgacagctcagcacgaaaacgactatatatacatgaccaaatattctacgtgc

SEQ ID NO: 180081 - DNA, 1061 bp, Zea Mays
gctggcaggacgacggttgggaacgcatgaaagcgaggatggcgagcctggtaaggttgtcgcatgtgttgaacgcgggttggcgagggtggagggcgcgataaggctgttgggtgagcacaaaatgcgtagatagcgggcgggcgaggatggcggtcgtggcatgcacggacacggtggcaagaatggagcacgacatggatttcgggaagccacggttggagcgcccgcggttacgggtgggttcatggtgagtagaggggttgcaagatttctagggtgctcgggctggttgctagctccacggtaatggaggcctggtggaggcggtgtagggagggaggtcacggggagatccggacgagcggaggcggcatggagagggagggcgcggggaggcggcgtggggaaagaggttagggatgatggtgtgggcccaaagggaggcaggacagagaagtgcataggacaccaagttgattcatagaattttagggggttatttgtaaaaaatgacgcgggacggcgttgaaactggtgctttaatatagtagaatagggataaccataggcccaatacagttagatgatcgatgtaaatttacggaccaaccatactagaaaaatccacgtaactgggcctttctggcacgcccattaggactagaactaggctggcatatccaaagtggtttgtggtggcttaattgatgcgtaattttcttagcctgagcaaccctacatccctcactggttccaaaatcggctagcacaacgcgagggccgcacctacctctccttcgcctcctttgtcctcgccgcaatcccaccccgtccgctccactcgccccacgacgtatctcccaatcaccatgaccgactaggtgggctccacaaggacctgctggacctcgtcgccgcggcgtgcctcctgtcgctcgacctcctcctctttcgtgtcgtctacggctcctggcgcatcgctgtagccgccttcaccgcccgtcacagctgcacgcgactcgactgcccctagctgctcctccccacggatttcagcg

SEQ ID NO: 180082 - DNA, 595 bp, Zea Mays
ctttgtttgctgcatttaactagtgtttgaatttcaaagcaaatttgaactcaaatctattgaaaaatagagaaaacagaaaaacgggaaagcattcctactgttgggccaaaactagcccacctcggcccaactactccacttctaccatgtgtggcctgctctctcgcgcccactcacgcgagtggccgatgggtggaccccactgctcagcctcacctaccactcgctcagcgctgccctctttccccttcttctcttgcagacaatccgggcccacccctccagccgctccccacgccgcgcgattcctgggagcttgacgcccgcgccactcgtccgtgtgtcatgtgggacccaccggtcaaaccgcgcaaccgaacccgtttccttcgtggcgactgactggtggtcccgctcctgtaggatcttcttcttccccaaccaacattccgccatctctgtggttagctccgcaaatccgcttctgagattcacatcttcccctcgacgcggattcgacttggccctataaaaacattgcgggtcttccccttcctcttccccattgacgagaactcgacctcggtgggag

SEQ ID NO: 180083 - DNA, 528 bp, Zea Mays
tagacacgacaaaaccagttatttgcctcgggctcgggctgagagacaaacccgacttgagagctccatatctttggaaccagtaggccaaatcctttgacccccacacataatcggtagcttatagggaggataagaggttttgtgcactgaccaaggcaagaacaggcttggatgagtgactactcgcgccagaactcgggcagaagaaacgtacacacgtgtttgaccctggtcggcatgccggcgttcgcccaacccgcgcgtgcgctcgccccagtgcatggtcaagtccaccgcacgccctcctcacgtccacgcctataaaggccagtggccctacacgacctcgcctcagcttcgcacactcgccgcgcttagtcatcgaagcttttggtcgtgaactgagagctcttctccgcccgctaagccgccagagctccggtcaccatggccagctcaccccaaccgctcccagtctatgccagtagttcggttagcttcgccagagacccgtgaagctccttg

SEQ ID NO: 180084 - DNA, 470 bp, Zea Mays
cctaggtcactaagacgcaaatgcactccatgggccgcccgagaggccctcattaagtcgtttggtagggtgcatagtgggcctcatccaagcataaaagaagccaaccaaagtggagatgcgccggattggagaagatctcgaagagtactgcacatgtgtaccggtcgtgcgcatgtcccgcagaggaatcacttgagctttgaagatgtgtctcgtgctgatcgaacaccgaaggactcagaaggtaacctggagaaagcaaatgaatatcgtaggactcggtccgcaagtagcagaggaaggtagactcagatagactcaatgaacagggatatctcttcagtcgactatataaggctgaagagccctacaaaaaatggagacttcattggatcgataggcaactccatcttccaccttccacaatcacctttaatccgcaaactcagagcaatccaacactcagc

SEQ ID NO: 180085 - DNA, 376 bp, Zea Mays
ggtagttctgtccttcttatccaagactcgaataggatttttagaatatgtcaagtctggttctaaggcaacatccgttacttcaatggttcgatcgagaacccgaagacactttttcaattgagacacgtggaacacactatgtactgcagacaagatttcgggtaactggagccggtatgccactggtccacattgttcaagaatagggaaaggaccaatgtaccagggtgcaagcttcccttttaccccaaaacgtgatatacccttcatcggtgagactttgaggtagacataatccccaactagaaagtacaagggttttcgtcgcttgtctgcataactcttctgacgagcttgagcttctttcaaatta

SEQ ID NO: 180086 - DNA, 567 bp, Zea Mays
tggattactggtgcgtcgggtgggtgtctcattggcggagttctgccatgggtgctgggctcggtcgcgccagccactggtgaggcaagccatggctcagccgcaggccagggctgtggccgacttggggttgggggtagccgggttggagagaggaggaagaaaaggtgtttggccgttcaattgggtttgggaggatcagaaccgtgggatgaataactgacgaaccagattagaatagccataccccttcgtgccgttgatccatgatcgggtgaacgggagcagatttagtcacttaaaatctatacccttggtgcgggatccgacggaccacgttgttcatcgtttcaggatgacgattggcctaatctgggtcgtccaatgaggatccgatggccagatttcttggataccccttcgcaggacgccttttccttataagcccctgatatttattagaatcaacccgccgtccaattgaggggcgccctgtgtctcaagaatatttataccagaccccctgtgttttgatttaattgaagctcgatccagataactcataaa

SEQ ID NO: 180087 - DNA, 1081 bp, Zea Mays
gtggtatacatattgaagacctataaaaggcaattgattgtatcatgtaaagcgtgagtaaagaaattttaagaagacaatacaataagatgaactaaaatattccatgaatacaccccaaaataacatatactgtagaaaaggtccaaaaaaataagaaaggttagattgaagtctacatttgtatgttggacccctgaccatgccttatattagcacagagcgaatcaccttttattttagggaaatgcaataccctaatcttgtttgtaaagggggtaaaaaaatgaaggagcatagatattaggtagcagtccaaatgcacgaacgcgtttgtggatgcggggcgagcagtaaaaagcaaaggcaggtccatttcaggggaaaacacatttcagagaaaaacacatttagggtttctaatgtggcataataaaagagatcaaaaggcatctgtgccttatagtgtaggtagactaaaaaagggcagcaaaaagcatgcgtgctttcaagtgtacatggagaccccattgcaaagattcaaaaccaaacgcaatgtctccatactggaaagcaatcagagtttgggacccttctattgagcaacgaacagggtaaaggaaagtgaagcctgaaaaggatctatttacctccaagaaacgacggcggcgggggctttcaagtgtacatggagaccccattgcaaagattcaaaaccaaacgcaatgtctccatactggaaagcaatcagagtttgggacccttctactgagcaacaaacagggtaaaggaaagtgaagcctgaaaaggatctatttacctccaagaaacgacgacggcgggggctggacgcacgttgaggcagcggcggcgtcgctgtcggcgctagcagcgtggtcgttgtggtaagaaggagcaagcagaccgagagccttctaggcggtgccggcgtgttttccttttttttattgaccagaggaagctagaacggtagtggtagagcaaggcacgtgcgcaggtaaagcaaaagaagctaccggcagccacgcgtacggcgacgatgctaaacggcgtgtagacg

SEQ ID NO: 180088 - DNA, 338 bp, Zea Mays
attggaagcctcctaccaccatgcgacagattcagagtttcctgggattggtaggatactatcggcgattcattccggatttctccaggatcgctaaaccaatgaccgaattgttgaagaaaggagtgaagttttattggagtcagaagtgtgaatatgcctttcatgcattaaggtagcatctgaccacaacacctgtgctagcacagcctgacaacaccaaatcttttgatgtgtactgcgatgcttcgggcactggactgggttgtgttttgatgcaagacaacagagttattgcctacgcatctagagcactcaggcctcatgagcaaaattac

SEQ ID NO: 180089 - DNA, 420 bp, Zea Mays
attttagtcccaataatttctaattgcgaggcctcattgagtcatattgtttggcagtttagggactaaaagtgactaaagtttatgaggtgggaaccaaacaccccttagccatcttggcctcctccagtgactcccctcgcgttgacatgcaatctccatccttgggatcatcacctttagggttagtctcggagagcggatccccgggtcttaaagggcccacaagtcagaaaggctatgggaaggaaccttcttgggtaaatatgcccccatatgacccccacaccgcgcatgtggtcggttgaggcgcaacctagatcggggtcagacgaggcgttagggagccactcaagtggatttggtgtctgatcgaaggaccgctctcgtcatcaatagtgtgcgcgtcgcattaactgc

SEQ ID NO: 180090 - DNA, 422 bp, Zea Mays
tgctgctagatctttttgtgtcttcaacgcctccactcctgccgaaggtcttagaacttctgatgtttttgtctcttaggttctcggttcttcaattttgtcagccttcggcattgcagccggctcttcaatcctctgcataagagcaggtcctttggcttcaatagccgaagaggtctcaccgccaaattcaggcactatggccggtttaatgtagcacggtcggtgagtaagaaccttcacctttttcctcttcggcgcgggctcgcttgaagcggctgaagcaacatccttcccagaagttgcaccctttattttttgcccccgcggcgggtaccgatagtcagggtacacaaatccaatagcgtcaaaaaccttatttagtcttttcttttttcggctcccgaaggccgcagataatg

SEQ ID NO: 180091 - DNA, 893 bp, Zea Mays
  misc_feature (868)..(893): n is a, c, g, or t
caatcatcatttggctcgtcaaaccgatctctgaaccaaaatgtgtacttcagataaactaggccactttggctggagccagcggcaacctccttcggcatttcccatccacttgcaaggggccatactctgtaagcaatatgctcttgaaccaaatccctcgtgccgacataggtgcatatagtattgaaagccttctagcatgcttgcacgtcatttccgagtgcggctgaaggtcttctgatgccaaagcgtgaccatatacgacgttgaatgatgccccttatatcctccctctggtccaggtcgttctctacataaaaccactcctgcatccaagagcccggccacttcttccgaaatgtaggcacaggataactggcctcagagcagggcacgaagctgtagcagccaaagttgttgtaatattgttctttcccagtcgctttcgtctaataggataattcgtgaatattacagaagcacctggcgtctagctctaacccttggctcctcatgacccatataaaaacccctactttgataagagcctcggggataagttgatgaaggtatatttcaaaagttttcagaacctcgatcaacatcttatgcagtgggaaacaaagtccagctttcatgaagcttctaaaaactaccgcctcattagcttcgagaagaggaacaatattctcccctccggccctcacaatagaaatatcacgaaagtatctgcctttcatcgcttcgatctgcccttgcttaacagatgactttccaaaaacaacatggctaggcctccactgccgatcttcaacttcctcattctcgctctctacatcaaaactctcgctgtcgctggaattcnnnnnnnnnnnnnnnnnnnnnnnnnn

SEQ ID NO: 180092 - DNA, 476 bp, Zea Mays
cgagttttctatgccactgtatggatcgaccctgatcaccactggatgagatttctgatttgagcgagaggatgctaccattcatgccagtaagattcgtcagttgtttggattcaacgagtcatcgactcgtctgcacaacatgtgctatggcacctctgaccctcctcgtcgccctcacggtggagttgctcctggtacagctcacatcgccaaagatgtgttacagggaggctgccactcatattcagctttggctccttggtgccctagtttctcactcagagtttgatgtcgtggattttctcatttgtgagatcgaggacaccatactggatggtctccgtgctcgtcaacagctgacttatgctcactatctgtgtcacatctttactcagctgattcgccccccacagttccagggcactcttgaggcctctcacctcatctttgggttgtaccgtctagctccagag

SEQ ID NO: 180093 - DNA, 1152 bp, Zea Mays
acaagagtggaagatgtggagttcatggaggtggatgatgattatgacgacgtcaacgtggctggcaatgtcatagatcaagagagtgagcaggacgaggctctggaaggaaggagcagtcaggatagccatggctatagcgaggacaaggagggcaaagactctgctgctttgagtgataatgaggaggatgtggggggaaaggaattgttggaagaggaggaggaaggtgccgatcaagaagaaagtcatatcatctacgatggtgaaggagaacaagaagaggacgcatctgaggaggaaacacaggaattggatgaaacaggggaggcgcagccattcaatcctagcaacaccatggcaggtagcactatgaggtcaggaggcgatggcaagcaagtctttaggaggagggtttttgagggcatatatttgcctgagaatccacacaggactgttggcaagggcatccaagggcggacgcgatcacagcgaaaatgcaaggacaagaaactgctgaaacgcggaactttcagtaaaccttacaacattgatattccagactcgacttctgattccgaagaggaaatcgaaccaccagcgccacagcaagggctactgtcgtcaagtgaggaagacaacatgacttttggcaaaaggaagcgcagaagagcagcgataaacaagagatgggacaagaggctgagtgccagtagtgacgaggaggattacggagcatctgccatggatgccaaagagaggcctttccggaggctgaagaaggggctatccaatcttcaggctgccaaggaaggttgcagaaattacgaaggctcaaatcctgggcatgccaggtacagtggtccaaatggcgggaatctagagaacatgtccagtgcacaggatgatatctccttcaaaagaaatgtacatatgattcgaataaagaagcgcggtcgagcagcgaaagccgtctatgatgagctccttgattccttgttttctggctgggaaaatcatataggtaatcctgttcacgcagaggctggaaacagtttgcctctcgtgttctcattcggagatgaggatgcagaagagaacacagaaaatgacaagtatcaagaacaagaagacctgtggatggaatgcggc

SEQ ID NO: 180094 - DNA, 810 bp, Zea Mays
tgactaccagcggcaggtatgttgaggagtgggtccgagtcttctacgcatctgtatggatagacccggatcatcactagatgaggtttcgttttgagcgagaggatgtcaccattactgccactcagattcgccagctctttggatttcccgagtcgacgacttgacttcacaacctctgctacgacacctctaaccctcctcgtcgccctcacggcggtgtggctccgggtacagctcacgtcgcggctctgttccgcccgcccttcacagatgggtcgcgacgttcaccgacagattttactctagcagccaagtacttatttgagcttatcagacggactcttctaccgaggatgggatacagggaggctaccacacatattcagctctagctccttggtgccctggtctctcactctgagtttgatgtcgtggatttccttattttgtgagatcgaggacaccgttttggatgggatttgtgctcgtagacagttgccatatgctcactacttatgccacatctttgcgcagctgattcaacctcctcagtttcagggcacacttgaggcctcacgcctttgtctttggatccctaccgtcctgtgcctgaggctcctgtgccagcttctgctcctgtttttgactctcaggccaaggatgcagctcttcatcagtttgacactcaggatacagcagttgatgatgatgatgatgattttggggttcctcctccgcctcctatgcctccacgctcacatgatcacgaggctgggagttctagtgctgcccctgctgcccctcccg

SEQ ID NO: 180095 - DNA, 688 bp, Zea Mays
gaaattcaagaattgtctgtcctatgcaggtgacatatcttgcttcaaaatccttcttcatatcatgtgtatgcttcttagtttcttcgaccatctttccttttaattgttcgttgtatttttcgattctgaaagtgtgatttttctcaaatatctgtattgggttgagatatccaacccttttaccggcactagcattgggatttgtaccgtaaaggatctcttgttggtcatattgcattcttcaagactcccgtgcatgtcagacattgaaaatttatacaaatcactaataataacacatatatgtggaagtatgaatgacactgacaatggaaacaccgttacgagttgcacgtcgagtctttgaaggtcatcattaaccacatgttcttgaatgtaacaaaggccttttgccttaaaccaccaaaagcatggcctgggatttatatattgatggtgtcgatgccaactgaaggtgcccacatatactagtcatgcaaccttttaataccagccgagaccttccttaggttctccaaagtgagtagaggtctgcccgacacatttttataatccgccttagttggcttctttatctttacggtcattttcttagtcttttttctggacttctcatgctcgaccaaatcaacaatatgtgacgtgcggctccatgcaatccttg

SEQ ID NO: 180096 - DNA, 517 bp, Zea Mays
taaagccatatatggacttaagcaagcaccacgtgcatggttctcccggcttagcaagaagttaattgatcttgattttcatggatccaaagctgacacatccttattttattttaacaagggagatacactgatgtttgttttgatatatgtagatgatatcatagtagtcagctcaaaataagaggttgtcacaactcttttgcataatctacaacaagagtttgagctgaaagacttaggagacttgcactactttcttggcattgaagttaacaaatgtactgatggcattgttctcacacaagggaagtatgtatctgatctcctaaagaatgcatgcatgacaaactgtaaaccagtaagcacaccactctccactagtgaaaaattatctctacatagtggttcaccgttaggacctgaagatgctactagatatagaagcattgttggagctttgcaatatttaactctaaccaggcctgatatagctttctcagtaaataaagtttgt

SEQ ID NO: 180097 - DNA, 479 bp, Zea Mays
gttgccagcatgactcacaaaaacatgtttttgtgcttcttagtttttgtgactagaaggctgcagttcagtgtacaaccgtacatgactttcttttgatggatgtaatatttttcatattcttttgcatttcaactttattgtgattttctgttgcatcgcctctcagtataaaattgtcgaactataatccttccaaaatcatactattacctaaaagctaaaaacgatatgtttgatccagcaatgttgtgtctccgtattccctgtcatggtgcacttatcaaaactacagcccacttttactttttacatcgggagaatatgactaagaatctggttttacttgattcttgacttgtagatacctttttcttcgtatgaaaccccacaaactgcgtcgaccccggtccggccaccacgccaccataccctcacagtacttgcatttgtttcatagaaacaatctactgttcctc

SEQ ID NO: 180098 - DNA, 381 bp, Zea Mays
cgccaggtgagaggaaaagtgttcttccccagactgatccgggggaggagcactgccagaaggatcctggggcggagggtgagaggacgattggcccggatccccgtgatacggaggcgggacaaactgctcacgttcatcaaaataagcttcttcttcttcgtcgtcgtctgctgtcataaaaggcaccccgtatgcctgctggtgccactcgttgaactccgggggaggaggatggagaggcacgtcaggtgagcggggggcgaagggagtacccagagaggaagcttgacgacgaaggttgtcatcagtctcccgctgacgtcttgccacctcatggacatccgcagcaatgttccggcacatggagaaaaatgccgc

SEQ ID NO: 180099 - DNA, 644 bp, Zea Mays
gtcatgaagcatgaggaggacctaaggacgctagaacaatcgaccagagcgcttgaacgaacctggaataagctggccgcggtgagggtgtctctgcggtggcggaaacttagtttgggggaaatccaaaattggagctctcgggtatacgattgaaggcacagtttgggtggcttggtgcttgactatcctacgaagctcacggtggcctcaatttatagtaggcaagagtggtggccattgaatcagacgacgacgcgcagcagtcggaggagtgggaggtcactagcgcaaggaattcgtggcatctaccgcggcagccctcaccggcgatgatcagacggccaaagtgagtcacgacgatgtggtgaatgtgcctaggtacgtggcgcaaggccgtgaatcggctgtcaccggcgagctcatccgaagcggccgtggcaacacggtacggtggccggagtaaactattggttggaagatatctacgacgacgatatttactcaaccccgagcgttatccagtcgatccgatcacgaatcacggcggcgagggcacgaatctacgcgcggctcgtcggcggcgaggttctctgaacctgttccccccgttcactgtaccatggcgcaacttcttcagttga

SEQ ID NO: 180100 - DNA, 529 bp, Zea Mays
ggaagactgtcctccaaggtcgacaatgcacgagacaccacccgggttacctcttgcccaacagaatcatgcagcgaaagaccaccatctgggacctttgaacagatggtcggaatgtcagcctcaggaggctctgataaaatgtctttgggaatgacctcttccagtgcctgatcaaagtctgatatcgaaagctcttgaaggctcacgagtggcgacaaggcctaggagggaatatcgctgcccccattgctgcctctatagtgatggctgttcttgcggatcagcggaatttcttcttcttcttcctcttcatccttgtcaaacacaccaccaacagcttgagaatcatcacaaccttcagcattgacctcgggaatggcgtccaccaggccatcaccaagcaacaatgcaaaaggaccagcatcttgatcaaggcacgacagtcacctcttcttctcctcggcaggtgcagccaggcggttcactcggcgtgaacgctttgggcgggcaccttcgggattctgga

SEQ ID NO: 180101 - DNA, 663 bp, Zea Mays
cccaaacacgcaaccaaattgagaaacacgtggagcaggacaaggaaaacggcttttatgatttcttacctcagatcgagcaccgggagggactgaccacgcgatgaggtggtcctacggtggaatccaaaccctggtgagcaattcaggtggtaccaggtgatcctagatctcttaggcgcctccgtacttttcccccgaggtctgtgctttctccgagctggtcttcaaggttggaacggcggtcaaggtgagaaccgaccatggtggcatgagttcccctttccccggcggcggtgctcggtgatgttgggaagtcaggtcaattcgtggacgaggggaatagccacgaccctacttaaacccaatggcgagggaatctcaaccaaattagccggtcgggaccccgcgatccccgacggaggatcacaatgaccagggcggagtcagactcgaagaaggcgactgacgtgttgggcccacacgtcatcaccatgagagggagatcagggtaacgcgcgccaggcggaaacggatgcgcgcgagactccactgacgatgtggggcccacacgtaagcgaccgcctgttttttccatgggagcgcgcgcgcactgggcggaagatgggctgcgcgggatggaaacgggccgacagagcagga

SEQ ID NO: 180102 - DNA, 638 bp, Zea Mays
caggcactgtagactgtccggtgcgcccatatcgcgttttaaaaaaaggcctccagcccgagaccgagccagaggctcattttttctccctgccagcgccctctctctctgtctctggcgattcctccccgtcgccggcgatctccctcaccggcgtgccctgtctccggccgagctccggcgaccccgaccagtgcttctcggtgagcaacctcccttcctcccctgtcttctctccctctcagttctctgtaggcagtacaacacctccattccacccctttgtccatttttcaaattcctgtcaaatccaatgaatccaaaaggtggaatgtgttcaattgtccccattgtgtattcctgcaggtttctagctccctttgggagggtttcacaacctaatttgcctcaatctcccaaaacctaattcaccgcacgccaagtgttcggtgaaatgcccaaaccagccaaaaatgttccaattgaacccaaatttttcaggcaccttcacaacacttccagcaacatacttgccaaatctctcgccaatccgagtttccaggcttaaatttcactcaattccccgtttcgagcgatcgtttccgagccgagtgcccaaatctctttttcttcgccta

SEQ ID NO: 180103 - DNA, 719 bp, Zea Mays
gggtcgtcttactggtcctgctgcggattggtgggatgcgtactgcgctgctcatgctgccgtcgacacaattacctgggcagaattctccactcagttcagaaattaccatattcctgctggactcatgaagattaaaaggaaggagtttctatcccttaagcaaggaagtatgtctatgagtgaatacagggacaaattcatccagttatctcgatatgctcctagggatgttgaggatgatgagaagaagcaggagatctttctggacggtttaattggacccttgcaatatcaactagtatcgcacacattcccgtccttccaaaggctacttgacaaagctattgctgtagaaaacaagaggagtatgtttggagagaaaaggagggctgctaaccaagggcaggctggaagtagttaccgtcctcgttatactaccactccaagtacaccagctagtggcagttccggacaacaaactcaacgggcactacctgctcctccgcaagcaagcaccccaataggacctgttgctcctaacacatccaccaacatggcatgcttcaagtgtggacaaccgggacactactccaactattgtcccaacagagctgcctacactacaccggctctgatgaagcaaggacaagccttggcaggaaagagtcaacccttatctgtcaaccggggacaagcccaccatgcagaagtagaag

SEQ ID NO: 180104 - DNA, 438 bp, Zea Mays
gattaacctgtccataacaagaattgggagaaaagggggggctatatagagccagttcagttaaacgaggaagattagtgacgttgggaaatatctgaaaaaaatatccgcgtcgctatggaatccggatgcgtccaaacaaataggagatagagatggccagggcgggatagctttgagccgattcaccgtcttgcggattaggccgggggagggacaagaatatctcacttgcgtgcaccgtggcttgtgtgctcctctcgcggtgtcacctgcgcccaaattctaccacactatgcttccttgttatgtggtctccatgcactagcatcgtaccttagtgattgcgggtagccagccttgtcaccatccctttaaattgagccatgaaccaccatggggcattcactgtcttccggtgtggtcagtagaagccaa

SEQ ID NO: 180105 - DNA, 336 bp, Zea Mays
aaagtggggatctttatatgggccatgaggagccaaggactggagccagatgcaagatgcttttgcaacattcatgagttgtcttatgagacgaaggctatcggaaaggagcaatatcacaacaactttggttgttacagtttcatgcctcggtctgaggcgagctacccatttcccacattttcggaagaggtggtcgggctcctggatgcaggaatggttttacgtgaagaatgacctaagtcaaagggaggatgtgagagggattattcaacgccctatatggtctcgcttcggcattaggaggccagccactgcccttgggaatgatataca

SEQ ID NO: 180106 - DNA, 510 bp, Zea Mays
ctcttcgctagaatagcgagacattctgtactgtgggacccatcgctcagtggtgatttgcgtatatatacgagggtttgtgttgaaaatatttttcgtgctatcgagctttgtgttgggtttgtcattttggctttctatctccgcaaccataattgcttttgagcttcggctttttgttgcaatcatcgctgaaatggccaaagagaagaaaaatgtggatcccgcacttaccgaaacaattgtgttgctttgttcttgatgtatagcattcgagaacaagaccaacataggcgcccaccgtgggtgaactcatccgaccaccttggacaagcatcgaccttcattatgccgccgaagaaagccgggccagtggctgcactgcagctgctggatgttaatgaggagacgctacgcgaagctaggagccagaagaggaaggctaccagcccaacacctcaggaggaggaactggaccaagagatcagggaccttgaagctatccatcaa

SEQ ID NO: 180107 - DNA, 521 bp, Zea Mays
ggttctattttgacgcctcaccccgatgcacaaacgaagatggttcccgaggcgcatggtggcggtggctcccccaggcgcgcggcggtggcggttcccatgcacgcgcatggcgattcctccacaaggtgcccgacggtggttctcaaggggcgcgcgcggaggtggcctcgagaggcgtgagcggcagcgctggccagacacatgcctgagcagcggcaccccctgatgtgcgtgtgacgacgaggccctcctacctccaactattcttcgagctccaacaagttggatgccgttgtgacagcgtggatcgtccgacgacgacctcctccaatccggtggttttgtggcgttttccaacgacgacctcatctgatccatgtgttatgcatttcatgatatttttatgccgaccactgcaacttttatgcattccatttgaggattttatgatgatgaatatatcgtctctcacgtgactttgatatttctacaggaataacatttatgctacatctgcc

SEQ ID NO: 180108 - DNA, 402 bp, Zea Mays
caacacttggtttgttctttccgtttgcccatccgtttgcagatgataagctgaactaaagtttagcttggtatccatggactcatgtagtcttttccaaaagcgcgaggtaaattgggttcctcgatctgatacgatcttctttggtactccgtgcagacaaacaattcttgacatgtataactctgctaactgggctcctgagtaggttgtcttcataggtataaagtgtgccactttagtcaacctgtccactataacccatattgaatcatagccattccgagtacggggtagtccaactatgaaatccatactgatttcttcccatttccattccggtactttgagaggttgtaacaatcctgctggtctttgatgttcggctttaactcgttgaca

SEQ ID NO: 180109 - DNA, 339 bp, Zea Mays
tgccatttggctacacgggagtgattctcgatgggagcagagttacgggaccactaccaaatgcccctcaacagtcacgagaatttgaatatcacgaggcttgcatgcggaggaaggtgaaaggctctatcgatgtctggacctcgagggtctaaccaactagtgaaataatgttttgtgcccctaacctagatgggtgatgcaagatgacacaatttgttatcctggttcgggcaaaagaagccctacttccagtagagtgggatgagacttatattacctgcacctaagtgcttacagtagggaatacaagctgagcgagagagggaaggatcccaa

SEQ ID NO: 180110 - DNA, 331 bp, Zea Mays
aattgctcccaaaacaccagcgtgccacgtcgtcactcggcggttacttctaaaaccccggtgtgccacatcatcactcggctgttaccctcaaaatggccgacacggcccgttctaactcggctgttatttctaaaacaccgatgttgtcaccagtcgctcggcatttatctctaaagtgtcgatgatgtcctcagtcgctcggcatttatctctaaagtgccgacgatgtccccagtcgctcggcatttatctctaaaagtgtcgatgatgtcctcagtcgctcggcatttatctctaaagtgccgacgatgtcctcagtcgcttggca

SEQ ID NO: 180111 - DNA, 444 bp, Zea Mays
agccttcgtctcaataagcactacgggcccagctttagcttcggcctggactttggcaacttcagcaattttcaaaataggagtaggggtcaaggccttcgtggtcttcataacagcgtcaagcacgctggccatcctcctcctcttgggagttgcgacaggacctttttgcaccttcgacagatttgcctctaccggtgggctcagaatttctggcatttttattgtttcttccacctttggctcttcagccttatcatccttagcttcggctggcctgactgtaggcaccttcagcactacaatcggctcttcaatgctctgcacaaccggagcagcttgttttgcttcggcagttgaagaggtcccttcgccaaattcaggcactatggccggttcaatatatcgtggccagtgggttagaaccttcattttcttgccctt

SEQ ID NO: 180112 - DNA, 477 bp, Zea Mays
tcctatttcgctggctagtgggcgcccttggtcagctgcggcctccagcttggtccatgcgggggggagatccctgtgacaaccctgcgatgatgtatcgccaccgcgtggggcactccgacggagcacggacttccttccctacctaatgcgcagaattagcgggatgggtgccgcgggatttgcgcaagtcgttgggcgtccgtgggtatataagcttgcgaccggggggagtatcgccatgaacgaggaaaagagctcgtggggagtaagctacttgccccgtcggggtcctgctgtcgggtcgaggagcttcgcccgtgccctgtggaggtggtctgttgggcctcgccgcaggtgtacgagtaccagtgaagcacgggagacgcgctgaactcgggaaatcgctcaccggtgtgttgctccaccgcggacccgccccgaaccgtggacgagctcgctactccttcaatcgcg

SEQ ID NO: 180113 - DNA, 982 bp, Zea Mays
gcgatatagttggttggcattttgcgaatcaaatttgaatgcaaatgctagatttgaaattaatgaaagatattcaaataaaaacaaatagaaaagaaaaaaagggaaaagagaataaaaacaaaaaaaagaacagcctcggtttgggccgagctcctcccaccttccggcccactccctcgcctgctcactcgcctgcctgcgcactgatgttcggtcaccgccacgtgggcccgctcagctggcttccctgtccacggctctgactcgctgacagcatgggaccctaacgtcggtttcatcctcttccccaaatcctctgctcgctgcaacagaccgcaccgcaggacccagattccaccggtgaattcgctcgccttgttgtaaccacttggatgcgtggtgtgcctgccgaccttttcccctagcggagacctcttcttccccgcggactcgtcacgccgaaccggccgccgtgtggggcgcctggaattccggatcggtggttgggatccgaagctcgtggcagccgcgatctctggccctatagaacctggccgggtgcgccgtcgatacacaagaccgggcgtcatctcctccatccgtctcgccgcaagcctagaacagaaccgcgcggcgcccgggtccccagatccccttcacatcggtctctcgcctgcgtataaacttggtttcgcaaccactgccgctcacctccccaacgccataaccaagcaccgtagttgtcgttgtgcagaacctcatcgcgagctgagcgaagccgccatcgatgccccgtgctctgggcgctaatcgtgttccaggggatagacagagagggagtgtcaggtggccgccgtcggccacatcacgcgatgtcgcgggatagtccttggagtgctgttcggcgtgttcaccggagcactccgcacgtcctcagcacttacacgggcgacgccggtggccggagttgggttgattc

SEQ ID NO: 180114 - DNA, 426 bp, Zea Mays
ctcttagatagggtacctatagttttagcaccggtgcggtcgcggatgcatcccacaacttcttcatcgaccctgccaaagagcattgaccttggctggtagccacaagatattgcaaattcttttagctctgacatgtcctcttcggagagttgttggccgcccaagtgccataggttgaaattcacttcttccgaataggtttcttcaatcttcctccccttgtcaggagctactgcggctacctccttctctgtaaccacgtctaatataagtctgtcaatttcggacagagtggttgtaagattttcatcttcgactacaacggtagcttcgacatcagtcgatttagtagctttgtctgccgaggctgacgacggggtctgttcaatggcttcttgtatattcatcatgcgacgtttcttc

SEQ ID NO: 180115 - DNA, 610 bp, Zea Mays
ttcgaagatctgaaacaatatcttatacaactgacaacccagtctccaccttcgcttggagcctcactcctcctgtacatagttgcctctcattatgttgtcagtgcggcactagtacaagaaaggcaagagggccagatgaagaagcaaatgccaacttactttgtctcagaggtcttaagtccgcctaagaagaactacacggaattggagaaggtactatatgctatattaatggcctatagaaagctttagcattattttcaatctcgtcacataattgtaccttcatcacaacccctaaaaaacatcataagaaacaaagaagccacaggtagggttgaaaagtgagttgtagagcttaatgagttcaccattgacttcgttcattggtcttcaatgcagtctcaggcgttagcagatttcactgctaattggatgacaagtgctcacgacgaagagcggatggtagataaagaagtataaacagtattttgtgacgggtcttggggaacctttggcgcaggtgctgcagcagttttgtgctcaccatcaaaaataaagacatcttatgcagccagactagacttccagtgcacaaataacattg

SEQ ID NO: 180116 - DNA, 536 bp, Zea Mays
aacttgtgccgtccctcccccgttagaattcgacggaggacgagatctcctactgagaaggatcgctgccgcacggccttgtcgtgatagcgccttagagtctgctggtatcgtgctgattggattactgcattcagccgttcttcctcgagtacatcaatgtcctccagcctggtggcttcgacttctgctatgttttcgaagataaaccttggcgctccgaacttgaggtcagctggtaatactgcctctgacccatagaccatgaagaaaggagtgtttccatgcagagctcggctaggctgggttcttaggctccagacgacatagggcaattctcttatccattttcctgcgaacttttcattcttatcgaagacctttttcctgagtgcctccagtatcatcccgttggctcgctcaacctgtccgttggctcttggatgtgctatagaagcatacttgatctgaatgttttttgctcgcagaagtcaaagaattctgaacttgtgaagttggatcccaggtcagttatg

SEQ ID NO: 180117 - DNA, 617 bp, Zea Mays
atctgtggataaacttgacacaagggtggaatttaaatttgaaatggaaatatgaatttggaaaggaagaaaagagattaggaaagaaaataaaaaaaagaaaaggattaaaaccttacctgggccggcagccaacccattcagcccaccccagctttcctcactccgcgcggcccacattcactccttcacgcgcgcgctccgcccactctcgcttgccactgccacatgggcccacgttccgctgcgcagcgcctcacttacgtgtgggacccaattgtcagcattgcctcccacgcgagctctgaccggttcttccccaacggtgtgcgtggaccttgcgggggaatcacgggctttcggttgaagtggtggagctcggggataaagcttaccctgcgactacgtctatccctcgcctccctctatccatacgctggacccgagcatcgaagttagccaccgtcgccgcgcgccatcgtctgggtgagagaaggccaccatccgtcgttgtcgaccagcggattcaccgacgtgcgtgcctcggtgcttgatctggggtgatcgcgacgtcgtcccggtggtgtccacgggttcctcggcccctggacttgttc

SEQ ID NO: 180118 - DNA, 799 bp, Zea Mays
gtgcatttctattggctcaagatttgccacacaaaaggttataaagaacataatcgcagaagatcccaagggtgggatctcgtgtggccactaccttctcctatctctccctatcgcatgatctggcagttgcacgaaagaaaaaaaaatccaggagcaggggaacggccatcgttggcctccaggggttggggcacgccaccggtgagccgcggtcggccgtggcggggctacaggctgggctcgccatggctgtttgccgtgcccgcgcctaagccgccgttcagcggctccaggcccgtgagccggtactcgcgctagccggtgcagtgcggcagcacctgagccacgccgaccgcagggccacgcccacggccgggctagaggcacccgcacgctggcagggttgccgcgaccgcgcgcacgctggccgcgcctggccacgagcaagggcccgcagtacctacggggaagaaggctggggaagacagagaaggggtttctcacctgcgttgagagagctccggcgacggcgcagtgcaggggtggaagggcgccaggtgtgagggagatggagggctgctacgttctgggaatgagggggaagagagagagcgtcatgtgtgctacgcaaaactgcatagaacgtggcccttttttgtgggcaagtgaggtgaggagaaaagtggggccgaggtggttactgtttttgtcgtgggttcgaactcagccgatcgagcggagggaagtttggaaatcaacccaaggtagagaaaatcatcacgacatatgagtttgt

SEQ ID NO: 180119 - DNA, 877 bp, Zea Mays
gtttggatgcttgtgaatctattaccaaatctctatgacccctacatgaagatgcaagagcttgcgcctgagtacctatgcccaaatgggcatagttggcaaagttaccaaagtgctaggtggatatagttgccacagaaccaagtgaagtgctagttggacactcagattctttgcccttatgccattcttcccattgtttagcttgttctctagttagggtgatagagggagtgcctctagtgaccaccacattggcctgaggaccaccacgacctctacctccagcaagtccaccatgtctccctccatagcctccatggcctcctccataggcttcacgagtaattccacaagctccaccaccttccaccactgccacgaggatgaggacaattgtagctcaagtgtcccttctcaccacaagaatagcaatctctatcatcaattgcggtgtaggctgattttgcaggatcaccagtagtcattactcgaagcctgctttcctcattaatcatagctgacaccgtctcattcatagtagggagactctcttggtgacaaaaggttgcccttatattttcaaatttaggatccaggttcttcaaaaaatgagtcactctcctatcctccacccacttatgaacaatatgagcatcctctgggttctcatgcacagcgggtcataatgatctagctctccccacaaataatgaagctcactagtatatgctcaactggcatccttgactatttgactgtatctgccttactttgtatttccatcatcatcatcatcacattcccctttcttgagtacatattgctcaaggtcttccaaatttgtgctgcagtgcgcatggcttcaaacatctta

SEQ ID NO: 180120 - DNA, 646 bp, Zea Mays
gaaattatccagcgccccatctggtctcgcttcggcctccgaaggccgaaggtggctgtcgagagtgacgtcgaagcgtgccagaaggcctttagcaatgtttgtgctttcattggcacaagagatataatccaagagcacatagcctatagggtgtggccacttgtggatagctgggaaatgccgaaggagactactgctgaatccagtgaaggtggcctagttcgattgaaatataccttcacattcagagagaaatttgatgaaccaaacgatgattagttgaaatgcattgaagctaccagtgacgagctgcttgggacatattcgaaggccgaagatgatgccttgtccgcagccttcgggggtcgaggcaagaaaagattgaacagggtgtttgatgcaattggcttcgtataccctgattatcactacccattacgaaagcaaggaaagaagagaaaaactgccgcttcggccaccactgctgtgctgaagggcaagaaaatgaaggttctgacccatcggccgcgatatattgaaccggccgtagtgcctgaatttggtgaagggacttcgtcgactgccgaagcaaaacaagctgctcccatcgtgcagagcactgaagaatcgattgtagtgtcga

SEQ ID NO: 180121 - DNA, 504 bp, Zea Mays
aagaaattcaacatcagatggccagagtgcgctctactgcgagggtgacccgtgacggagaggaggccgaagccaccgagactgccctgatctccgaagtgatgagacaatcgggattggttgtgacagagggagccattgaacaaggtgcacctactgccgaaactgaacaagatgttgaggaagaaatcactgatgaacaagaagaagattatagcattctgatcctgtcgaaacccagccacttggattttggaaaatctactgtcttagaggccgatgtgcccatgatgattaagctgggttacttcggggagactgagaagaagcttatttgctttgccggcgaagaaaccactccacagccaaaaaatgacgaagtaatagttttcagaagctttttcaaagttggattgcggtttccgctgaacgagataattggagaaattttggataattatgaaatatttcttcatcagctgacccctaacgccatcgttaggc

SEQ ID NO: 180122 - DNA, 397 bp, Zea Mays
agatcttcggcatggtcgttataccaaagtgaaagaacgttgattaatgtaccattttgatgaggaccgatttgcaagtcgttacacgaatcagggcgcaaagttcatccaaactcgggctggcaggcacggtagcaatctaggttcagtgcacttcgccgtggatagtaatgccactgccgtgttcactgctcggactcgcgggcgtgggtaaaaatcttccaagacgtggcgcaaaccatgaggtggcatcgttcaactgaagcatttcacctgggcgctcattgtggccttacccgcgcacaagctcgccagcgcacatgaagattttttttgaaattctatccgattttggtagcttccctataaattgagcccaagcgttgcttccttacca

SEQ ID NO: 180123 - DNA, 598 bp, Zea Mays
taaaggaagaggtaaatgtgcataaaaaaaccaggaatctaggtacaatcaagaatagaaataagataagtcttgcaagaggtaaagtataggatataaccacgggtgagataagtaagagaccacgcttgaactaaggtgggagattggaggttttagataacgaacatagcgtaatcaccaaggtaagattgagagatgagaagggtaaaggcaataagaagcaaaagcacaacaaaggatgaggttacaaactcacgagccaaagaagaggatacgaccaagagaaagaaggtatgagacggaagaggggcgaatttaaagggcgggtatgagacaaacatcaatgtaggatatagaggtgtcaagggtgcatatgataataattaaaaagcataacaaaggatatagttaagacaagactcgcgaaacgacaaagtggagaaaacaatcaagggtaagatcgataaggttccaacagaagggttgaagtaaagattcattaccgagtggagttacaaggaaacaacgagattactacaggtgtgcaaaataaaatggtcacccatggatcattaggaaacaagggtggtcaagg

SEQ ID NO: 180124 - DNA, 522 bp, Zea Mays
tgtgatctcaattgaccagccatcccatcgaccaaagcctgatattgaaaacaaatgagtacaaagacagtaatttgcctagagtatagccacaacaggaaaagccaaattacctgaagattagagaagaataaaggaaatcccaaatcacgagaagccaggtggtggctcgacgaaggaatatcaactgtggcaatctaaagaacatcaccagggatcaactcagcaccaccagcaggcatcagaactctagcatccggtgcgccgacctctaaggcgacttcctcatttgaagcatgcactgttaccatgccctcaaaatgtggaggagaagacccaacgtggacatccatggaggtatgagaaggggagcccgcttggacaccctcgggggctgggttgcagcccgcactgcccatcggagccggatcaccaccgacaacaccctcgggggctgggttgcagctcgcgctacccacccgagccagatcattaccggcaacaccctcgggggctgggcaa

SEQ ID NO: 180125 - DNA, 531 bp, Zea Mays
tttaactcctacatttgaaagcaaaactctaaggtaaagaagaggaaaggaaaatcttaattaaaatgtgcaagaaaaattttatatgtagatatctctagccttactagggtcttggaattaaacttaaatttagtaatgaatccccaaccaaatttgggtttgaacttgaattccaaaaatgtgagaaaaaggaaccaggaaaagaaagaaaaaagggaaagaaaatgggaaaatggcacatgggcccaaactatctgaactcggcccagttcgtcccatctcgcgcgcacgcctgggttcctgtctcactgacgggccgggcctacccgtcagtacctcttgcgctcgctttcgtcgctccgtccgtgaccgatgggaccaagccgtcagatcaatcgctctcacgccaacagaattcgcgtagcgacctccgaaatctctggtgaactcgccccctgtccaggtttctcgctgattcgagtcgttagcctataagacctgacccccaagaacctctgtgcccatagc

SEQ ID NO: 180126 - DNA, 327 bp, Zea Mays
gtttcgcatccggcaaacggggtctgtagctgattatattgatcggttttgtacattgatggatcagttagctgcttatgaatctgtgcatgatccgttgtatttcacaacgcgatttgtggatggattgtgtgatgaggtccgtgctgtggtgatgatgcaacgacctggtgatttggacacagcgtgtacgctggccctgttgcaggaagaggtaacagattctgttcgtcaccaggattaccgcaagttcagtacacctccttggtacaagacaaaaccgaaggggcctcatccattaccttcaccgttagctgtggatcgacc

SEQ ID NO: 180127 - DNA, 849 bp, Zea Mays
cggattttgatgactctaagtttaacctggcccgcccaaattgcatcggacggttacgatcaatcccgcgctgaacgacatcccgatcaaatgtacatcgtctgctgaagatcctgcggtccccgagcatcatccaagccccccaatcggagccatcgatttctggattgacacctcgggccttatccctaccaacgccacaccggcagctgcgcacaccaacatgaacactgcgtcgccattgccgtgcaatccgtccacacgatactcaaccctatacttcaagctgaggagagcgatagcgaggaagcgaggatgcagagttagcgaggatgcacccacagtgaagagtggaagggaggatgcgcctacgctccgtcgatcaattcccagctccaccgtactctagccttgatgggtgcggtgtgaacacacaccccggggttccgtaaagacccgaaggccagacctagcccccaatcgaccttgcagactggcagcaatggaacactcccctcccttgcggcaacgacggtggtctttcggtgtctggtggtacaaggagtctggcgaacgggatgagcgcgaaggcggtcgaggggggtcttcaatttgtagccgcggggggtaggttagggccaccagctgaagtccgccatactcgccaggttgttacgcccgtcagcgcgaccatggcggctgggggggagacacacagtagtcctaggctgacccgcagcgacacactatacatggtgagggagcgtctggcagacgggtccgcggcattagcgagcgcgagcatggatgaggagcagcccgctagcagggcgaccccacatgtcggcg

SEQ ID NO: 180128 - DNA, 431 bp, Zea Mays
cggatatatacttagcaatttccctcttcattttggtccatcagtactaggatctgaggtcatgatacatcttgttactgccggggtgcatggaaaattttgaaaggtgagcttcatccaatattttccttctgagctctgggttcttgggaacaaccaatcggtccccaaaccatagaatccatttgctgtcctgacggaagcatttatatttttctgccttttgttcgatcatttccttaataacttgaacacccttgtcaccaatctgtgccatgacaatttgctcttgtaatgtgggctccactgaaatataacttaaagcaccggaggaaacgacttctattttcagcttgcacaactcatcacatagggtggtgatccttgcatccatattcatacaattgcactgggccttcctgcttaaggca

SEQ ID NO: 180129 - DNA, 342 bp, Zea Mays
gcagcaggtcaagcacgcggtgcagccgagcttcgtggtgccgaggcggaccgaggcgccgccactgtcatcggtgcctgcaggaggtggggaggtgtggcgcgtggacgacgtcgacaccgcggatgagtcgctgtgcgccgccgaggagagatcgttcaaggtgtcctcgtctgtgatcgtgccgccctccttcagcgcctcgtcatccgagtctttcggcctcgacgatctctagctgtggtagctaccggagggaacgactcgtgcttattcgtccccgtggcacgtttgcgtggcgcgcttgcgcgaacagtgtagatagtgcgcaagcagctgcga

SEQ ID NO: 180130 - DNA, 872 bp, Zea Mays
aaagcaggaaataaaattagaaaaagaaaaagaggacaaaagcacttgggctaaaacctccctggctcggcctagctcgggcctttctcggcccaagtggcccacgcgcgcctaaaccctcctccagggcgcagcctgcttcctcgtgcccccttcacgcgtgtggcctacgaatgggtcccacctggcaggttcatcaacaacctcgtggaaataccacagctcggtcagcgtcgcgcgcacgcgcgtaatttcctccctgggccactgtggtgtgggcccgtctggtcgggtgcgcgcaccgtatcgctcctgccctgtactcccgctgactcgtggggtcaccttgttagccctatcctcttcctcacccaaccgaagctgcgaataggatggtgtccgccgtgacccccgccgtgcttttcgggattctctcgccagaaaactgccggtcggactcgtgcgccctgagtatttatacacggcccagcaaacccttccccatcggcttatccatgtgcttccggggaaattgaagaagcctggtggccgtcgtgtgcctatccgcgtgcgccgctgccatggattcatgcgagtgtaaccgttcagggcgagaagtcggaactgggagcctcgccgggtgtccaaggtcatgttcgttgcagctccgggtgtgtagaccaactgggtgatgggaaattcctcgccgtcgtacaacttccgccatggtaccgctcctcgccatggccaacgtcacccgtacgacaatcaatggtaatattcccttaatcttgttcgccatgttcccctatacacgtagcaccgttctccttgaagatagcaagtcagagcaagcgatgtccctgcgccgg

SEQ ID NO: 180131 - DNA, 395 bp, Zea Mays
ggaaatggaattgaatacttgaccaagcaaggcatcgatccgccatacaacagaaagcatgacgacaccgatagatgctatcaactaatcatttaaaaaaatactaaacttacttctctctttgccactacaccaccctttagtcacatgaccatcatgcacatccttcacacgattatataatagcaacctaaacgtcgtgttacacaatacatacatctttcctcgtcgcgagtataaccatattacgacatatacccgcacacctcaatcaaatatcttacgccaccaccactataatacaccatggcacacacgcacatacgtgtccccatattacgcacaagacatcaaccgcacaagtgactccaacaggattaatcatactcctcatt

SEQ ID NO: 180132 - DNA, 385 bp, Zea Mays
aaggaattttttgacagggctgacctaagaaggttctgtcccaattcttttgatgagtttgcttttgtcccttcgataggaaatttggggggtttcattactgtttggaatagttcgaagttggttggcagtgctatctttcagaacgagtatgctctctcggttgaattttctgctatttcgtcgaatgaatcttggattatcaccaacgtttacgcgccctgttctccgaatgggaagattgaattccttcactggttctccaatattaatatgccctcggaaaagcgctggttgattgttggggactttaatcttacgcgtaggcctgaaaatagaaatatcgctggggggacattaatttgatgctgaaatttaacgaggc

SEQ ID NO: 180133 - DNA, 987 bp, Zea Mays
gacaaagtctgctggagataatcgtagtccattctagcagataatcttagtctattttagcagaccatgtaaagtaatgttttgcattgtagattgtactgtttgcagagtgttgaaataaagagtcagatatggagtggattagggagtctggagatagtataatccgagttttgttccaaaacaattgcgtggtgtggatgtgatccgagttttgttccaaaacagctgtgtggtgtggatgtgttgtaacacatgctttatcctaatgtgttgtgcaacggggcgctggttacagctagtcagtagctgcactttctatctatgacggatcattctaggaacagaacaaacctagatcatgcagtttagtgttcttcctttcgacccacaatgggtcattcctggaccaaacctagaaaatggagctaggtatcttcttggccgtctcaaagtaggcccatggcatgaaagaattaggctcatgcctcacatctggtcttgtcacaacacgtttaatatatcgattcataccatgcctaaccataagcttatccacccatagcacgacatggtcagcgttagatgggctatgccaactcgtttagcacgacatctcaatagttcgttagggttgatgagctattaaaaagcctacatataaaaccttgacaattcacattataaactacaaatagctcattacacgagtaacgagttgatacctttatagttcaaacaaacaaacatcttgttgggctcttgcttttgaatccttcgggatgtcaaaaacaagacaacataagttagtacgtttcccgcttcttccttcatttaacctctttccgaaggtcatatgaaagaagaaggtgagaaataaagaatcctcacatctctaacaagaataaaagtgcagataataaagaacaagtcctctaacttatctgcatattcatctcaaatttcattcctggcaatgtgataaac

SEQ ID NO: 180134 - DNA, 809 bp, Zea Mays
gagaaagagagagagaaatagaaagagaaagagaaagaaagagagagggtgagggagatctactccccgggttgtcatggtgggtcctcggaaaggtcatgtgtagccatactcctagtatggcttcgtctattactctagctccagtagtgagtccatcgttgatgtctttgttgtggtgcgcggcgagtcccacggatcagtctcatggtgcggtcgtacgcagcgtggcttctcctatcgtcaagagccctacgttacctgtcaacatgcgtaggcgtacactcggtatggcacgttgtcccgtccttccgatgtatgggtcattctagtgaccccaacccccattgagtgtgttgtgcgcatgttcgggcgtggctcaattgtgacgcgtcccatcatagctgtcatggatcagtagcgctggactcagctctttgactcgttgagttgctctacaatgagttggtgggagagttggtcggctggtcctcttgcagagttggtcggcttcgggagcatcgcccaagatgccctcgggcgagtcagagagttggtcggttggtccacctcgtagagctggtcggcggagtcaggcaccttctggagcaccgcccgagatgccctcaggcgagtcagagagttggtcggtcgatctgcctcgcaaagttagtcggcgaagtcgggcaccttccggagcatcgcccgagattccttgggcaagtcgttaatgcgctgctcgtcttaggttggcctcgggcaagccgtgactgtgtctcccaccctgtgatggcctcgagcgagccgtg

SEQ ID NO: 180135 - DNA, 566 bp, Zea Mays
ggaggactgtcatcatgtaaccagcaaaagtagaacaccgtgttttgatagtatcccatctactcataaaagattttatggacctttacgacatgttcctcgtctagagttgtaagcctcaataatttgactccaaaaccattgacacttctggcctgtgttaattatgggatcacaagtgacaacaagccaagcatcacaaaccctcatgtcctcatcagtagtgaagtttgctagcttagttcattgattagccttcttagctacagctggtggcgttgatccctctacgtgcccatccgctggaagaacaaattcttcactcgcaacaggctgctcctcatgatggcttaggaagctaccatattgtgccatcacctggttccagttagttcccatgctatacatacaagagaagcacaacaaaattgtcatcaatctgcactagtgactttgaaaatgcacagacacgtatgacaataattgcaatcgtttgaacatgcacaattcatatgaataaacccaaacatactaaaactcaactgataataattgtaatagttgaa

SEQ ID NO: 180136 - DNA, 824 bp, Zea Mays
ttttagtatgtagagaatatttttatgaacctaacgcaactggaacggagtaaaacagaattaagacgagtaagttatgccataaacaagtttctaggtttcctaattatttattttaactctataaaggtttccaggggtatattttaaaagtccagggactttgatgtaattactttgcacatacacgcacgccgagttactttcctttaaagacaggggcctctttgcaaaaccaatctcggattcctgcacaaggacacgtggcgtcctatgactggctgagatcgtgccacaccccggcgcacatggtgaggcgcacgggattcgatccgcacaagatccccaccaccacacacacgtgcatacaaatgagatcaccccggaccatcggatcgacgatcaacgactcggattcaaagtgccgaagggttatctgttgttctaatcttgatcgtaccttaccgatctaacggtcaccgtttccaacccacgccatcatctccaaccagccacccatagtcaatcggacggccagggggttttcttccccacgacagtccccagatggcggtgcgcgagaaccatggcggtgatgcattccggtgaaccggtgacccgaggttatggcaccccaaatcggtcgtagaccggcgctacacgtatagaggatgagctgagtcaacagagtcgatcctcaccgatgaagaaagcaggagcagggccagccatggcgcagggcggattagcagccgcgcccgtactccgatgaggaattctagcgttgacgccacccaatcacgccgatgtggccaagaacttat

SEQ ID NO: 180137 - DNA, 792 bp, Zea Mays
tgagccatctgttatgccgttgtgcgatgtcagccgttcgatcccgcccaccagccccagcaccgaagtctatcgtgccctggcttccccttctgcgattccgtcgctcgcatatgtcgaccctcgatcgcaacttctcttctctccactcccccacgccaccacatcctacagccgtcacccagcccacaacaaccgccggccgccgccgtctctcgcgcttcgcctggtccatccgcctcgctcgcaacctcccacctgcgccagccctcatatgattcctccaccatgaaagccacgacgcatccaatccaccacgacaccaccgccccgccagatccgatcgagttgtgtgctgcagtcggtggatgagttggacacgagcaagaagagccaaggcgatggtgggggcagagctaaacgtgggttggagccggtggagggcgtgtatctgagagagctgcaagggttcatagcgacgctgtcaccttcgtgtccacgccgaggaacgttgccaggttgagcgccatctcgccggagctttctgtgtgcctccgcgtcgtcgtgctggatctgccgccgcaggtggagggcctcctggttggtgcagagtcgaccattgacctcccatccgagaaggtcgagctactcaaggaggcgttcgatgatctcgtcgcgtcgttcgctagcttcgtcgtggagtcccccgcgggcgtgtgccgggccaggcgtacctccagcgtggtggcctcggcctcggtcgccagccccacaggtttattgtcattttca

SEQ ID NO: 180138 - DNA, 961 bp, Zea Mays
attgccttcatagccgatatcattgtgatacaatttttggccaaatgataaaaaattttagggcagccgtgggtgcctaggggctacatgacctttgcggggacagtcctggcattgcttcagtgtccacctcgatctccaggatggtggcagcggagcacgacggcattgcgattgaaaagctctcgagactcttcaagtctgtcctgggctttgaggtggacaatagcaccttcatggaggcccaaatcagggctacgttctaccccaagttcgaaaatgataaatccgatcaggaggtgagagtttggcagcacaaaaaatgttgttcagttttgccaaatactattttactgtagctgcttagctcttgttgatttctatggggtcataattacttccgataatgaagaaacatttaatgaaccctctatgcagtaaatccttagggtcgttgattgttctagcttctttgggtttctgttattatagtttagtaagtggaataaaagtttagttaagcttacccttgatttttgtgatgacagacaaggaccagaatgattgagatggtgtcccatgggcttgcaaacttggaggtatgtctcacatgttggtttttctttcaaataaaaacgggtgtttatttgtgtgaattaatcaatgattatgataagtgtttgctatgcctgaaacttcatgttctcttatagttatactgttgtgggtgtttttgttgtggggcgtttgttttgtgaagcttggggaaaggagtctcctaaaatataagcagatctcaacaatttttcttgaggtatttcatgttattgtagtcggtcatattcttcatccccgctgtcgcgcactgcaggggagcttgggaccagcatcagctggcggaagaagaggatgtcgacacacttccagaggtatgtgatgaatttcggattataggaatttg

SEQ ID NO: 180139 - DNA, 426 bp, Zea Mays
aggtcagttatgatgctattcggtatcccgaacctgaatattatgtcttgtatgaattccactgccttagctgaagttagagaagcaatgggtttgaactctatccatttagtgaatttgtcgatagccacaagtacatgagtgtatcctccttgagctttcttgaaaggtccaatcatatccaatccccagcatgcgaacggccaagttacgggtatagtctgcagctgctgtgctggtagatgctgctgttttgacaagtactggcaggctttgcacctctggactaactcggccgcatcactctttgctgttggccagtaaaaacccgacctgaagaccttcccaactagggttctggatgctgcgtgtactccacattgcccagcatggacctcatccagaagttgctttctagtagctgag

SEQ ID NO: 180140 - DNA, 725 bp, Zea Mays
aactagcaactagcctctaatggcacaaagggcagactattcatgtcataagtcatttccaataccatttttagttcattagtgtgacaaaacgcataaacgagagttcggtacgtaacttcatcaacgacattcctctccccaccatattgttcttcacctccactgcctcaagaacacgattgtttctgcagagaccatacatcaacacattgtatggcacaacactgcccttaacaccctcactttccatcctcgccaacaatctccttgcgccatccaaattccttatctcacagtaggcccaaatttcggccgtgtaaacatactcgtccaagtgaatttatattgaagcatttcatcgaacaggtcgcgagcaagagcaaattaccggatcttaatgagagcaaaaagtatctgcaaagcggtgtattgcttcatcgcaatgccggatgagagagataggcgcaggacggtggcaactcgcgggtgcggcgaatccagaggtacgaggatgcaagaagcgtggcggcagcggtggcggcgccaggtcggaaggtggcgagtttgttagcgtgtgagagatacgaaaacgaggaggacgcgaacggggtggatgacgcgagggagagaagtagggaggcagcgtgcggagaggatgccgaggaggaagtggacgaggacaggaaagagagggcgggcgtagagagagacaggagatatga

SEQ ID NO: 180141 - DNA, 581 bp, Zea Mays
ctcttaagtttcttacctgccagactaaatattgaagaggagcaaccatttgatgatctgtctcggatgctcaaagaggccacttcctaggaagagaaggctagacttattcttgaacgatcagcttctttctatgagtttgaagaccatatgaggtatttgtagctatgaagtgaatcgatatgttcttgtgcttttgaattgaatgtcaccctaccaaatatattcttgaatcgcaggtgttcagagggaataagagttatccttccgtctaaagtgcatatgaaagcagaggttgatattgctaaattgtggatagacaaatgtcaggcctatttgagaccaagctgcaataaacttgcatttggagactttcttaaagttgatgatatcaaggttcacaaaatttggcttagtaatatgaagaattgtttgtagtgagatacttaccctttgttcttcattatatcacaggatttaatcaatcagcctgcaaatttgaaagtcattcttgacacttcagaacttaattctgttctcaacaatattgaaaaatgggaacatagttcactaagtctact

SEQ ID NO: 180142 - DNA, 301 bp, Zea Mays
ggggtctgggtcttggacaagattgtgatgcagggtcagatgctgggcaactggctgttgtcccggcttcggtggcggttgcgtcggccgcggcgatggctaaggcgaagggtgcttcgcaggacccatggtccaagttttgcgccaacggtgagattacttcggccgccgccgctaaagacgtggcgggctcagttgcgcagtagatgaagcatgtaagtcgtcttggacttcgtcagtttgttgtgtttatgtgattgcgaatttgatggacttttcatggcaggcggctgccttcgcc

SEQ ID NO: 180143 - DNA, 312 bp, Zea Mays
acggatctgaagaagttataagaaggaatacattatgtttggggtggtgcaagttacctggaagtgagcattttttatactgtacatgagaaaagttatgggccatgagagtagcatggaattgtgctatatggttgtgagttatgccattatcttcatttctgggtctagaaatttctgaaatgagcaccaagagatgccagtacagtgatatggaaaccattgaattgctgggtttgaagatttcacatgaacactttgtcatctcatcaaacttagttgttggacgttcatagtttgtgtctgcaaagc

SEQ ID NO: 180144 - DNA, 689 bp, Zea Mays
ttatatatgtgtgttcggtcttgaagtaatatctgtgtgtgtaatgaacctttatctatgtgtgtgaggtcttgaaatattatatatgtgtcttgaaatatttgaacttatctatgagctgtgatgtatagtcttatgcaacgtccttatagtttgttaaatgtgttgaagcaggaagatgatgatggcatcatgtatgacgaagaagtagccgatggaggcagctcaagtgaggatgaaattatatccaggtgtcgcaacaatttggtgcaacaacaaaaaatgattgtgcagttggttcctatcttgggtatgtactctgataactacttcctgaaactacctaaaagggtcgctggggattctggtttggaatgggtgcaagagacactagcaagagatacccaatgttacaacatgtttagggtcgagaggcctttattttatagactgcataatactttggtccgtagatatgggttgaaatccactaaaaaattgacatatgtagaggctcttgctatgtttttatggactgttggaggctcacaggcagttagacaggctgacaaccgttttaggaggtctctggagacagtaagtaggacatttagcagagttttgacatgcctcatgaagttagcacatgacaacattgcacccaaggacccaacatttgcagagatgca

SEQ ID NO: 180145 - DNA, 436 bp, Zea Mays
ctcagatcgatgttagggtttgtcggtgaggagtacggctctagcgaactacgtcatctgagccgccggaccccaccctttttatttacagtgtagtatgagagtgtgtgacagagacccaccaaccatatagagttgggcgtcccctaccaaggcgcaatcaaaggcccaaaatgttcgttgagccatcttggtgaagatcaatccaacaagtaagacacaacgatagtctctcgctacatcggcatgatttttatcttgactctacatccgtgcaccacaaaccaagatacatgttgcacaaatatacttaggccttagttaatccgtacgacttggcacaagatggtacacttgttgacaattactcgtcgcaatcatataccacaaggacacatataaaccttttcacatttttccttggtaagtgcatcac

SEQ ID NO: 180146 - DNA, 973 bp, Zea Mays
ctcaaagctagtatttccgataatatctttgtgatactttttgcaaagctattattcaaattgataggctagaagtcacttatttgggttgcatcagccttctccgataataccacaagttgtgctttcatttattaagtctagtcttcttgttcctaggaagtgaaaggcccccaaagcttatatcatgtctattttgatcatatgtcaatattttatttaaaacaacccagtgaaaccatcgagccccgaggacttctcatatagaagctggtgaatgataccatcaatctctttattttcaaaaggagcctcgatgccacatagttcaattttgttatagcataggccctcccaattaaaacttaggcttcttgcttgtgttaggcctaacagatttataaaatgattataaattaatttttccttaggcttcttgctcgatttagaagtgcacgtggaattcttagcgaggcatagtggagttcctctgctctgtccactcctcgaactagaatacccagccacgggcatggagaagccgttgatgaaacacctattgctagtcgtggcgattagtgaagatgaccaatagctattcgtggtagcgcttgatggcctgcatgtcgtcgttgtggatccccaactgctaaaagagtgtctcgatgaggtggtgggcttaatgtcatgcctattgccattgacctttcacaccaacgcctgaccagtgtggcatccctattctgcttgatttgccttgtcgcagccaccatcttgcactccctctctggtctcgcgcgagggtctcctaggtaagtagccatggtcactccttttccagtgatagtgttgagatattcgtggtgtgagtggatgaagtggaactgctgttagagttgctgaactggatccttgttattgagtttatactcaccctgtttcttggtgtacttttgtctcacatcaacccttc

SEQ ID NO: 180147 - DNA, 478 bp, Zea Mays
cccccatagccggagaatcgctcacttcccccaattcggtttccgccaccgcgaagaagacctcaccgtggccagctcgattcaggtgagctcaagtccctctgctgcttgttctagcctccttaggtaccccgcaaatccctcgaaccctttaattgaaccggaccgccagggatcaccgggaacacgtaccattgtcctcatcattcgcgattcacgtggacagggcgtgatagcttaccaatcgtgaaattaagttgggggaatcgttcgaggagagtttaatccggtgtacgccgctcgggagcaccggccgttgcctaaatccgccggcacaacctcaccggagttcatcctccgcgctgccgttgtcggggacctcccactgcgaagaaatagaacatggagggtttatttgcaaagcgtcagtgactccgtggaatagtattgtgacccgcttcaggttattcaaaacagc

SEQ ID NO: 180148 - DNA, 461 bp, Zea Mays
gaagtattcgacagcgacgaaggcgaacttaaggttcccctgagccgtgggtaggggcccgacgatgtctaggccccagcgctggagaggccatgtgtgagcgatcagctttgtgaattgcgaagggctgcctgatcggggggaaaacttctggcaggcatcgcaggaccttgcgacccgatttgcggcgcagatcattgcaggccagtagaagccttggcggatcaccttagcagctagggcccttggccctgcgtgagagccgcaggtgccactgtggacttcgcgtaggatctagagaccttcggtttcggtgacgcatttgagcattggttgactgacccccttcttgtagagttggccctcaatcagtgcgaagtctcggctgcgatgtttgaggcgcttggcctcattgatgtcggttgggtgataatacccctgtaggaacaaagttattggtg

SEQ ID NO: 180149 - DNA, 518 bp, Zea Mays
tgactccattgcactttgcacatctttataaccttattcctcgtgacacgagtcagggtatcaagaatcttgatggggtactcagcataagtcaggtcatcttgaacactaaggtcctccattggtagctgctctttaggtaccctgagacatttcttcagctgagatacatgaaagacatcatgaacatccgcgagatgatccggtaactccaattgatatgccacctctcccactcgctttaaaatcaagaagggtccaataaagcgaggggacaacttccctttgactttaaatcttctcatatcccggagtggtgacaccttcaaatagacataatcaccctccttaaactctagcagtcttctctgggtatcagcatagcttttctgtcttgactgcgcagttctcaaattctcccttatttgatggacttgttcttctttttcttgtataatctcaggcccaaacaactgcatttcaccagtttgatcccaatacagtggagtcctgcactt

SEQ ID NO: 180150 - DNA, 569 bp, Zea Mays
gcaaggaccacctcggtgcctactatttctagacgaggtcagatccaaccgtggcctacattgccaccctcggtgacgcgaggtgggataactggcgcaatgactgggtgatcatcagtgctgaggccaacgaccgctttgccctgccgaacgacggaccaagactcgaccggaagcaatggagggccaaactgtccctcacgccggagttcaagcccgtactggacaggatcaaggaactggcggccggtggtctgacctcgatgcacgtggtcggagatttcctgaagcgacgggtcatgccgttgtaggggaggccgcatctgtattgctggtttactggcaccagtgacattggcaggatctagcgcgggccagggaccgacctatccttccaggagctagaggttttagtgaaggggatcactggtgaggcttttatccctgaatccttgatacctccccagggcattccgccgctctgcgatgatccagggctgcggtcggcggtgctggcctggctgccgactcttgatgagagcggcatggcgatccgccaaaccgacggc

SEQ ID NO: 180151 - DNA, 685 bp, Zea Mays
agaggggatagtgatattccttctccagctctgtctgctcttgttagcctgcaagaattatccataacagattttgatcaggcccttgaggatgtcgttcctgaggatatgctatcagagccgactgatggtgatatgatggatgtttgctctgacattccaaatgtgggattagaggtatcccgagcagcatctcgcgcgtcgtcgaccttagaaggcggtcttcgatgtcaagaggttggtcaggattgcccgactcccatggaggtgactgaggatccttcagcctttgaggtggctgttgtagaaaacccagcccccaagggtggtgctggcggttacccagcccccgagagtgttgccggtaatgatccgactcgggtgggtagcgcaagctgcaactcagccctcgagggtgttgccggtagtgatccggctctgatgggcagtgcgagctgcaacccagcccccgagggtgtccgagcaagctctccttcccatacctccatggatgtccacgtcgagtcgtctccaccacgttctgatggaatgatagcaatgcatacttctttagcttcaagtgagggagtcgccttagaggtcggcacaccggatgccagaattctgatatctgctagtggagctgaatcaacccccgactatgctcttcagattgttccagttg

SEQ ID NO: 180152 - DNA, 476 bp, Zea Mays
ataaggccatacccctcatgcacttaaaactaaactagtgccttaaaccaactcagccacgtgcatgagatctaacccaaccaatagagtcatgatgaattacataatcggactatccaagtttttgaccaacatcatgtagtatatctcacctatatctaccttaaccatactccccactccgataatatacactgatgtcgaatcagtaagaccaagactggagaagaaaagatcaacatcaaatgaagcatggaaggataagattcaagctagatcttcaaaagaatcaagagccacaatcttggatggagtcttttcttatcctactctttcttacccaaacctataaatgctttaaagatatcttttatcctgcataataaagtggctatacccatgcttttctaatcacctgataatttgcgataaaaaaaagagaagagttttggtattaaaatcaattagaaactaac

SEQ ID NO: 180153 - DNA, 731 bp, Zea Mays
ggaatgggctggccgcggtggccgaggctcgggtggcaatggcaggtggaagggagctcgtcggagctaaggagggacgtctggctggcgaaggtgagcacggggcgaggtgaggcgcgcccggggagtctttataggtgcgggcgagcacggccgagggcagggctctggcaagtgctcgaggcgtgcaagggcgaaagctagtgcgcgctctggcgcctagcacggcgtcgagcacgaggcagcgcagagagaggtcgagttcaagcgcggattggcaacaaatctttaagattatggccatgatcccgttgagagatctcttcctctgacattcctttgtcgtttgtgtgtggaggcttgcaggttttgctgactggatcaagagatagagaggggagaaatctggtttgtctcactgtcgcacatagagagaagatcacgggtttgacgtgtccaaggcacgtgtcccgatgccatcttctgacatgagatagagaggttagttaggcacaattttgtcaatggggtcattaggatttgagcaagggatcaaggtgaatacgctcggtctttggctcaagggctgaaattcagaattctgaatttcagaaatccctattgaaccctcacttgagaagcttgtttggagtttttattaaactattttggccaagcttccataatctttattgtagcttgtttagtatacttcaatgtttatattttgc

SEQ ID NO: 180154 - DNA, 538 bp, Zea Mays
gacatattccacaactcgcagtcattgttcacaattttgtgtcacactgttcacagacacagactgaagattcacagacatggtgggaagttggcgcccggtgatgatacaggtggaggtggggagcagtccggccataggccactagacatggaggttgtggttctctctaaaccctaaaaaccctaaacacggcaagacaagcttcgacgaaatggaggcagagtcggctgcttcgccataacagcaggcgaccactttgctagaacagaatcatctttgtgcggtctcgtgatgaacgacgattaagcccccaaccccacgacgtcgtgaagcatcctcttccttgtcccctctctcttctcttccttgtcccctcctcggattttattggagcaatcgcaggcactatgaaggggaggtcagtgggactcatcgacgacgtccatgcatcgacgaaagttccacggatcaaccctgcctcgctatctgcattgccgtcgccgacgaccagtgagttcgatttgtgttgccccga

SEQ ID NO: 180155 - DNA, 723 bp, Zea Mays
ccttggtggagaacggcctcatcgaggcacaacaccgtttgggggagcttggcgcagaatatggcgacctttcgagggcagtgttgatgccatatgcgatcagcttgcggtgtcattgccatccgaaccaaggacatcgtccagccggattgggcgtattgccgatcacatccacgagcttgaggtggacgccttttgatgtggcgtaaaccatgctttcgccattaccaggtcccactatgaggaggggatcaacttggacaccttcagtatcggacattccgagggatggactgatgtggaacttgctgacatgctgaaagcgctagagccattgtattatcgccttggcagatatccttgacggtgacgctcttcctaaaaggggttaggaagttttagaactttcatgaacttggggtgtgagactcgcaatcattatgaatgcaattgtcgtctgttttttgtttgtgtgatccctttttctttgcgatagacaagctttagggagcgcaatcaacgtcttctgacctaggtactgcctggtgagaggtgccttacctttcaaggtgtagacatatcggcagtccaactagcttcgttgggggtcatttgctggtgtgggccgctctctccctttagtgcttattacagacaaagaacaagggagacatgtgtttgtgtctttcccctctaatcccgtgagatgatggttcctaagtt

SEQ ID NO: 180156 - DNA, 547 bp, Zea Mays
gttgaatacttaatctaaagtacaaattcacaacaaagatttggattcaaatttgggatttaaaaataaaaaggagggaaaacagaaaagaaaagaaaaagaaaaaaagaggtagaaacctaaatgggcctggctcctcaattcagcccactagcgcttgcacacgtcaaaaccctaaccgcctgacctccgctcgccgccatgcgggcccacgtcgccagcctcactcctcaccgcacgcgcgcactgccgcgtgggtccacctggccagaatccctatcacacgtcgcagccgcgtatcgaccgaccgtatttccattccgcgttctctcgccttgtgtcactggtggtggggccggatggccaggtccgtctcctccctcgaatccgcgctagagcttcttccccgcgtgaaccggatcgcgctgaccagatcctccacgatcgcgcgactccctcgccagctgaagtcgttacggcctccgccatttccgctctgacttcgccctcctagctagccgggacctcgcgacctcctctcttctcg

SEQ ID NO: 180157 - DNA, 329 bp, Zea Mays
aaacccttaggaagcagaaaagatttcaaaagctcatactaggctctaggggcttgtttcaaaccatataaagttttttgcaatttaaaaacatggtttagaaacttggaactctcaaaactaaggggttacctcacatagatctcttcctctacataccgattcaaaaaggcacttttaacatccatttgaaaaagctcaaaaccctttaaagcaccaaaggctaaacaaatcctaatggcctctaaacgggcgacaggggcaaaggtctcctcataatcaataccttctttctagcaaaacccttgggctaccaaccttgccttgtt

SEQ ID NO: 180158 - DNA, 625 bp, Zea Mays
agaaaacgtacccaccatcataggctctccttcaggtgtggtagccacttgagtatagtagacccgtccagttttcctttcacctttgcctgcctgagtgcttgccacatttcccttgccttgagatgtgcttccagaagccttttggaagtttgatttcttttgcttcggatagggacaatccttgatgaaatgcccagacttcccacggttgaagcagctattagatgaactgggtagggctaggaaacgagtaccaggggcactcggctgaatattttgagtagggatagctgttggacggatgaagactggttacttgaaaggatagacgggtggacgaggaaaagagcgatttgggttaaagggatgaatcaccaaccttgaccgcttttcggatccttgagaggatccctcactcccttcacatccaaacctttttgtcttttgctacccctaattctttgcctccatcgagagtgttgtgctcacggccctgctgaaagtgagatctagacacatggccatctttcgctgtagccaatcattcagacctctcatgaaacaattcttcttttttaggtctgtgtcaacttgctctatagcatactaggagagatggttg

SEQ ID NO: 180159 - DNA, 402 bp, Zea Mays
ggacgactcgactagagtatcaagtcgtccgactagtcgtcgattaggggcgattagtcgtccgactagatggtaaatcgaccaggatttgtccaggcggctagggttttctagtgggctactgggcttctatttttttggcccatctacagtagtataaaggcaatgcgccaccaccccttgaaacttttcctctcctctgccgagtccagaacacaggctgcggctctagaacaccagcagcagctccaaaacaccggcagctgctccaaaacactagcgacgagatgagctcctcatgtcaagatttcccccttctccccctttcctattgtctgaattctgatgaatctgaatctgttggagaagctgctgctgctttttgcttggatgatgatatgc

SEQ ID NO: 180160 - DNA, 688 bp, Zea Mays
gttagaagggtgtggcctccgtgctggtgggccgtagtgctggcctgctgggctactctgtcaagtgaagtgttttgtgggctgccttggagggagtttttctttgagccgtgctgttggcgtgggcctgtggtagggaaacacgacgaaaccgtggagggtcgcggtggtgttgcaaacttgcaaatgcacacccgttattcggtgcggcggattcttgcgctgtaagaagaaaaaaaccaacaccaaaattttcaaaaataaataaatacataaaaccgaaaccgaaaagtcgaaaaaccataaaaatagtcagactgttgattctttgttttaggataaactttgaatcgcggtcagactgttgggctgctcttcacctgtagctgtttagattattattactgtaatctataaagacaaaatactatagaaagcagtagtcgtcgtcgttggattaaagccggcagcgaagatggtgtgtaattgttttagaatggaaggagcggtatggaaatgcatcccggtggacgcatggtgggtcgacaggtgtgcatgctgctaccggcaggtcttgcacgtgtgcggaggcagacagaggcaggtgggcaggctggagtcctgaactgaatgcggccggattggattgctggttgcctcgggcggggaatccgcggttcgcacccgc

SEQ ID NO: 180161 - DNA, 645 bp, Zea Mays
ggacactcccgccgcagctgggcgagttcgggaagctcacagttctcggcctggatgaaaacagaatctccggtcagatacctcaggttcttggaaatctgactagcctgacgaatctcaacctgggacacaacgtactctccggtacaatccctccagaacttgggtcgctgtatcagatccttcagctgaacctgagcttcaatcatttgtcgggtccgttgcccctaacatttaggaacctctccaaacttttctcgctcgacttgtcaaactgtagcctaactggacaagcatatgaccttcttgtcaccaccaccactgaccaggtcaccaccgctgtttcgttccccgaaattgagatcctcgccctttcctccaacggcatcaccggcaccatgccgacgctactctgtagtgctagcttcctcaagatcctggacctgtcaaacaacgccctacatggagatctcccgaactgtctgtgggaattgccatccttactactcatggatctgtccagcaactccttcagcagtgtagctccgtcctccagctcctcgtctagcgctagcgacacgcttcagtctctacacctagccaacaaccgttttcaaggcaatgtcccctcaatcatcagaaact

SEQ ID NO: 180162 - DNA, 422 bp, Zea Mays
cgattagagagggagtttgctgtgggggagcgtgtatacctcaagctccagccatatattcaaacatccgttgcaccctgggccaaccacaagttgtctttcaaatattttgggcccttcacagtactgcagcgtgtgggttcagttgcatacaaattggagctaccagctgagtcttcagtccatactgtattccacgtctccctggtcaagaaggctgtctcgcccatacatcagatcagcagcaccttgcctgattcatcaactacaacacagattcctgtccaggtgctcgacaccagaaccatctcccgtggcggtacatccattccccaggtgcgggtgcgctggtccggttgcgacgacgcgctagcgacatgggaagacctcgacaccattcgccaacagtatcccgatccaca

SEQ ID NO: 180163 - DNA, 767 bp, Zea Mays
gagagagagagagagagatcgatagatgtgcacatgtacttgtctcggtctgtgtggctggatcgagctgcctgctgtccgtcccactgtcccaaagagtagtatattaattgaaaatatagtgcggcagtggaatatgcatgcatgcatggaatggaaagtgatggaatggaaggagagctgatggccgtacgtacgtacgaggggagaaaacaaaagaaaatgcttggggacggggcagcaatagcatgcatgcgtgatgcgtcgatcgagttggagactgagatcgttgtcgtcgcactgtccgcatggaacattgcgtgttggtttccgtgtggtccgggtccggccagccggccggtcggtcgtccaaaccaaataatgcaataataatcgtcatcacttgctctatatatgcatggtccgtcctctcgctctcgatctaatagctcatactcctactacccacgtactcaactcaacccagctatagtggcgtctagctagctagcaatataataggatggacgacgactagttctcgtactgtacgtgtactatatatacggccggtggatgggtactggagccgcgcgcgtgagtggaagtgtgccggtggctgtgggctgtggctgtgggttgcgccgtggaccccactagctaaggaagcacactactgcaggtagctagctgctagcgacccatccacacggtgaacttattacagctctgctggtggcggctagctagatagtgctaagtgctca

SEQ ID NO: 180164 - DNA, 577 bp, Zea Mays
gtcgcgctgagcctttcggatggcagttggtgcgtgggcgtcagggcatggtgcgccggtgggaggcgctcgggccctgtgcgccgccgtagcggagcgacggtaggagcgtgatggcgctgtgaccgtcgatctgtgaggcaacggtcgcgattagaacgtacgtaacgattggctggatccgatcggggtcgttgattccaaacagtgcggccaagattaaagctaggttacccgttcgtcagaaggcatgggtgtcgtccgatccaactcggatggatgcgattacaagtgtgatgtaccggttcggccccttagatctgaccgtagatcttagatcctacggcctaaacgcatccaagtgcttagccgcgtggcaatctttgtaaagagcccctaaccttttgtgaaaccaacccgctgtccatgcgcagttgaaaacaaatacgaataggtccctaggttttgcaaatacacccctggcttcttcagaaattatattggagctcggtttggtataaatcaatggcagaaaatgatttttaatataaaaataaatccagaaacttatataatt

SEQ ID NO: 180165 - DNA, 328 bp, Zea Mays
gataattattgcatgtatgacattgcataacttcattagagacagtgctctacacgatagagactttgatcaactaggacctaatagccttggtcatgatgtacctgtgggtgagagtagtagtagcacatctgatgagttagacatgagtgcatttcgagatggaattgctaatgcattagtgtcgtagttaaatatgtgaatgtaatggtagttatgttgtaatgaactccactaattattatgtaatgaccttttgttggttcggtgtttatgtgtatcgtttgttcaaacagaatctgcaatctgagaatctgtgtatccaaac

SEQ ID NO: 180166 - DNA, 663 bp, Zea Mays
tcgatcgaccattaggcctcgggcggacgattaggtttaggctcgggttaattggaatccaaccgttggatctggggtgaacggcaaggatcaaggcgaccggatccggcgttctcccatggccacccaaggtggtaccgctcgtgatcgcggcggggaactcgtcggtgacgaagacggctaggtttctgggtgtcttagggcgattggtgtggtctagggaggtcagggagggtccatggaatctagtggcaagggccaaatcacagtaggagcaccgaaggtcggagatccacggtgaggcgacaaggcggcgacggtagtagctctaacgagcaattgcgcatgacagagtgcaagggagggaaatggaggggcaggggaagttccttacctcaaggcgagactcggggtcccctcgaaggctacaacggcacgatggcagcttggagtgatggcggcgactccaggactgcaccagggaagaggttaagcgaggatagggcgaagagaccaggaaaaaaaagaaactgaggtgggttcctagtgcatcgcactcaggcagagcgcaccatggcaaaggcgacgacaagagctcagcgacgacgacgtaacgacctttgcgatgatagcagtgttgttgtatgctttggtggggaaaac

SEQ ID NO: 180167 - DNA, 306 bp, Zea Mays
ttcggaagaaaggttatgattttgcaagaaattttcaagaaattcaaactcaaatggccagagtgcgttctactgctagagttgagcgcgaaggagacgaaaccgaagttgtggaaactgttcctatctcggaggcaatgaagcgatctgggttggtgacatcggaagacacccctgctgctaagcagaacaagcagatattgaagagactgattctgaaggtgatcacagtatcgcagtacagagcaagcccagccacctggacttcggaaagtcaactatctccaaggctgatttacctaagat

SEQ ID NO: 180168 - DNA, 616 bp, Zea Mays
cagcttgattgttagtgcaataagttttcaatcggctagagaagtcgaaggagacattacttggtgaaacaagtacgatgccaattccttgcccttcatggcaaaccgatccatcaaaatgtaaagtccagggaataacagtgaggtatgatctgtctagtttatgagtatcattgatccgatgttgtacaataaaatctgctacgacctggcctttcatagatttcaatggttcataggccaagtcatactctataagtgcataagcccatttaccaatcctaccactcataattgggttttgcaacatgtatttgatcacatcggtttgactggcaatagtgcaataactagacagtaaataacatctacacttggtgcatgcataaaataggcataagcataacttttcgataaaagtgtaccttgtttcagcatccaccagcctccgacttaggtaggtcaccacatgctcctttcctccagtcacttgtgtcagaatagccccaataaccttatcttcagctgcaatgtacaatctgaacggtactcctacttgtggtgcttttaatacgggagtcgaagacaaatattttctgatgagatcaaacgcttc

SEQ ID NO: 180169 - DNA, 412 bp, Zea Mays
cacggacctcggtcacggcgagtagctgcgccacggcgcaatccagcgctggtgagcaattcacagctgataaggcgcttatacgctataacacttgatggtacatcgcatggagaagcaggaaggggcagtgggagatcttcatcggtggtgacgccgcgaattgatcgacccgcggtgtggggcggaaacacgatagagactcccgccaatgtgtaattcgccgtgagcagggcatctccgatccctggcgacctccgctctagctactgcggcttcctggtgacctccccagcgtgtaaccggatcaaatcggtggcgagccgtgggctgcgtgtgatggctctcaattcgcagcgcgcaatggtgaccttcacccaattacagcggcgtatgacaatggctaggggca

SEQ ID NO: 180170 - DNA, 888 bp, Zea Mays
ggatgaataccttaaaatgggagagagcactgtccttgagactttgaaggaatttgctttggctgtggttgatgtctttggcgatgaatttcttcgcccacccacaagtgctaagatagaacgtatattgaaacggaatgaagaaagaggatttccgggaatgatcggtagcatagattgcatgcattgggagtgggctaactgtcctaccgcattggccggtatgtacttaggccacaaagggaagccaactatgatacttgaggccgtggcgacagaggatcttggaatttggcatgctaattttggtttcccaggctcccacaatgacattaatgttttacaccgctccaatgtatttgatgatttggctaatggaatagcaccacctgttgagttcaatgttaatggcaacacctactcccttgggtattacctagctgatggaatctatcctgattgggctacactagtgaagagtatcagtggtccaattacaaacatggaaaagatctttgcagagcagcaggaagcatgtagaaaggaagttgagtgttcattcggagtcttacaagccaagtggaacatattgtacaacccaacacgtttatggaagccagaagtattgaatacaattatgcgtgtctgtgtcatacttcacaatatgataattgaggatgagagggatgctgatctacctaacatccacacatcagaatggcctggggctgctaacccaactattatccaggatagagacattccctgtattgaagaatttgtagatgcacaggccgtcatacaagacaaagagactaatcatcaactccagaaggatctgatggaccacatgtggaacctttatggaacaaagtgtggaccgtttgt

SEQ ID NO: 180171 - DNA, 651 bp, Zea Mays
cagctagcgacagcgcgccctacgcggtggttcgcgacccggtcttcgccggtgcaatgtggcggactcgggtcaactgaaacaggacgtggtgatgtcaccgcatgggcagttctgttgtttcctggtggcctggtgtcggtgtggttgtgcagcgtgctgccgcaacgacgtttcgattgagcatgacacagtgtaggctataggcttaccgttcacgaattcacgtactcgcctcacatgcccggtggtgtggcttatctcttccgcggtcggcgctcctgccgccgcgtctcatcccacgcgcacagatgtcagatgagatgaggccatgaggggtgtttcggagccagttcggcccagcccaggcgcgacgagaggccgacgcccctgtgaatccggcctaggaggggccggtctgggctgaattggaacccagtcctattttttcttctcccctatataggatattttagaaattttgtgttttagcttatatctgaaataggcttaatctagaactcttgtcattcgtggagaattctttgtggtgctttttgagagcactttttaagcaagattagtgtggcgatctcgtttctctttctttgcatgtctacctttcgattctagattaatttgttaattcag

SEQ ID NO: 180172 - DNA, 365 bp, Zea Mays
acaatcgccactaccctacccactagtacataatagagcagctgatggcctcctcctccgtttcactgctcgtcaccatcatgctgctgctgctgtcgtcatcacctgcttgctcctcgctgatttgcaggcttgacttcacgagcgtggcactgcactcctgtcaggagacggcaccacaaaaccctactgcctcatgctgcgacgccctcctctattccatcaacatctggccaattcatgaactagaaaagggtctttgttgcctatgtgtgtacatggtttcaaggaacactacctttgacctgcctacgtcttacgtctcatgcgggggtaaagactcaagtaatgtgctgcagtggaat

SEQ ID NO: 180173 - DNA, 1376 bp, Zea Mays
gcattttctatgaattaaacaaattctagcatttatttttgcattaaaaatcattttctaatccctttttctggattttataattctctggactgggcctcaattctataaaacacaggggcaatggcgcaaaagtttctaagacaatgtgaacaatccctgtggaccacgggttcattctgaactaaccgaggggctcttatgctaaactgccctagcgaagaggtatcgcccaatctgggccgttagattctaaatcaacagatcaaattagatctgaatccgcaagcgctgctagcccatggatctaagatctacggcccaagttttaagtagctaaaatcgatccacatacaccagatcaagatcgcacggaccaaatctgatcccgcaaaccggtacgtcacgagatctattggattcaaatctaacggtgctaacataatacacggagatctaatcttggcctttgctttcggatcaagcgaccaagacatcatccctgccccccccccccccccggcggcacaggccacatcgccagacccaccccggcggcgaccatggccgacgaaattaatgccagcaacccagcgcttgaatccgaaattaactaggtgcttcgccaaggggagaactatgtggacaagcggaaagggagactcaccggcgacacgcagtggcctcacagctcacggaggagggtggatccgtggcggcagagaaactctggcgaggaattatcgcccttccgaaggcgcccaagggaaaccacccacaccactagcttcgtgggatcggaccgagcaccaagaacccaatcccagggcttgacgaccaggaattaaagtctgacctcgtggtggggtggtccttgtctttcgcaccggcgtgcacgcacagtcgctcgcggaggtggtcgtggggatgaaaaaggagagagccgagaccctcccggtacctaaatagcgcccaagggggaaaagttcgcaacggattccgtggcttgcggcccgccccccgccatgcttggcgtggtcgttggaagggagacggccgacagcacgggtccatcggacagagagggcgaggatgaggcagtgggcacagctgacgcatggggccgcattgccggcacttctttgtgaggcgcgcggagaggtttccctgtgggcccgcctagtcagtactcagacgcgaccatgtggggatccgctgataggccgaccggagtgaaatcagccagtgcaatgtctaatctttttgttttcctttttcggtttcttttccttttaatttctagaattcaatttccattccaattgtgaactttgtacctagattcaaatgtacaaattggacaaacaagtatggaa

SEQ ID NO: 180174 - DNA, 730 bp, Zea Mays
caggtcgactgactgaagaaacaccatggtacagtgctcggatgtagatcagactgccagcaccggatgttcaccgccggcgacctcttcgccgggattcgtgctacgggcgtatgggttttgttcaccaggtaaagatctcctcgtggatatgtatgagctaccgtagactcgtcacttcctgtcctttttcaccggcgacgtggcctcctggccgtcaccggtgttgccgtgtgttactgtggctgcgccacgctccaagctctccaccacgtcatatctagccgcaccagctcaccggtaaccgtcgtagcttcttaaccggtgatcaccagaggaagcgccacggtgaaagccacctgtttcacacaccgagcgctttgtttcctctggccgccagcgctgctcgaccggattgatcaccacctctcaagtattctataaattgaggcctcaacttgttccgctaggtaatcgtgcgtccagtgaaaccactcgtagctccgatcgtctcccacagcttcccaatttgggatttcccccaaaacggttgaagaacaccgcgaacccaagctcaccgtgggaagctctcctcaggtccgatcctgttatctttagtcttgttctagcatcctcatgtgcccttgatactcaccgaaccaccccattgaattatactgccaccgttcgccatgaacgcattgttctttgaatcgttcgcacggtcacc

SEQ ID NO: 180175 - DNA, 446 bp, Zea Mays
gccaagatgagaatccttctccccctttttggcaactagcaccaaaaaggagagaaccaccagccataaatcaccactgaggaggatgatgcggaccaaagaattgatgcgccaggtgagttgcaaagtgttcttccctagactgagctgggggaggatagctgcccgaaggatcctagggcggaggatgagaagaggattgacccggatccccctagtggggaggcggggtaaactgcttacgatcatcaaagtattcttcatcttcttcttcatcttctggagacatgaaagacaccccatatgcttgctggtgccactcattgatttccggaggaggaggatgaagaggcacatcaggtgaatggggagcaaatggcatacccatagaggaagcttgacgacaaagattgtcgtcagtctcccgctgccgccgagctagctca

SEQ ID NO: 180176 - DNA, 616 bp, Zea Mays
tggtcaggccacggtggggtgggtttcacggcggcggaaaacgatttggggaaaactccaaattcgcggctctcagtgaatggttgaggctgattcgagatggctggttagcttactaccctacggagcccgcggcatccgcaatttataggcgcatcgagggtcggtggcgaattcggccgaggggtgttagcggtcggtgagctcggtgcgggtaaaaagtagctctcaccgtggcagtgatttcggtgatcgccggacatgcaactaacgagtcaccacgaaggtgtctcgtgctaagacacgtggtgcgcgacgacggtagcttatcggcgacgaggccatctaatcgacgatgagctggggtgaagtgcggcggtcttagccgtagctcaatcctgcctcggatttttacccggtcaagtttatctgttgtacccgaagcacgaatcgcagcacgagatcgaccaccggcggcgactcaccggcgacgagcgagccagctggcggtctgatccccaatggtctactgtaccatggcgcatctgcttcagtcgcctgaaccggccatgttccaacccaattatctctagattcttgttaggaacagagcgat

SEQ ID NO: 180177 - DNA, 595 bp, Zea Mays
ccgttttcctagggagattgccaccgccatgcctgaagtctttcttaggggtgatattttcaaccctaagtgggaccaggcagaaggtagagctctaacaagaggtgacagtgagcagcagcacagcgacaccacagcgtccagtgctatgtttgcagtgatgcagttgtataacaacacagagcacagtttggggatggtcaacaattctcttgctaaggctcaaaactagttgtacccggctcaggaagcgcatgctgcagagctagcccaagtgcaagagaagctagcccaagttacgcttgagaaagatgaagtcgtccaggtcagagatgtggttgttttggacaatgtgctgtggattggcgaatgccaggactactagaccttgctggtggaaattatgagagaaaggaatacaactttgtttggggtagcacaactcagggcaacataggtcaacctaatgtagcagctgaacaatgcaaaagcttggaacgctaatctgcatgaggaggttcaccagctgtatgcccagctcaatctaatcaacccgccagaaccagaagaagcaaatgtcgcagcagccaacaat

SEQ ID NO: 180178 - DNA, 502 bp, Zea Mays
ccgccatgtgggcccagtcgtcagctctatcttctaccacacgcgcaaacaaactagactccgttgagcagaacgcgcgattctggcggatccctggctcggactccatccaccgcgccccaatcccaacaggtttctgtatctcccaatgcagcttcgtccctttttttctcgcaacagcatgtggagaccgcgaccgactccaccgaatccgccggtgagctcctcctctacggtaaatcaggctccaccaacagaaccaccgaaatctaggggcgcctgcatccgatcttcttcccagtggagcgcacatcaagcaaaatcctaaccaaatccgattccatgccgcgtgtgtcgggatttgtcaccaaccccgtcgttatctgcccatggccatggctatttaggcaagaactgtggatcgatcgctggcaagaaaagggacagagtgagttggcaccgtgcgtcctcaagcgatccaacacgctccggttcgccaacc

SEQ ID NO: 180179 - DNA, 720 bp, Zea Mays
agagctcaaagcccaaattggacggagctacacgatgcaggggtaagggtgaacgcgcgaagaaggttctcaccgacggaagaggcttagtcgaagcagtccacggcggagggcgaatgtcggggtagaagcttgctccgatgtgaaattccggcgatgtgtgttggtcccgagcaccggtgagccctggatgtgcacccacggtcaattgtcgaaaccctgagctccttcccccggggcgaatcgatggtagggcgtgattggaaggtggcggccgctcctctctcactccggtcgaccgtgcggtctcaatcccacggtaatggccaccaggggtgcggatgcggcaacaggaggacgccagcgccctatatagctagagaaggagtccacaactgctcccgactcggtcgcaccacgcgcacacgaggatcgcggagtatcccaatcctcacgcgcgcggttccgcgaagaagacgcaacagaacggagaggataagactgacgtcccggccccacatgacagcgagcacccgtgtgcgcgcaggcgtggggaaggcactggcacgtgggccccgcgcgtcagccacagagaaaccccagggcgcgcgctgtgagcgacgtgggccgcgcggtagtgattccgagagtgggccaaaagtggggttcgcggcccagttagatatccatccctttttctttttcttacttttccttttt

SEQ ID NO: 180180 - DNA, 569 bp, Zea Mays
ggagatagaagcctcgtaagccctaacacaagaaggacctgcaccagaagaccctaagcctaaggtgccccacctaaaggaccatgcaccagaattacctcttaacctaggatggagaaggaccgtccacaacaatgatggcatgactttatagttcccacatatgttttgtaacatactcgtcgacttagtactaatgaacctccaagttaactacattggaatacaatactaacacattaagggtagtaccagcccaagtagatggtgacgacagagatcaccagtgggacgagtatggcataaggaatacaatgtccacacattatgctctatccatttgaaacaactctgaagcaagaataaatgatgctaccaggatagccatgttttcattcaatgatctgaatcaagggtatatggccagtagcatcaattggtactatccgcaatgcccatccgagagaagcatcatgataatcgcgtgaagggtacgatagtagaagacaacatctagatggacacactagatatctgaagcatcatgataattgcaacccatccaggag

SEQ ID NO: 180181 - DNA, 499 bp, Zea Mays
ggaatgaggatggtagaaaaggctcccgatgagcatttgcgggaatggagacgatgattttttttttaccacacggagacggtcatgggagccattcgcagatggagaatatcctaatactgtagaaaaacgaacatgttaagaaaatattttgaataaaaatctctgttaccacaagaagatgacaacatgtggtgaaaatcgtaggtgcctttggattccgattcggacggaatcggaagcggatcaatgtaaagactggttggacttttgtggcggttccgacatcaccagacaagcacgtcttagcttaagcccccatgcgcaccgtcgattactggctcacgacgctccctccaagctcaagacgttgctaggctcaggacctcaaaataagtcaagaagggtagcgtcaatagaatggatgctccaatcctgactcgagctgctgataatttggaggctgttgatggcttaaatagcccattcctaggatgcc

SEQ ID NO: 180182 - DNA, 439 bp, Zea Mays
cgttaatctacatcgtctgtcctattgcccacatctccgctcgaagcctcctctgtcccttgattttctctcgatcccaactgctcgcgccgcctcccaaccttctccaactctccaaaggccgagaaaaccatgcctcccacacgcgctcacctagctccccactcccctccatacgatcccataccttcgccgccgctgagcgcatgcctccccacatcgcctcccaaccttctctgactctgcgaaggccgagaaaaccatgcctcccacacgtgctcacctagctccccactcctcaccaaacgatcctataccatcatcgccgttcgcacgcctccaccacacgttcacctaggtccccactcccctcccgatgatcccatgtcgtcgctgctactgagcgtgtggggcttcctatatgcacactttatctccc

SEQ ID NO: 180183 - DNA, 622 bp, Zea Mays
tgagtgaaaatatacttgagacttttatgatcggtgtaaatgtcacaagactcgccataaagataatgcctccacgattttagagcaaagaccactgcggccaactcgagatcatgcgttggataattcccctcatgcttcctcaactgccttgagccataagcaatcactctgccttcctgcatcaacacacagccaagaccaattcgagaagcatccgcaaaaactgtgaaacgtttaccactctcaggcaaagctagaataggagcgttcaccaacttgttcttcaatgtctgataactgacctcgcaatcgctggaccagacgaaaagaacaccctttcccaagagtctggtcaaaggcttagcaatgctggaaaaatttggtacgaaacgccgataatatccggcaagccccaagaaacttcggatttcagagacactagagggtctcttccactccaccacagcagcgacattcttgggatcaactgcaatgccctgttgattaatcacatgacccaagaaagccacttccgacagccaaaaggcacacttcttcaatttgccaaaaaactgattcttcctaagagcacccagaacgagacggagatgccgctcat

SEQ ID NO: 180184 - DNA, 489 bp, Zea Mays
gcgaaagggtcggctgaatgacaaggcccggggcggcgttggccgcacagtccggcgccgtcttgagggccttccggggtgccaggtcggtctggccatggcttcgcttgctggacataaaaaaaagaggaaaggaaaatcacggccaagacatatgaatgggaagccaagacgaagacattccgagatactcacccactccgggccattatccaccgtgcctggggggaggtctcttggatcccggctcccaagacagccgccgaggtccgcttcgccggcatcttcggcgccacccttgctttggacgcccggggagcagatcgcccgggcgcggtcgcgatgacctgagggtcacccccatgcgtcgccggtacgagcggcggcccctggggagcagacgccctgacctggccctccggagccacctcagctcctccggccgagggaacaggtgacctctcgggtcgcccccgtgcctcgggctgg

SEQ ID NO: 180185 - DNA, 1651 bp, Zea Mays
catctaagtaaaaagaatgtgcaaaggttatgctttgttaatgaaagattgagcaatttaattaattaaacatgatagatcatgagttccttagtaataaaaaatatacatgacataaataaatgtaatatacattggcttattcaattgatgcagtcatttaaatatgtttaatattggctacaaaagtttttttctgaattagagtagtgtatttggagcttatgtggctatcatgcttccaatccgacctctagttacactaattaataaatgtatcaacgttatagaaggactaataatacatattcggctaacttagctcgatagaacaactattgcaaaggaacactatacatggataagacaaagacagagaaactactaatatagatgaggtgaaataacttgttaacacttgaggaaaaaacctaggtgatgcactcattgtagttgtaggttaagtgcatgttggacaacactgtttttaaaaccacagtttgtcgaatgccatgacacaactatgatatattttacatcagtctaatccagcactctttggagacacggtattttggttgcagcgtaggaggggaggagaaatggcaagattatggccgagcaccagcaagaaactttggtccagatcaaagttttttagatccaaaaatatcgtggtattaataaaattatggtttgaaatacatagttttagatgtgctcccaaacaccttttggcctagaacaccatgatatgctcaaatatcataatattatattgagactaggaaaatactatattcccaaacaggccctaaaggtacattcaattgagctgtggcttttaatgtgagttgtggattataaataagtttatatgagatatgcttagtgagaaggtgaaagtcatttgattcaacaaccgtggttttcgaataaactatgctcagtgtaactcacttgcgaatgaacccaacatgtgatccacttccttcctctcgcttatgagaagacattgtttgttagactcacacattcatcttcttcctctcatcgtactaaggcagatacctcaccaaaactgaggccaccactagtcatgctcgcgtcagccatcggataacacccacacatcggtcatgtgccattgtggtggccaaggttgtgcctgaatgttggccgcgcatcgccatcgtatctaggagtgatggagtgggaaggggagacatgtcctcatatgaggcgcgtcatcactggagtcgcgcccgcacagggccaactagaaagaaaaactttaagcctgcggtgaggtctaatttttacaggcggattcggttattaaacgccaaggcatgcggttccttaagaaaattgccagtacaaatcatatttctatatgcggttcgttaaaaaaaccacctctagaaattcatgatttttgtacatgtggttttcttaagaaaccgcctataaaaattgatttctacatgcgattttcttaaaaacgtcgctaaaaatcattttatcctctcttttttttactttttcaaatgaacttgtatgaaaaaaccaccaaaaaaagttatacatctctaaaagaaactttgtagttgacaatttttttatttaaaattatttcggctctcaaaaa

SEQ ID NO: 180186 - DNA, 782 bp, Zea Mays
atttcttcttcttcctcctcttcatcctcatcaaacatgccaccagtagcctgtgcattatcactgcttttggcgtcaaccttggtaatggcgtccgccgggacatcgttaaggatcagcacagaaggaccagcatcctgatccaagcacgacagtcgtcgaagtcgcctcttcttcttcttctcctcgacaggtgcagtcggcggttcactcggcgtgaacgctttgggtgggcaccttcggtttctgaatctccacttcttcatcaaattcttgcccagtcgtgatagccatcggctcggtgtgggtagagtcagacgactccccagccagcaggctaagcacgacatccatctcggcatcgtcagtactagctggcatctcaaagtgggttagcctctcagccttgggaagactccaaagtggagcaatcaatgcctcaatgtcctcaggagagggtcgcaatctatgacccaggctaccatcatgagcaggagggttggagataaactcagagaatggcctgtttggcggcaggttccatgcggaataggccacaggagcaccaacatttgagactctgcccctcaagatcatgtccagtcggctcagtagatcttcattgggaatcctcttgttcgtaacccgagtggagtcattgacacctctatataagtaagcgggataaatcctattcttcaagggttggatattcttgaaaacaaagtcagcaactacagctttagtagtcagacatccatccttcagcaagcagatctcgg

SEQ ID NO: 180187 - DNA, 433 bp, Zea Mays
gtcagctatggtggttttcttgtgtttatgggcctcaaggagatgccgataaaattcttttcctccaaggactaaggtagtgtttggttccagagtatagggtcacaaagccactccattctagtatatagggtgtttggtttgattctatgtagaatcgagcgacaccaaaaaagagaatattccttcaatatactgcattctctaggctcctgaaaaatgcacgaacctatacgctcgagcgttcagcacttatgttcttctccagttacgtcctcttcctccgacccggtcactccccacctcgtcgccgtctactgcaaccttctccgccgccggccgccgtgtctccaccgccctattattgtgcccctgttctctcccctcctgtcgccgcgcccctattctaaactgtgtcgtgtgagctattccc

SEQ ID NO: 180188 - DNA, 678 bp, Zea Mays
gttttaattaatcactattaatatatatgtatgctctttttacgatgcaaatatggcacataaaataaggagacctcatatattccttttatacaattttgagtattacatgtatacattagatccagtccgcaccatgtggaatgaagtgtcactgctgctgggcacagattcaaagacacctgccaagtcgtcgctcgtaaggcattgagggccctgtgtcagatttatgaagtagaagtggccgacacaccgctcagattctttccgccctttcagagagaccgccccgtttggatggctaggatgcgtgcattggaaggtcagcagctgcttgaggacgaccccacagtcacgtacctcactgcatacctgctcaccctagatgcacggtatgatttcttggctcggcaccaccgttagataatcgcccgagcagaagatacagagatgctcaatcgtcagctccatgtggatctcaccacagctcaagcccgtgcaactgccttggaaagtcatgaagtcattgttgttgaagccctgaagcaagccaaggatgagcatgttcagaagttgatggaggcctacttggtaacccgtaaccaacatagagccctacgtatccaagagcccgcttcatccaacccagttcaacccatgagagctgaagatccccag

SEQ ID NO: 180189 - DNA, 689 bp, Zea Mays
aaccctcgaaccttttccttacgcccatcgtcacgacgtctgtaaacaggatatgaatccttcccttgcaaagttgcgtcacagaaaggtcgggggtaatgatttttgcacgatgcatgacccttagtgcatgggcagttatgatttagcgacccgcacgagccatgcatcatatgcttgataaccatctttcgtagttcagggtactttttgtctgggatctcggctgagatcaaaaggtcatactgctcagggcacgcgagcttgtacttcctctgcatgattagtagaaaatgggcatggggcaaagcccgcttctgaaactccatgacatagacgtatgcccagaccttgccgagaatatcatgtttagttagcctatgctttaactcttgtagcttcgcgtgaaagacacgcactacaagatccggacgatcttgcggtgtctgcccagggagaagctccgtccttatctcatccttgttggggttacatgtcatggtaagaaagatgtctggtttcccaaacttccgcaccagagccatagcatccatatatcaacgtctcatgtcatgaggaccgccaataaacgacggtgacagcacagttcacttcccaaccttttctgctcttatgtctccatctaacatactatccaccaagccctggtacaggtcagctcgtaaccg

SEQ ID NO: 180190 - DNA, 641 bp, Zea Mays
agaaaacatcgttccccttcctgaagatgatgaagtggtggtcttcaggagcttcatgaaaactgggcttcgctttccactccataagatgctggtcaaagttttgaagacatttgagatataccttcatcagcttacccccgaagctcttatcagggtaggggttttatatgggccatgaggagccagggtctagagccggatgccagatgcatctgcaacattcatgagctatcttaccagacgaaggcgaccgaaaaagaacaatatcataacaactttggctgctacggcttcgtgccttgctctgaggcaaattaccttgtgcctacatttcgaaagaagtgtccacgttcttggatgaaggaatgattttacgtggagaatgaccttaatcagagggaggatgtgagaggtgttatccaacatcctatatggtcatgtttcggcattagaaggccatccatcgcacttgggaatgaagtgtaggcgtgccaaattgctttcaacaccatatgcacctacattggtacgagagatttagttcaagagcacattgcttataaagtatggcctcttgcaaatgaatggaaaatgccaaaggaaaccgccgctggctccagccaaagtggcttggtcta

SEQ ID NO: 180191 - DNA, 866 bp, Zea Mays
actggaagaaccaggggcactcggctgattgttaggagcgggggcagtagtgggatgaataaagacgggctgcttgaatggatatgaaggtgggtggggtgaagaacgattttgattaaaaggtcggatcaccaacctggttctcttttcaggcccttgatttgacctttcacctccatacccctttgattttccatgtcccacattcttggcttccactgccagtgctgtactgatagctctgctataggtaaggtccagacatgttgccattttccgctgaagcctgtcattgaacccccttataaaacaattctttttcttcaagtcagtatccacctagtcaatggcatactgagagaggtggttgaatttgttttgatactacatcaccatatctcctccttgcttcaaccggataaactcttctagtttcatctgaagcactccctcaggaacataacgctcttggaatgctagcttgaactcctcccaggtaatctgatgtccaacatgctaaattgctgaaaaatttgcccaccaggccctcttagctgctgagctacgaataggggcttttgcgtcttcgtgcatcgaattaacccaaacttctgttacattactctcactcattcatcggcttctaaaggttcctctgctttgatgaagagcggcggtcgagtcttagagaattccaaataagtagtatcacgcggtccttgagggggaactctacctccgtgctgttgaaattggttgcccgccatttcacgcaagaagcgcatattatcagtggtgccattgaccatggcagcgatatcctcggccaatgttggtggtaccgatggtgggttaggagtatcttc

SEQ ID NO: 180192 - DNA, 310 bp, Zea Mays
tccctcgccttctgcggagttgcgcgctttgcatgggaatccgcaagaaatcggaatacatctggaaagaataccgcgagaacgggattgagaaatgctccatggcagtctacctgggagaaagccgaaactacccaaatcaccctcctttccaaatcaccgccactggacaccgcttcctagacacttgccagaatgctgcccaaagagccctcctccagctatgccaaaactacagcagggaagtctctgagacaccccttcgctactttccacccagcaacaaaaatactcctgcctagaggaaaat

SEQ ID NO: 180193 - DNA, 728 bp, Zea Mays
ttattattaggaagtgcagggatctcggtgcaagaatcactagactcaatacacagtgaaatggacggcgggttatttcctgataagcgcaagatctcttttgaatgtttgcacgacgaaggggtattggcgatccaaagtcatacgatccgaaaccgagggctcagattagccccagcctttgagtgaaccagcgtgcaatgcgggcctaggattcaacatttaagggctgagatttaatatttatgcgatctgctcccatcccagcatccgtgatccaacggtcgagcattacctgccccgaaccggtagctttgaccagatccacaccactcctcacagatctaacggtcactgattcatcctacgtcatcttctctcactagccacccagtacggtggcgcagcccacctatggcggcaccatcgccggtgactcccgaatcgttgcccaaacgcataatacacgaatcaaagaggtgctacgcaaggagaaggtgagtgcaaacactaggcatgatttattaccgtctaatgatgcgctagaattcccgtccgcggtgacccatggatccgcgatggtgatggagctacgacgagtaattgctgctcctcccgtcgcccatagctccaggaatcgaaacacgcgcgtcaggtactcctcgccgacctccccggcggcggaaccttcaacccgcccggctatggcgaggaaaggtgcagcggat

SEQ ID NO: 180194 - DNA, 710 bp, Zea Mays
agctagtcctcgacctccgcttcatcacacttctgcttgtaataagcgacctatgcttcatcggcgatctgagacataaacttgtcctcctcctcttgcgtaggtaatcctgcctcagcgagtgcgatgagctcactcaaccttgatacgtcctcctcctcttccccatgtaatcctgcctcagcgagcgtgatgagctcactcaaccttgatgagtcctcctcctcctccatcagctccacccctccattttttgctgaacttatcttgcacgagcctcgtctgcgatatagttcccggcgcatccaatctctgcaaatatattgatataaataagttagcaaagacaagataaatacaatgtacgagcaaaacaacacatctttttctcactcacttgcactcagatgactatcaagattccccaacatctgtttctcggctctagccgcctccatttcccttgcctcctgtgctctcatttgccgccttcaatcttctccgctcaacatgcatcgggctgtcataaccccgtgattccgtgaacctacgcatctatctacaacgcatcttctgtcccataagtctcttcgaccttcttgtatgcatcacctcttctttatcgatgtatctcttccaactgcatttcatcctacacaaaacaaacaataagtaaggacagaagcaatagtacaactcatgcaatcaaa

SEQ ID NO: 180195 - DNA, 821 bp, Zea Mays
ttctaaccttgggatcaaaattgggatgttacaaacctaccccacttaaaagaatctcgccctcgagattcagactgggattgagagaaggtaagggtattccctcctcaaagagtcctcactctcccaggtagcttcctcttctccttctctactccactgaacttacagagttttcacttctgagtttcgggtctttcggatggctgaatcaagaatcttcactggcttttctcggtactgtagatccctctgaatctgaattgtctcttcttcgatgtgactttctagcactttcaggcatttgcggagctgggatacatgaaacacattgtggatatctgacatggattctggcaatttgaggcggtaggctgcgggccctattctgccaatgataagatagggaccgatgaatcgtggagctagcttcccttttacttgaaatcttttgaccccgcgcattggggagaccttgaggtagacgaagtctccttcttcgaaattgagttctctccttcggttgtctgcgtaactcttctgccgactctgagctttgagtagtcttttttggatcagggcaactttttcttctacctccttaatgaaatcaggcccttccagtgtcttttcccctactttggaccacatcagaggggtctggcactttcgtccatacaaggcttcaaacagtgacatcttgatactggcccggtagctgttgctataagaaaactctacatacggcaaactagactcccaactcttgtcaaaggtcaacacacaatctctcaataaatcctcgaggactttgttgactc

SEQ ID NO: 180196 - DNA, 340 bp, Zea Mays
gtgaaaggaggtcggttcagtggaacaacgaagatcagtgactcaggaaatatctgaagaaaagatccgcggtactctagatttggatgtgttcaagtgaattggagatagagacgaccgcaacaagataactttgagtcaattcactctctcgcggattaggccgaggtctggccggagatatttcactagtgctcaccgtggcacggtactttcatcgccgtgtcactcacgcctcaactctacctcactatgctctttcattacatggtggccatgcgctatcgatgtgtttcgtggccgcagatcgttagcctggtcgtcgttcctttaaatagcg

SEQ ID NO: 180197 - DNA, 615 bp, Zea Mays
ggtgaaaggtcgtccgagagacacctatctctattcgaacacgaagtcacctacgggtacagtcggatcagaaaatataacacatccttaacaatctaagagcgcaaagcattcagcatgcggacaacgaagggcacaacttagttcaaaaatggaaaaacaatgagcacgaagctaccattcacatacaaggtattccgttctgcatgcaagttcacatagtcgtcctttggcgaagggggtgagggaaacgttgccacttgaattcaccaaagaatggtcatgtcaacacgggcactttacatgggctctgccttcgggattaggccagcctcccagaaatgaaacaacatcagtctaagctcctcgccatcaaatagagccagcaaatctccctcttcgaaacgctgcccaattgtcggtgcaaggattatccggcgagtcccttcccctgactgcattctttcccgtggatgaggcccctccattcccataaggcgacgccttcgagggccttcaatgccatgtgaagactcgcccaacattcccacactctgtttcggccctctaatccttctcttgcccctcgccgcagtcggggcaaccctagacaaa

SEQ ID NO: 180198 - DNA, 747 bp, Zea Mays
tgggtgtatcaatcattgttcacttgtgacttagccgattttccatcggctctaacattatatgagtgaagcctttcctgcatacacttacgaaccgataatctgaaaaatcgactcctgttaaacattttgcagtttcataagtccaaagcataggggcagcggccatagcaatgcaagtcgttgcgtctacatgcacggtttctacttcattgcctacccattgaagtaacatttgatgtaaagtagaaggtacacattgatcagcgtgaatccaatctttgcctaggatgatactataatttccttctactttagtgacgaagaaggcaacaattagtgtatttgtcccgattgttaatttaagggacgtgacacccttggcctcgattggactgttgctcccaacgatgttgagtgtcatgtttgtcctgatcagcttgttatcctatttacctagctttctttacaatgagtaaggaaataaatttatggtcgcacctccatcaattagcatcctagaaatcggcgtcccatcaatatggtcgcgcatatagagcgacttcaagtgattgatccattctttgggtttggtgaagataatatctttaggaccgaaatcaaattgagctaccataggtttatcatcaccaataatagtataattgaccaaaaaagtaatcacaataactttcatacctgcgtgctatagcgaggcttcgtaatccaccatgtcttctcctaata

SEQ ID NO: 180199 - DNA, 499 bp, Zea Mays
cgaatgcttgttggtgatctggtgtccatacaaagagaatgtttttcttgagaagctctgttaatggtcggctgatcagcccgatatggcgcacgaattttctgtagaatccggctagaccaaggaaactgcgtaattcttttacattaactagtgctggccattgctgaattactagaattttggagggatcagatgctactccatcggcgctgatcatgtgccccaggtagaaaatactggtctgagcaaatgcacatttagccaaattcaccttccattggtctgtttgtagcaactgaagaactatggatagatgagtgaggtcatcttcaaaggacatactataaatgagaatgtcataaaaaacactagtgcacacttgcgtaatactggagccaatgtctcattcatagctcctaagaaagtattgggtgctcctatcaatccaaaagccatgaccccgaattcaaaatgtcccatgtgtgtttgaaatgct

SEQ ID NO: 180200 - DNA, 541 bp, Zea Mays
gacaacccccggtgagcaatctccgcgcatttgtgctacaatctcctcaatctgcgtgcccccaatctcctacatcagcctcgatggaatctcccccatcctcgaacatggaaacccaattatccaccgcaatcagcattcgtcgtcgattctcaccttccatcttcggcgagtgaatgggaaccatcctcggtgccgatgacaaccatcctctgctagccgatgtgcccctccactaggcgcttcgctccgcgtcgccaattgccaacaaccaccgagatccagcgtaggaaacgagataatctggcggcgagaaacaaaggcaaggtcgtgcccctgctcaggtgccccacaccacgcgttaccctaaacccttcccctgtctggcatgctgtccccgccctccttgagcccgaggtagctcccgctcgcccgccacttctctccaccaccaccgcatcccgtctctcgcgcacgcacagaggtgagtaccccctcccaagaccccgtctcctcgtcttcttgtcctcccggctttcgg

SEQ ID NO: 180201 - DNA, 471 bp, Zea Mays
tgcgagattatcggaatccgagggctcctcaaccaaattgccgaggttctcggccgattgcatcgctccgcccctatataacccagtcgctcctgctcccttatccatctagccgagaacccagccaccaccaacaggaatcatagacggagagagagttagaaaccgcggtacagatgttcttcacgcgcgaggtattgggatggatggacttggttcattggtcgacggcgagcttcgatgcttgcgttgtcgtcggggggcggagaaggacctcgtggccactagaatttctcacccatgccgctgctccgccgtggaaccacaggcgccgtggttggagaacatcagcatcctcaccattggtacgtgaaccctatatctgttgttgggatcccgtctccgtgtagcgctccctggattgggatctagagcacaggaccgccatccagcaggctcaccggcgatgcc

SEQ ID NO: 180202 - DNA, 410 bp, Zea Mays
ttgttctataatagttaaggtaccctctgctatctaaggtgtttgcatccggcatatagcatataatgtgccttcgttccttgccgtcgtgcttgtcttctttgtcatattgattcttggttcttttgggagatactttttattctctttcccgcctggccacagtatcactacatgcgataggctacgccctaaccggtgcaccgtccaaggccttggcaggctagctggcaggcagcgtgtacatggcttcctcccgtgtggtgtggcgttgtccacattggcagcctctgtccggccaactgcacgaagccgcgatgcatctagcgccatcctcgtgcaccgttagattttgatcatacggacaaaagaaaaagtattgacgtggatgggctgggagtgggtctttg

SEQ ID NO: 180203 - DNA, 870 bp, Zea Mays
aaatgacttttattgtgaaataataatctttcatttgctggtttcgttagtccctcacattgaagccttctaaacccttcgatcagtggatggttattgaaccgaaaggaaccagggcgtggaaggaggttagttgggacgggacgggtcatcgcacaccagtcctcacagagttggggatttgtttgtgatttgcccggtgatggtgacatagggcggtcgagagatagctgctcattactgggctcattaggacttgaagccgtacgggaacgacgggacacacacaagcaaagtgtgggatttgttttgggtaagtctattgtgatattcaaattgaattcaaattttgcatttgtaagtctttggtgatcttcaaatttgtagggccaatttcgtgtgtgcaacccctataccttggatgatccatatgtgcgtgaggtattcaatggttcagcagatagagctgtaaagggcatgatgtataaagcacgattgagggcggtcacagtgtaccaaaagcgtcaggggaactattgtgacacgaatatggcaatggaaatccacctgatggctagcagtacaaagagagtgaggtggattggttgagccaccattcggatgcttgggcatggatgtgacagtattgggcttctgaggagttcctggccatatctaatagaaatcggaatcggttgagcaagcctgaggtccacttctttggggcagatggacacactggcaaggccgcaagtatggtgtgtcaaattgcctggtcaattgttaattgcatagatttgtctagactttctaatcatgtgttgcaggaagctcaaatggagtggagcctactttgcttcaagtcttcat

SEQ ID NO: 180204 - DNA, 442 bp, Zea Mays
ccatagccgccatggtagtcgtagcatgtgtggccattgcaggcttcctcggatggtgtgtctactgctcctagttttgcagtccatcgtccaaagcgcgaggtagcatccagcaagtccacccctcaatttatgaattaattaattattattacaaccgcgcgcatactaattaaatcagcacaagtgaaatggagatgtcgcgtatcctctcatctctgcactccacctcagctctcctatgatgcgattccgcctccctacagctacagcttgctcaagcatgtgggaatgcagcagcaacgtagccggcaggcaatgctgctgctaggctggtagtggtatgataatgattagagtctgctgctgctgggctaattgtatgatagtactactagtgatgagagtgacgctagctagctgctctgcctccccgatcaaa

SEQ ID NO: 180205 - DNA, 325 bp, Zea Mays
cttcaacagcaatgacttcacgactttccaatgcagttgcaagggcttgagttatggtgagatccacatagagctgacggttgcgcttctctgcatcttctgctcgggcaatcatctgacggtggtgccgagccaagaaatcatattgtgcatccaaggtgagtaggtatgcagtgaggtacacgactgaggggtcatcctcaagcagctgcttcccttccaatgcatgcatcctggccatccaaacagaacggtctctcttaaagggcgaaaagaatctgagcggggtgtcggccacttcttcttcataaatctaacacagggc

SEQ ID NO: 180206 - DNA, 338 bp, Zea Mays
gcacacgcacgactcctgtgcacatggcaattgacagggtctcgacagtcgacaacacggtcaccaactgctcccgtctaacgatcaggatccagacgccaaggaagaagggtgaggtagaggttgacacagaaatcaattttctcctttctcggtctcgcgagcaagcctcgccatggatatctgcaccagttgcttccaagccagatattagagctgcctactacttgcgtcgcgcggagagcgggttgggaccagaaacaagagtagagcaagactcctatcttttttccacgcgccagtcttctctgaaccggtgaacccattcctcctcctct

SEQ ID NO: 180207 - DNA, 1162 bp, Zea Mays
aataaattaaagcatatcatgctgggttttgattgtgcattatatttgagatgaaaacccaaaactcacatttgaaattgggagccaaattgaaattggaaatagaaaagaaaacataaaaagaaaaaaagaagaaagacttcactaggccaaaagctatcatctcagcccatctggctcgccttccgctcagcccatctccacctcccgcgcgcgccgctccctagttcctgtcaaaccggtcccttgccagccatagactcgtgctcacacgatctttggggtctctgtcctatggggcccacccaccagcttcaccactcacccgtgcatccgcgcctaggcaattagccactggatcacgaggcccacgtcccagctcgtcgcgctgccaccatggctgcaacaaccttcgccggattgcgcgctccggccggagaaattggcttgtcaaccgcccccgcttcggttgcgcgtgactatatgaacccggccgccgcacctcatggcgatacctcatgggatggaacttgttaggagcttggtggtcgcacataatttgtgccacgaagtcatcaccgttgccgccttgtggttggccatacccgatacttcaagttgactggtgagtcccgttattaacccgctctaggtgtccgctttcttttgcacccgtcttagctccaaatcgaactcctgagctccgttaattgctcgctggggctagaaatctgccgcaggctgtggggggtgcagccatcggattgcctgtggtgtgatggtctccactgcgttggttacggtgtggggtaacccgtgcaccagaaggcatgggaatccgagcacccacaccacttacagggtcctccagcgaactctccgtcgtggagtcatggcggcgccaccggctggtggtcgctgggtgagaaaaagtatagcgaccgatggaatgcaaccgacgggtgggattgaatcggccgtatacctcttcggtagattaaatctggacccttgatcgaaaaatgagcgaccgaaaatagatctaggcactttaaagttctgggccgctgatcgtttgttgggcggcccggatcgtataccggttcggtataaacaatttttaatccgtgccgtgagattatgatcggatggcgctagtgag

SEQ ID NO: 180208 - DNA, 358 bp, Zea Mays
tatctcggcactgtacctcgacggcactggcggaactagcacgaccacgtagttgtccgacgacctaccaaagtccacaagcaagcagcgaagaggagattaggtttagagaatgccgactggggagtggggactggtgaggaagagtgacatacctgccaagccggagcccggagccggagacgagggtcaagtgcacgacgatggacgacgcgagagggagagccggagaagaggagattagggttagggttagggattgggatggccgactggagagggagagccggagagggacttatctgccaagccgcagcccagagccagagacgatgacgcgggacggcgggagggagag

SEQ ID NO: 180209 - DNA, 302 bp, Zea Mays
cgttgagttgagcgtcaagcaggtgacattgtgcggtgatttctcggtttgcgccaccaatttccgtgttcctcgatcgccagcaatttgttgcggtatccatattttgtacgacgaagtaattaatgtggcaagagtacgacgatgaactcatgagcagtgccatctagtgttcttgcgagcaaagaatggtcgatgacctggtggcgtctatgacaagatctcgacgcgggttctttggcctcagggctctgccatttctgagagctactcgcactgactcccccagccccatattttcc

SEQ ID NO: 180210 - DNA, 481 bp, Zea Mays
taagtagcaaggtaatataatgtaatgtagtaaccagggtgggaaaaggttgactcataatgagtcggctttgagtttgtgtaaccccctccgatatgaatgaaggaattagttgcctcaagtgatcaatgttttgccatttttctatttgcgcatttgaaagtttgtccatatgtccgatactgctagcattttagaggtaactgccgagtgatgcttgatgcttttgcttttccgagtagtgatctggcactttagagatagtgcccgacccaagaaaccccatttatactcgcgtcgacgtgcctttttgatttatgaaccctagcttcactttttctcttcatctgctcctctgcttcccctgaatttccgagcctgctcgtcctgccagaaagatagcgatggcccccaagcggaagaggcagagcaccactgttgcaatcatcccgcccatcgaccccaacagaaagcttccatc

SEQ ID NO: 180211 - DNA, 841 bp, Zea Mays
gagaaatatggcacagaaaacacgagatgaaacgatcgagaggtcaaacgacgtgaaaacgacgtttgaacgataaacagtgccataggaggtttggaattggaattgaggcacgaaacgacatggaattgagccgatacttcacgaataggtttatataggtgaatatgagtgaagtgtgtgcctggtttgaatttaggcgaagaaaaagagatttgtgcacacggctcgaaaacgatcgctcaaaacggggaattgagtgaaattgaagcctggaatctcggattggcgtgaaatttggcaaaagtgttactggaagtgttgtgaaggtgcctgaaaaatttgggttcaattggagcatttttggctggtttgggcatttcaccgaacacgtggagggcggtggtttagggttccggggaaatggctgtttgaggtgtgaaaaccctccaaaggagctaagaacctgcaggaatgctcaagacacacagagacacacatagcacaacttggattcataggaatttatagagatttgaattttgcgcaaagggaggaaaaaggggaagcatcactgggtgaatgtgcagagagaagagagaggagaagacaagagtacacaccagggaagcacgagcacggggattgacggaggatcgccggagcacggccggagaacagatcgccggagaggaggaggtggttgccggcgaggaggagcaattccgagagaacagagagcacagaggtgaaaagagcctctggctcggtctcgggctggaggccgttttttaaaacgcgatatgggcgcaccggacagtctacagtgcctgtccggtgc

SEQ ID NO: 180212 - DNA, 547 bp, Zea Mays
atactcattaaaatatatataacccgtacatccattaataacatatccacaagaaaatcaatgagtcaaacgggaaatgatgaaagaaaaaattgcacagttattgagctctgttgtgggagcaaaacatcagacatgtccataaaataactatgaactgcaatctaaatatatcatccatcttgtgcctgcaatctaaatatttcattcagaacatgaactgcatagagtaaaatgttatttgtaatgggtcagccatggtgcaaactaagatatcctaaatgagatatttagttatatatgagaaagtgtttaagtgctacagtaaattgcaggttctaatgtatagcttaaacacatcaaagagtttgatatcaaaaatactataattgataattcatagttgataactgatgatataatacatgagttgcttggctcaaacaaacatgcaaaagaaaagggtcggtagttaacctaggaattctgatagccatcaatttcatttcattatcttcttgcatctaatctgtgccggtcaaaactc

SEQ ID NO: 180213 - DNA, 730 bp, Zea Mays
tcacgctcctcgcctcaatgacaccagcaccaccgacgaggaactagagggcatcatcggcttcgttctcgtattctagcctcctctcctcatcctcgacgattgggtctagctcctggacgtctgcaatggatgacattgccagcccaacccgtcacctcgtcgacatctctggctcctcacggcgagcggcactaaccaaatggtcggcgtccttcacaagttgcaagacagacagagaggagatggactcagtgagaaacgaataatcgaagaaaaacaaatgaaattgaggattagggtttagagattcatacctgcacgtcggagcaccagacccactaacgaggcaacaagaggagaggagacacgaagaccagagcgactagatcgaggattagggttacagagagggttgtcggagggataggagaggaggattagagcaccagtcaccagatcgacggatccgtcaacgatcggcataggcttgtcggagtatgcctcggattggaggcgaagtcgtcaagcagaggggagcgaacgagggagaggcggaggccgagaccgaagagcaccagtcactagatcgtcggatccgtcgacgagggagaggcacaggctcaccggcaaccggtgtatgccttggattgggggaagacgaccggaggggagcagacgagggagaggcggaggccgagacggtgagatccgagagtggcaacatggg

SEQ ID NO: 180214 - DNA, 319 bp, Zea Mays
ccaggaaccatggtcaccatctcgtcaagggagctataccacggcgagtaagcagccgctgaagtgcaataccattgtgcaagggtccgacgcgtgtgtgtgcctctgttatgtggggtcggctatgccttgctgctgcgaagggcttatgtattgtggagtgttgcttgtgaagggcatcaaacaaacaggtaatacaatttcagtcgattcctctgtgtgctatcttcttccttccccatcctctctgcttctcccatccttactccttcctctccaaagttccacttccagatagtgtagcctgctaacaccaagc

SEQ ID NO: 180215 - DNA, 894 bp, Zea Mays
agtttttggaattatttttattaaaaatcaattcttaaactgaattatctgatttttctgctctctggactacgcggcaaataccaaagagtttcggggctaatctataaaaattccccagactcagacttcttccaaggtggaccgcgggtttgattctgtgaagttcagggacttatttgtaaagcgcctgcgccgaagtggtatcccagcatgtggattgctggatcgacagttcacgacgcggattaaaaggccgagccaaacgagccagtatcctattgatcaattcctagccgcccatcccgtgatctacgaccacgattttaaattacaagatttagcagtacgcgtttgatctcagatcgacgacccgcgtccatccaggccgaaatagtacaccattgatttaatctagatcgttgatttcttgatccacaaccatgacttcttcttctacctcccgactcggctgggcaacgacgcctcgcctcagggcaatgtccccaccggaaccagacgaagggcccccggacgcttgcaacacggcgacaggggatggcagccccccaagcaaactcccacagcaagcccccaaaaccaaaacccaccgctgctaaattatgcatgggacatggtgattatgagggggggtccataccagggatgatcagaacgatgcggctgaccacggtctagcggaaatcatcgacattcaaacgacacccagagctgtgatccttctctagcctccgaatttgacggtcccagctagcttctgccacggtttggtgatgtcgaatccctcccctcgctcagttcttcacggtagtactcaaagtttgtgatcgacgggaccagagaaaagttaacggagatatatatcctagagcg

SEQ ID NO: 180216 - DNA, 544 bp, Zea Mays
cgttgctgtcctataggcgctaggccgaggtacatggcgatgtgcccttgccatgggttgacgtacgttggccaagaagtccctctgtcgtcattgttggtggttttgacaggagatacggtggtgctgcgggagtttccaccacgactgtcaccattgttgttattcatgtcgctgttgccaccgtcatggccactgttgtgatggttattgttcctcttccggttgttgtcatagttggactgttggcattgtcggcaccgttcctagtgctaggcgggcgaggtggcatggaggatgagactttgaagcggatgacacgctgttggagtagaatgccataggaggagcaggaccagaggtgtctaggtggatctcttccagcatctcgaaccttgaggaagttcgagaacgacgagttgcgtcaaatgatggcctcgacttgctagaagtagtggtttagaccacgcaaaatgttaaggatgaggatcttgtcgtcaacgagcgacacgagattggctagggcatcatccacgcctttgaa

SEQ ID NO: 180217 - DNA, 733 bp, Zea Mays
aacgttgattacacgttagtaacattattccttgtcgcaacacatgttctaattaattatttgcttatctgttgggaattaaaataagtttttcattaaaactaggttatagtattaggtgcgcatttataaatttacattaacctgattaatcacatgcttaaatgtttcgaattaatatttacttagtataatcacgacatctattggtgaccctcgtgtgtcgacgcgcgctgtcgcgtgcgccattccgcacaccttgtttagcgggttgcgtgtcttgtgcgcagcgcgtcgtcaaggtcccgacgacatccgtctaccccccctagacgacgttcgtctacccctaaacgactcccgtctaccccccgtctacctcgtctattcccctgcgctaattaatttcctattcgattgtcgatcagtaaactgagtactcaattggattaaaattatgattttagttaagcgattgtaaatatgtgataatgtgatcttaacgacttagatgtggtatttaccacctatttagtgtttagtataaacgcgatgtctattagcgactcttgtgagtcgtgcgcgtcgtcgcactgtctacacgttgttcgcacgtgtggcgctcaccgtcgccttgttgttcgtgtgtatagttcattcgttactttcgtgttgtcgcgcgtgcggttcgcacgcgtcacacgttgtttgcgtgtgtccgtgcgtcgtcgca

SEQ ID NO: 180218 - DNA, 558 bp, Zea Mays
caccatcgccaaataggggagagtgggggaggattgtcgtgtggatgtctcacctctagcatcgctccggcatggcgtgtggtcgtgatgactcgcaggggccgttcgcacatgttagtgaccttcctgtgcggagacatcaacaggaccgcgacgaattgcttaccaaagttgggaaatcaccgccaactgcaccatgccgtggtaaggcttcatcatgtcatcatcgctggtgaggaccttccccatagttttgtactgatctctgcttcgtgttgctctattcggtttcgagtttggggctctaatgcacgaagtacacgacaccggccatggcgccgcagctgatgggctctcatcgtgcgtctggccaccgtggggtggaagatgagccattgaccgtaggatcatatccggatgttccagattagaagcacgttaccggtttggctcctttaaatcaaacctgttcatctcggaacggaggggcatggatagatcatgcatgtggagctttggagctattgatctttaatcctctggttgtgatcatgtatt

SEQ ID NO: 180219 - DNA, 329 bp, Zea Mays
gaaaacggtgtcgtggcggctctgggcgaaattgggagatgggatcggggctataggaccgtgagaggctgtgctttcaccgtgcgcattcgatttgggagaaggtggagagggcaatgtgaattcctggttgtactcaagcttacttgaagaacagcgagcacctcgccgtggctccctgtcctatatataggcacggcggtccggtgatcgatccacggctacgaggtgggctattaacgcatggcaaccacataaggaagaggcatagtgaggtgaatcaaagcatgtgcgacagcgcggcgagagctcactgagtcacggcggcc

SEQ ID NO: 180220 - DNA, 721 bp, Zea Mays
cttcgacatgattgtggatactgcccttgcctcgatccacttggtaaaatactcgacggcaatgaaggtgaacttgaggtttccttgtgccgtgggtagtggcccgacaatgtctaggccccagcgttgaagaggccatgtgtgggcgatcagctttgtgagttgcgaggggttgcccgagcggggagagaacttctggcaggcttcgcacaacctcgtgactcgatttgcggcgcagataatagtgggccagtagaaaccttgacggatcaccttggtagcgagggccctaggccccgagtgagagccgcaagtgccgctatggacttcgcgcaggatctggaggccttcagtctcggtgacacatttgagcatgggctgactgatccctttcttgtaaagttgtccctcaataagtgtgaagtcctgactttggtgattgaggcgcttggcctcgttgacatcacttggatggtaatatccttgcaagaacaaggttataggggccctccagtcttcagccatgatgagattgacaatgcgaaggcccccgacattggtggttatttgcaggccttctgggttgcggacggctggtgtgctaatgacgtggtagaacacgtcggagggcagggcttcgcctctggctgctgctttggccaacgcgtcggcctcttcgtttctagagcggtccacatgctgcagggtgaaacccttgaac

SEQ ID NO: 180221 - DNA, 506 bp, Zea Mays
aaccagctgatgtggcccccagagtttcttctgcagtccccagtccctcggacaagggcaaggggcccgcaagcagctcctccactccgaacgccgccgggaggtcggaggaagtaaggcagcaccaactgcgccacgccaatgggtcctttgttggggatcttcctcgagattcgggctctccccagaagcgtcagaagacagctggtgggactaaggagcccgaacctcgggtctaggacgggcagaggggcgtgagccctccatcaccaccatcttcatatcagataccaccaccgccgccgcctgtgtcagaccgaccgccgtcaccgcaagggcagcgacaacaacatcagcagggaccgcaacaatagcagcaacagcaacgtgtgccccgcttccaaggccactggaaggttcacggtcccaagtaagcttaggccctcccaatgttcgctcgatcgtagcttttatgtcgataggtcttgatccgccctttgcctgtc

SEQ ID NO: 180222 - DNA, 653 bp, Zea Mays
tgcgactcgacgagcgcactgtgagcagagaaacttgggacaggggagagagggagtatcgggtggccgccgtcggccacatcaagccatgttgcgggctcgtccttggggtgccgtttggtgtgttcaccggagcacgccgcacgtcctcatcacttacacgggctgcgcgggtggccggagttgggttgattccttgccgaagtcatgggccatcgtgacctcgccctgcttcgtgggggtatgcccctatggcataatcgctggtaaggactctcccttttgattcgtagtaatccctggaatgcgtagcaccgctcgaatggttgtttgaagcactcggcgagatttgtacgctttccggtaatgtccgtcgccgcggcgccgcaactctgcgtgggccggggatctccatgcccgggatctaggtgagagcccttccgtcagtttcgccatcttctccgctgggcgcagcacgttgcctatcggagttcgagcgggggagcagagaactcgtgagttccagtcatggcgccgctgactgtgcttgggcgcagccgcgtgtggctggtgaagtgggaagatgagtcgtgggctgtccgatacgaatcgtgaggataggattggatctagtagtgggcaggtgtctggcc

SEQ ID NO: 180223 - DNA, 740 bp, Zea Mays
cgccccttcccgcgagaccgagccaggcggcggcgcacaacgcccaggcggcggtggccatggccggccaaaccccacccggtggtcagatgtgcacttccaatcgtagactagtgtaagagaaagcgggagctaacgtgaactggaggaaggtgtctcaccgagggtagggatgaaggcggagccggtcgacggtgcggtatagcacggaggtggtgcatccacttcggcgaggaatctccggacatccagcacacaacccggccagccgcgggcactagaagttcccagagagcgccgccaagcatccaaacaggctggtgattcaccctatctcccagccaagcaccgaagccaacagcggctcacaatcgatggcagcatggagcgacttccaccgcgctctcccccatggcggctctcagctctcacggttgcgtggtgtgggtaggacgggatgcggaggagtatggggagctgacttaagtccccaggataatcacgtggtggcccgagaagtaggggaagggggttgagggagatgcgagatccacgggcgggagatcggcgtagtctgttaggaagacgctcctgacgacctgaccccaccgcacagtgactggaagatggcacaaaggtgcacaagggagagttggagagcggggcccacatgccagtgagatgacagagagggcgcgagcgagaatgggctgcccctggagaatcgctagatgggccga

SEQ ID NO: 180224 - DNA, 357 bp, Zea Mays
gactctctgcgtctgggggcgccgtggcttcggcctttataggcggcaccataatggctctgccttcgtggccaacatagcagagctaggtaagccccaactcgagaaccgtgtgtgggagacgaagtcgccgccgcgattcaccgccgataaggggagtagagtgccaattggactagctggggttgctcgtgagggattaattggtgggcgacttgctggtgctccggaaaatcgctcaccggcgcgctcttcaccgcggaacagccgtcgcccgtggaccgccctcgattcgtcgtccctgccggtgtgtactctctccttgcgttctccgtgcctggtgttgcttgaatcacg

SEQ ID NO: 180225 - DNA, 702 bp, Zea Mays
caccattgccgggccgcttcgctccgtggtcgtactccaccgcctacgtcaagcctcggtggtcgatccgggaggaagcacaacgcacatgtatgctctccgcggcctcgtctgggaggaatcgagctccgacccacctagattcctcgccggtgtgggagcttcaccgcatcgccgccgtgtgccgtgggcagcctccctggcatcgttcctgcacccggtatgctctcccaccttgtatgcgttagatcaggaacgcgtaggtctatctggtttcgggtgtagggcgtcggcgtgccgggacggtgttcaccggcgggagctccgccgtgtagacctatgcgtcgccatgactgggtgtgggtctgcgggataaggttggggcgatcctgtccgttggatccgtggtgggcgcactcgattagatctgagtgatctcctggcatcgggcatcgcgagccgttcatttgttgatgagcgccttagattaaatgaggggttagaactgatttgagccatccgatcggatcgaacgggatcggatcacgatcgtgcggttataatttgagtatcggttcacattatgttatgggccaacgatcgttcatcgggcggttctaatgtctcggtaggattaggtctaatcaagaccgtaggatatcgatctaccggccagtgttttcaaccgtaccccttcatggt

SEQ ID NO: 180226 - DNA, 849 bp, Zea Mays
gtcaaatattactacgtgttatgctcattcgtgcaacggtttacacactttttggtatgcgcatgtttcaggcatccgggcccacgagaagattgtgttcccgcaatctgggcagcacataaatattgatattacgatgtcttatgtttccgtttatgaaacagtaatccacgtcagcacgtgtcggtccatgggccttcgcattgatttcgccagcagtttgtgtatcgggcccacgaatccagcaaccgagcacgcagttttttcagctctccacacccataacgctcgcggcggctgaaccctagcttaatcgacgtcgtctgcttcttctccaccgcggctgccgaatcctagcttaatcgccgccgtcttcttcttctccatcgcggctgccgaacccctagaaattctccccccccccgtcgtccgaccaccgtcgcattcaccttctccaccgcatagagggatacgccgtcgccttgttcttcttcaccggggaagggacccggaatcgcggagacggtggcgccgccccctcgttcttctccaccgcagagatcgagccgcatttgatccaccgcggtggccgaaccctaggcaatccacgcgccgtcgtgagcaccgtctccaacgctgagtccgacccgccatcaacttcagtgtcccctacgcattgaccgagtcgcgcgtcgccttgggcttcttccctgcagagggtcccaaaatcggccggcctccaggcacctccacactcgggtaagtcctcaaccgccaactcttacatttgcatatttacacaatctgaatcgtaaatcggtttcaccttattagtaactcaattgtgtg

SEQ ID NO: 180227 - DNA, 902 bp, Zea Mays
ccacctaggtataatagtcccgtccagttttcttgaaattcttgcccgttgaagtgttggccatgttcccctttccttgatttgagttcccagaagtctgctaaaagttgggtttgttttgcttcggatatgggcagtccttgatgaaatgtctggactttccacggttgaagcaaccactagaggaactgggaaaggtagggaaacgagtacaaggggcactcagctgattggtaggagtgggggcaggagtggggcgaagaaatacgggttgtttgaatggatatgaaggtgggcgaggtgaagaacgattcggattgaaaggtcagattaccaaccttgttctcttttcaggtccttgagttgatttttcacccgcatatccctttgatttcccgtgtcccacatctttagctttgactgccagtgctgtactgacagccctgctgtaggtgaggtccaaacatgttgccatcttccactgaagtctgtcatttagtccccgcataaaacaattcttctttttcagatctatatccacgtgttcaatggtgtactgggagaggtgattgaatttattgagatactgcatcacagtatctcccccttgcttcagtcggaggaactcttatagtttcatttggagcactccctctggaacataatgttcccggaatgccagcttgaattcttcctaggtaacctgatgtccaacaggttgaatcgcttaaaaatttgcccactaggtactggcaggccctcttagctgctgagcggcaaacatgggcttttgcatctccatgcatcggattagtccaaacttctgctccattactcgcacccattcatcggcttctaagggttcctccgccttgacgaagagcggtggtcgagtttcggag

SEQ ID NO: 180228 - DNA, 437 bp, Zea Mays
taggaagccgtgaagcttgcccgagcttgaactgaggacccccgccaccaaaatagcgcaatcgtgctcgtcggagttcggaaccctgccggagcacgtggaccgggtgagtctccgcaccattttccaattcactgcatgcatagcctctacgtcaccccatggagcttctcgtgccgtttaattgaactataccgccgtggtttggccggagcaggagccgccgacgacctccgccgcctgcgctcgtggctaggatcgctccgaccacctctgacgccgacccgcacaccgacgtgaccgccgtgacctcccctacatcactgacaaccccgccggagctctactacagctggtaagcctcgccgccgtaatctatgccgctggtattgtttaagccagccagggagcgcgggttagatttcggttagggtcag

SEQ ID NO: 180229 - DNA, 537 bp, Zea Mays
aacacactcggggttcaccagcgaacgcccccgaacgcgccgtgcgtgcccaaccagtacggagatgagggacgccggtggcgaatcccgcgccgtctacagcagacgatgcacatagcatcgcacgggcgcccgcgatgaggagcagcaccgttgcgaaccagcaaccccagtgagcaaatcgaagagctttggcgcacaatcccaactaggatggcaaggatcaccatccccggatgacctgaagcacacggaccagcgcacaagccccaaatgtcaccaagggtgagtgtccacgacagcgtgcggatccaggccgagcaccacaccggtgaggaatctcccagcgtcggagaccccatctcacccccggtcgtcttccttgcctggacaaggcgatggtggctcgagcacccgcgcagctctgaggcgagcacgccagcgcgagctgggcagggacgcgcaaaagcagaggctgctggaggttagggctgggcgaccgccgcgcaggagcagtcgcacgagccgccctactcc

SEQ ID NO: 180230 - DNA, 306 bp, Zea Mays
gtgcagccggactagcacaacaagtgcgcaaaatcgaagtcttctccaaaagactctccatgcaaaagtcgcctaagggtgcagccggaccctccgtgcaaaagacgcctatgggtgcagccggactagcacaacaagtgcgcaaaatcgaagtcttctccaaaagactctccgtgcaaaagtcgcctaagggtgcagccggactctccgtgcaaaagtcgcctatgggtgtagccggactagcacaacaagtgcgcaaaatcgaagtcttctccaaaagactctccgtgcaaaagtcgcctaagg

SEQ ID NO: 180231 - DNA, 468 bp, Zea Mays
tggttggtactgcaacagagaactcgactatatcacaatcatccacatcgtatgcttcttcaagctcatccttaatgatcatattgtgcagaataatacatacacacatggtcacactgagtacttggtgagaaaaaagaatgatctagcctagtgacaatgtggaagcgagccttaaagaccccaaatgatatccctatatcctccatgtgcccttctagcatgcaacaggcatctgctgttttagagtctatgggaagggaatggtcctcataaacaacgacatccaacgggatagctcctccatcggcaaagtagttcccttgggtgtactcatgtctatttatcgtgaaattcacatttggtgcttcttgtttaagcatgttagtgaacaacaatgcctggtgactagttgagcacgttgacgcgttgttagacccccaaaacctcgcaaaaaagcatgccaaa

SEQ ID NO: 180232 - DNA, 1202 bp, Zea Mays
cccctctctctctctcccttcttcgacttcgatcgctcgggcacgccgccgccgccgtgcacgcgccgccacgcgtgtgtaaaccctagggcgcgcgtctttgcagagagtgagagagagggagagggagagggaagagagaggagggagagggaagagagaggagggagagggaagagagaggagaggagagagggaaagggaagagagaggaaagagagtggagggagggagagagagagaagagagagaggagggagagggagtgtatagaaagtattactgtacaccgaacgacaattaagttcatgtacgaatcttcacacgcactactcgcccattgctgccttcttcgtcaaattgctcgctggtgagcagtctgacgcgaacatcctcgaggtccgcgacgtcacacgtcgtggttgatccatgggagctgtcggctggcggcacatatgccaagaactcagcccatggacgcctcctggcttgcttcacaatccaacgtgtttacgggacggtctcaaatgtatgccatgcttctcttccatgtatgttcaataaaaatgcaaaatcctcactcgctaaccttaatcctcaatttgtttacttagttgccactcgcacaaatgagaagcatgcatacaacgccatttcctctgccatagttaccgtgttaccgtggtcataatcgccttcatggtgtacgcaagagagacatgaatgtcatagaaagtttggacgatacccataaagaagaagatgatggcccaaatagttcagtggcaaatgcgagtcatcgtcaatagcgcgccacacacattccatagaattacgatggtgtgttgactgttgtcgatgcacatttcgtagaactagatgcttgattgttgtctgttgatacgtttagcatttatttcttgaattgtgattagaattagcacatgatctctgatatggttttttagtgagacgcggaaaaaagactaagtaaagagatgcagacgggtgagaaggaggacacacagagagtagcgggcgagcctagttggcaccccttcccttcacacagcatgtgggccacacatcaagcagctgcctaggtcgcgcaatatcattcgactaagtatgagcctagttttactcatacttgcgtcacctcctcgagcgagcaagggctaccctgcttactcactatgaag

SEQ ID NO: 180233 - DNA, 487 bp, Zea Mays
tgcgcacgcagggggaggggcgcgacgagcgcacgccggagatcgggatgggcacctgttcaatctgctgcacgcgctaggagggactcgaccgccagtgtcgccggggaccgcttgcaacgctacacagcacactacaacaggaagaagaaaggctgggagagagagaatgagagggctcacctagaaccgccatgtgcagggacatcagcttctgcgcgatttggatctaaagagggagacgagaggctatgtgacgtcacgttggttatataaaagagaacgcgggaggaggttgccaaattcatcctcaattgtgtcgcgaccgagagagaggcggttgcgagcatgacaaattgcgcgagacagtgtaagatggagactgagtcaaacgagtggtagatagggttggataaaattagaggaagacggtcagagctgacccgcgagtccaaggcgatgagatagacgtcggaggggtagacag

SEQ ID NO: 180234 - DNA, 657 bp, Zea Mays
tttgtatatcattcccaagagcagtggctgacttcctcatgccaaagcgagaccatatagggcgttgaataatccctttcacatcctccctttgacttaggtcattcttcacgtaaaaccattcctgcatctaggagctcggccacctctttcgaaatgtaggcactaggtagcttgcctcagaacgaggcacgaagctgtaataaccaaagttgttgtgatactactcctttctggtagccttcgtttcataagacaactcataaatattgcaaaagcatcttgcatctggttccagtccttggctcttcatggtccatataaagatccccgctttaatgatagcttcaggagtaagttgatgaaggtaaatttcaaaggttttcagaacttcgaccaacaatttgttcaggggaaccgaagcccggctttcatggagcttctgaaaaccaccactttgtcagcttcgggaagaggaacattattctcccctccggtcctcacgattgagatatcacgaaaatatctccccctcattgcatcgatctgcccttgtttaatagttgattttccgaagacaacatggcttggtctccaggaccgatcttcggcatcttcatttctactttctacatcgaaactctcactatcgctgta

SEQ ID NO: 180235 - DNA, 1144 bp, Zea Mays
cctttttctgtatctttcttcaaaatttcatgattatgctcatagtttaccagatcaatccgaacggaaataacattctctttagcatcatcgtagatttttttaagtttcatcccagccttgcactgtgttcgtttcgaacatgtgttacatatccttggatttccagctaccctttcagcattctttccttccattgaacagttcaaccatttacaattcttccgctccctatattcttcaacggaaatccaacctcgtatgcatattgactataaaaattatacgcctcgtccacgttactaaatgtcataccgactttaggtatcaatcttatatcaatattgtccggctgcgcacagaaatttaacatttactattcaatagcgtctaaatttaacatggtatatgtacaacattacaaagaagtatgtaagagaataagagtatcatattagggagaacttacatggctttgaagaatatgaggtgtgtcctgttcatgcggcctaatatgtctcatggggatgtgcttctccgcgccgaccacatctgccgtttttgtttgctcatcgatatgtccaggtgccctcaatgctgccgggggagtaacggagacaccctctgtgtatggggcgatcacagacactacaggatttatgtctattgaaacagacgtacctgctggcgtatttacagatgctacaggtggcatgtcatcgccagctccggtgctcgacattttctcgccgccggccgtacctctaacttccgccgccgctaaacgccgccaatacctgagataaagacgtggacgagcgaacgtggacgagctaaccttgtatttgtttcctcccataactgcgcctttatttacgcgcacgtctttccttatctcaaaccggtgggagatttttaaatgttgcatggttttacactatcatgtctcacagcgttatgcaatcgtaaaccgacatgcacatgcaaatattcgttccgtgattcgtggcagaaacttttccatttatgcatgagttatgcacatttccacatacctttatgcgtgcgtatatcggttgcagcgtctcagccgggatacgttgctatcctatgcatggctgatgcaagctggcgtccattgggc

SEQ ID NO: 180236 - DNA, 615 bp, Zea Mays
aggacatgtgtatttcatgtagaatctgataaattcctttgaaattgcaagtgttgttgacatatttttcttcaagttttatcaaaattaaagagctaggcttgatttttgattgagttcttggcacaaagttaattgaaatatgctttggcacaaagtctaaaatatattcagactcggctagctttgaacctgggggactctatccagttgagcgtgcgaacgtcgggctgcctccccggtcgaggagggagggacttgttgtggttctccatggtaaaccactcaatgtgccatcctttaatgttgtccttcaggggatatcaagatactctgttttcctgccccgcgaagctccaggctgcaccatcaacaagttgatgttatcctctggtcatcccaggccgacagtggtagaggtatttccaaagcccgaaatgaggaagaattctaaggaaagcttcgcagaggtgcacaaaaatggcaatttgaataatagaactggggtttaagtgtgtaagattcagatcgtaaaaatcgagcaggccgcggaaaaagggagaagctggcagagccagacctcggagtgagaaaaggcacgaagacgacagcttc

SEQ ID NO: 180237 - DNA, 784 bp, Zea Mays
aaaattctaacataatgaatttgaagtatctttgattttgaaaggatattattaaatttgttatgagatatatttttagaatattttatcgagtgccataaacattattatttatttatttatttgaactttaaacgctaaataaacttggacggaggtggatgtgggggtggctactgcatccgttcggctgaggccttgtgcgtgcctgcctcatgattgtcgtctcgtgtggattggtgcagcctggcactggctcggctagttctaagtgaaacggaggagaacaaacaaacaaacaaaggagacaggcgcttcaactccagtccacgccgactgctcgctgctgcgtgttgttgttgagtagtaggaggcggaagtgacatgtcctcttgctaggtctagagggagtaggagccgagagctgacttgatgactcgagagtgaattcatggtggctcagcagtgtcgctttctttttgcccaggtgggcaagggcaagggcaaggcaaagaaagattcgtgtcaaattatgatcaccatcttgagcattactgcatggctgcctgcctaattcagattcagagctgagactactatcaaattatatggaacgcttggtttcttaattgcgcctagcttgtttcgtgcaatgccggtgcttgcattggcatacactgcatttttcttattttcaacgaggctggcgagaatagaagcaaacacttgtcaggcctaagcctgtactgctgtataagcatgcctagtactactacaagtctac

SEQ ID NO: 180238 - DNA, 303 bp, Zea Mays
ttgtgatctctttccacatgatgaaattccagcccttcaaatttgtcttctagtttttggacggctgtgcagtacttgcccatagagtcattcgagcaatcccattctttatttatctgacttatgaccaccagtgaatctccgtataccattaacctcttaatgtccagtgatatggcaatgttcaatccgtggaccaaagcttcatattctgctgcattattggatgctgagaataacaactgaagagcatatttgagttgttcacctccaggtgcaatgaagaggatccctgcacctgcc

SEQ ID NO: 180239 - DNA, 1154 bp, Zea Mays
gaagggcgacctaatttgctctggccatggtgacaacgcgaatgatcaaaggaacaacgtgtacccaatgatccatggcagtcaagctcaatcagaggggtcgaggagtttgaggaggatctaagaatgctagaacaagcgatcaaggcgctggaactgacctgtaataggccggccacggtgaggtgttcttgcggcgtgttcgaaccgatttgggggaagttagaaattggagctcactggtgatcaaccgaggacaatacttggtggctgggtgcgtgatgatcctacggagctctgggaggcttcaacttatagagcgcaacagtggtggcgctcagtttggccgagaagtgctggcggccggagagggggaggattactggtgcagtggattgatggcaacaatcgcggcagcgctcactggcgaggatcagatggttatagtgagtcacggcgacacgacggacgtgtctcgatacgtggcataaggccgcgagacgacggtcaccggcgatctcatctaattccaccgcggcgagcctagtacggcgaccggaattgtttactggccgaggcttatccacgacggcgtgctccgagcgttatccgatcaacctgagcacaaatcaagacggcgacagcacgaatcacagcggagatcgtcggcggtgagctgagctgtaaatctgatctgtttcaggttactgtaccatcgcgagttcctttcagtgcacctgacagtcaaagtttgggctcaaatctctctcaaatttctatggcaaccagtggatcggccagtaacaaagttgttgtctgatgatccaacaacaatcttgctatagcaaccatggccaaattcacattagatcagggttgatttccagttcaaagttgactcagtatcactgttagtctgaatttcagactgcaaacagcctgacagctcgactttgagctgaattatctccaaattcttcataacaacaatgtttaaccccttaaacaaaattgttcacctttgatagatctacaaaattgatgtggtggcctagggcaaaaaccttataatttgaaagttacaaagcctcaaagatgagctcaaatactgaatttcagacttagcctttagaacaccaatagggtctttttgc

SEQ ID NO: 180240 - DNA, 711 bp, Zea Mays
agctttggcaaaaatagcggttgtcccatgggcagccactagagcgcaaaagtcgtcgtgccccaccataactttaagtgccttcaaaatgttgtcgatagaatgattcacatcttctgatactgctccgactgagttgaaaatttcccgcagtcgtgaagagcaccgagttgcgaagccaaagcaggtgtcccaaagcattcttaaagcttcggacaatttggaacttttttctactttggcttcaacattttgtttcaattctttggcttcatgctcaaagtggcttacaatatctttaagttctttgctcaaccgtgaaggaactagacactctgattggttctgcgggcaagcatggcctggcccatttgagcttggcccactagaaacaatatccatactacgtacccatgcatgtagcattttcgcctgcactacacggacgaatgtagccctggcctccacgtaagtaggtaaccaaagagagtctgtcacttggtcagtgcatagggagagtccgaatgcgcacgtctaggtaaccaatcgtgcaaagagtgaaccgttgaactcagtcttagactagcttcaacgcaacctatgccgcctcccttacgacactttagcgacgacactttagcgacaatagaaagcacgacaaacactacatagtataccccttcgtgtccccactacttcactgcatttttc

SEQ ID NO: 180241 - DNA, 568 bp, Zea Mays
ttttacttgagcccttctgttggaaccctacctatcttacctatcattattattttctccacttcgccactttgtgaatcttgccttaactcaatcatttgttatgctttcattattatcgcctctacctttgccccttctatatattaccttggggattatataatacctaccctctaaaaccttctctcttctatctcaatttttgagttgtattttacctattttcccttggtcgtatcctcttccttgtctcttgtgagtttttaactccatccttgttgtgctccgggtgggtattacctttacctttctcatctctcgatcttgccttggtaattacactatgtccgttctctaaaatctccaatatcctatcccagtttgagagcggtgttttacttatcttacccttggcaacgtcctcttctttactgcgtgtaagcttgtgtgcaacttcattctttgttgtactcataccactgactcttcaatgccttcatattttctctcatacccttgttcgttatcgtctttgacccttgcgatatttatgtcttctacttaa

SEQ ID NO: 180242 - DNA, 572 bp, Zea Mays
aggcagttcacctggtgaagtgggcatcgtagcacttgaattaattgttggtggatctgctgcatgcaaagggttagggtcttagggagcaccggtgtggccatatgatcaaaaccaaaattagcactatgattagccaaatgaaaattgcgtacagctagaggtgggttgggtatggctggggaagactttagggaggacctagcaaagggaaaaacattttcatcaaagatgacatcacgagaaacatagactctaccggaatcaacatctagacatttgtagcctttatgagaggcactatacccaagaaaaacacactcttttgactggaaagataatttgtgtttgttatatggtcggagatgaggccaacacgtgcggccaaaaaaattaggagcgaataatcaggagttttgtgaaatagacgttcaataggactagtattatcgatgacatgagtaggcatgtgattaatgaggtatgtggagacgaggaaggcttcatcccaaaatttgagaggcatggaagcatgagctaacagggctaggccggtttcaacaatgtgacgg

SEQ ID NO: 180243 - DNA, 684 bp, Zea Mays
gacctgagacagaggacaaggtcgtggctaggtatcttcgaatcacccgaccacgatataaatagctcgtgatctccatcaaaacccagctagacatgtcaacacacactgacgaggatgtaactagacaaatcaaggccgtcaaggaggaggacgatgtgatgctgcccagtgctagcggcaaactgtaccacattaaggaacaatgggaggcccaactcaagtagaagaaggatatgttggctggctcgttaaagtaggcgaaccaatgatgccatccacgccacagctcgtcgaacggatgtggcggcaccgagaaagcaggtggaggctagggatgtgggtcgagatcaatgccagagatgtagaaaaaccatcctttggctagggagtgcatagttcaagcccaagaaaggagaggcccatgccgtgtaggcagaagaggaggcggggactttgctattcgcacgggcctccttcgtatagctcccgactgacaaaatggcaacgacacatcgacagttgaatcttcggtgttgaatgtgtcacaggtggaaatccacccatcgttggcctggatcgaggcactagagttaccaccagcttagatgttgacacaggcggccctagcccctgtggagaagacattgtcggacttaccacccctggcctcggtttcagcgc

SEQ ID NO: 180244 - DNA, 404 bp, Zea Mays
gcaagtgcctattacatgcatgaatggataatcaaaatcataatctgtctaggcataaaaacatatgaccaccctagacaatggtgcagaaactatcatacacacctcagatgcttgcttcttacataaggacctctttagttctttctcaacaataggaaattcatcaactgcataggataatagctcttgtgaaaatgatcaaaacaaccaaacatttaaaatacaacagtatccatgggaggaagtatttaaatagcatgccttttactcctagtaattctgcttccttcagaatgcctgtcaactcctcaacaacattgtgatagtcactcgtagcataaagttttctgagtatgttcttagcacgactcacccaagagcaacaatttgagtaacgttgc

SEQ ID NO: 180245 - DNA, 315 bp, Zea Mays
tgtgtcgaatccacctgtcactgatggcagtttgggtcttagagtgcgaccctctgctgaggaagtcagcatcttggttgcctcgctcggggaaattcctgacgatgaacggcaggtccattttgaggtgcctttggatcctagtgacgcaaagataagtgctatgcttgatttgctagctgaggactcttctgatgctgctcctgctgggacattggtggtggcacctctcctagaaactggtacaaccttggatatccagaagcctgccagtactcgcccgagacgcccttgccgagccaatcaacttgatcc

SEQ ID NO: 180246 - DNA, 479 bp, Zea Mays
caaatcccgagggtggatcgtgttttgtgaatagggagacaaggagaacctgataccacccagcccaggtggggttgaccgaggcccaacaaattagggttgctcggagcccaacaattcattatgcacaccaaactcagggaaagggccaattgccccaaaagactagtccaatgggggaagggtgactctcccttaaagtgggttcctcctcccaagttaagcgaggtgggataattctgaggctcacacggtcaccgtccgactacaattgggccaactgggccaattgcgtctttgccaacgggtaatagtggaggatgtcctcatcattcccaccttcttaaaatgggccctagctctgatactagatgatacacccagcccaggtggggttggctgaggcccaacaaattagggttgcctggagcccaacagttcattatccacacccaactcagggaaaggcccaatcgccc

SEQ ID NO: 180247 - DNA, 382 bp, Zea Mays
agagtaggctgagttgtgggcttcgtcaagcaggattcctcatgcctctcccttcggcacacacagccggtccctgaaccaaaggccccttcttcatctatcctgaggtccggaaattgttccttgcgagttttttctgcaagtcctgctgtttcggtgtccaagcgctgagctttgtgtatgagatcttctagcatcggtttaacttctatgttgccactatctcctaaacaagcattcagctgagctgattctctcttccagtcttccaaaaagttggttgctttctccctgaaaggtttctggctgagggcgtctgctactacattggcctttctggggtggtagtggatctcaatgtcataatccttaatcaattcca

SEQ ID NO: 180248 - DNA, 281 bp, Zea Mays
gtttacaaaattccaacagccataggaaattgttaagtgggcaaatttcacaatatgatatttgaattaggtacttaggttcgcactcttatgaaaatgtctttcctttttaaaaaggccaccatatgcatgggaacctcccttctgcagccccaaccaatttttccataaatgactgcctgcattttgaaagtgtagttgactatgctgcttcctaagtgcctaactggatgagtgaaaccaattgcttcctgatgcagaaggggatccatatattttgc

SEQ ID NO: 180249 - DNA, 485 bp, Zea Mays
tccacttcattttaagcaccccaaaagaccgctctatgacattgcgtagcgaagagtgtgcaaagttgaatacttctttgctcccaataggttgcctcgcattttgccattctgaaatgtggtacttctgacccttataaggtgcaaggtacccctttctatttggataacatgaatccacaagatagtatttacctgcacaaacaaaaaatataaagttaaatacataagacataaattaataacgtatgatagaaaagtacaatatacttatataccttccggtggatgcgggaacctgtccgcataagttatcaaagtatcttgtaatactctagtgtcatgtactgaacctggccaacctgtgacaacaaatgtgaacctcatatcgaagtcacaaacgaccattacattctgcgatgcgtaactgtgccaaccaatatatttggcttgctccgtggccgggacagacacgggaaagtgac

SEQ ID NO: 180250 - DNA, 620 bp, Zea Mays
gatgcacacggtgaaggggaaaagcagtgcaatggcgagcacgccaataaaaaaacatgagggtactttgcccattcatcaattttagctggttttggaacagctaatgagataacaacttttttttattagctaagaggcatttagctaacattttagctagtaaatgcgtccaaattcactctagcctatatggagttcgaaatgccacgagccctcccgttgcttttctttttaaatctgctgggccaaaatgggaaatttccgcaacaacctgaaaaggaagaacttcatatcgggtttatcctgggctcggaaagctctcccctttcagcccaactgtacgtctgtacttaccaagcagccgagcaggaggaaaacgaactaggcttggagccctgcgactgcgagcaaccgggaaccgagggagtcgtgtctgtgcgagtgtgccatggcgggcgaggggtcagagtcagaccctgcctgcctccccggtgccgccgccgtcgaagcggagaaagatcgagccgcccaggaggtaccagttttgcccaccctcccaaattctgcgagattcctagcaatattcgttgcgactgctaccgctacgtgttcccaac

SEQ ID NO: 180251 - DNA, 521 bp, Zea Mays
gaaaaccaattttggtaccgtaaatttcttcttttgaggcgatgatggctcggtcgtttgttcaagatctttgggtggtggggaaggtgaataattgaatgcatggtgatgctagtggcagagatagtgagttaggtgatgacggattgtcaagagctggcacaatcgatgatgatggtaggttagaaagagactaggtaggtgaaggtaatgggttagaaagaggatctacaggtgatgacagttggttagcaacaagatcggcaagtagtgactgctgagttagtgacatggcttgagaggatggtggtggctcacacaactagacatcccgtcgcggccaaaggatgaaattcttgatagcctttccatgtttctcaatccccttaagattgaggttgtctagcatgtcattctcgtatccttggatgactgtcgacacttctactctgcagtagtcttctagaatgtcgcgaccatggtactagcgtcctaggatcgatgactgtcgccacttctac

SEQ ID NO: 180252 - DNA, 853 bp, Zea Mays
gtatgggcagacataggcatggatttcgtggaagctcttccaaaggtgggcggcaaatctgtcatcttaacggtcgtggatcgcttcagcaagcagtgccatttcataccattgggccacccttactccgcagagtctgtggcccaagccttctacactgagatcgtcagattgcatggcattcctcaatccatcgtttctgatcgggacccagtgtttacatctctgttctggaaggagctcatgcgattggctggcatcaagctgcatatgtcttcagcatttcacccacagtctgatggacagacggaagccgccaacaaggtcatcataatgtacctaagatgcttcacaggtgacagaccgcgtcaatggcttcgttggttaccttgggcggagtttatctataacaccgcttatcaaaccgccctcaagaccacaccgttcaggatcatctatggtcgagaccctccaaccattcggtcttatgaacagggcgagacacgagttgctgctgtcgtcaagagcatgaccgagcgcgatgaatttctggcagatgcccgcagtcgcctggaacaggctcaggctgtatataaacgcttctacgacaagaaccaccgcgaccttcgtttcaacgttggcgattgggtctggctgtgccttcgccatcgtactccagcctccctccagggggtcaccagtggcaagcttcagcctcgcttttatgggccctaccgcatcatctccgtcgtcaacacggttgcctatcgccttgagcttccacctcgggctcgcctgcacgatgtttttcatgttggcctcctcaaaaggtttgtgggcaccccacccacga

SEQ ID NO: 180253 - DNA, 725 bp, Zea Mays
tacaactgaactatctaaacacttgtaaatacatatacttgtaaagacatactacttataaatacttgtacaaacagcaccgtttttgttcaactatctaaacacttgtaaatacataaacttgtaaatagttgtaaatagagaccaaaacacttgtaaatagagaccatctgacttctaaaagcagcaaatctgacttctaaaagcagcaaatagagaccatctgacttgtatcatatttgttctcaaaaggtaaacaaaacttcaaacatagcttaaatagagaccaaaacttgtaaaatcagaaattttagtacatgacagtgaattttttgttattagcctcagctcaatgaaattttccacatgatagtgtagccagctactatatagaaacatcagaaattcaaacagggcagcaaatgtgaacattgaaacaacaaataggacacatcaaatctgttcaaaaccatgtctgttcaaatgtgaacatgtaaacaacaaatgtgaacatgtaaacagtaaatcgtgtagcatatctgttctatagtaccatataggacatcaaaaacaacataaatgatatctgttctcaaacaacaaatattagtaactggctacctaattaggattaatatctattttcgctatcatcattggcatatccaatttgcaaaaatgatagagataggagtgtcttttctgaaactgccaaaatcaactgc

SEQ ID NO: 180254 - DNA, 398 bp, Zea Mays
ctgcaaacgcgaccggccgaaggggtatcagcatatcagggccgcacgatcaaggtccgatgcaccagattaaacctttaatcggtacgcagcgcccatcgttagatcgggatctgacggccatgttttaatgaaacagggagctaatcatatccatcaatcgccgatccaacgacccaaagtagatcgcgaagcggtacacacaggtgtccaatggattacagatgaacgaccaagctttaatgtatctgagatttaatcctatccctctacaaccgatccaacggccccaaccaagccgcgacgcttgatctcatcccggccgttggctggcaatctacggccatagtgtgcctccccaacattccccctccaccaccgccatcagagcgatggag

SEQ ID NO: 180255 - DNA, 913 bp, Zea Mays
acctcggcgccccgaatattaggtcggcgggcagcattgcctctgaccaataaaccatgaagaacggggtgtttccatgcagagctcgactgagttgagttctcaagctccaaactacgtatggcagttctctgatccactttcctgcaagcttttcactcttgtcaaacactttcttcctgagtgcttccagtatcatctcgttggctctttctacttggccattggcccttggatgcactactgatgcatacttaatctggatgctccgttgctcgcagaagtcaaagaattcagagctggtgaagttggatcctaggtcggttatgatgctatttggtatccaaaacttgaatattatatcttgtatgaattccactgccttggctgaggttaaagatgcaatgggcttatactctatccattttgtgaatttatcaatggcaaccagcacgtgagtatagccttcctgagctttcttgaaaggtctgatcatgtccagcccccagcatgcaaatggccatgttatgggaatggtctgcagctactgtgcgggtaaatgttgttgctttgataagaattggcaagcttcacatctctggactaactcggcagcatcgctgtaacacccctggtgttactataactaaaatttgagcataacatcataagcattggcattgcatatgtttgacacacctagagtgcattcactaggtaaaaatttcaaacaagttgtgtgttatagcattttgcaaaaaggaccctggatagggaacttaaccctaaatagggattaaaggggtaaaacctaacccaagttgagaaaacctaaaagctttaggggaaaagtcataaaatgaccccaagaataaacttgaatcacctttatacccctaaggtaccaaaaacc

SEQ ID NO: 180256 - DNA, 889 bp, Zea Mays
aaggtcttcaacctcgaccttttgggcttcggcctgggcagtgtacttagctttgtcttcttttattttactcaccaatgaagttaaaattttgtctttctctagaccttcgtttctcagctcgattacctctgagcgaaggttgctaagagctattgtactgctttcatcttcggcgctcttttccccgaagcatgtcaaataatgtaatcaacatcttcggacgaagcttcaggggaaggagattttgcttcttctattatactttgccccaccatcatgctggtatttgaagtttgttgttcagttttatcctcaggcgcgacagccttcatctcaatgggtactaaagacccagcttcggctccggtctggactttgatagcttcgcgactttcttggtaggagcagggctcaaggcatttgtggtctccatgacagagtctagcacgctggccattctccttctcttgggagttgcggcaggagccttttgcactgtcagtagttctgccgttgttggtggactcagaatttctggcattttcactgtttttccaatcttgattcttcgaccgcatcatctttggctgacccgactataggcaccttcggcactacaatcgattcttcagcgctctgcatgatgggggccgcttgttttgcttcggtagttgaagaggtcccttcggcaaattcaggcactacggtcggttcaatatatcgcggccaatgggttagaacttttattttcttagtcttcggcacagccggcacaacagtggtggctaaagcgtcagtttttcttttccttccttgccttcgtagtgggtagtgataatcagggtatacgaagccaattgcatcaaacaccctgttcaatcttttc

SEQ ID NO: 180257 - DNA, 1335 bp, Zea Mays
cagcaatagcagaagcgcgtgcgcgcccgcgcccgcggtggcaatcttgcagaagggccctcggggttttgtctaaataaaactgggttcgccgcactattgttaggagtcgctgacatcttgcagaaacatcctcttatttctatttcttctccaaggagctccccgacggcgtacccaaacagaaggccgagctccagcgagctggactagccggagggagccaggatcggtgttcccgagtagcggacaccaaatcggaccccgcccgcgcatttcccctaacataatttcaccagaggctacctggtttgctctagccgcagtgaccgtagaccatgcggtcggatgaacgcattcccgacgattggtggactcctagttcaattggttgggtcggcgagcatcgcagacacacgagaatactaaaatggggaagcagaaggcatggactgacctgaatcgcgttggccgcggcgaggctaaactgtgcagtgttcttgagcagattgggggaaattcgaaattcaagagctctggggaacgattcaaggctcgaatgactccactggttgcgcaattacctaacggagcgagtggtggcggctatttataggaggcttaggcggtggtgcgcaatttggtcggacagtgcgggtggccggagaggaagaaaggactctggcacatgacacaggtggcctctcaccgtggcaggtgctccggtgatcaccggacatgcaccgcatgattcactgtgacgagagccagcgctaaggcacgtggtgcgcgacggcgacaacacgacggcggtgagggttatccgagcgaccgacgctggggggagtacggcatgcttagccgcaaccgagctcgagtggatcagacgccgagatctttactgggttatgcttatccatggccacggcgcacgaatcacggcaagcaatcgatcaacggcgacgggccaccggcgacgagatctttttggcgctggcggtctgatcatcaatagagcactgtaccatggctagtgcttcttcaataagcctgtcagtccatgtttggggtggattttctccaatttttatgtggtgactaaggcaaccttctgtatcaaagttatacacctataatccatgttaaactttgtcacaatgcttaccatcaaatagttaccgaagcccattcaaaatcgagctcaaagttcatcccatcacactgttactgaaaattcagtccagggattgattgacagcccgactttgagcttaattatctctaaattcttcttaacaactaggcttacactcttaagcaaagttgttctccttt

SEQ ID NO: 180258 - DNA, 529 bp, Zea Mays
gaaggccctcacggttttggctaactcaaatcaggtttgtttactgtttcactgggtcactgactgtttgcacaaaagtccttcctcttctacctattctgcgtttaaagtccccgacggcgctcgcgcaccgccgcgctccagcgagcactgtactggccaaacggggctatgactggcactcccgagcgatatacaccggattaaaccctcccagaatgtttcccctaaaccaatttttgaattggagctctacatcttactgccctcggtgatagcggagagacttaaaggaaccacatgttccaagcaattcacggtggtataatccaattggataggttggggagcatcacggttacctgggaatacttaaacggggaagtagaagtcgtaagctatctcgaatcacgctagtcacggaaggatttttgcggcgaagctaagaacaggggaggagggaatttggggctacgggggactctccggtgagctcgagtcaaaagctcagttgctgacgtgcggaatg

SEQ ID NO: 180259 - DNA, 745 bp, Zea Mays
gttcaggctcatgccctagtttagtgtagtgttgatcattatattgctggaaaactgtgttatacagtgaggatttgtattctactgatgagtgtggcctgttgcccttgagtggcatagtccttataacgtctctagtagggtcgtgcacagtcatactcccggtatggtgtactgcatcatccgtctggtatacgggtccctgtagcgagtccaaaactgacgtagtggcacttggcaggtcccacaaggtagacttacggtgtgcctcggggtcatgcgtggagtagcttcatcttctgtcatgagccttttgttatcttttgagaattttacatttctaggtgcgtgcaagtgcatctgctagatgtagcctcgagcctccaagtaatttatgtagattgtttgggggtttatgcgcttcgtgtgcagtttaggtacagacctttcccacgatggtcatcacctgctgagcgtgtgtccatggttactgtctcttgttcaagatcaaattcctgggtgcgcgcaagcctatctgctagatgtagcccccgagtaatccatatggattgcttaggggtttattcaatttgtgtgtgcagtttagggacagatccttcctgcgatgattgtcatgcactgggcatgagcccatttagtgccagaactggacgtagttttcaaggatgatcctttgagttggttgtcttccaagtgtttgatccttaacattcttgcatccccc

SEQ ID NO: 180260 - DNA, 1442 bp, Zea Mays
ctggtttgataagaatatatcaatgattgtgatgttttcagttatgcatgacattttcctgtatcgcctttgttttttaactgctttgtattattagcatcttgtcagatgcacttggaagggagcttatgaagcatctcactataaactccagaactgaaacagagttttgatcagtgtgcccagcagctcttacgttacacatcatctggtatgatcaatgcagacccttaatagaaaaaaaaatgtgaatgcattattgggtaagaaacaaatgaaaatgccattttgtcacttgtcggcgtaatcaactaaagcatgctggttgtattcaagtatcatgacccagccttatcttcactctgtctaataagtttgccacaaacagaatgttggacatatattgtacataaagaaaaaaacaaatcaatcatcgcttgattccaaacccccacactgcatcgccctccttggtgccaaaaataggagtatatgactacagtggtagagtcagcttaaactgtccgtttgcaaggcatgggtcggacatgcctctctaaaatatacaggagtttgatccaaaaaaccacaaatccacaacaatcatcctcatacaattcttcacaaatccatgatacccaatccgacatccatcaaaatctcacccaatttcagtgtcatgtagcagctagaacagaatgaacaagcacagcaccaaggccaacacagcaagagaacgcacgagcgtgcaagtgaaagaactaaactatcaactaagagccctcgctcccagaatgaatctgctgttcaccaaagcatcccactgatgactgatcccctcagctccagaaaacagggaatgggaagtataatagtcccagcttgacctctaaacacccgaattagtggttggacgaccaacaagtcaaccaccattctagctcccgggatttcagcagagaaaggggaatagcggcctggaatatccagactgagctccattgtagcacataagaagaagaaaaacagcacaacgcccatgaattccgccgtaatcaagcaccatttcaggtcggcgcacaaagagcacgagctcgcccgaagttccgcgccacgcgggcggagagcacgtaggtgatagatgatgatctttcaatccactcgtgggaggggaaatcgatccgcgccacgcgggaggagacgtaagcggtggatgatgatctaccaatcctcatctcagttgcacacgcagtggaaccagggacgggggaggaaaaatcgatccacccagagaagggttagcggcatgcacctgctcgatgtcacgctccacgggccccgcccggatgccgccgagatccgacgagacgtccgacatggcagcggcctccgcatcagccccggcgccggcaccgccccatcacggccaggcgcgcgcggac

SEQ ID NO: 180261 - DNA, 1294 bp, Zea Mays
ttgtcaatgtttcaggggtgctctaagtcttcgccggaaggcgttactagcctgtacgcgctgggggatgccttcgacttgacgatgaatggaccctcccatttcggctccagcttgccccgtgattctatccgggtggtccggacgagtacgaggtcttctttgttgaactctcttgggacaaccgcgttgtcgcgccaggccttggtttgagcttgatatttgttgagggcctatagggcgaggacgcagtctccgtcgatgagatctttggacgttggtttgtcgacatcgggaactgctgatgtgcttgttcgggcgacccatgctttatctcttgcagcgtcatggcctcggatccatacaatagacaaaatggtgtgaatccggttgcctgacattctatcgtgtttaggtcccagaccacttcagatagtcggtcggcccatttgccctttttgtcattgagaagtcttttcttgatggcagtgaaaatcttgccattggcgcgctcaacgatgccgttggattgcgggtggtataccgaggcgaagacaggcttggtgccgatggagaaacagaaatccctgaagtcttggctgtcaaactgtttgccgttgtcgactatgagttcggacgggactccaaagcggcaggaaatgttttgccagaagaacttgtgggcggtcttcgacgttattatggatactgctctagactcgatccacttggtgaagtactcaacgacaacgaaggtgaatttgaggttcccttgagccataggcagtggtccgacaatatccagcccctagcgttgaagtggccatgtatgggcgattagcttggtgaattgcgaagggttgcttgagcgaggggaaaacttttggcatgcttcgcaagacctcgcgactcgattcacagtacagattattgcgggccagtaaaatccttgacggatcaccttggcagcgagggccctgggtcctgagtgggagccgcaagttccgctgtggacttcgcgaaggatttgaatgcctttggtttcggtcatgcactttagcatgggctgactgatccccttcttgtacagctgggcccccgactagtgcgaagtcctagcttcggtgcttgaggcgtttggcctcattgatatcacttgggtggtaatggccttgcagatacaaagttattggggctcgctaatcttcagccatgatgaggttgacaatgcgatggccttcggcgtcactagttatttgtaagccttctgggttgcggacagctggtgtgccaa

SEQ ID NO: 180262 - DNA, 457 bp, Zea Mays
acgacttcattccatcgtcggtgcgccgcctctcgtcctacatctccgacggcggattcaccactttcgccaacaagttctccaagctgcgttccttcctatgctgggccagtgacgactacagcgctactgcaggcggaagcattaatacggataagaatcttgatgatctcaagttcctgcttaggtccaagttcctccgtgtcatcgagatcaaggggctgaggatcaaggagctgccggctgagatctgcgacatgttccacctgcggtaccttggtgttcacagcccgggcctcaagaagctcccacccgccattgccaagctgatcaacctgcagacactggacataaggggcactgcagtcaagaagatcgacccgtccttctggaacataaagacgctgcgccatgtccttgcccaggacctcgagcttccagcgtcgtcgtccatcgt

SEQ ID NO: 180263 - DNA, 1065 bp, Zea Mays
gccatgtaagactaatataatttaacgtaggactaattaggatctcttaattttttttaggacgagacgataacttgggcaacaaacaatacaagcacacaacatcatcgttagttttgaccaaaaactaaaacacaaagatgttgaaaacttgcggctgcttcggctcctcttcgatctctgttagaaactgtgcagtcctgtggcgtagcgaccacgagctccaacttggtgtgctggtgtttgcggaaagagaagatccctcaaagactccttggcctctggctcctccagatccgccgtagctattgtacaatgcccaaacgatagttgtcatagttgttcatttttgacctatgcatgatggcatcggacaaattaaaaagagatagcaccgtcaagattttgagctaggcagcccctttatattcccatttgtgatgagtgttggtgatttctttatagtcttctggcatcttaattattctcatacgcgagcacatgcataaacacaacactattattatctggataaataaatggctaatcattttaaagggcattatatgtccctctcgattagtcaaaaataactgccatcatagttcggttgcaagcacaagcttgaagactgaattatagacgccaatatctcttctgaaatttgaaatagacttttggaaatgtcgttgcaatatatatttgtgttcacaagtagtttcagtaagatagtatacctttgttgtatctataggtttcatactattatgatcaaatggtcaaactagagtcttacagtgatggttgtgttcctcccataagacacaatagatcgtgattaattagagtatgaaggggttgtgtcagatcccctgggctagcaattaacatagaaaattatttctgctctatataaataggaggactaataggtgaactaatttttttagtcaatccttcagctgacttttaggtctacctaataattagctttagccgatttaaacagactctaaacaccagaggtgtctcacaatccaaaatgattgaaagtcaatatctaca

SEQ ID NO: 180264 - DNA, 522 bp, Zea Mays
gcatggtgaaggggtatgggataactctggctgcccgatcaaaacccgacgggtgcgattagatctatcacatcatgaagcggtacgcgatccggtccctcggatcaaagaccaaacgttaggattcaaaacgcgcccgatccaatctgtccccacatcaacgatgcggcggctgagacaaacccaagccaaagcggtacgctaactctaatctacgccatacatccaaaatccgacggctcacattcacgccctttcgggaaaccagcgcacggcggcaccgcccgcctatacggcggcgaccatggccgaagatgacccgtacgacaccccgggacactacctctgacctattacgcgccaaagcagacaaaatcgagtgcggctaactgattctcaccgatggtgatgatgtgacgcgctcggaccacgaaggaggggcgattccgcccagctttggcctccggcgaggaattccttgagcctgagcggtgcgcagttcgaattggggacacagtcggc

SEQ ID NO: 180265 - DNA, 604 bp, Zea Mays
gctcatcacataacgtatctccctccgcaatcgcccgatcgagcatcaacgacagggggcgatcagattccagccatccgattccgaaccggtgcaccggatttaatatcgtgaaagggtaacctaagatcaaatcacaaccgttcatctagatcttacccgctatcgcgcatcttcttcccctcggctaaaccccagcgaccacgccgagttccacggcggcccgccatggccggaatgcccgcatcgctcaacggtacacaatcactacatatcttgggtgcaaaatgaaattgagaaggtggcgaacttagggagccagttctcatagtaattccggtagtgtcctggtccgcccacgacgacccgcggatttgcgacggcggcagcgaattgagcgcgccctggtcacggaccaaacctgatatagccacccaaacgatccgaggacccgggcggaaccttctggtcgcacgcagtgctccaattcggcgctgagcgcgatggacagcatggggacgatgacccgcctgatccgtcaccacggattccggcagtatctctctctctctcaacccctctacttggtggtcgtgcgccaggt

SEQ ID NO: 180266 - DNA, 747 bp, Zea Mays
ggagagagaggagaacggtcggatctagatcggagagctgagattaggtctgctctgattaaatctagatcacgaaatcttggacggacgcccgagatctagcagccggtagtcggacacgggcgtggtggcgccgctcgatcccgtggccaagtctcgccggagacgagggggacggccatggtggggctccaggggcttagggagagggtcaggtgtgttcagggcaacaaggcgaactcgaccgtgggtaccatgccggcgcaggcgcaccaatgaacgtgggacacagtgatgcgggctaacggcggcgtggatcaactccggtgaggaattgtgcaaggacaaggacagtaacggacaaattaagggcatgggaaggttgcttaccacaagcgcaaactcatgagcgcctggaggacggcaaggaggcaggaaagtcccgggtcgacgacggtgggctccggcagcgcaagaagtgctccggtgagcatggaccaggcaaaacagagagggaaagggcaatccgaggggtgtcccgagtagctgacggcgaggcggaactcaccgaggcaatggatcggaagcgggctcgacggcggtcgcagaacagacgacgatcacagatgagcggcggtggagcttgtctggtcgcgtgcgcagggcaagagagggggcgagagagttcgactgagggcgcaagtgagcgaggagaagtgggcgagcagcgtgcggcttctaaagggg

SEQ ID NO: 180267 - DNA, 620 bp, Zea Mays
caaaataatacaaatcacgactgttaccctcacaactctattgcgaagagggggagggcagcgttttcactcactatcgcaacaagagcagtgagggaagcaaaaatgtcacataggctccaccttcggaataagacccgcctcccggaaattaaacaacatcagccttagctcttcaccctcaaacagaacctacaagtccccctccccaatacacattctggatgtcgaggacagtagctcacgctgaccaccccgatctagtcgaagacgggaccgctccatacccattcggcgacgtcttccacttcgtgacgtctcaccgatgctctatttcgacaccactctttgcctatgcgggtcctcagccctcgccccggccgaggtggccagcgtttcgcgtgtatcgggtcacaattgtgggggacagatatccctcaggtccactagaaggctagaaggcctcgcaaaaggcgttgggcctattgtttcgcaagatcgtccttccgtgggccaggggtgaactgctggcagaatgggccgacacagggaatgagcaaacgcgggccaaggcggctcgtggggtttgagcgttatccacagctctgatccgattctcc

SEQ ID NO: 180268 - DNA, 1074 bp, Zea Mays
gcaaaaaggaccccaattgagaattcattctaagtctgaacttcagtatggttggctcaactttggagccttgtaactttcaaaatgtagggtttttgccctagggcaccacatcaaagttgtataccaatcataggagaacaactttgcttaagaatgtgagctcagttgttaagaataaattgaagataattaagcctaaagtctggctgtcaggctggttccactctgaaattcagattttcagtgtaacagagccatctttgggtttgtattcaaccttgatctactgctcaaatgagttcaatccctatagtcgaattattgctggtttgtagctctacaattttgctgcagagcttgggatgagttgtcattgggaattgagagtaaatcatgctccaagtcgctctgtcagttcatctgatgagagatcaccatggtacagtgtactctgcagatcagaacgccagtacagaaaaccccctgccggtgactccccgccgtgattcgtgttgccgccgtccgaattcgcgctcggggcagatggataacctcgcggggtgagtgaatcctcgccgtcggtgagctggaggtcactccggtgactcaccgtcatctcccccttctgctttgcggttggtgcggatagcctcgctggtgaaccgccatcgcacggccttgtgccacgtatccgggcacccccgtcgcatcagcgtgactccctatcgctgtctcatcgtcgccggtgaggttgccacgacgaaagacacgaattcgcggcatcgatgttcttccttatctccggccacccgcactgcccggctaaattacacgccaccgccttcgcctcctataaattgatggcccgggcaactgcgctagatcatcccgaagccatagcacccgctcccactctcaatcattcaccagcactcgctaatttcaaattttccccaaattcggtctccgccgtcgtgaagaacagatcgcagcggccagctcgatttaggttagctcgcgtccctctgttgcttgttctagcatccgtaggcaccccgcgaacccctcgac

SEQ ID NO: 180269 - DNA, 353 bp, Zea Mays
aggcgcctaagggcctcttttatggctctaaggggcctaggagtcgttgctccttcatttggaaactgaagattgccttctgttcgtgggtgcaccggaccagacatccttgtctgcaacagtcgttgaatcatttgattggctaccttcctttcctggtgggcaccggactattcggtggtgcactggaccatccgatgacccctcccgaccattggcgcgctcgcgtggctagcgagtcaaccattgcgccacttggagagtcatggccgcctagcacaccgaacatgttcggtgtacaccagactgtcacatgatttttagtcagccagcccagtaaaactcgagagcgg

SEQ ID NO: 180270 - DNA, 669 bp, Zea Mays
ggaaatgcagttgatttgagagcaccaaatctgagaatctatacagaattgatccatgaaccctataacaaacacaaaagactgttgtttggggaacaaattttattaagggaggttaccctgttcttaacaagaatcatgagaaagtggggatgataggtggtcggttcagtaaaacgctgaagatcaaaacactgtaaatatctgaagaacgtggataaagatctgaggcacttttgaaccggatgtgctcgagtgatctggtgaaggagtcgatcgcggagagataacttcggacgtggcaccatcccgcgaacccagccgtgcgtggtcggagatatcccaccggcggtcgccgtggctcggtcacttccgccgtggtgtcacccatgcctcgttttccccttactgtgcctcttcactatgtggtaaccatgagtgaacaatgcaatctgtggccgctgatcgttagtcggaccgccgtgcctataaatagtgccatgggccacggcgaggcactcacaatttcaccagtgaacttggtagaagccaaaattcgcactgccttctccacctctccccaaattgagtgtgcacggtgaatcggtagccctttgcgactgtatagccccaacaagacctcctaattccactcgagctcgtcgcaac

SEQ ID NO: 180271 - DNA, 462 bp, Zea Mays
agctaaactaatatttaggtcttacaaatagtaaaatatatctatatatatctatatttatgtttatttctatttatgttctactcttgttgctcgttgacttcttcaccgactacttcatcctcaactagcacttcttcttgaatttcaagttcacccggctcagcttctacttctccatggttggcttgcccccggttgacagataagggctgactctttcctgccgaagcctggccttgcttcattggagctggtgtagtgtaggcagccctgttgggatagtagttggcatagtgtcccgattgtccacacttgaagcatgccctgttggtggatgtgttaggagcaacaggtcctgttggggtgcttgctggcggaggagcagttggtgcctgttgagtttgctgcccggaaccgccacgagctggtgtacttggagtggtagtatagcgaggacgg

SEQ ID NO: 180272 - DNA, 1319 bp, Zea Mays
ctcagcggcaagatcatcggcgtaaggtagtacctcagaagtagtgtcgttgccgatgtctttgtcgtcgctggtgccaaccgcgtcctcaccaagtgccatggtgcagaagtctcatgcggtgtcaatgatgaagcacagcccattcagcttgtcctcaacccgcctctcagtctcctcgtcgatcaaggaagatataacatcgtcgaagtcgtggtcgaggtcgctgagggaggcgaggaaggcacgctccttgatctttgccttctgaaggtacttcttcttgagtgcctccttgttgaatcctcccttggacttgtacttgccggaggagtacttgcccttgcgccgaccagagtgatggtcgcgcaggccagactccatttgcccttcttggggcagctggcaacgaagtggtcgggatcgccacagttgtagcatccgtccttggacccgccacaccgccgactcatatggttgttgtggtacctcgtgaaccggctggccacaagtgccagctcctcatccccaaggctctccacctgctcctctgtaatagacaacaaagaagatagtgcaaacatagcaggtgaggagttagaagcagaaccacctccagagactagggccatggtgggtgcactagggttctcaatcttggcccaagtctggtggtcaatctttgtggacttgagcttgctgaagagctcatccatggtgagagtctcgtagttgggcgactcgatgatcaccaagaccttcacctccaaaaccctctgatctagagcatgtagtaatttcagcgctctctcatgatcactatagggtagctgtgccttgttggcacacatcttgttcacaattgactggaacctggagaacatggaatcaatggtctctccagccaactgtgtgaagttctcgtactctcgcttgtacgtctcaaacagtctggtcttcacatgatcattgccctcatggaatctctcaaggatagaccagatctgatgagccatagtcagatgtccaactcgctcaaactcaccaagcaagagacacgagaacaaagcgtttcaagctttgttgttcgaatcatggaaatccatttgaattggagtgatccggtcacttgtagcatcgaaaatcgcatcgaggcaaatttcccaaacccggtaactgatgctctgaagatacgcagacatgcgaatcttccagtacgggtaattggtcccatcgaagaacggaggtttgccaacacctcgttccatgtcgcctacgtggatttcgaaccgattagggaagggaaatccttaatcggc

SEQ ID NO: 180273 - DNA, 483 bp, Zea Mays
tcacacacacaggtgcggcggcgcaccaaatctcacggcggagccctcaccggcgagtctcaatgtgacgcatcgggcgctaatccccctacccgtggtgatcaatacgatgctgtgagtaaggcgaaatgaaatggggaggacttactgtgaatcgcgcggcacagacctctgcccacggagcacggcggattaccgacgacggcgagcgattctggacgattggacgggtcaccgagcgcaatacttcacgcagacgatccccacgcaccgatgaacactcccgacaccaccctggccacccaccggcgataccgggccgggtcaacggcggcggccacaatccttccgcgagcgtagcaatggcggcgtcgattggctcaggggaaagctaggcttgtgcgagaaggtagtagggaaaggaacgagtcacggggcgtccctttatcccccggggtctcggttcggagagtggaagagatc

SEQ ID NO: 180274 - DNA, 499 bp, Zea Mays
agacaaaggtgctatataaatgcaagatttttctctgggtgcttacagggtcgactcactactgtggataaaattgtcaggcatggggacacaccatccttacctgcaccctctaccaaaatgatcttgaatatcatatacacttgatggcatcttgcagttacgccctccggtgctgacagctaatagcaaatcgtttccatcttaatctgtcatcacaagtgccacatggaatattgcattggtggcaggcattgtgtccggtcaacgcaagacacacatcaactcaaagtaatgatctacactctattgaatgtttgaaaagagcgatgttgtagggtttttcgatccaagtaacaagtatttcacgtgctggtctcacaaatccaaaaggagatctactcatttcggttggcttctacaacaactctgtaatttagatcctttttatctcatcaaccataataccccctcctcctatctctttttttgtatctgc

SEQ ID NO: 180275 - DNA, 1051 bp, Zea Mays
tctccggaagacgcgacacacggcccaaactcaccaaccgcgcgcgctccacgcttacatccggggcccacttgtcagactcacgctcgctctggactcacactggatcgtgggtcccagttgtcagctcgtccgtccacctcagaacggagtccgcggcggacgcgcgcaatcccgccatggccgtcgccggggatctcggggtcttcccttccccgccaacgaatttccctctgcgcggactcgcccttcccctataaagcatggcatcatgtttccctctggaatcacgcagaccgtaaccgaacaccaagagagggattgggagggaagaagccgccaccgaggtaagctgcctgtgctgccggtctgtggccggagtggtgctatggtcgttcacggggccgtggagaacctgggcgcggggtcccgggagctggcgggatagtcgggacaccgaaattcgtcgccggtgtgggctcttcgccgcatgtcgtgaccagggcgctacaccgcgtcattcacggtatgaactcctcccatgtatttgaattagtccctatcgcgcgtagcacctgtcgggatggagtttagggcactggagcacttgattgggatttctccggcgaggttcgccgtgaattgagggcggcgccgccgtcgtccgtgtccagagggtgaagacgatcgcgggccgttggatgatccctgagcggtttagatcaggccgcgtataccggttcggttcaacgtcacagaaccgtccgatctaaatcgtgtgcacaggataagatcttaggttattaaatcgggagcattgcatttggatctgacggctgctatcgcataccgcttcgcgggagatcagatctaatcgtagttgtccctggttgatctcacggcttggattagtcgataccctttcgccctgtcgtttttgcacaagagccctcgggaaaaatgaaaatcaacccaccatccaactcagaatagtctgagtcattggataatttacgcagtagcccctagagtttctgttaataatgcgccc

SEQ ID NO: 180276 - DNA, 697 bp, Zea Mays
ccgcccacagcaaaaaaaacctagactggcaggggagtaaggggtggcaaaggccacgaccgcagtaggggactcacacatgaccacaagttatattgtgtttgccacgatgaagacgtcagccacttcaccaaggattgtccgatcactaaagggcccggaaagaatggcaagaacaataccagatcaaccagcaaagttcatagcccacatctaccaacaacaatacccctcgctaccaagatatccagacaccatatccacaataccgacaaaattgccaccctcgtctcccccatcaagaaaggttgccccacaacaaccacaaataatacccccgctcgtcaacttccccctccgccacctaaaatgaagatgacttcccatagctacatgtccacaagataatcaacatgatatctaacgggtccagcaccgacttcaaaacaagcgacataataaaaaaatactatcaaaggttgaatcatgtcgcagtcactaccagtggtgcaaacaaaatggtcacacatcccattgacatttgatgcaaaggacgtagacttgcgaagcgcaccacgcacagatgctatggtagtaaactacaacatagacggttgggatttgcacaaggccctcgtcaacaacaatagccaaacagatatcatcttttcgcatgccttcggtcgcatgggcatca

SEQ ID NO: 180277 - DNA, 556 bp, Zea Mays
aatcccaagtcaacatataatcacaaagataagaatgagaaatgggagctctaaacttttctccatttgtggagaccacatccttcatcttgtcctttgtgtaactcaagtttacctttacttgagttgacttgtcatttgaggagtgaatcctccccaaggcatcatatagggtggttccctctatgaacttgggggatctccacccctcatgctctatgctagggttttccctatatgagttgtacccaagcccctttctcccattgttgggcttcaaggacttgtacttgggttcaactttctttaacccatcattgctagagcatttcttcaatatttctttgaccttaacctgtgagcttttcttccttgcatggttagtcaaacaacaagaagcatgatattttgtacaatgtttacaaatattattatttgaggagctagctttagactcaaccaataaagatgaagcattgaggttcttgcatcttttaagttgcacttgaagttcttgattttggactgtaaagcttaacatgcttgattcaagtgc

SEQ ID NO: 180278 - DNA, 560 bp, Zea Mays
cggtattcacctaagcaagtaaactcgaagcctcctctttcagtggtcatgcacacaagaaactcgaatggaaaacttggctaacggtagaaatgcaggcaaaccaagctgatgaatgaatgacaagatgaggctttcatattgaagctaggaaaacgagtgggtgcgaggagaatcgagcagatagaagagatcaagagatgtgggaaactcccgtggctccaacaattacggcacgagatcatcaagagacggtaaactcctgtaactctacgagttatgatgaaagatcaatagacggcaaacttccataactccacatgcagtactttaagtggcaaaacatcgacacgtcgcgctacactcgtgtcttgccatgtcgcaccacagcatgtcaaaccacgcctcgccacgccacactcggttccacggtggtggcatgcgcgctcacatatggcacaccttcacgtaaacagacagagtccaaccatataaaccgaattaacatttggttagcatttcatatggtactaaactacaaaacaaactttaattaatag

SEQ ID NO: 180279 - DNA, 292 bp, Zea Mays
ctttggtaacagtgacattagcttcaatacactagtttatttttcggttcatgcgtgttcaaagataacgatttggctggtatatcgccttgcccaggcatggccgcatgggcatgcataatagacaaagattaattagggcagtctctgttgatccggatcggaccacgaattttccttgggtttgccaaaggtttagttttgtgaaagattccagtggattccttggatcgccattcctattggaattcgttgcggcgctttataggtcttgtcctctacgcacaggacc

SEQ ID NO: 180280 - DNA, 920 bp, Zea Mays
gctcgcgttgtctgagattgaagggtgattcaaggttgtcaatgcgttgtcttcgggatctttcatagatgaggactttccccaccctctttccagaaatgtcgtgagtgatttgggagctttctcttttctgttctccttcgtccctccgttcttctctattgatgacactcggtcgtggctcctgtaggggatcaggcttctagcgcctagtcttccattgctcctcatggggaccgctgttcaggcgaggtgtaagcacagaaggagcgagaaggataccttggggcgctagaggcgcctccaagcgtacaagaaaggcaagaatgtcttgtccctatcgagttgggcaagggaatctcatcctcttctaattcggagggcatgtcctccacggcttccggaggggcagaagtgacagcgttggtgggtggcccgtcgtgccatggtgatgccacagccagctctaatgtctcggccgagatgagcaggtctgttagactcacgatatcacgctcacagtttcactccggccagcatcaaaactgatcgccgtcgtcgtcacagccgtgttctggttctcagttctgttcgtggtctgaggtctttcccctcggccaagtcaccttattacacgtatgtgtttacagggccacttaggctccaaattcacttggaccactcatctcccgaataacggatgttgggccgtctcactcgctgggctctcctgggcgccgtcccgtgatccacttctccattcagcatccttccagctccttctccatggacgctaacattttccctcccttcagaaccagcttgaccccaagctggagcgcggggaaacctccgctggacgtcttgttcttcctcccacgtagctagtgatggatgccaaccactccacttaatcaaca

SEQ ID NO: 180281 - DNA, 490 bp, Zea Mays
ggacgagcggctgtaaatgagaatttgtttcctcccgtaactgtgcctttatttacgcgaacgtggggcacgtctttccttatctcaaaccggtggatatttaaatgttgcatggtttacgctatcatgttacacagtgttatgcagtcgtaagcggtgtacacatggtaatattcgttcccgtgatttgtggcccaaaagattccttttatgcatgatttatgcacatttctacatatatttatgcatgcgtatattgtctgtcacgtctcatccaggattcgtggctatcatatgcatgactgacgcatgctggcgtacagtgggccgaccacgacctgattagcgtcctggctggggcttcccccactaacggaagctcagggcttccattacctcttccctatatatatatcgtatgcatgaagatatttcgatgaaaggtgcaatagtattaatctagtgttgtcgttctgtataaattttatat

SEQ ID NO: 180282 - DNA, 1159 bp, Zea Mays
cttgaaatatgccgaggttcgattcattgccgccatcattgtaacgagggggtggattacgcacgctcggcagtttgtcaccgtagtaagttgttgtgaagtttgacacctcctctagaatgtatgcctctgcaatggaagcctcgattttgcatttatttctacatttctttcgaatagtctttagacatctctcgattggatagcaccaacgtccctgcaccgccccccatccgtgcctcataggggagatgaagaatcaaatactgcattggattgaagaagccgggcggaaatatcttttcaagcttacacagtaacacaggtgccaatctttccaagtctgtaatcacagtctgagataactcttttgcacaaagctggcgaaagaaatagctcaactctgaaagcgctagctagacatgctcagggacatagcctcgaaccatcgcaggaagaatccattcaatccatatgtggaagtcatgactcttcatccctaagactcgcaaagtagataagttcaccccctactcaggttagctgcatacccatcaacgaacatcaacatcttgatccactgaagtacttccttcctctaggccctgcttaggacaaaattggccttaggccttctccatgtctttccaccactaggcggcttcatctcttggtttggtctatcacataacgctgctagatccactcttgtctttacgttatccttgaacttaccaggaatgtccataattgttgcccaaagtgccttggcaacattcttttcagtgtgcatcacgtcaatgttgtgtggaaggagcaggtcgtcataataagggagccgagtcaagcccgacttatgtgtccacatatgctgctcaccatatcccacaaaaccaccttttgtattggccacgagcccatctatctgttgacgaattttggcactagtcatcgttgcaagtgggcagtctgtcactacgacaccctttcgtaaagttcttgatgtctagcggcggaatggatggtcaggagggagaaattttcgatgttttatcgaacgacggatatttgccaccccttttcaaccaaatgaacctaagagcttccttgcaaactgggcatgggaacttaccatgaatacaataggcgcagaatagcc

SEQ ID NO: 180283 - DNA, 605 bp, Zea Mays
ggaaaatccacggttaaagcggaagatctggttttaatggagaaattaggatattttggaaagcatgataacaaactagttcggtttgctggggaagaagtgattccggaaccaaggaacgacgaagtcgtagtttttaagagcttctttagagcaggtctttgattccctctatacgagatgattggtgaagttttaaagaagtttgagatctaccttcatcaactcatcccaaatgtcatagttagacttagtgtgtatatatgggctctcagaagccaagggaagagtgtcaacgctaaaggattttgccaggtgcatgaacttcactaccagacgaaggctagagctgatggactacataagaacttcggatgttacaattttgtgtaccagaaagataccaaagctcctatgattggttatcacaccaagtggccgactggctggacaaatgaatggttttacgtgaaagctgacacgaagaagagggagaagcttatgactatggtgatgagtcccttgagactgagcttcggcatgacacgaccattgtgcaatatgcagctcggctccccctgccagttagccaaagtggtatttag

SEQ ID NO: 180284 - DNA, 733 bp, Zea Mays
tgagggcattacacatactacattggctcaaccttcgggataatgcccgcctcccgataattaaacaacatcattttcaattcctcaccctctaacaaattccgtagatccctttcaccaatactcgtcccaaacgacgaggacaacaagtcgcgttggccaccccgatctacatgaagacgagtttgctccagccccatccgacggcgcctaccacttcgtgaactctcgccaacactatgcttcgccaccacttttggttgacggcgttcgatcctcaccccagccggaggatccaacgcttcgcccatctccagccgcggcgaagactccgccgcagccacatctaacgcagcgaaataatccaaatcttaatctgaagactcttcagtccaggaaaacgggctctcgaactcaccaccatcagatgaaaaagacccagattcagaaccagacaaattatcattagctggcactgcgttcatggccaccacaaaattagtaccatcagtagaggttggttgcgcaggcccagatgtcagaacctgcgcagcaaccgagtttcagtatcacaaaaacaaaaccctacatccaacgcccctaactctttcccgccacctgtgcagggcccatcgacgctgcagagtcttcgacagccggcgcggctgccaccgaagtgtcttcaggcaatacagcggcgaccacagggtcgtcttcgccgacacctgttggc

SEQ ID NO: 180285 - DNA, 818 bp, Zea Mays
cacagctatagtaacatgttcaaaccctaggcttcttagaccagtcccatctgcagcaggcagtgtagtgttcttcggcactagtgttgtacccgcagtatctttctcctcagtttcatcttcgtcaacatcaaagaatgaactcattactggagctattcactcctcttcttcttcttcctcgctctctagaaacaattccaatggtgtaaccccttgcgctatcaaggtaataacttctctaatttttgcctctttggctcccataggagggagttcgtcaatctcagctgccaccttagctacaggtgcaacctaaaaatattcaaaacatgaaattaatataataaattcataaccagtataccaaataccaaaaaagcctatttaccaaaattacctctgaggcttgaggagttgattcaacttgcaccttcagaactttgctctgccttgtagttaccttcttcttcctcttcttcgaatcctgaaccatgatgggatagtctggatagaagaagctgatggcttcaaagacacgatttaatcgacgcctcttttgaactccaaaagcccgttgtaaagcttcggcttcaggtttgctatagttaccaagtatcttattacattttgcttcaacataatctagccaccggtcactaggttctccaaactcatcttcgaatttatacttgtaacaaagcctagccagcctaggctaggcgttcgaagcgtctttttcagacatcttcgacatttcccactcaaccgctagtggccttgtcttaaaagctgaaaattcatgaacaagatccctc

SEQ ID NO: 180286 - DNA, 623 bp, Zea Mays
gttgagttgtgccgatcgttcgctcgtcgttcttccgtcatgtcatgtgcagtacagtgctcgaactggactcgcagtggagcgcaagagacagccatggctaataagctgaagtctatgtgtgagagagtagttggggtggttctcctgcttttcgctcgtggccaaccactgttcgttgaacctcacaaggatggctgtaacgttttcgttatcctttacctaccacgtctgcccttttgtcaagaaattagattcctggctttgtaaagattcggtagcaggagaaactgcccatgctccgccgcccaccagtttttgtgaggctgaagcctgaagctactggacatccctgtctgcgtttgctcccctcattgccaaggacgatcggtatgtttgtgtgcgttgccatgttaatttcgcattacatgatagataactagaagtttatgcaaaaactaggagcactaaacttctctgcatggtatgtccacccatcccatcccgagcaaaaaacgctctgtcggcgctgctcactagtggtgctcagtttctagctgagacgtcaacgaaccttgtggtgactgcaactcaagctttgctgtacacacacgcacacatgg

SEQ ID NO: 180287 - DNA, 1004 bp, Zea Mays
gtcggagtgtggaggcgatcccgcatgaacgtccatggaagtacaggagggagaccccgctcggacaccctcaggggctgggtcatagtttgcactgcccacttgagccggatcatccccggcagcaccctcgggggctgggcagtggcttacacttcccacccgaaccaagtcatccccggcgacatcctcgggggctgggcatgtgtcaacaccatccttggggtccaagttctctgcggtagccacttctaaggctgatgggccctcagttacttccatgggaccaggacgatccaagtcagtctcccgaccctcgagatcgcgctccaaggtcgacgaggcacgggatgacctcaacccagcatcaagcacatcagcacaaacctccatcacaccaccatctactggctccgataacaaatcctctggaaccatatcctcaagagtctgatcaaagttggccagggacagttcttgcagaccaatgagagcagacaaagtaggagaaggaactccactactttcaccgctagcgatgaactgccgactgtttttctgagtcaaaggaacttcatcttcttcctcctcctcgtccacattagcagcacaggcagcacccccattgggatcaacaacagatggagcacccacattgggatcagcaacagattgggtacacccattggggtcagcgtcagtaaattcagtcacaggcacttcttcagcagcaggaaccgaggtaccaacgtcccgatccaaactggatactcgccggaggcgtctctttttctttttctgctcatcagcagaaggatcaggttgactggctcggcaagggcgcctcgagcgagcactggcaggcttctgagtatccaaagttgtatcagcctctgggaggggtgccactaccaatgccccagcaggagcagcatcagaagagtcctcagccagcaaatcaagcatagcgcttatctctgcatcactagggttcaggggcacct

SEQ ID NO: 180288 - DNA, 342 bp, Zea Mays
gttcagcaaatcctgttgtgagaaacagaagttgagttagattaacctcacttatgtaactcataaatttcacatgtaaagcccattgtgaaataagaagacatgaaaatggtaaaaagatcttattagtttaacccaatcagccaaaaaggcatgtatatcatcaaaatggttccattctgtacctcgcttgttcctgtgtcaagttcattggtgctgtccacttgatcaccgacaggatgtggattaatcttgccatctttagggtgtttgccactgcaaccccaccattcaacatctgggctggtatgagatagttgtcaatccgctcttcccttgtcg

SEQ ID NO: 180289 - DNA, 406 bp, Zea Mays
cagactctaaacatctatattgtcgttcaaattctgcccatcatgtgaatttgacttgatcatgcatatctaaatttggtttacaggaatgatattactctctcaacccacaaaataatgcaattttcgcatttcgagaaaccaaatgctttcaagtttaaccataatcgtatgaaaaaatactaacatttatggtacaaaataaatatcattggatcatatgaaatatactttcaatctttcataataaactgatttgaagacataaatgtaaatactattcactgtaaacttggtcaaatttgaactacttaaacgggcacaaatgtcatagttgcattcttttgtggacagagagagtatatgtcaatgactaatcataatctaataataatttataaaccgt

SEQ ID NO: 180290 - DNA, 722 bp, Zea Mays
gggatgacttcgcttcatctcgatgcaagcctcaggatgatgccatgtgttgcatctagttaccagcggaactccaactaggttttaaggcccaaacccgaatggttttgaaacccaaaccaccaaaccgtcgtgattagcatatataatatgctccctccatgatcttgacacgtgtcatcaatggtccaccttccgatcaccaagtcctctagcgcctctacttgacttagtcaacatggtctactgctccatgtactcttgtgcttgttgatgttgccaggtgtcagtcacaacagtcagtcttctacttctccaaaaccttagctaagcctcaacgctcatccttcattgctcctagtccataagcatgaaccttcttgacgttcaccttcgttgttgatcatgcccaagctccacacctatgcaacataagccaagatacatgttgcaaacactataattcacaataagtggttagtcaacactaaacaaaagccaatcatctcattcacaatcactcatcacacttgaacaccatgggcacatctcaatcatgttttcacaatctcccctttgatgagtgaattgccaatacaaacacaaagcgatggatcaaaagcaattgaaaaaaagagaactcgctaaaataagcaaaagacaaggaaaagccaaaacatggtcattcgaaatgagaaagcatggtccctagagacatggac

SEQ ID NO: 180291 - DNA, 845 bp, Zea Mays
gtgctgtgagacctatttgtcaggtactctcctttctttcccagccgtttggctcatccggctcagcccctcctcacgtattctcatcttcctcttttcatttacatatgggcggatgggccccatcgccaacttggtcgttcagccactgttcggctcctgctgagcacggacacgcagcagcctggaatcgctgccgtcgagtccgattccgcgctcgcctgctcatctccgatgtaggccacgaacgtccacgaacgcccgcttcttcccccactgcgatgatgtttcctctccccttcctcctctttagtgagtcggcagtttcctctctttcccagcgccattaatggctacagagctcttcctctcccctgtcgatccgtctctccgccgtctccattaatggcgtattcaagcttctgtttctgtcaattacatgctgtaatagccttgatttcctcccccgcctataaatggagcccatgacggagcctcctcgtgctctccccttcgctgccgtcgtgccaaaaatttcgccacgccgaacctccactcgccctgctgctcaaggcccccatagttctctactagttctgtttgtcgcgcacctcagtgctcaccgccgattccctatccgcatcgaactcgcccctgctgctgcaccatcctatacgcccacgctcgcgtcgtgctgccacgctcgtctgtgttatttgccgtcgatctggttgctcgccgacgcctcactagagctcgcaccctcgtcgtgtcgtgcctcgccgagcctctacgccctcagtcgccctctgctcgcgtcgttaatcgtcacaacgaagctgtcc

SEQ ID NO: 180292 - DNA, 986 bp, Zea Mays
ctcactctttttacaccgacgtcgtcagcaatgcgtgccgtgcctctagactttttgtccgttgtctgtgactccgcccaccgacttttgtttctgcacctgaatacctgatagatgttctatcttacgcgtgtccaatggcgaggcatgcccgcacgatgttccagtccattcgtcaacgtgctccgacgtgattacctagatttcgtagtagtacaaatttatacttgatgttctcgaaaagggatccaaattaatcgaaagattgaaagaccaccgagcaagagttgatttgctttctcgtggaaggttcctcttcctccagtgacaaaagtttacgccgctagcttttcaacgtggctcattatgaattcgattgccgagtcaaactatatgtatgttaagtataaaaattatattgataaaatgtatttcatatactcactctatactaagaatgcaactataaaatttatgttagtcaaacttgctcaagtttgacgagattcatggtaattagtacagacatttatgcctccaaatatagattcgaagagtcaaatcatatgtaggttatactacttctactctcaaatatttgtcgtttactagttcatttttttaactaaaacaagaactgagggaatataatataaatgccaaagggcgtggagtctagtggttacaagagtcttagtagtaaactagtagtaacaccttagaacaaatattctagaatttaatggcattatgcttttagtggtagatggcatttctgtcgacaaaaagacatatgtggtgacttcttaatctcgaggatttgttggcctagtcttcgataacgcttatagggatgacgtttaggtacaccgtacacacccttgcttaatggaaatgatgaataattgctccgttaatttcttataagtgttttgtatggaacttgacactctcctaaaattttaaacatattggcataagtagtg

SEQ ID NO: 180293 - DNA, 479 bp, Zea Mays
atcgagtgcatcccacttatctgttcaccggtgccagggatccttctctggcgactgaaagagtaattacagaataagatgttctgaatcgagttgagatgatactgagaggtgccattgtcaatgaaggtgctcctcaggcctattttggatggaatcttcctccactataaccttagttactttgtcttgaactatcacatgtcgaattgtcttgttgtttatactgacggtgttgctgctttgccacaaagttcatttcctgcatttgtgtcgatcccccttgacgtggacaaggtgtgcatttagagagtagggtgcaaccgtctgaggaagagattggagtgatgcgtgcgacctataaaggcctggccgatgagtttaaggcaacccacttgctcatcaggaagccttctaggagctctgaacttgaggcaatgtgggatgtgccagctagaaaatctgaaaccgaggatgcc

SEQ ID NO: 180294 - DNA, 545 bp, Zea Mays
ggagaatgacaaaccaaaggatggcagtatggaggtgaacaaaattaaagttgaccgaacagagagaagtgacaagttagaagcattgcgaaattatagaaggaaaaatggattgtgtttcaagtgtggcgaaaaatggggtcaacagcataagtgccctacccagatcttgttacatgtattagaaaaatcttgaatgccattgaattagacaatgaacaattcagtagggaagagaatgaaacggtggtggaagaacaagtgttagcagtccaagaaactgtacctgggagtaagaaaagaagtacactgcgattactgggcatcattggcacgcaacaagtcttgatcttggtagactcatggagtattggcacttttgccagtaagggattagtggatcatttgatgttaccaacacagagttgtgcccagacacagtttcgggctgctgatggaggaattatgagctgtactaaatgggtagcaaggctgcaatggattatttagggctattcgtttgtttctcaggccaaggtgttacc

SEQ ID NO: 180295 - DNA, 683 bp, Zea Mays
tccctatttgcttcatttaatctttcacatttttgtttagcatctttaagggagattttgagctcatttttggtggacgacatagtttttcatttcctcactagctttaacaactatgtcatacttagcagttaagaactcattttcattttttagctcgtcacatttagctttggactttctattgatttgagtatattctttaagcaagtatgttaattcatcataagtaggagaagcatatccatcatcactatcacaatcttaaataatgacattttcattttgtacctttcgttcacctttagccatgtggcataggtgtgaagtagatgaaggtgatgatggtggtgaagagaaatccccggcgatggcggcgacctttcatcttcttcttcacttgaagaagagtcgcttgaggattcaatgtcggtgagccaatcaccaacaatatatgctttcccattcttcttgttgtgaaacctcctgtgcttgccttctttctttttgaagaacttctttcctttcttctcatcatcacttttatcatctttcttgtccttgaatttgtttttcttgggcttgttgcattgatgagcaagatggccaagttctccacaattgtagcaatccatctcggggatgggctttctcttgctagagaaaaatttcttctttattga

SEQ ID NO: 180296 - DNA, 485 bp, Zea Mays
ctggtgtggaggtgggggtgggggaggtacgatttgtacttcctggtggtgttggtatgcgtggtgtggtggatgcggggcgggggcgtggatgtatggtggagggggttgctgataagtgtgcgcgacaactctggggttgtcggctggctgcgcccgtgccatcctgtctttggtggccttcatttctgggcagtctctagtttggtgggcgcagtcttcaccatgaaaaagacagtagaactggcgcggcggctgcgcacgcccccgacccctaccgcgagttccgtttccgcggccctgagggggatactcctggcggcgaggggcatcagcagcggggtgctggttggcgatgttgtgcacttgctgctgattgcggtcgtctcgactggagtctggctacggagtcctcgtccacgtgcggctggactgtggagcatctttgggtttcctctgagactcaaccttgcgctggtggagct

SEQ ID NO: 180297 - DNA, 497 bp, Zea Mays
cgcccagccaatgatccaacgcatttctaaatcgagggctcaagaattgacgtcgatcgatcgggagatgcatttgtgaagtgaatagggactgttcttgcggcatatatggaacggtttcgcggagatggaatcgtgtgtatgagaaggaaagaaaaagaggtatagcaagagctggaactttgtgtgtcacacgcatgcatgcatggaagtggtagctagcacgggacaaaccaacccatggccatgcgtggcctcctttggaacggtttcggttaccacgcaagctgatggagtgatgggcgaggagagggatgatggcaaaagggtttggctgcgcgcgcgtttgtttggaggggcagcagagcggaactgacacggaggcgcgcagtctctcggagaggcgaaggagcgcaagcaaaacccgcctgaagaaagcaaggatatcgcaagatatacatgtcttacgcagaaagcaatcgaagcaatagtaaaac

SEQ ID NO: 180298 - DNA, 448 bp, Zea Mays
tacatggtatcaatcgcggtttcgatccgctactcttccgcaacctattccgcgcctgtcgctgatccgatcgttgctccagtcgcagacgccatcgcctggagtattgccgatccaatcgccagcgttgtgctgtcaatccggcctcacacgacgccgcacatcaccagcactcccagccgatcgcccgccccgtgctgaccttctcgccgggtgtggtcgccggtcagctccttcctccactcccgatcactcgccccgttgctgccgtcaacatcaggctcggtcgctggtcccgtttcccatggcagacgacgacgacaccacggtcgcggccgacgccgcccgcgtagacaccatgcgtcaggccgaggaggctcgcctccgcactgctgctctcgatgcctacgagaaggcccacgaatctctctaggcgcaggccaccgcc

SEQ ID NO: 180299 - DNA, 611 bp, Zea Mays
aaatatttgaatttgaattgtggtttgatttgaattgaattccatagagaaaataaaaagaaaaggaaatagaaattcaaaggaaaaaggaaaaaccgttttcagcccagctcctgcgtccggcacacctcggcccagcatgcgcgccccgcaccccttccctttgcctggtgggacctgcctatcggtgtcgttccctttgcccgcacacgctcgcgccctcgctccctctctccctttgtccggtggggccgtcttgtcacgcccttttcccttgcgcgcgcgcccccgctctctctgcacagtgggccccgcccatcagcgctgaccgcccgtttgcgcacccccttttgctggtcatggacctcgcctgtcggaatcgtcctccccaaccgcccacacgcatgacccgcgcgcacgctgtggacttcgcgcccacgacgcacgccgaggacgcgcccaccgccaccccggcctattctagttgcccacaccctactcgctctccctcctcctcactcgcgcactcgtagaaccccagcacctgcctcgcaccacgcgcgcaccagaagagctccgccgtcatccgtcgtggtctcggacttgtttct

SEQ ID NO: 180300 - DNA, 461 bp, Zea Mays
aggcccaattgagattatcaaggttgtgtccgagttcctagatgtgtttccaaaggacttaccaggtatgccaccagagcggaaagttgagtttgctatagagcttcttcctggaaccgcccccatctttaagagagcttacagaatatctggacctgagttggttgaactcaagaagcaaatcgatgagctgtcagagaaaggttacatccggctaagcacctcgccttgggccgcccctgttctattcgtggagaagaaagatggcaccaaaaggatgtgtatcgattattgagctctgaatgaggtcaccatcaagaacaagtaccccttgcccagaatagaagatttgttcgaccagttgagaggagctagcgtgttttcaaagatagatctgaggtcaggttatcatcagctcagaattcgaccttcagacattccgaagacggcattcattacca

SEQ ID NO: 180301 - DNA, 799 bp, Zea Mays
aaagaaatgtgcaacatcgaagctcaggaaaacctgaacaacttcagggatcaagattacgatggacgagattatgacaatgatgatgaagcttctccattgacaccagagctgcaagctacaccatggccaccattgtacatgcctcctacgctatctatctatgatggcttgatagacctaaagcagttgctcatgagctactaaggcgccatatcatcgtatggtggaaactgagcagtcatggcaaaagcctttgtcatggtggtccaaagtgtcacccagacctggtactcatcacttcgacaaggactatcaactcatgcccgaagcataaagaaatgctcctcaccagcttccagggctttcaatccaagcctatcactacgcaagctctgtttcaatgtacgcatgagctagatgaatatcttcaatcatttttccaaaggttcctcaggcttcgggctcaggctccgaccgttcaggatgacatcgtcaccgaagcaatggtcaagaggaccaaccacccagtattttgctaggaaccctccccattctcttgaaaagttattgcaaatgatagatgagtacataagagctgataatgatttccgtcaaaggagggaagagttccaaagatacgccaaagtcgccaggggcttcgaaggaagattccatccaaggcatgtccgaagcatccataacccgtcacaggttgaggaaagaatgacccagtcacagggtcaatcaggacaacaggcaagctctcagcagcaatcttctcaaagcacattccgac

SEQ ID NO: 180302 - DNA, 717 bp, Zea Mays
gtcgatgatgaagtcgatgtcatggatatgcgcctgtgccgtcttcgtgggctcgtctttggctctgggtgtttctcctgatctctaggagggtttctagcatcacgtgggaaggaggaaccatggggcgccatgaattgctcagaggacagacacatcatcgcggcctcgtacatcggcgtggtcacccgtatgtgcttcacgaaacctggtagggatcttctcaattgattcgtctccctctgtagaccgtgtaggaccaatcggattaggggggcatggctctggagtggcggcttggtcgactccggcagatcctccaccgcggggatagaagcgccgcctctgcgctaggcgtgttggggaagaaggcctaggggcgtcggatcggaatgaagggccaggatcggaacatgtgaagcgcttcgttcatgaccgttgatcgggtatctaacgcctggggttcagatcggttgtgatccattggatttagatctagcggtatatatcacatatcgattcagtgtaagctggatctaatctgggccctcggttttgatcgaacggcccaaatctctctataccccttcaccgagcgacttttgcataggagaccccgagaaaagaaaatactgctccgccatccactccctgtacaaagtactttcagttaggccctaaaattgatgaaaacgaccctgggctctctagaaatcg

SEQ ID NO: 180303 - DNA, 690 bp, Zea Mays
ggaaattgcaacggttgtagcaacccagggtaccgagatcgatccggcttggcacgcaaggagacgtcacaggaacgaacgtaccgtcggacaacagacttcatggctggccaagcaaatagatgtttcaagcgactgtatgtgactggaaaactcgaatggcctccaactggactgtcatgtagtgaacatatgatttgttgttgtagggttggattgtggccaatccaaatgcggtctttgtatcgaataattccgttctacaatttgtaatgaccatctgtggtagatgaagtagatagatctgccagcaatttaagggtgtggggatcttgatggtaacctgccaccacatctaacagccattgggggtgcccactgatatagcattgagggaaataggcgaatgaggacgctgagaaagagcattagcagccctgttggttgatccctgcttatagaccacctggtattggagccccaacaacttagtgaagacacgctgctgccaaggaatcttcaaacgttgttcattgagatgagtcaagcttcgctgatccgtgaatattaaaaatgtgccatgctgtaaatatgacctccagtgatctacaacgagcaaaatggtgaggtactccttttcataagcagatagacccatatttttgacacccaaaggcttgctcacatagg

SEQ ID NO: 180304 - DNA, 863 bp, Zea Mays
cgaaggcgtctcccagcgcatacaggctcgcaacgccatccggcgaggacttggagcattcctggaacattgataatctccgcaagttttttgtttgactcctcagggccagctcgcccttgtaattcgcaaaaacaattttattctggcccgcactcttttcctcccggggggtgaggtttctaacgaggcggagtcatgtaatatacaagtgaaaaatcccccgcaaaaatctacgtcgaaaaaagaccacgtcgacggtcttcgacattcgactaatacaaagtcaccgcgaggggcagcgctagccaccctcgcgtgcgacactccgcgcaaaagtcgcctaagggtgcagccggactagcacaacaagtgcgaaaaatcgaagtcttcctcaaaaaagactacccgtgctaaactctacaccaaactgtccgcgcaaagaccgactacaggcgcgccggaccgacataataaacgtactagaccaagtgcgcaacgcctttatgagcatagccggatgcgcgcaggcgcacaacctcatcatacaaactatagttacatatgtacagcgagggcatcacaccttacatcggttcaaccttcggaatgattcccatctccctatagttaaagaacattatcctaagctcctcaccctcaaaaagacttcgcaactccccctcacctacactcgcaacggccggcgaggacaacaattcctgcttgccagccctgcccacacgaagccgatcgccatccacctcactcactctatgcttcgcaaccgcccttcgccgcctacgcccagcgctcggaccaggcacaacttcagcatccgcagcacgcggcgaagcctccgc

SEQ ID NO: 180305 - DNA, 503 bp, Zea Mays
ccaggtcagtgagtctgtgtcagactgtcagtgcaccataaactctatagtctgcccgtacggtacgctcatcccgagttcccgaccaacaatttacctcagattatgcatggaatgtgaccgaatttatacggtgtaggggctgtacaggcttatgcgagtgagttcagatttgcattctgccggcgttgcaccagtagcatacgactctagcaccatggctgcaaattagtagatttcgcaatagctatgttatgccaatgaatgttgtctcgtgtgaatgccttcgtgctgaggcagcagattagttctctttcttattttgcactggggtagatatctactactgaacattttgttgttaacaccagttgattagtagatttcacaatagctatgttatgctgatggatgtcgtagtgtatctttttgtttgtcagtagtcatgctagttattgtatactttgatcactggttttggcagccaacagagttaggagtat

SEQ ID NO: 180306 - DNA, 549 bp, Zea Mays
tcgcattttagaggggaaaggggaagatggaagctcatatctttggagctaaggtgtagtgttgttagtagtcatcgtcatggagtttgatgtgggggagtcagcgtccacaggtcctctcctcattgctctccctatgtgttaggagtctatggtggtgtgttagtgggcagtgtagaggttgcactagctgtgtcatagaaaacatagttatggccactaggtagaaggtgatcaataccttgtaagatgtgtcagctaaggttgtggaggcaagaagcgttggcttccatggcagtgtcatgtccttattcatatagtgaatgcgatcgagggccacaactagagataagggttgcacctccaatttgggcacatattagttagaaagatagactcgaacatggtctccttaattgagttagcgaacatgtccaataagtctgtcttgcttcatgtaaattgggcgctaccatttcctatgaacctccaccaactacgtcattgtgatttatatgttttttaaagtgatccttttggacttgactt

SEQ ID NO: 180307 - DNA, 659 bp, Zea Mays
atttaaatgggctctggactgggcaccaaaatacaggaacagcaggggcctagttacaaaaattcctatgactcagagcgatgataagctggatggcgggttgagtcatgaaatgtgctggggttcatttgtaatatgcgcaagccgaaagggtatccgatgatgtgggccatccgatctgcaaccgagcaccccgattaggtcgcctccaaatgaaaccgcatgcgatagctgccctacaatcccggatcaatgaaccaaaaccacccttgccagcacccgatcctgaccgttagatccgatccaacgctcacgatccaatcgggcccaaccggtaagttgtctctaatcgtgaccgtcccactagatccaacggttcacagaccccgatcctcccgggcagactggacggcggcgctgcccactgctcacagtggtgccccaccggaacggcccctacccgcgctctagattgacaatcacactaaccggagagtacaactcgcatgaaaggagatggaaaaattgacatggtgattgaacctgcgtttcgagcgacgacgaggtcggaccacgacgccaggtgccgtcgcggcggagctatgccaccgacgagaaattcctccgccctcggtgagtaactcgctcaccgcacacgc

SEQ ID NO: 180308 - DNA, 388 bp, Zea Mays
tgggaactctctcccccctcggtctggaaggcagccggacgttcgcaccccaagctggaccgagtctcccacagatcaggaggtagttgaggcaggtgcgttgctagttgaagttggactgctgaaagagaggggtctgactgctaaagccgtggttactgattttgtttttaagaatattcagccgttgaaggacagggcatacccagcttatatgtatcgaggcctagccgactcaactcgggttaccaacagaaaaattccctctgcagacttggtgagccgacttgagatgatccttagaggcaaagtgtcaaatgttggtgctccagtggcatactcggcctggaacctgcctcctcccaaagctttcaccctttttgtgtca

SEQ ID NO: 180309 - DNA, 639 bp, Zea Mays
aatctagggtgtcttttcggaaaacggcgcagtggcaaccacagcccgtcctaggccattcgatcgtatgcctacggataagattagatcctagtcttcccaaaccggtatacttccaccaccacaggattccccatcaacggccaaggaagcgccacgccgcaacatccctagagccctcggattcgatcacgacgacactggcttaattaggccaaagggatacgagcatcgaatcgccactatccattgccagatcaacgccacccctcgccttccaccttagctcccgtcgcagtggcccgcgcaatcctcttggcggcgcaccctctggcgccaggggacccagtcccccgatgaccccgattctacgcttacccgagctacgcatagcaaagatgaagccaaactacaaagagggttgtttaccgtcgatgatgtagcaggcactcccatccatgacgcaaatcggatccacggcatcccacgtccccggcgagaaattcccgtgctcccagccaccaatctcaccatatgaggtcaccgacgtgttcgatggactctggaggctttcctcgattgtctgccaagccccgagcggtgcacccagcaggatgcacacgtggcggaccatctttc

SEQ ID NO: 180310 - DNA, 611 bp, Zea Mays
gcgacgccatagatgcaggaaggaacggatggtcgagaacctcgagggtatcacgctccgtacgcgtgcaaccctccttattgcggccctccagccccctgcggcccatcaccttcgcgacgtccaccaccgactccctatctgccttattggcggcaacgacagcaggtggccggacctcagccagctacacgctactgatattgctcacaccgagctgtcgtaggaagcagatgttggagagatcgacaatgtcgaggcacgagatctgcatggacacggtgatggcggtggcatggtgttgggtgtcagggcgcggcgagagggagggaccgggagtgagaggtggtggtggtggagcgggtccgacaatgtgctcggagatgaggagcagggctgttgttgttgtaggtcgcgcaggtttcctcattcgagctgatcttgatcttgggagagggagatgtctagatccagtcgcctgttagctcggcactccaagatccgacctccgaaagcagcactgagacgatggctcgatggcggctttcacggggcgggtgcacggtgtggagagggaggcggggggcaagctagtggtctacactattgac

SEQ ID NO: 180311 - DNA, 534 bp, Zea Mays
cgcaggaggcccaggcgactagctttgaccgcatgccaatcccagagccgcgccgccgatgagatgcccatgcggcggccaggatcttctcttaccctgcggcgacaaattttcttctctctctcgctttgatgtcctcagcactcatggatgatggagggggcacggtcccatctttataccccgagagatgcacagtggtcgggaagggtggttacgccggtggcgcgctttcagcggaatccgtcctgacccatagcagagaaatcggtcggctgtttgaggaggacgaagctgacccctggggtcccacacggcagcgacggcggacacaatgtagccgcggcttgtacgcggagtcaatccgactgacaagctgggtccacgcgtcacagacccaaagagaaagggagcaaagcgcgggcgtaatgggctggcgtggggagtttccagtgggccgcggcgcagggaaaacaagtactgggccacgggtgtggattcggcccaagctagttttagcgttttccttttcta

SEQ ID NO: 180312 - DNA, 1372 bp, Zea Mays
caagcaaccttctgcggatcagtgcaactttctcttccgcctctttgacaaaggcaggtccttctagtgcttttcccccacgttggaccacatgagaggggtctggcattttcgtccatactgagcttcgaatggcgacatcttgatgctggcctggtagctattgttgtatgagaactctgcgtagggtagactggattcccaacttctatcaaaagctaacacacatgctcttaacagatcttcaaggactttgttgactctctctgtctgcccatctgtctgagggtggtaagcggtactgaaatctagcttggtgcccatggctttctgaaggcttgtccagaatttggatgtgaactgggttcctctgtctgacactatcttccttgggatgccgtggagtctcactatctccttgaggtaaatccgggcaagggtggctcctccaaaggtagttttcactggaatgaaatgggctaccttggtgaggcggtctattattacccagatggagtcattccctttctgtgtccggggcagtccggttacgaagtccatgcctatttcttcccacttccattcaggtatcgggaggggttgtaataggccagcaggtttttggtgctcggccttcgtccgttgacagatgtcacatcgggccacatactgagctatttctttcttcatccccttccaccagtatctggtcttgaggtccaggtacatcttggtagatccggggtggatggagtaggctgagtcgtgagcttccttgagcaggacttctcgggcctccccttttggtacacacagacggtgtttgaaccaaaggactccttggtcatctgtcctgaggtccgggagttgttccttacgggctttctccacaagccttgctgtctctgagtctagacattgagctttgctgatgaggtcttctagcattggcttgacttcgagactgtcgttgtttcctagacatgcatttagttgtgctgattcttccttccagtcttctagaaagttggtcccttttattccaaatggctttcgactgagggcgccggctaccacgttggccttcccggggtgatagtgaatttctaggtcataatccttgatcagctctaaccatcttcgctgacggaggttgacatcaggttgagtaaatatatacctcagactcttgtgatcggtgaaaatgtggcatttgtttccgattaggtaatgtctccatatctttaaggcatgcactatggctgccaattccaaatcatgggtggggtaattctgctcgtgcggcttgagtaggcgtgatgcgtaagcaatgactttctcgttttgcattagcacacaccctaagccttgc

SEQ ID NO: 180313 - DNA, 1267 bp, Zea Mays
tcaggttacctcttgcccggcggagtcaagcagcgaaagcccaccatctggaacctccaaacagacgactgggatatcatcttcaggaggctctgatagcatgtcttcgacgacctcctccagtacttgatcaaaatctgatattgaaagcccctgaagactgacaagtgccgactgagctagagaaggaatatcgctaccccctcactgcctctatagtgccggctgttcttgtggatcagtgggacttcctcttcttcctcctcttcgtcctcgtcaaacatgcagccagcaacctatgcacgatctcaacccttggcaccaacctcaggaatggcctttgccgggacatcatcgggagccggtacagaagggcctacatcctgatccaagcacgacagtcgccgaagtcgcctcttcttccttttctcctcgagaggtgcagttgggcggctcactcggcgtggacgctttgggcgggcaccttcgggtttctgagtttccacctcttcaccaaattcttacccagttgtaatggccatcggctcggtgtgggtagagtcggatgattccccagccagcaagctaagcacaacatctatctccgtgtcatcagtgctagccggcatctcaaagtgagtctgcctctcatcctcaggaagactccgaagtggagcaatcaaagcctcaatgttctcagaagagggtcgcactctaagacccaggctatcgtcacaagcaggaaggttggatacaaactcagagaatggcctaagtggtggcaggttccatgcagaataggccacaggagcaccagcatttgaaaccctgcccctcaggatcatgtccagttgactcagcagatcttcagtgggaattcttccgtttgtgattcgggtagaatcgttgacactgctatacaagtaagctgggtaggttctgtcctttaagggttgaatgttcttgaatacgaagtcagcaactacagcatcagcagttagacccccatccttcagcgagcagatctcggcaagcagcactttggcttctattatctccgaaggggttggagattctatccagctaggtgtgcaaacatctgactgcctccctgaccgaggagggagagatttgcagtggttctccataatgaaccactcaaggcgccaccccttgatgctgtccttaagaggaatgtcaagatactctgctttcctccctcggcgaagctccagacttgcgctgccaacaagctggtgctgtcccc

SEQ ID NO: 180314 - DNA, 304 bp, Zea Mays
tgtaaaatactgcaactgtcttgggcagttggggacccgcaactgatcggaataacacaactcttttgcatgttagcaaccaaccccgaagcttcaccaaaacaatccaagataagcttgacacaccttaaatcctcctcctgcggcttgacaaggactacatcgtccgcatatatagatagcctggccttaacaattctgtcatctaagccttgcaatagcctgtatccttggcgtgcttgaacaagctgctaagcacatccatgactagaatgaagagcatgggagccaaagggtctccttg

SEQ ID NO: 180315 - DNA, 417 bp, Zea Mays
gtagcgtcaacgctgacttgattaaccctggcaatagagtatcccttgccagatcctagagtctgttgcttattctgagctggggtggtagcaatcctctgtgggcaaacatttgcataatgtctagtcttcccacacttgaagcaagtagtgtctgcgctctgtcctgaaaacttcgtcggggtgctagtgggggtagcctgacgagtcggtggagtcctctaaggtgattgctgaactgggcgctggcctccgccagtgcgaactggtgtaccctggggtgaactgtagcaaggacgaacactgttgtttccctgtccttgagatatagccttcctcttcaaatctcctagctgaatacgcttgtgttcaatagctagggccttgttaagcagcctctaaaatgatggaaatgta

SEQ ID NO: 180316 - DNA, 934 bp, Zea Mays
tctaccaatcgttcaaccaatatcccactaaaaaatcagcacaactacccatcattcgttttatgtcatttgcttcacagtgctcatccttttctacagcaaacgcggatatcaaaccaaaatagttgagaggtggttgctgttgaggtagggataaatcaacgaacggatttctacctagatcatgagggtaagaaatcaagaagaggaaatcaccactaggaaatgctagggccaaacgagcagacgaccatgagggaagtgttgtgcgggatgctttttcgcgtggctagaacaacagtacgctttcaagaagatcaaagacttccagagtcagttctaccacgacccccaggccccaacagcatgtgttcgtcaccgtcgtccccagaccctaaaatacaagctgccgcgctcgctcctaccatccatctagcccacgttcgtcgccgtctaaggagcgaaaacagagaaaataaatcctagcaagaccaaaaaggtgcggaagaggttggatttacctgacaaaatcaccggcgaagtggtggcggcgaccagcggaggaggggtggcgacgcgtccgtgacgagaggaggcgagaggaagtgacgagtcgggggtagtcacccgacgtccgaaggccggacgagtttccacgtggaagttgggctcggactgggtcatcatcccgcgcgaagccggtttccaaacaagacagagcggtggtccgtggaagcttcccacgtgggccaaaaacaccaggaaaatagcaaatttcccgcgaggatttgggctcccaaactaggcctcagacacttagttcatgtgccgtcaatatttccccaagtaagtagccacctccaaacataaggcggttacgcaagatacaaaaggccttctcttcacataaatggggcaaaccatacattgagct

SEQ ID NO: 180317 - DNA, 626 bp, Zea Mays
gggggattcagtggatgattgatcaaggtctttgtaacaaagttatagctggtacattggacacaactttgataccgacaggttaatgggttgtcacatgaaaattagagaaagaggccctgcaagttgctcggtcagatgaactgaagaacatagccatggtacagtagctggaaagatctccagtgccgtgaacctgacgccggtgatcttctgccgcaattcgtgctcgcctgggagattcatgctgtgtgagaagtagataacgtcaggaaggggtgaaaagatcctgggagaggtggagccagtcactggccggttcggccatcgtgtcccaccgtagttagtcatgttggcatcaccggagctcactgtttccccgaccgtgacactcagcgatctatccttcgggtcataaagatcgtggcaagcaaccagttatcatccctgaaccatttccctctcacgcgccacggtgagcaagccaccgtaaaaatatcctagccgcggtaacctcgatcccaatccaaaattcgtgataagctcagccggagtctataaattggaggcacccctattccgcctacttgttacgcgcccagcacaccacttctcgcctcccatca

SEQ ID NO: 180318 - DNA, 492 bp, Zea Mays
atggctggagggcagcatcagcttgttggaggtgctagcttggaacttcgccgaggcaggatggctgagtatctcgacattcctttgaaagacagtattaagggatggcgcttcaagtggtttactatggaaaatcataacaagtcacttctgctcgatcagggagacatcccgacgtctgaacgcctagctggacagaggtccccacagattcagatcttgctaagttcaggatgctacttgcagggatatgtgtattgaaggacagaggcatgactgctgaagctgttgttgtcgactttgttatcaagaatactcagccttttaaaggtagagtctaccctgcttacctgtgcactggtgttaatgaccccactgaattaccaataagcggatatctaaggaggacatgttgagtcaagttgattcgatgctaagaggcatggtttcgaatgatggtgctcccctttcatattttgtctggaatcttcc

SEQ ID NO: 180319 - DNA, 537 bp, Zea Mays
cgtgcaagggtggctcctccaaaagtagttttcactgggatgaagtgggctaccttggtaagacggtctattattacccagatagagtcgttccctttttgcgtccggggtagtccggttacaaaatccatgcctatctcctcccacttccattcgggcactggaaggggttgcaataggcctgcaggcttctagtgcttggctttcgttcgttggcaagtgtcacaccgggccacatattgtgctatctctttcttcatccatctccaccagtatctggttttgaggtctaggtatatcttggtggttcctgggtggatggagtaggctaagttgtgagcttcatcgagcaggacttctcgtgcctccccttttggtacacatagacggttcttgaaccaaaggactccttgttcatctgtcctgaagtccggaagttgttctttgcgagctttttccataagtcttgttgtctctgattccagacgttgagctttgcatatgaggtcttgtagcattggtttgacttctaggctg

SEQ ID NO: 180320 - DNA, 425 bp, Zea Mays
cgatcctacgtgaaggggagctaataccgaaacaaaggagatccatttcacctgggttggtggcgacagtaacattgtccacatcgaagggcggcacagtggtggtgacggagcttcggggagtacttagccattagtgggacctccccgggagatgaatccgatgcacacacgttccgcacacagagccacagaggcaatctcccccgactagatctagtggccaaaacaccggtgaatcgagcctacggcgtcggcagccaccacttttctccttccatctttcttgctgggcattgaggttcgcctagagggataaagggagggggagggctctgtagatcaccgatatatatatacacatattcacgagcacatattcacgaggtcgaatcttctccgaatcacacctagcgaatctcaac

SEQ ID NO: 180321 - DNA, 443 bp, Zea Mays
aagacattatgaagatcgtaagtgaagatcaacaagtatcaagcaaagtccaacacatgaagaaagtgtagccacctacggagtgcccggctaggagcaaagtccaactcatgtttgttaatgaccccaagtgttagataccgcagctagtcacctgacttctctagccacttagtcaagacccaacatttgtcttttcactgctcatggtccattagcatgagctcgcatgcccttcacatttaccgttgaccactgctttcggactacacacctagcaccacaagccaagagacatggtgtacacatactcgcacaccgattagttgagacaactcaacccaacacactactctttggacaattgctcatgacaaaccgcaaccacaagggcatatatcaaccttgtgttcgcaatctctcccttgaagagtgcattgtca

SEQ ID NO: 180322 - DNA, 736 bp, Zea Mays
aggttgtggagctcgttccatgcgccaagaataagtgagggaactggtgggatttttggttttatatgacgttggaggacaccgaggggttcccaggctgcctccatctatcctatgctcgcactgctacattgcgttcccgcagtttaaattgaagaagggggataaaaacgaagatgccctttggcgcgcggccaggacgagcagcgatcacggcttggtggaagagttctttgcatgaggagtgtggccccttgcgcatggctgtgatgtgggtgcggtaaagctacgcccgatgccctttttgaataatcggctggtgccgagtcccgccttcgctattgagttgcgggggtgagatgcagctgcctttattagagaagtagaggcggaggcgatgaggattgttgggaagtattcggcaaggacaaagatgacgagaagctaggacattcgaggttcaaatgtaaggttgaaccgtgttttgagttgaatggccttcgctatggcccgtatcctgaagagggctctgctgaggctagggatgaatgaggaaagataagagtggtgacacgggtagacaaaggttgcttgaaggggaaggttgtggttacggcagcgaggaagaagaaaaaggttgaagttaaggtgaaaggtacgacgaaggcatccggggctgcaagggccttggagggttttgttcatgaattaacggagacgtgcgctaatcctgggg

SEQ ID NO: 180323 - DNA, 835 bp, Zea Mays
gtccgtcgagctctggaccagggagcttcaccgggttgcgccgcagtagttcaaaacctcgtcgcgagtgaacgaagtggggggatccggcgatttctcaccggacttgctggccgcacgccgtcgtggccacgggtgtcctcgctgcgatttccggtatgacgccttctctgaagctcgctatagtccctaatacatctagagtaggcatgttcttagaatagggcatctgtatgccagggcgtcgctcgccggcgaggtcttgccacggagcgtcgggctctgccgcggcgtgccgccggagtgggtgagggcgagtgcgtgccttttgatactgaaaccaacagttgagattagagatgggagtaccccttcgcaagacggatctagcccattggatcgtaatctggtggatgtcgtgcgacccgcactatttaaaactgggccattggatctaaattcgaaggtctatgtggcgtgaccgttggatgatatctatgcggtcgagattagtttgctagaatcctttcgttcaataagatctgaactgtaggatgactcgggtacggtggagattaggccttggtttgtttaaatcctgtgcattgattctggatcgggcggttctggttgtgtaccagttcggtgatggctgaatgtaatttaggttgtccgtgtgaaatgcattggtcgggatctctgcgtaccccttcggctgtgtgaacagtgctaaagagcacctgcatttttccttattcaacccgccatcctcagcctatgtaaagtaattacaaccaagcctagaactttgcaccttagcccctataatgtctgg

SEQ ID NO: 180324 - DNA, 523 bp, Zea Mays
cagagtatggccgcttgtagagaactgggaaatgccgaaggagactgtcaccgagtctagcgaaggtgacctggttcgactgaaatacaccttcagatatggagataaatttgatgaaccaaatgatgactggctgaagtgtatcgaagctacaagtgatgaactgcttgggccatattccaaagcagaagataatgcattatccacatccttcgggggccggggaaaaaagagattgaacagagtttttgatgccattggttttgtttaccccgattactgctacccgttgcggggacggggaaagaagaggaaaactgctgcttcggccaagactgctgcttcggccactccagatgagcctgcgccgaaaagcaaaaagttgaatgtccttacccaccggccatgctatattgaaccggccgtggtgcctgagtttggcggggagacttcttcagctgctgaagcaaaggagcccattcctcctacgcagaaggctgaagatccggctataatgccaaag

SEQ ID NO: 180325 - DNA, 760 bp, Zea Mays
gatgaactcccgaaggccgcacttccaagacccaaaatgtgtgggctctctacctcttcttcatacaaaatttccttgcccttcgaagatttgccaccttcatcggaattctttgaagttggcataaactgagtcaatgtcggtcccaagggacttcaagggggaaatcgtaatggtcgagtcattgcctcgagaatcatgatgcaaccaaatgacaaagtggtggcagtgctacccttttcttgctcatgggaaaccgtagctttctttggagccggagttttcttcagacctgtacctttcgatataggaattttgacctctatcgggcccgaaggtggctcttcgtcaattttggatgcttcgtcctcctctgcttcgacatcggtagtcttctttgactctttgtcagcacccttaggagatcttttcctttttttctccagccccgacgttggccgatggatcttcataatctggttattcaaaccctagagcattcataactctattaagccaaagtttccctcgactctcaaagacatatttcatatcttcgtgttctctaatggggtaattttcgcacatttcgttacacttctcctcaataaacctcagccacccagtcgaaggagctttatatggagattgctctttgaagtcaaaagtcaatgttacaagttcttcatatttcgatttcacctccttcggaagtttccacccagtacgagtcggatagatattataagtaagtgcctct

SEQ ID NO: 180326 - DNA, 414 bp, Zea Mays
cagaagaacaagtccggttgataagggagaactcgagaactgcgcaatcaaggcagaaaagttatgcagatacccgaaggaggcagttagagtttaaggagggtgatcacgtgtatctgaaggtgtcaccgatccggggtatgaggaggtttaaagtgaaagggaagttgtccccttgcttcattggaccctttaagatcctaaagcgagtgggggaagttgcctaccaagtggaattacccgaccatctagcggatgtacattatgtcttccatgtgtatgagttgaagaaatgcctcagggtaccagaagagcaactgcctatggaggatcttagtgttcaagatgatctgacttatactgagtaccctatcaagatcattgacactttgactcgtgttacgaggaataaag

SEQ ID NO: 180327 - DNA, 570 bp, Zea Mays
cgccatttctttgtgcgggtgaagtcggggaaggcgaaggaccacctcggtgcctaatacttccagacaaggccggattcggccgacgcctatatcccctcccttggcggcgcaaggtgggagaactggcacgacgactgggtgattgctagcgcggaggccaacgatcgcctcgccctgtcgagcgacggtccaagacttgaccgaaagcagtggagagccaagccatccctggcgccagagttccagttcgtactggacaggatcaagagcttggcagcgggtggcctgacgtcgatgcacgtggtcggagacttcctgaagcgctggatcacgccgctgcagcagagggcgcatttatgttgctggttcaccgactcaaacgacatcggccagatccagcgcgggccgggggctgacctgtcctgggaggaactggaggttctggtgaaggggattactggtgagtccttcgtccctgagtctctaatcctccccgagggcatccctgcactttgcgatgacgcagggttgaggacggtgattttggccacgctgctgactctcgac

SEQ ID NO: 180328 - DNA, 385 bp, Zea Mays
caaacttcggatgagtacaaccttccatccacaaatagatggccaatcagaagttgttaataaaaccatcgcaatgtacctccggtgcatcacaggagaccgtccacgggcatgggttgagtggctaccatgggcagaatactgctacaacacaacttatcactcagcattgcacactaccccatttcgagtagtttatggcagggatcctcctctagtgcttacctaccagccgggcacaacagcaaaccagacagttgatgaaatgcttagtgaacgtggtctattccttagtgaagttcgagataggctgctgcaagcacaagaacatgctcagcgattctatgatgcacatcatcgagacttggagttctcagtggacgac

SEQ ID NO: 180329 - DNA, 379 bp, Zea Mays
aaaacttttccaaaatctgaaggtaaactgtgatcctctatccgaaacgatcttcttcggtacaccgtgtaaacacacaatctgaaccatatacaactctgccagctgagaacctttataagtagtcttgaccggaatgaaatgagccactttggtcagtctatccacaataacccacatagaaccatatcctttctgggtgcgaggcaatccagtaataaaatccataccaatctcttcccacttccactcaggtatcttcagtgggtgcaatagtccagctggcctctggtgttcagccttaactctttgacacacattgcacatagacacatgtgcagccacatctctcttcaatccataccaccaatacttccgc

SEQ ID NO: 180330 - DNA, 544 bp, Zea Mays
cctcgggcgggtgcactacccagcgattcgcggtgctctgcgcatagtgtagcaattgttagatggcaaaataatgccttccatcgctggtatgcatggctccggtgagctgttgccacagtggcgctatcctttgttgtgcgggtacctagggtagaagaaagggtaggggaaagatgcctggccgttcgatggtagacatgtgcatgtgattgggtcgcgcagtattgtgcttggggccgttagatctggatcgtggggtctaagccacgcgtagactgatgctaacttagggggattgcgggtcgtcgatcacggatcctgtggcccgtattgaatacatttcacatacgatcagatctaatctgtgccctcggttgtggatccaatggtccaacgccacccgtaccccttcggccagtccattttgcataagagaccctggaccttttggaaatagaacccaccgtccaccttgggattactctgagtctggggaataagtgtggtttagcccctaggtttatctggatttgtggcccag

SEQ ID NO: 180331 - DNA, 696 bp, Zea Mays
gatagggaactagaatgtatccttggtgctgacaattacaacattttgtttttgttgtcaggacataacagtcgtcctaaacgattgctgaagtaaatgtggcgtgctggttttgaagttttttcccaacttatgccaatcgcttggctggtaaggcatagtggtcgccctaggatgagtagatgtgagcatgtcgcaccgtcttaggtcattgccgacttaagccgattcgctccgttagtaggatatagtggtcaccctaagttgagtaagcacgagcatgttgatacagggtgagcaggtaggcagtgaggtacacgactgaggggtcgtcctcaagtagctgctgaccttccaatgcacgcatcctggccatccaaacgggacggtctctctgaaagggtggaaagaatctgagcggtgtgtcggccacttcttcttcatacagttgacacaaggtcctcaatgccttgcgagcgacgacttggcaggtgtctttgaatctgtgcccagcagcagtgacactccattccacatggtgcagactggatccaatgtatacagtcacgacacacttctctgtgccatgctcgacgaattcacgaccatcatactctggctggctcctgatttcgaggcgaactgtgcatgctctcagcaacttggggaaaccatcttcattctggcaaaagctgg

SEQ ID NO: 180332 - DNA, 673 bp, Zea Mays
cgcgaggatgaaaagatctgagggggtttgcattgagccagccccaccatacctacttacccagcggcgtggtcgtgcggccgttgccatactggccgtcatttatcccgatcatgccacaccctatgttgtctcaccatgtcgcagtaggtcatggtggatagccagttactgtccgagactttactccattgaacgccacggttgatgaactctagtgactcatctcttcaccgtcgtgagctcatctccatccaaaaatcgtagcaccagtggctggtctctttaaattgagcactccactcgctctgcttctctgttacacgcccattccaccctccgcaagcctctctcgtgcaccgtagcccccagtcaccggatttcccctctggtcaccgtcccctccatgagacatcttgtcgtggccaacctgtctcaggttatttcatggccccctgatccatgttttagcattccttattgctagtgaagctctcggtcttggttaattgaacgctaccgcgccgtagctttgagaatgccacgttgtcgcctgggaacgccggcatggacactactcgtgtcatcctagtaggtcactgatttgttccgagtcattagatttaatgcaaccgacttgtgtaaaccagaatgagttcgccagagatcttgc

SEQ ID NO: 180333 - DNA, 518 bp, Zea Mays
ctgaggagcaagtctagcaaataagggagaatttgagaactgcacagtcaagacagaaaagctatgccgatacccgaagaaaactgctagagtttaaggagggtgattatgtctatttgaaagtgtcaccactcaggggtatgagaagatttaaagtcaaaggaaatttgtcccctcgctttattggacccttcttaatcttaaagcgagtgggagaggtggcatatcaattggagttaccggatcatcttgcggatgttcatgatgtttttcatgtatctcagcttaagaaatgtctcagggtacctaaagagcagttacctctcagggtacctaaagagcagttaccaatggaggaccttagtgttcaagatgatctgacttatgttgagtaccccatcaagattctagatacactgactcgtgtcacgaggaataaagttataaagatgtgcaaagtgcaatggagtcaccacggagaagatgaagctacttgggaaagagaagaagagcttcgc

SEQ ID NO: 180334 - DNA, 276 bp, Zea Mays
gttatcttagaattggatgctgtactgttttctttacaaacaaattacatgacaatgaatatgaaacattaacatatttcatatagcaataatgaaaattaattaatgttgggcctagctttttgtggtttgtacattctaaatgagatagttcttttatgatcagtctgacacatattaacctttactttaaagctttgacttactttgcatgcaagtttttaaagctagcaaaaactgtacgacttactgtcatggttagttgcacaaatagga

SEQ ID NO: 180335 - DNA, 1051 bp, Zea Mays
aaatgaggctagtgctcaagtgaataagatgcatttattttcaaactgttaagtaaaactgtttcttgtagcacggtagtacctttacattcccagttgtcacacaagacatcaaagcctgcaccattctttcaagccacacaggatctccataaaaaactgaatcactgttactaaaatcttaaaattgtgagttagagtaaccagtaataagaatagtcatagtcactgatccatacagaatgttctgctaccttgggtcatttattgtgccggcgtggtaattgaatctgataaatcttgaaagataaccaagagctctaacagcgtttgattttacctgaatgaaaatcaaacaacttttttcaccacacatacaagcaggtttgcttagtttacttgtttcacaatgaacatcgttctccaactatctctgtatctgtattccttgtggataaaaccaacagtctgctatggatgacggcgaacaaacaaaaacaagataaataaaggcaacatatctagtgtaaaataatgatgctaacatcaaatcttatctatcggatccaccgttgagtgcaatcccacctgaggacagtatccttttctgcgaaaatgtagggggggggtctttagaaaatagtctgaaaggaggtaggattgcactcacccgattctgttagcatgttaacacactaatcctttttacactatatatgttgccatacataaattggctaaagcaagcttactttttcactatctttggccagacgcaaagcaacttcaaccaaaagagatatgcttgatttgctcaatacacctacacctgacaaaaagataataaatacataagcatgctctattggaatatacactggcactgtaaccatcaacatgaaatatgtacctgcatagggatctgtatgcacttccagtgctctaaaacgaatacaagaacagagatttgccaaagcccatgcagcggtgacacgaacctaatattaacatttacaggtaagtactacctccgttcttaaatatatgatgc

SEQ ID NO: 180336 - DNA, 363 bp, Zea Mays
tttcattgttggactaccccgcactcctgcagggtatgactctatttgggtgattgtggacagactgacgaaagtggctcacttcatacctatgagaactaactacacgagagccaagctagcagaattgtatatgactcggatagtttgtctatatggggtgcctaagaagatcgtgttagaccgaggatcacagtttacttctcggttttggaagaagttgcatgagtgcttggatacacagttgaattttagttcggcctaccatcctcagaccgatgggcagaccgagaggaccaaccaagtactggaggatatgctaagagcttgcgctcttaaacatggtggtagttgggataagag

SEQ ID NO: 180337 - DNA, 385 bp, Zea Mays
ggccttatttagggcgtgagaaatagaagtcctaattcacctcctcttaggcgtccatgtccctttcttgtgctaacttgacttaaatcaaagactatagccttttctatgttgctacacacatccctttcatagcacaaggaagtagagagttgcattcatgcatggctagatgatcctaccaaacaaaagtctaactactaagctagcattgagccagatcctctttgggtccatcttctgttgatgaagtcctaggggtcatttttgctaagattcaatggtatgcttctccatgggtagtgacatgactatttttatgacatcaccatgagctctatattcgacaaaataattattttgtggagctcaaggatgttccatc

SEQ ID NO: 180338 - DNA, 666 bp, Zea Mays
tggttattgaaaaagtaatgtctcttttgtaaaagattcacagcggcagggtatcttctaacctgatccgtccaatcgcccaccactgacacatattagaacttaggtctccccccaaacggtacactctcctaaccaatgatgcgaagatccatggctaacaactccctttcccctactccgtacgatcgtcggttgacggtcctgcttcacccggccaaagcggtaccctattgatctaatccaggtcgcgcgctatcgaatggatggtccagattttatcacgcggtcgttacaatccgaacacccgtaggccgtaagatcctgatccaacggcgcatgagccatcttcctcatggctggcttgatggcggcaagtttgtgccccgcggtggcggccatggccgacgtaggctgacctggtacccaagcgctcaaattcccatcctacagactctacacgatgcggggatgaatatgacttaatggggataggtattacctatgacgttgatgtagagatcaccgcccatggtgtgccatggcttggcgacgaagctccacatcgacgtgaggttcccagccaccaactcgcacggtgagtccacgaaaacctccgtgaggactcattgaagctttctgactaatatctaagggcttgtcgcc

SEQ ID NO: 180339 - DNA, 594 bp, Zea Mays
gacagcatgaccttatcatcggtgatagtggctgaagagaggaaatgatggcgacgcttagtggagggagggagaatgggtatgggagcgggtgatccatcgaattgaaagtgagcatgagtgtgtgcagcaagtgagtgcacacgggaggcaactggatgcaacatggacacgaggaaacaatggcgtggcacggacatgaatggcgacatgcgcgagaaggatgaaggttcttgacaagtggcctccacttgtcaacgagagctcgacgtgcacacgttgtgttggtccggtagggagtgggctgggaacataggttactagtctaggagggcgaatttgggttttcctttagtgggagatagatatccccttggtcctcacgaacatagaaacacatcatgggccgcctgatgggcctcctgatggcttgcctagtgagacaggccatctggccacaaccaggccggacgagctcgatccagtaagacgaagaccgaacgtccgagttatacgcagatcgaaatgatggtatctcatgtcaaggggttgcgcacacctgaagggttaacgcgacggaggaagcgatcgaat

SEQ ID NO: 180340 - DNA, 834 bp, Zea Mays
tttcgatgtagagagcgggaatgatgaagttgaagatcgaccgcggaggcctagccatgttgtttttggaaagtcatctattaagcaagggcagatcgaagtgatgaaaggcagatactttcgtgatatttctattgtgagggccggaggggagaatatcgttcctcttctcgaagctaatgaggtggtagtttctagaagcttcatgaaagttggactttgtttcccactgcataagatgttggtcgaagttctaaagactttagaaatataccttcatcaacttttccccgaggcacttatcaaagtagcagtttttatatgggccatgaggagccaagggttagagccagacgccaggtgcttttgtaatattcatgaattatcctatcagacgaaagcaactgggaaagaacagtaccacaacaactttggctgttacagcttcgtgccccgctttggggccagttatcctctgcctaatttttggaagaagtggccaggctcttggatgcaagagtggttttatgtgaagaatgatttggaccagagggaggatatacgagccatcattcaacgtcctatatggtcacgctttggcatcagaagaccttccaccgcactcggaaatgacgtgctagcgtgccagacagctttcaatattatatgcacctatatcggcacgagggatttgattcaagaacatattgctttcagagtatggccccttccaagtggatgggaaatgtcaaaggaagctgccactggctccagccaaagtggcctgatttatcggaagtacacattccggtttagggatcggtttgatgagtc

SEQ ID NO: 180341 - DNA, 426 bp, Zea Mays
ggccgtttcgatagaagtattgttttgcattgaattctaatatatagcattacgtgttggtaatgaccagttagatagcagttctttttttttgaagatgtagatagcagttctttgaggctagaaaagaagctaacaagatttcttgctttatcggtttgcagtgagaaaagtaataagcatgttaaacatgtgcaagtttcatcattgattcttagaaatctgcttgtatcatccaatggataaagagagaataaactttttggttcgatgttgacctcagcttcatagtttgcttttttcctgatgaagattgcattttgtcatgtttttctcgtcgttgctgcaagctctgcaggcatgcatcttccatgacgttcgcccaagttattcttagtctgtctttcccccaatgtttgttcttgc

SEQ ID NO: 180342 - DNA, 313 bp, Zea Mays
ctcattttccactgttccctaatatgcagagtaaactgtcgggagccatttgagctaatttttagtcaaccatctgttcgagttagctttttcttcaacatgtcaaggcatgttgcttgcatagtattgagaactgaaaattgatacaatgacaccgcaaatatagtacaatatattgtgttttatgctatcactgtttcaattatgtcaacgcatggagttgtatttgatacttcttgttgtatgaatttccacgcccacaacattgctatgattcatccttgagaaaattaaatatcttttctgcagtggg

SEQ ID NO: 180343 - DNA, 528 bp, Zea Mays
gccgagaccttcgaagaaattttaagtgatcgcggggatgtttgcacgttttccggtgcgtggggaatttcagccatcttggagaaggtgggatgtgatcatatcaagaccatggcccaggccgaagctgccttctccgtagacgatacgaaggatccttcagctgaaacaacctcgaagggcggaagattttacaatgatgactgggtgaatggtgaccacgagatggctcacgaaattataaagaaaagtgaaaaggatacccatgaagcccgagcagaagcaaggcaagctgaagacgttgcagagcgaaaaaacatataggtattgctttctggcttttagcttccgcatttgtttttgtggcttcggactgattaacttttcctacttcagctgaattacctccgccgccggaaccgttcaaccccctggtggatccagaaatgaaggaagcgctagacattataaacatggctgaatccattgttgatgaagttgttaacaaattactgcacgaagttgcag

SEQ ID NO: 180344 - DNA, 305 bp, Zea Mays
ggagcatgggttaacttatctttcaaagtgttgaacgcctcttcttgtgggggccccaagcaaaagacacctttctttgtgagtttgtgcaaaggggcagcaatctgtaggccagctctgaatggcttcaaccttgctgctatccacctcaatgacctgcggagtaaccacataaccaagaaacgagacacgttgcgtgcaaaaggtgcatttgtccatgttaccaaacaagcgagcaacacacaaagcattaaaaacaacacgcaaatgttctaaatgatcttccatagacttgctgtaaataa

SEQ ID NO: 180345 - DNA, 609 bp, Zea Mays
gcgaaaaacattgtcagtagagatgtttcgatgcagtgacatcctgcgaaacactgagtgtactacgaattctatgtgcttgtgatggttgtgtttgaatattttgtggatagggcactagaatgtgtccttggtgttgacaagtataaaatctattttcctggagtactgattgtttttgttgttagggtataacaatcatcctgaacaattgtgaaagtaaatgtggcgtgctggttttggaactttttctgacttaggccaatcgcttggctggtaaggcatagtggtcgccttaagataggtagatgtgatcgtatcgtgctgacttaagtcattgctgacttgagtcgattaccccgttagtagggtatagtggttcccctaagccgagtcagtgtgagcatgtagcgccgtcttaggtcgtcgccgacctaagttgattgctccgttattagggtatagtggtcaccctaagtcaagtaagcgcgagcatggttgcaccgtcttaagtcgtcgcccaatttatccgattgctctgttagtagggtatagtgggtccccctaagtcgagtaagcgcgagcatgttgcaccgtcttaagtcgtcg

SEQ ID NO: 180346 - DNA, 978 bp, Zea Mays
caacaactataatgagctggtcaatttggtcatctcacaagaagactatgtcatggctcacagagtagagaagaagaggaaagcacttgtggcaggaccctctacacagcctcagcgtttcaggatattgtccaacatccagagaaggggaccacaacagcaacaaggaagatgggtgcttacaccaccacagtagcaagcacatagtcgtcctcaagctctagctcagaggaatgctaacaaccagcccccacaacagcagcagtaccgccagggaaatggcaacaagtgtttcacttgtgacaaaataggccactacgccaaggattgtcctcgaaaccagccaaagccagctcaaaatgtaaatcagaaccagggaaggaagcagaaagtgcaagggagaggcagggcagattgaacttcaccacattagctgaacttcccgagggagcgcccatcatgactggtacctttactgtttttaatcatcctaattttgttttatttggttctggcgcatcacataacttcatcagtccaaagtttagagtcaagtgctaactacctttttcccacacaaaaggggcaatcatgatcgcaacgccagggggcaaaattgcatctaaccaaattgttcggcacacacctataatgctgggaaccaaaatattcaaaaccgatctcataattctagggctagaaaatgtggacatcatcttgggaactgcttggatgacacaacaccaggttctgctagatgtcgtagcccgagcacttgaaatacactcccccacctgcggagaacttgtcttataccttcctagccatggtgacacccattcttatgccttttccatgattgaatcacccttggaaaggaatcccgtggctagtgagtatctcgacatctttcctgatgaattgcccataatgcctcccgacagagacatagaatttgccatagagttgcagccagga

SEQ ID NO: 180347 - DNA, 492 bp, Zea Mays
ctgggttctcggctagatggataagggagcgggagcggctgggttatataggggcggggcgattcaatcggccgagaatctcggcaatttagttgaggagcccccggattccggtgatcacgcacgatcgttatgagctcaccgagcagagcgtgcacggaaagggggaatcaacaggattccgtgcaggtcgttggggaggaagacgacgctgtccacgcgggtccacccgtcatcgccacagcacgaagtagcccacgcgcaacagaaccatgtgcggctgccacctcgggcccgcgtgtcggcgcacaggtgacaagctgggccgtgcgcgcggagaaaaccagaagatgggccacaggggaaaagaaatcggcccaatgaggttcaggtgagcctttttctttttctttttatttacttatttttcctgatttctattttaaaattcaaatcaaacaaggttgaattccaaactttttacttttagat

SEQ ID NO: 180348 - DNA, 811 bp, Zea Mays
gaccacccacatcgtgggcaatctagaggagaaataggaactcgcgctcgtcgccttcctccaggcaaatgccgacgtgttcgcatgggaaccgtcgcagatgcctgggatccccagggaggtgattgagcaccatatgaagatccaccctgacgccaaaccaatgagttagaagcctcggagacagtccgttgagtagcaggacttcatccgtgaggaggtccggaagctgctacacgctggcttcatcgaagaggttcatcacccagtgtggctggccaacctagtcatcgttccaaaggcaaacgggaagcttcggatgtacatcgactacaccagccttaataaggcttgtcccaaggacccgtatccacttccacgcatagatcaaatcatggattctacctccgggtgcgacctcttgtccttcttagatgcttactctggtttccatcagatccagatgtctagggaagataggaagcataccgcttttgtaacagtggatgggctttactgttatgttgtaatgccttacggtctgaaaaacgccttgccgacatttgtacgggcgatgagtaagacctttggggacctgattagggacatgatagagatatacgtcgatgacatcatggtcaagactaagagagggtcgactctagtggaagacttgaccctggtctttcacaagctgcgggcaacgcgcacgaagctgaacccagagaagtgcgtctttggtgtctccgcagggaagttgctgggattcctggtttcacaccggggctttgaagcaaacccggagaagatc

SEQ ID NO: 180349 - DNA, 394 bp, Zea Mays
gcgcgggggacagaagccgaccatgcacggtgcgggcgcagagggcagccagtgctcggccgagcgcttgagcacgcgatcgaacacgtggaagtgtgattcttcccgagttcaaaagcccgttggccgaccaaaacgtgcatatcttaccaaggatcctgtgtagtgtctcttcaccgtgccaaggtcttcctgtcgtgtgtgagtcccgagtgaagatatggcctgggtgagaagatatggtggcctgaagatagctctgtcagcactgcccaaaccgagacaaaaccggtgtcaagtcatgtcaaacgatttgggtttgatctcaaacttctccatagtgttcctagagtattttggcgccactttgatatttggactttatggatttgag

SEQ ID NO: 180350 - DNA, 702 bp, Zea Mays
ctgctgaaacattggtggtggcgcccatccctgaggctgacaaagctttggacgctcagaggtctgtcaacgtttgccggaaacgttctcgtcgagccgatcaagcctcttttcctgctgagggggagaaaaagaagaagagacgtcttcgtcgggtgtctagcttggatcagggtgccggtccttctgtttatgttgctgaggaagtgccagtgcctgaatttactgaagctgaccccaatgggtgtgacccgtctgatgctgaccccaatgggtgtgatcctgctgaagctgaccccaatggctgtgttgtccgtgttgttgatgaggatgatgaagaagaggatgaaatccctctgattcggaagaacagtcggcgttacatagctagtggggaaagtagtggtgttccttctcctgccttgtctgccctcattagtctgcaagaattatctctggcaaactttgatcaaactcttgaagacatgtgtaatacccacttcttaagaagatcaaaaaggagaaattacattcatttatgtatgtgtgtgcatctctatctatcatcacatgtgcctgatcatgattaaaaatgaataaaactccactaagacaaaaataaaccgtggcataatcttggatttttgtttgtgcatttaaaataataatgatatgaacaaagataaaataataatgaggaga

SEQ ID NO: 180351 - DNA, 462 bp, Zea Mays
ctcagttatgagcattaccactggtttgatgagatgctaacattgtctattaagcttcaaccaatttaattttgtcaatctattgtggggcgtccgaaggacgtgtgatggtctagtgaaagcaaaacatctgtgtaccttaaacatgaaacttaatcccaacccattttcctagaagatgcaagcgcctaaagaagagaaaatatatttgttgagcgcgtcaagattgcataaacagaaaccatccctcctgcatcaaatgtgcaaggaaacatggactacagcgggaaagatcgagacgtgcgggagatgcccaaatccagactaaaaaaccaaccgactgttcgccaaggaactctagacatggagcacacaaatcagccaaagaaatccttgtaaatcccaaaaactctcatgtttcacggcgcaaaacaaatccaaacacgcagagaagcggaccag

SEQ ID NO: 180352 - DNA, 528 bp, Zea Mays
ccgggagacaagttgggcaagatctcgttcctcggccttgtggtgatgtcggatgttacgccgcctgttctgacgtgggcatgcctcacgctgcgggggctcgtccctagtatagtgggctcatcattggagacaggcgcatcctctatccttccctggatgaagaggatgtctgggaaaaaagagcttggtgtggtgcttcgtgctccaaccatctcctttgagagcggagtggtcagagcgattgccagtagtgttcccgcggctacatcagtgccgggggcaccctcttctcttcactgagtgatctgagtctatgcccgagtgggtgatctggacaaaggggtccgccgcaatagtggtgcagcctcagtcgaccgagtcataggcgccataacggccctgggcccacccaacataggcacaattttgcgcgaggccaaagcctaccgagattatcacgcgttggagttcgtcagcgtagttcttgctggagttgggcgaggtagtactgctaccgcctttggc

SEQ ID NO: 180353 - DNA, 603 bp, Zea Mays
aatccaaaggtgttagcctacgatattaacaaaaactcacgcattgaccgttttgaccaaaaatgttggtcatgtgctcattgattgatgagtgagagtctcgtattacttaccccacacatgttttcttgacataaaccacattatttgatttttgttggagaccgtgtgtcaaaatccaaaggtgttagcctacgatattaacaaaaactcacacattgaccgttttgaccaaaaatgttggtcatgtgctcattgattgatgagtgagagtctcgtattacttaccccacacatgttttcttgacataaaccacattatttggtttttgatggagaccatgtgtcaaaatccaaaggtgttagcctacgatattaacaaaaactcacgcattgaccgttttgaccaaaaatgttggtcatgtgctcattgattgatgagtgagagtctcgtattacttaccccacacacgtttcttttacatagtccgcataatctagtttttggtggtgaccatttattagtcaaaaagccttcgatattaacgaaaactcacgatttggtcgttttcgaccaaaaatgctggccatattgtaaggaaa

SEQ ID NO: 180354 - DNA, 1021 bp, Zea Mays
gaaagcgcagggaccaaaacagaaaccttcctaagactcagatccccattcactaggactgcgggttaaattctattgtactcggggtctctttagcaaaagtctcgggcgaaggggtattgcaatatctgggccgttggatcagagcccaacgatccagattagatcgggaagccctaatattcatcaagcatacagaaccgtgggatctacgatagatggctctgatttgatgaacgacgcgatcacacggaaccgtccatcgctggaactacggctgatataaaaaacgcagagggtatgagtccgatctaatattagccgctggatcaaaatccaacggactcacccctttcttcctcccctggtcctctattcggcggagcacagcgtcagtgcggcggcgccatgactagagcataggatccgcgtgattccgcccccactcgttgcaataacgggcgctacacgatgaaaatgactaggcgatcgaggctaggggtttcttaccggcgattgaagcagcggcgaggcaggccacacgacatggcggatccgcggcaggatacaactacggcgaagaatcctcagcaggtcgaagcctcgttcacccaattacttctccgagcgcgcttcgtgaacccaaccaaacatccaggacaggcaacgggtgtcgagcgatggggataattgattccgacggcagcggacccccggggtctttctctggtggcagctagaaggaggggaacgaggagatgagcacgaggggaaagggtctcggtccgcttatgaagaatcggcgacgtggagttaggggtgcggagttagcgcgcagcgcaaccgctcacgccgttttccccggcgacgaaatcggccacgttcacaatcgtggtgggtggagaagaaatcgctgacgctcgggacccattagacagcgaggggaggagagagcacggctgcgtggagcgtgtggccaggtggggcccacctgcagtggctcgagtgtgcaacgcggagg

SEQ ID NO: 180355 - DNA, 787 bp, Zea Mays
atgatattatctttggtggctcttctcatgctgttgtttccaagttttcagatcttatgagcagagatttgagatgagcatgatgggcctacacctctctctcttgggttgcaattgaagcagacccaaaacgagacctttgtgtatcaaggtaagtatacaaaggacatcctgaagaagttcaacatgggtgaggccaagcctctttcgacaaccatgtccaccacgacggcacttgacgctgataaggacgacgagcccatggaccagaaggagtataggagcatgattggctctctcctatacttgactgtgacgaggcatgatatacactttgcagtgtgtctatgcgcacgtttctaggcctccccacgtacttctcacagacaggctgtgaaacggattatgaggtacctgcgcttcagtcctgggtttggtttgtggcactcttcttccgttctttctttgtgcggttattctattgctgattttgcgggatgtcacttggagcaattctacttctgggacttctcagtttttggggactttgttggtttcctggtcttcacgcaaatagtctagcattgctcattctaccatagaggttgagtatgtcactaccgctagctgttgctcgcagttactttggatgatggctactttgagggattttggcttgcaagtttctcttgtgtctctggtttgcgatagcacgagtgccataagtgttgccaagaatcctatgctgcattcaaagaccaagcacattgatgttcactttcaaatt

SEQ ID NO: 180356 - DNA, 622 bp, Zea Mays
gatatgttactttgattgccatagatgttttctacccttgaatcaccccttcagaaggcagagaaaggagtttaggaagggcacaatcgttacaaagggaccgcccaagcgatgtagtgggatagaaattacagaagaccataggaaacttgtcctagatgagattgggaaacggtatcaaggttttggtgaggagcataactggactcatatatgtggcttgtgggagcttccttatgctaagtcattgattctgatgcacaacatcgatgtcatgcatcaagagagtaacttttgccaagccctcataaatacatgcgtgtatttctcggataaaacaaaatacaatgacaaggcatgcatggacttagccgtgatatgtgatcgtccaacccagtgcttagagaaaatggaggcaaaccaaaagctgactattgtctgaaacctaagcaacagaaagaagtgatgaagtggatgaaggatctgaaattccctgatggtcaggacttccacataattatggaaaggctcatgcatgtaatgttttgtgggtacgtttctgatgttgtgtggaaaacgttagctgaagttagctatttctatagacagttgtgtgctaaag

SEQ ID NO: 180357 - DNA, 793 bp, Zea Mays
ggaggagttcgacgctctcgtccagaagctcgaccgggtctacggcgacatcgagcggagatgcctcgaagccgagaaaccccgagcaaggaagatatgtgattagatcattgaaagcagcgacggggcgcaatatttcctcaaccccggagaaaacatggccgcaacagccatgatgctccggtccatccctgagccagatgaaccagagacgcgggcgatgtaccggaacctccgcaacttggtggagagagtcgcagtacaacaagccaagattgatcggtagcttcccaccggcacaaaaagttacggcccgcacacggcctcatcctagggtaggggggcacaaccctttcaatccatcggaacgcgcgttcccttgaaggatcgcctcgagggcatacacgacgctcggcacatcatcgacaaccatcgtcgggtgcaggaggaggttgagcagccgcgtgaagggaggcacgagcggagccccagcccacccatgtcggggccacgcgccttcggacgtgcgatccgtaaagcacatttccctgcaaaggtaagggcgctggtgaacatctccaaatatgacgggtcttcaaatcccggtgtatggttggaagactaccgcctcgcgtgccgcatggtggggatcaaggacgaccacctcatcatccagttcctccccatccaccttgcggagggagcgagggcctggctcgaacatctgccagccggcaccatccacgactggatcgacctccggaaggccttcgtcgagaacttccagggcacc

SEQ ID NO: 180358 - DNA, 444 bp, Zea Mays
ggcgtgctctgagcgcgcccccgagtgtcagcccgcaacgaacacgtgtgtgtttgcttctgccatggttcaacggccgattggagcaccttagcgtgcagatcttggcaaaacacccgtgtacggtctcttcccagtaccaaatcctacctttttgatgtgagtcccaagtaaggatacagtcggggtagggagatataggggtgagaagttgcctttgtcctagttgtccaaaccgagacaaactatgccaagtcgtgtcaaactacttagggttgggttcaaacttttccagggggttctagaggtattttggcgccactttgtcaattgggccaagtggttttgagtttgggattaaggtgaacatgtttgatctttgctaaaggtttggtttttggacttagaaaattctgattttccttttatgctcaaccctttggt

SEQ ID NO: 180359 - DNA, 460 bp, Zea Mays
attcctgagcaactctctgagacccctatcagaagtgactcatactttgtgtgcttcgaaatagtgtctcagcttgcgtgaagccatgacgaccgcgtatgctatcttttctagctctgtcatgttgcactttgagcttgtgaggactttggagacaaaatatactgggcattagtgagtcttgccatctctggtcatttcttggattaaggctgcgctgaccgtgctgggtgaagctgtgatgtatagtagtaggggtaaccctgggtctagacttgttaatgttgctaggtcggacatatattgctttagagactcgaaggcgatggcttgttctaggccccaagagaagtctttggcaccacgtaacattttgaaaaacagaaggcttcgctcggtggatcgagaaataaatctgtttagtgcagccaatctgcctgtcagtcgttggatgtctctg

SEQ ID NO: 180360 - DNA, 1430 bp, Zea Mays
atctcccgaaaccgtgacaggaaggaggaaccataagaccggttcacaacgctctggatgaacacgtctggcctcatcttcctgatgttgcagaggacagtgtccctagggcttggagcgtcgaagaacatgctctcctccatcaagatgctgaaactgaagaggtcaatcacgacaagcacctcgtcggcgtctctgtgcaagtgatcctccatggtacaagtagcatcctcccagtttttggtcactgcgtggaacttgaatgaaggcaagccaagctcatgggcacattgcatgagccgggaccctactttctcaatctgctcgcctgggtagcaaatgggcgtggggcgggctatggcagtgatctccacctccggcaggtcgccttctttactcgccagcaggcggagcaagccagcccattggaacccaaaccgcgtgccgtaatccacgatgtgcaacctgctcttgcctgccatggcctgcatgatgatcattgctgagaaaatgaacgtcacggtgatgaagcagcaagcttcagagtagaggctgtaggccttgaggagctccacaccggaggggtactccaacacaagcaacggccagatccggccacctgtgcccagtatccgtgcctctagccccttggcgaaacaatgagctagtcgttgggtggtgtcccctgtcgctgaagcgtgttgcttgatccgcttcagtagctcacgcgctgtcgcgtggtcatccgctgcaagagcctgcgcacaggaggtcaacaccctacgtatgtcgaccacaccgcccctcgccgccgccgccgctttccgcttcctgtttctcttctccacatcgatggtgacacgctccatgcccccgatgcatgtctcgtaggcatgaagtatcattttgtcgaccatctcgttggcacatctgtcctctagctcattggtcgtcatcatcacagctctgttgaccctgctattaataatgttgctttcctcggtttgatccagcagctcatatgtaccttcatgcaagaaatcattcggcccctcgctgttgtttgtgttattgccaacaaggggaggggaggagaggatctcagcgaagggctgctgcacctggagtagcgcagggtgatcaccaagctcatcgtcatcgtcctccatgagcatgcgtgagatgtaagggagcgtcatgtcattgttagggacatgatgccggtcctcattgctggcattgggcttgtgggggaggtcaaggaagacaggtggggacaatggtggctgctccatgagatccttgatgaagaattcctccggtgtggtggccatgctcatgaatggtagtgctgcaggacaatagctttctgttaatacatatataaatgtcataaagggaagaaaacaaaactacttccggtttcttgt

SEQ ID NO: 180361 - DNA, 527 bp, Zea Mays
aaattcagttcatgtagactaagccataaattgtatacaacattttttctgctcaaaatgtcacactgaattccagcaagatctactagaaaaattatgaagtggttgacctttaatccttcattttgtcacacgttcaagtcatgaacaaagagaaagagaagtcaagaacgtataatgacggtggaagggcacatatgttcctggttttctttatcttttctttgtttggttgttcaggtcaatcgatatggtttccatggtcatcttcaagcaacagagactatcagagatgtcatggaaatatttgctagtggtggcgaaggaatcaaaagatggaaccatgtcaagcagtggccaccagtgattcaggcccagtcatgccagtagcccagtaccatagttcgaggtagggttagtgggagaacaaaaggaatatatttccccctttttcccattcactagcctatgtggctcacaatgtggtggatggcatgccagcgaggtaacaatgtggtgggttattt

SEQ ID NO: 180362 - DNA, 311 bp, Zea Mays
gtccgtgcgtgctgcgtaggggttggggtcttggggatctggctgcaggatgaaagcaggatgcctggccgcctgggtcctgggattcaagcagaaatagatcggtgccaacccaggcttcgtaaactgataagtgacaacgctattactactgctgaacggcccatgttctgacagtttcgatggatttgatagcccattgcccaattggctaccggtgctttggtgggctaaatattattttggtgggctggcgcctaggctcaataatggactaatgattaatttcggatatccaacggattatccgc

SEQ ID NO: 180363 - DNA, 503 bp, Zea Mays
gcctttcacctgacatcatgtagaggggtgttaattgaactttggagggtcggggatgagattttggtgcactccggcgagggcgccaccgtgctcaggtagctgtgccgccgcgggatatctcaggggaagtggatgagcgcctgccgtcgatctaaattgaatggccaggatcatatgcagtgtaccgattcgtgggaattcatcgtggccattgatcggtcgatcgacgatcggcgattgatctggttctcttttaatccagagcgctgatctcagatcgggcggtgctgggcgcgtaacggttcgatgaagtggactttggatctggaccgtagatcgtagattgcgcggctgaaatcgcataccggttcgctgtttaaatctgggccctagatctttaaatggatggcccaggcgcacctgagttcgctcagtcgtggcattttcgtcaagtgccccctaggttttcaccaaaacaacccgccgtccagctgggttgc

SEQ ID NO: 180364 - DNA, 562 bp, Zea Mays
tagaataagtccctacatatcatgaagttcaaaaatttagctaatcaaattttaactacaaaaaagacaatgtgtaaaactatatgccaaccttcaaagtgttataagcaaagcaatctgcaagttgatcctttggcatagccgataattcacattccagcttaggataacccatcttatccatcatcttgcgacatacctcaagttctctattgtataggagacaatagagatagtcatcctcgtcatttccaccatagacaagagaggtcgatgggtactttagatcttcagcataatctttgacttcggcaatttgctctgcagtcagtccccccctgaagcatgacaacgatgtacttgtgtcgtctaggcggtaccatctctatggacactgaagctatttcctctttagagccctcatccttaggacctacaacttcatccctctcttttcccaaatcaaggtcagccttcagactaacaaataactccgattcagttttcatgctctcagcaatagatgtgctaagaggagtttccatgaactttgccaaggcga

SEQ ID NO: 180365 - DNA, 802 bp, Zea Mays
ctctactgcatgcagaggatgtagcaactcaattagcgcttggggctgttgtacttgcagcaggccgctgctgatttgctggagatgatgttgaagaaaccaccacctttgaagtagcattggatgaagagggcctacctacagcaccatgagaccgtcctccaccaaaagaagtactggactactgcttacgccatggggcagcaatagaatgactggaataagatttcccacgaacctcgtgttgaatttttctcttcgtgcgcttggcttgatcaacaagatcttgcaacaaatgatatggaaacatctcaagaaatcgagcaatttcttcattgagaccactctaatttcagcacgcactagcagcagttccatctccttataatattcatcaaccgttctttttccttgcttcaatacttgtaacctattgcgaaggtcacactgatagcttgagggaacaaacctcctcctcatcactctcttcagttccgcccaagtgttgatataatcacgcccaactcaagttgattctcttgtacttgattccaccaagtgagagcataaccagagaactcaactgaagcaagattcacacgcctctgatcagaaagattatgtactctaaaattttgatcacactgctcaacccactcaagatatgcatcagtatcttcctttccagtaaattttggaatcttcaacttgacacgagcaatgttgtccgagttatcacgatgacgacgacctcgatgatgctctctatcttcacgatcagcacgccgccgacgatcacgat

SEQ ID NO: 180366 - DNA, 603 bp, Zea Mays
atatgaggttcgatcaatatagttaatattgatttggtctgtagagaggtggtgacatgccgaagtagtcatcgcttcctctacggttaagttgtggttatgtgtgatagtgttgtttatgtggtgaatgcgtagtgaaatttatttatgtcgtgcaatatgattagaaatgtgaagaatggatagggtgtttcggaacggttagccaataggttcagtcaagcatggtagaggttgaatcgcttatcttgtagaattaatgctcgacatgttagatctcataaaatgtggtgttttatgtgacttgtgcgttatccaatttaagttgagaaaaagttaagagaagctaattaatctgctcctacccatgttttgagtgtagtgtctaaaatggtttgttaagttttatactggcttagccaactcttgttaagaagtcaattgtgttaagtgattattatatatatgtgtttctagtgctacaaatagctaaaatattaattagtaaacaaatggtataatgaaggctgcatggttaagtcttcctaaattggtacacttctcacaattgatatagtaaaattgtaagagtttaatggttag

SEQ ID NO: 180367 - DNA, 568 bp, Zea Mays
tgcacaaggagctgggaatctgcgccaactgaccaccgtgaatccggcatcgccgcggggtgttccttgtcgggggcggtggcctcatcgccgtaatccagaggtaagtcgactggattcgagttcgtaggactgtgaatcgtgttttggcgcattttccagtgcgattgtaccaccgttgctggggttgattttcaccggcgatgatatccgccgcaggagctccactcaccatcactaccgatggccagggtggaagaacaaccttagccgttgatccgtaaaacaacgaaccagattaggtcgagtttaaacttgtggtgcgccgtcggatcttagctgacgtccgagattagaggtttaaaaccccctttcactgatgacttgttcgtcgtcggatcacgatcgtgtggcctagatttaatgtagcgttagcacttcgatcgggctatgcctggcgttgatcaagaatcctagggtggggatcgtatactattttcagtggggcgtgatctaatccaggccgcatgccattgatccaacggccgtgatcaactcgtacaccttc

SEQ ID NO: 180368 - DNA, 1055 bp, Zea Mays
cttgggatgtacgtgtctttctgtactccccaagtcttgtgcaaacatgatccttaaattgttctaattgtgtttatgttttgcagttaaagaaccttgaggatcacattgggtttgaggatggctacgatatgagcagtcaaccggttattattgtaagtagtatgcttatcagacttgatattccttgaactctacaccaaccaattaagatctcaaaactgtaacaacttgcagtttctggagatattgcgagagtttggaagagaggagcagcgggctttcacacaattcagcactggagcccctcatctcccacttggcggcctagcttcgcttgatcccaagctcactgtcgtacgcaaggtttgttagcatagcaaattatacataccactagggcacagacctattcatttgttgaatacttatctgccatgcatcttgcccgacaggaatgcaatggcaatgtagacgacgaattgccaagcgtcgctacctgctggcactgtatcaggctccctccttactcctcgaaggtaccacatacctgtttgttaatctgtttttatttttgtgaagatgtaaaactgacacctatttacctttgctatctgttttgattgcaggagataatgagaaagaagctcaaatatgccattacagagggtctaggcgctttccacttattatgataacaagactgaggtccacaagatgatggaagagtagtgtacattattgtaggaggaggtagataacaactgtgtaataccaaaattataagagagaaccacttattatgataacaagactgtggtccacaagatgatggaagagtagtgtacattattgtaggaggagatagatagcaactgtgtaatacccaaattgtaagagagaaccacttattatgataacaagactgaggtccacaagatggtggaagagtagtgtacattattgtaggaggaggtagatagcaactgtgtaatacccaaattgtaagagagaaccacttattatgataacaagactgaggtccacaagatggt

SEQ ID NO: 180369 - DNA, 583 bp, Zea Mays
tagaagctggttgcttatttctaggtgcagtatcatcttgtctacaaggtggcttcagtccatggattcaaatcaccaaaacaatgctggaggccactttaacatggaaacatggtgctcttgatcatggagtatgtgagaatcatcctgtattgcacattactgctacaggatagtgggttcgtctaggcagtgaagtgtcaaaaattaaaaggtggaattgtcataagctttatcttgccttgtttgcacaagagattcgagagattgagctttctgaaaattcagtgatggagcacctgagcttatttgatcataaggtacagtcatctttgcaattatatgagggcaagcaatctcttgcattatatttacaagccagtctagtgattactctagcactctcatgctatacaagtgctgcacatataaagttataaacgtcaacttgaggacaagttgaatttttagggggcagtaatgtcatgcccggcaagtgtcatagttcattttattgggcccatcagaagacagcccattgggccaagaacaaaccaaacccgtgaacaacaagggcagcgac

SEQ ID NO: 180370 - DNA, 642 bp, Zea Mays
ttttctatggttttactgttgtctggactgggcacaataatatcggaaagagcagggacgatctcacaaaaatcccgagacacagcccacagtgcgtgggacggcgggttaatttcagcaaaggccaggggttcttttgaaaattgaccacggtgaaggggtaatatctactgtgagccgtccaatcgaacacccatggtcgagattagaataaccctaaagcgaacaggtatgccacgtgaaccgcacaacatcagatctgtggaccagattttttaaataaacaatacataagcgcacccctccgatctggatcggacggcacgcattccatcaggccgaatcgatatcccaactttaatctatgtcgtccaacactggatccacggcgagggattaatccccaaccccggtcacgccacccagcggcggcggcgcacagacccccacggcagggctcccgccggtgaccgccatcccggcaagcggacgccctaatccccgaaccctagcgaccacgcgcaccagagacaaggcatacaagatggaagggcatgccgggtacagggacgatgccagggacgttgcccacggtgcgcggctgcggtgcggcggagctcccacaccggcgaagaattctgg

SEQ ID NO: 180371 - DNA, 571 bp, Zea Mays
ggcagagggtcgcactctaaggcccaaaccgccatcagcagcaggaggattcgacacaaaatgagtaaaggccttggaaagaggcaggttccaggccgagtatgcgacaggggcaccaacatttgataccttgcctctgagtatcatttcaagccggttcaccaagtctacagcagaaattcttctgttggcgacccgggttgagtcagctagacctcggtacaggtaggccgggtatgccctatccttcaacggctgaatgttcttgaaaacaaaatcagcaaccacagcctctgcagtcagacccctctccttcagcagtccaacctcagccagcaaagcccctgcctcagccacctcctagtccgtgggagactcggtccaactcggagtacgaacatccggctgtctcccctgaccgtggggggagagaatttccgtggttctcaacaataaaccactccaagcgccatcccttgatactatccttgagtgggatttcaagataatcagtcttcctcccatggcgcatctccaaacttgcaccccccaccagctgatgctgcccccc

SEQ ID NO: 180372 - DNA, 496 bp, Zea Mays
tagagaaggacatccccaatagtgtgccacgaccaaatgcatggctctatgtatgactccatgatcaggataagaatgaagtagttgtgtcttaataggtgggatccaaggtcaaactcttgtaacctctgtcctcccttgtcctacaaaagggaagagtagactaatgtttaagaggttcctctaagggggtttgatctttactcaagcctggagttgaatatcgatccttagaaaatacaagctctagagatataataccaagataattccaatcccttgactctcttactcactcctcttccttaacacaatggaacatactcactctacactcaaagggtagttttactacatttctacactgctcaaatgaacacattggggttatttatagctcagccaaggcttgtggtacttacaagttcactagatcaatagagaagttaagacggttggaagaaggtgacctggtgggccgagtggctgtcaagtg

SEQ ID NO: 180373 - DNA, 1767 bp, Zea Mays
aaaaaaaaaaactaccaagctgtttgtgaatccaagtgaaacatcagtggtttaacatttgagcaactggtcaacttccatccatttttttacctttagccatatcatgttaacactccagtaattattgtgttaaatcccccaaccgtttaaattgttacaagctcatgtaaactaaccagcacgtctatatatacatgatagctggcaagaaagcaccagcctgtccctttagcaatgttcataagagatggagatacttgtcgtattataaggataatcctctgtaaccttttccagctctcttcttccattttctacgctaaattcttctactacaaaagagcatgaaatctcctccagactcatcatgctgtgaacgactacttggactgatgatgtaactcctactcatctctataatactaatcaaaagccaaggttcgggcggcggatcaatccatgttgctcgccaacctagtaaccgtcagatccgacaaggacacaatgtagaccattcgacctggtcatagcgggtctatcgcacattagtccgtaaacccatgcgctcgtgaatcatcatgaacctgtacaatgcctccgcctcctgctgccatgcccatctctcctcccactaccctctgatgtcccctactcttcccctctgctggggtgctgaagaggcgcaatcactgttggtcccaacctcccaggcctccggtgctagttctttgcacttcttagttagccctctgtctcctgccactaatcgccatctccatcacgcctgatctactctcctgcatggcagaggtgcggcgcaaggaggtcgcctcctcctaggcaaggaagccacatcgaactgctgagctggaggcaaaaggacaaagcaacccctgggtagagactcggcggcctcattgaacccatcgggcgctgccacgcgctccccctgccttctctccctgatgcagcatcaccctcgctgccactcctttcttgtgcctacctcctacttacgcagagtggaggcggaggcagcgaaaggcgcagcataaggaggagcaaagcacgcatgggtgacgcaggcatgtgacgcaaggaagatatgaagcgcagatgtgccgcaggaaggtactggcatggcgctgatggtgagttggagctgcaaatgctcaacggacactcccataatgtttgatgaaatggtcatttggaacacgacaacctgcctgctgctcggtcgcttcctctagcccctccaccatcgaactgtcatgtctggcaaggatgttcggtgtttgcagtcaacagcactggagctcgacgcgaaaacgtgcttcagcgaggatttgtttggaggacagactgccttgctttacgtcaggattcattttcgtatgtagtttctgcttcagaagtaatctcaacctatcagtttaggttgctcaaaaaacattttatatgttcaggttcatttttgctagtaactgctgattccagtggcggatccagggggggctccagcccgccctacagccatgaaactctatgggaaatggaggtgaagtgtagaggaaaatagaggagaaagaaggagaagagagaaaaacgagtctctatcagttcgcaactcccaatatccataaaacttcattggagaaagaggtggatattagaaaaaaatggagaaaaaagaagcttgtgttgtctctgccactcgtcactgggaagccccccctttaactcatttctggatccgccact

SEQ ID NO: 180374 - DNA, 504 bp, Zea Mays
gccgcttcggatctaccctcgccgggttagacacctcgcagccttgcgccacgtgcctcggcactttaaccacgccgccgtgactcatgttagcccatccggtgatcgccggtgagcttgccacggtaattgccaccaatcgcgtgcgccattgcccctcctcctctccggccgtcgcgcgtctccttcaaattcactggccaccgctctggggacctataaattgagcacgacatgagctccttagggtaattacccatccaaagcaccagcacttgcctccaattgttcactagagaccacaaattgctcatttcccccaaatcgtgtttccgccaccgtgaaaaggtcctcgccgtggctagctcgattcatgtccaatcttgtcctctgctctgttgtttcagcactcctacatgccactgatgctcctcgacccattcaattaagctacactaccctagatcgccgggaacacccgtgctgatccgttgtttgcactgc

SEQ ID NO: 180375 - DNA, 1832 bp, Zea Mays
ttatggaaagagtcataaaatgaccctaagaataaagttgaatcacatttatacccctgggatactagaaaccctaaatagagccctggaaaaccctaaaactaaaacccaggggcttatgtgcaaaagtggtgaacctttggactaaagtgtaaaaactactatgtttgaacatatatagtcatttggttcacaaatatgtgaatttgcaagttaaaccctaagttttgggcttatttgcaagaatcacctcttaagcactataaagcctaagtctgaaatcagtgtgttttcttcaactttgagcccttgtatcttacaaattaataagaatttgccctaggttaccacaccaaacttgcagaccaaacaaagtataacaactttgcttaaggttgtgagcatagttgttaaggaatatttggagataatcccacttaaaatcagactgtcaggctggctgatggctgaaacttggtctgacagtgggatgggtcaatctttgaacccggatttaaacaagatccagtgcaagtttgggtatgattcccacaacaaaattgtagctggaacatggggctataactttggtacagaaaacttgcttcgtcactgcaccaaatcgggagtaaattagcgctaaaactgctctgtcaggcgctctgatgaagcagtgccatagtacagtgtccaaaatgggttagattgccagcgccgcgtactcgccgccgacgacctccctgcgccacgattcgtgtcaccgccagtccatgtagtgttcggagtgagtggatagcgctcagggtcccggaaatatccccgccatggataggattacacaccagagcttaacgctgcgacgtggccgatctgcctgagccgccgtggaaacaccggtgaacccggttgtgccacgtcgaagcttattgctccgcggtgaccggcgtggcacccttgggagcgttatccatgtgctgtacaccggtgaccgccacggttacagccaccgtgctcttctccgtctccggccgccagcgcatccggctcgaattgaccgtcgccgctgtcgctccctataaattgagcccgcgaatagcttcgcaatatcatcactcgctcagtcaccgctaaccgctagccgcccctcgccagagcttgcgaattttggattcgccccaaatctctttccgccgccgcgaatcacaccctgtcgtggccagcttttcccaggtccgctcattccctccttgtccctgttctagcatccttacttgatgatgatgctccccgatcccttcaattgaaccgaaccgccagggatcgccgggaacacgcaccattttcttcctcatccgcggttcacgtgggcagaaccggatagttgacttaatgagaaattaggttgggggaaacagttgggaagggttcaatccggggtacgtcgctcgggagcgtcggtccttgcgtaaatcgaccggtgcgtgggctcgccggagctctgcaacgccgctcgacgtcgtggacttttccctgcgaagaaataggaatcggaggtcttttctgcaaacagtcagcgacccagaacaacagtgaccaaactcacttctatttagtccaaaccccgagtccctttgcgcaaaacagccagcgcgcgggcgcgggcgcgcgcttgggcgcacttctgccctaactgggccgacgcaggcttgtttgagcccaagactgtttaaagtttttctttttctttttcagcagaactttgaaaaagtgtagaaaatggtaggaaaatcctaaaaatatgagaccaattttcttagaaccctaatttcctg

SEQ ID NO: 180376 - DNA, 492 bp, Zea Mays
tggaagaggtacgatttgtacttcctggtgttgttggtatgcgtggtgcggtggatgcggggcgggggcgtggatgtatggtggagggggttgctgataagtgtgcgcgacaactctagggttgtcggctggctgcgcccgtgccatcctgtctttggtggccttcgtttctgggcagtctttggtttggtgggtgcagtcttcgccatgaaaaagacagtagaatcagcgtggcggctgcgcacgcccccgacccctaccgcgggttccgtttccgcggccttgggggggatactcctggcggcgaggggcgtcagcagtgggttgctggctggcgatgttgtgcacttgctgctggttgcgaccgtctcgaccggagtctggttgcggagtcctcgtccacgtgcggctggactgtggagcgtctttgggtttccgctgagactcaaccttgcgctggtggagctcttcggacttggcatatttttcaaa

SEQ ID NO: 180377 - DNA, 1008 bp, Zea Mays
gtgatggcggtttgggccttagagtgcgaccctctgccgaagaagttagtgctttggttgctttgcttggagaaattcctgatgatgaacgacaggttcactttgaggtgcctttggatcccagtgatgcagagataagtgctatgcttgatatgttagccgaggattcttctgataccacccctgctggaacattggcagtggcgcctctcccagaagctagtaaaaccttggacattcagaggcctgccagtgctcgctcgaaacgcccttgccgagccagtcagcctgcttctcctgctgatgggcagaaaaagaagaaaagatgtcttcgccgtgtgtctagcttggatcgggatgctggtccttcggctcctgccgctgaggaagtgcctgtgcctgaatttactgaggctgatcccaatgggtgtgaccaatctagtgctgaccccaatgggtgtactgtccgtgttgctgatgaaaatgaggaggaagaagaagaagaaatccctctgatttggaagaacagtcggcgctacataaccagtggggaaagtagtggagtgccttctcctgctttgtctgctctcgttggtctgcaagaattatctctggcggactttgatcaaactcttgaagacatggttctagaagatctgttatcagaaccggcagatggtggcacgatggatgtttgtgttgatgtgctcgacgccgggttggggtcatcccgggcagcgtcccacgcctcatcgaccttggagcgcggtcttgagggtcaggaagctgacttggattgtcctgctcccatggaagtgactgagggaccttcagccttagaagtggctgctgcagagaactcagccctcaaggatggtgttggcgcccacccagcccccgagggtgttgccggggatgattcggctcgggtgggtagcgcaagctgcgacccagcccccgagggtgttgccggagacgatccggctcgaatgggtagcgcaaactatg

SEQ ID NO: 180378 - DNA, 344 bp, Zea Mays
ggcgcaagacgaaccagtgccatggtgtccaaccgaagcattgaactagcaaaacaccaagaggaggagatgacgaactcaatggatggatccttaccggtcgtcgcgcagcagagctggctgcccacgggggcatgcggatctgcggcggccatggagctgcggcgagcaattcccaaccacaccgcccgtcgaaggcctgcggacgcgaacagcaatcccgggcgacccttgccacccacacaatcaagcagagaggtacgatttggggagggtagtgccgaacttgtctggtcgtcgttgaggaagcacgcggccatggcgccaaggtcgggtgctccctg

SEQ ID NO: 180379 - DNA, 484 bp, Zea Mays
tataccccggccggccctaagaatgctctgaaaattgtatgcagacagtaaggcttcaatttcacgtgaagtgaaatgcatgtaaaccgcataattaaatgggtgtgtctgtattgtagtgtagcgacatgtaagtattatttgggtcgatcaaccatcatttcgggcgtttcatcgatctgaataaatcgagctgtagtaggccacatatcaatggttgcttggagatgcatgcatgcatatgtatccgggcctccggtagagtatatatggacaaattcacgtgtcacgggggagaaggatgggaagccagcctttcggcttgctcacgttacgtaacttttttttgtccaagtgcatgccttggaatcgatcagtcactgatatatggttgtgaaagctagctagcctagccagacagccctacgtcgtgctcgtttagttattagtgcttggagttggactcgatcagtcatcagcctga

SEQ ID NO: 180380 - DNA, 586 bp, Zea Mays
ctgaataggatcgcgaatttatttgtataaaggtcaaggactctagcaaaattccacagacgaagcggtacggggcgagatcggtcgttagatcccaatccgacggttcaaatcagatctaacggttataattataatatgaaagggtacgagacgatagccaccggattggagatctacggtccatattcaacataaccgtactctattcctgtttgtccgatcacacatctacggtccaaaacccatcacacgaagggggaatacggttgtctaatcgtgaccgtcccctgaccgatcaacggcaccccaggttcttccccactaggccaccctgtacgcggcggcgccggtggcaagtgcgcccgacgcccacacctcgatttcgaagagctatacgcaggggaggacgcgacagataacatgggagggtttctcacctgcaagaggttgcagaggagcctgccctcgcgcgagtggaactcacggtggagttcaagatccggcgagcaattggtgcgactcccgccaccggactcgccccgcgatatcacgaatactcacagcacgatccggcgaaaccgat

SEQ ID NO: 180381 - DNA, 417 bp, Zea Mays
gggagaacaggaaatagtttgatgccgattaacacagagtattagggcaacagtggttttttcgtcccctgcaatggtgctgtagggggtaataggtaaccaagggacagctctaccctgtcagagacggttgtgcccttggttacctatgttatccacggaatattccccctgggggttatggtgggtcattacagcgtgattagttacaggcacagacagacacactaacaactctgcccttacagcggcttacaagtgggaccctgtagcgtgggtcggttatacgcaagccccatattacaataacgagcagattacaacacatggtcttcacgttccatgtgctcagccttcggaatcagcggcgacctttatcctgacccgccaaaacggagggagcacccaagcctttgc

SEQ ID NO: 180382 - DNA, 299 bp, Zea Mays
gtacaagtaatcaatgaactttagttagccttttctttatttctcaatacgcagacattatccttaccctgtgttcacattgaatttgttgaaaatcacaaactaaacagaatttaattcaaaacaacatgatagcagaactgcataaagaagggcctgctaagttgaaaattcggagcatgtatgctcagtaaaagagtcagtaacccagtatatcatatttgccatgccatatcatttgtgttccagttacagaaagttttcacttttcatattcactgatctcatctatttgcctc

SEQ ID NO: 180383 - DNA, 508 bp, Zea Mays
atttttgcgggggatttttcgcttgtatattacatggctccgcctcgttaaaaacctcaccccccaggaggaaaagagtgcgggccagaataaaattgttttgcgaattacaagggcgagctggccctgaggagtcaaacaaaaaatttgcggagattatcaatgttccaggaatgctccaagtcctcgccggatggcgttgcgagcctgtacgcgctgggggacgccttcgtcttgacgatgaaagggccctcccacttgggctccatcttgcccctagactctgttcgagctgtccggacgagtacgaggtctccttcgctaaattccctcgggatgactgtgtggtcatgccatgcttttgtttgggcttggtatttgtttagagcctgtagggcgaagacgcggtctccatcgatgaggtccttcatagtgggctcgtccacgtcggggacagctgtcggggctgtccgtggggacccatgttttatttcttgcggggtcatgg

SEQ ID NO: 180384 - DNA, 650 bp, Zea Mays
tgcggtaggcctcacgggtgttggtttcctcgccttccgctatctcgaggctctcttgaagggacaccttttcccttgtaagttccctgacttgatgctccaggctttccacctgggagtttaggtgagtacagtgggaggcaaggtcatcatattggttatcgagtgtgtggaggtatccagccatgtagacgatggtggggtcatccttggtagggtctcttcctgacagggcctgaagtcttttcctctaggcgggggtatttttgttgctgggtgcaaagtagcgaaggggggttccaaagattattctgctgtagttttggcacagttgtcggagggcttttcgggcaacattttggcaagtatctgggaagcgatatccggtgaaagtgacttggaaagaaggatggttcggatagtttcggctttctcctaggtagactgctatagagcacttctccattccgttctcgagatattccttccagacatattttggcttcttgcggatccccatgcgaagcgcacaacttcacaacagatgtgggaacccctccacctctgagcagtaggatgtcctaatgaccagagagtcttccatctagaatagtaaaagaagggtctgttaatatcgggggaaaggagag

SEQ ID NO: 180385 - DNA, 1528 bp, Zea Mays
ttttagcttcgacgaaggagaaacaggtagaacgcctgaaagggattgcaaaatcttattcatgaattccttagccacaccaccatcgtccgtagcttcctgagtttgcaataggtgctttcttctagtatgaacttgggttactttgcaaggtgtctggggtaaaacaggtggaagctgcacaatagccatagaatctggtacattttcacaactgtgagaaaaccatccatctgttggatcgctgagaccagaacatcattattagcatcctttgcgaagccctccacttgaatcaaagttggagacattattaccagagaagcagcagcagacgaagagacaagatgggacccaggcgcctccagctcaacatcccaagttgggagagcaaggccatcaactggagtaacagtcaccacccttcccgccagattcaaacttggagactttactacggctgacggctcagcagacagaatcctcgcagaatgtgctccgccgtctccatcccccatagatgagcaagaataccctaaagattaatatccagcagcgccaccaccggataccattgcctgacgagaccagcgcttgatgatcaaccgaatggggggcacatacaaagattgtcctccagatagaacctgatcatccatcccaacattcggaaatagagcgatggaggaatttggtgcgaccatgcgtaggtcgatcacatcagcatcaaggttaaaactcaagcttagtgcgatcaagacctccgtggcgccaccagaaccctccagatcaacagctgagataagaagagtgcggtgaagatcttgctcagcctgccaaattttccatgagtgtttgatgtaactcacatgtcatccggaggaaacagacgggatggtggtatactggtatctgaatgcgaaagagggagagggggcatcggcggcatcacgatcaccatgaccaccagagctccgtccccgcctcttcctcggcccacggcgagtacgccttcgtccgccatcagcagagcctcccccggcacaccttgcatgatcctccatacggcctctaggggcttccatcggcgctgccacttggacgacggggcgccacacctggactcgacgcggatgatgagtagccgtcgaccgtcgcgggcacgctaggcacagtgcccaggcagccggcaatggaagcaccgcacctgccgccgacactcagcaacccgatgagatggcgagaagcagttgaagcacctcccacgcaagtccacaagagccaaactaggggggaggactgggagcgccgcctacgatcacgacgaccgagaaccttaacccagctgccttcctcttcccgagaagaagcgggatgaacaagctcccctgatgagattaggacgtccttgtaggaagcttgcacctgaagaggctccggcgagacaccaaaggaggaatctccatcatcgctccaccgctgagcctttgagcgaccagcggggcagaaacagaggagtttgccggtg

SEQ ID NO: 180386 - DNA, 533 bp, Zea Mays
gtccactaccatgtgggatcctttcaccagtgtctcccaaccacgccatgttccgtttcactggcacgtggggtcatgtcgccagaagcttcttcctcgggtcgttacgaacagaaagcacgtatccagggtgattcggttcaagctgcacaaaaccacctcaatctatccgagcgctccctgacccagagtataaaggctatgcgccgcaacctttccccctcatgaacccccgtcttgcacgaacaacgagaagtccttgtagctgccaccaccatccggagaggagagggtccatcgtcatagaagcatgtctctgctaccgttcagcgcataggatccggcctaggagcttcactacatcctcgaggcagtaatagtggtcgcgccaaggaggggtagcaaccggaagtctcagaattgctcgccggatcattgacctccgccgcggagccgcggagcacagtggacagcctcgtcgccatactcaccgccggtaagaagcatgccatcacattggtcttcctgttctc

SEQ ID NO: 180387 - DNA, 608 bp, Zea Mays
ccacattaccatacaaattacaattacatacacacgacgagggcatcacatattacatcggctcaacctttgggatgatacccatctccctgtaattaaacagcattatcctcaattgctcacccttaaaaagcttccgaagatcccctcgcctatgctcgccccagtcggcgaggacaacaattctcgtttaccaacccggtctactcggagatggtcacgctccatccccatacgacggcgcctgccactccgcgaaaattcacccacactatgttttcccattacacttcgccgcctacacctagtactcgcactaggaagatccctggcaccctccacacgcggcgaagtctccgccgcagccacatccaacgcaacaaaataatccaagccttcatccaaggactcctctgtccaaggaaacgaactcccagattcaccatcggactcaaaacactcagacacagaaccaaacaaactatcatcggcaggcactacggttgaggccgccacaaaatcagtattatcagcagcggatgcttgcgcaggcccaaacgtcggaacctacgcagcaaccgaggttcagtatcacagagacaacagtt

SEQ ID NO: 180388 - DNA, 780 bp, Zea Mays
cgagtgcagacctgagagcggctggctacggtggggtgacatacggtggcgtagacgaccgatttgggggaagaacgaaattctccggctatggtggctaatcgagccgacgagcatcacaagcatgcgagagtgctgaaacacggatagggaggacgagtgcagacctgagagcggctggctacggtggggtgacatacggtggcgcagacgaccgatttgggggaagaacgaaattctccggctatggtggctaatcagaggcgggagtgggtgctctgggttcgtgataagctaacggagctgactgtgcactcaatttatagcagctggccacggttgtctggaatttgaaggagatttggatcacggtggtgataggatgttgcactggtgagctcgtcgtggcgttcaatggcactatgactcaagggcggtaactcttagcttgccacggcttcgggtacgtggtgaaaggacttcgacatggcgcaatcacggtgaacggtgatctccacggcgatgaccgcccgaccacgtcgctgcgcaagtgggtacaacaactgggtagtaacagtgccccgacttcatcccctgcgcgagatctttcactttacgtaggtatccacatgccattgggcacgaatcgcaacgccggcaaggatcatgatgagggatcaccggcggcaatgcactgaacctgtcgatctttatcacgttactgtaccatgcgaattcctttcattacgcctgacaaagcagattaagaagctccattct

SEQ ID NO: 180389 - DNA, 361 bp, Zea Mays
cgtagaaggaatgggctcttttggttcagcagctgaagaagtctccccgccaaactcaggcactacggccagttcaatataacatggccggcgggtaaggactttcaactttttgctcttcggcgtagtctcatctggagtagctgaagcagcagtcttggctaaagcagcagttttcctcttctttcctcgtccccgcagcgggtagcagtagtcggggtaaacaaaaccaatggcatcaaaaactctgttcaatctcttttttccccagcccccgaaggatgtggataatgcattatcttctgctttggaatatggcccaagcagttcatcactcgtaacttcgatacatttcagccag

SEQ ID NO: 180390 - DNA, 1471 bp, Zea Mays
gttccgacttgtacttttgacaagttgtgcacgtgtgcacgaagtcctgcaccagatgacacatgttgggaaaatggaagtcgcggtggaggcggtgtagcttgcggtggacgcccttatgtccgtcgttgtggacgaccgccaggatctcctgcaggagtggtgctgcgggcggtatgtacaggcgttcgtcgtaggtgaccatgtcgtcgaccactgcccatggtgccgtgcgtgtgacggcgtggacctcgtcatggatggcaaccagggccgtatcagtggcctgggcgtgccgtaggcgcgcgatgaagtcgaaacggggcgccgagattgccagcaactcgccatcgacggtgtcacggcgggagagggcgtcggcgacggtattcgttgcgcctgacttgtacttcacagaaaaatcgaaccccaagagtttgccgacccagtggtgctgaggtattgtggccaggcgcgggtcgaggacgtacttgagtctatagttgtcggtcttgacgacgaagcgccgcccccataaatatggcctccaacgccgaaccgcctggatgaggccgatgagtacccgctcgtaagcggcgagggagcgatgtcgggggcaatgggggcggctgaagaaggcgaccgggtggccgtcctggacaagcacgacgccgaaaccgtgcgacgacgcgtcgcatttgacgacaaagagcttggagaagtccgacatggcaaggacgggggccgtggtgactgcgaccttgagtgctgtgaacgcagcgaccactgcgtcgtcctaggtgaagccatccttcttgaggagggcggtcaacggtgcggcgaccgtctcgtaattgttgatgaacttgcggtagtagcccgctagaccgaggaagccccacaccgctcgagccgaacggggtgccgaccagtcgaggatggcctgcaccttggcgggatccatggcgacacctgccttagatatgacgtggccgaggtaggcgatggaaggaacgcggaaggcgcacttggcgcgcttgatgaagagttgctgccgccgaagctcggaggacgacgcggagatgttgaaggtgatccgcccacgtcttgctttatatcaagatgtcctaaaaaaatactaggacgaagcgactaaggaaatgttgaagtacatcgttcatgagggcctgaaatgttgtcggcgcgttgcagagcccgaacaccaccaccaggaactcatagaggttgtcgtgggtgcggaatgcggtcttgtgtacatcttctggccgcatgcgcacctggtggtacccagaccggaggtccagcttggagaagaaccgcgtgccgtggagttcgtcgagaagctcatcgaccatcagtatggggaacacgtccttgacagtgagcgcgtttagggcccgatagtcgacgcagaagcgccacgacccgtcgggcttcttgacaaggaccg

SEQ ID NO: 180391 - DNA, 433 bp, Zea Mays
ccgctcaagggccctataaattgagcacaccctcggctccgttaggtattcaagcatccaatccacccgctcgtgcctccaattactcaccagagagccccaatttgggatttcccccaaatcggtccgaaacaccgcgcatagtgacctcaccgtggctagctcgttctaggtccgttcatgctctctgctctcccgtttcagtgtccttagattctcctgatgctcctcgacccattcaattaagctaaaccacgctagatcatcgggaacacccgtattcattcttagttcgcgttgtctccgtggacagggtgattcaaagctcagatcgtgcaattgatcgaggggaaatggttattaagggtttaattcggtgtcaaccgcacgggagcaccggtagttgagttatccggccggtacaggctcgccg

SEQ ID NO: 180392 - DNA, 546 bp, Zea Mays
gtggaggtggtcgcagcacacttctaacgtgatcgtgctgacgatgagtagccatatctgcaaagatgcgatggtcccgttggggtggtagtaatagcttttgacaatgtaatatacttaagaaccatgaatgaatagtgttggacacagctatatattttttcccttatgttggtgtgtgcaggaccatcaactttcacttgggatactggccccatgggaggtagtctcgactggtcgaggttggctaccactaaacccaggaaataattgacgcgtcctagccccctgggaggtaggctcaatagtttgagactacctagctttgaaacaggacctagacctgcacacaacttcaactttgaagtttagtagcgcacccatggaacccaccgtctggtatcattcatcctttgacttatgtaacctggcctagcaaggtccaggaaaccagtctttaagatagattgaggttgagtctcctagagatgtcggacctgggtactagggcacctgccccagagtggcgaagcatgtaggcttagg

SEQ ID NO: 180393 - DNA, 1026 bp, Zea Mays
gcttgcttggctaagggcgccttcggtatggtagccggttcttcatccttctgcgtaggaggaatgggctcctttggttcagcagctgatgaagtctccccgccaaactcaggcaccacggtcggctcaatataacgtggtcggtgagtaaggactttcaactttttgctcttcggcgcaggctcatctgaagtgcccgaagcagcaatcttggccgaagcagcaatcttcctcttctttcctcgtccctgcagcgggtagctgtagtcagggtaaacaaaaccaatagcatcaaaaactctattcaatctcttttttccttggcccctgaaggatgtggataatgcattatcttctgctttggaatatggcccaagcaattcatcacttatagattcgatacatttcagccagtcgtcattgggttcatcaaatttatctccatatctgaaggtgtattttagtcgaaccaagtcaccttcgctagattcggtgacagtctccgtcggcatctcccaatcctctacaagcggccatactctgaaagctatatgctcttggattaaatctcttataccaatgaaaaaacagacagtaccaaaggccttctgacatgcttcggcggcttcatcgatttcaaccttcggccttcgaaggccgaagcgggaccaaatggggcgcataataacctccttaacatcccccctcgccactaagtcgttcttcacataaagcattcttccatccaattccctgaccacctctttcgaaatgttggcactgggtaacttgcgttgggacgggcgataaacccgtaacaaccgaagttgttgtgatactgttccttccccgtggccttcgtctcatacatgagttcgtgcatgctgcagaagcattttgcgctgggctctaccccttggcttcttgttgcccagacgaagactcccatcctcaatatggcttcgggggtcagttgatgaaggaaaatttggaaggttttccgcaccttcactacaaacctgctca

SEQ ID NO: 180394 - DNA, 526 bp, Zea Mays
gaaacatcctcccataggtttgattttaccactgtaggcacttttcgccaatcctttatcctaatatcaacacgcatgtgtgctatataactacaatagcttgagaattcattgacatgttttatcggtgactgggcaatcccatttttatcaaacgtaagatgacggggacctcctttttctagcttcttgcatttggcgtgacctcgtttcgttctatgcctggcagaagtacaagaacctttttcgacaatgtcctttgaatgcaagctagtggaagatgagctacttgtggacccagaggtttttgaagttgatgacccagatgtatcataagatgactcaaaactcatttgttcctattgaattagcaccattagtacccattgtacataattatattcgaaaacaatataggcattagcagcatcaaagaatactatgtaaaccaaaggaaaactcatcaaagaatactatgtaaacagaagcaaaactctatgcacgctcaaagaaaacaccattggga

SEQ ID NO: 180395 - DNA, 637 bp, Zea Mays
gactaggtgtacttatctgcacataatcttcttgtccagttttgttggcaaccttgcattctttttctaaagatcgcctacagttcttcccttctgctattttacctgcataagcacaaaaaaatcagcaacgagtacaatctatgttaaggtaaaaaacataagtaaaaactcataccattataaatctcatgcagatcatcatagaaagggaatgatctaccatcccatctctgtaaattctttggtagatcagcccataccccacccacagtggtagccattttcagatcattatccaaccaaagccactatttgacacaatgatcttcacaacattgtagtccttttttagcctttgctctctatccttcaactgcgacactacaaagtttgctgatgtaaacctttcattaatacgctgtgtcatactgttccatgcctctttggtccatccattctgcgcacgatatcttggtgagttgtactctttgaggatgctcacaaaaaaccatgttcttccttcattccaatcagctctaatctcaattttccctagaacaaacaaaattcaaatgacatgaaccaaacagggatcaccagtgaagtgctaaactatgcaaatatgtaaccctag

SEQ ID NO: 180396 - DNA, 733 bp, Zea Mays
acccgtgcacgggtacgggtattggactggggagtttttagtctgatgaggctaggtctggtgtagcaaaacccggtaggtcttcacccgttgccatctctagatcggacctttcaagaaagctcagggaggctatactcacgtgctggttgccattgacaaattcacaaaatggatagagtacaagcccattgcctctttgacctcagccaaggcagtggaattcatacaagacataatattcaagtttgggataccaaatagcatcattaccgacctgggatccaacttcaccagctctgaattctttgacttctgtgagcagcggagcatccagattaagtatgcatcagtagcgtatccaagagccaatggccaagtagaaagagccaatggggtgatactgtaagcactcaggaagaaagtatttgataagaatgaaaaacttgcaggaaaatggatcagagagctaccatacgtggtttggagcctgagaactcaacccagtcgagctctgcatggaaataccctgttcttcatggtttatgggtcagaggcagtgctgcccgccaacgtaatattcggggcgccgaggttggctttcgaaagcatagctgaagcagaagctaccaggctagaagatattgatgtgctggaggaagaacggttgaacatagtaattcagtcggctaggtaccagcagaccttgaggcgctatcatgataaagtcgtg

SEQ ID NO: 180397 - DNA, 870 bp, Zea Mays
gcatgtgttgttgccatgccatcagaatgtggaggagaagacccaacgtggacatccatggaggtatgagaaggggagcctgctcagacaccctcaggggctgggtcgcagcccgcactgcccatcagagccggatcaccaccggcaacacccttgggggctgggttgcagcttgcgctacccacccgagtcggatcaccaccggaaacaccctcggggcttggtaaccgcttgcaccatccttgaggaccgggttcttcgcaacagccacctctaaggctgaaggactctcagtcacctccatgggagttgaacaaccttgactagcctcttggcctcgaagactgcactccaaggtcgacgaggcacgagacgctgctcgagataactctaatcccacatctggaatgtcagagcaaacatccatcataccaccgtccgtgggctcggacagcaaatcttcaggaacaacatcctcgagagcctgatcaaaatttgctagggataattcttgcagaccaacgagagcagacaaagctggagaaggaatatcactactctccccactgactatgtaacgccgactattcttccgaattaaggggatttcctcctcttcttcttcatcctcgtcaacaatacgaacaatacccccattggggtcagctctagcaggatcacgcccattgggatcagctctggcaggatcacacccattgagatcagcatcgtcaaggtcacacccattgggttcagcatcagcagggtcacacccattggggtcagctctagtaaaaagttccactgatacttcttcagcagtaggagcagaagggccagcatcctggtccaaacacggcactcatcgaa

SEQ ID NO: 180398 - DNA, 456 bp, Zea Mays
ttgggaatatcacatgacatttttgaaccgtactgttcgcacgatgtttagccgaatatttcctgctacattccggttaacactacagtgatgtgcttctgttttgatggttttcgtgatgccattagcagtttattagcaccgtaatcggccaaaacgagctaagataactattctgcatgtcagcttgctgctttagacgctgcgatgttgcatgcttgtaatgtggttgcgagtgtatcaaatatgcagcctagaagtctgggcaaggcacggattgattttatatcttcacttttttttgctacttgatggttggtgctgttctggtagcatcagatcagatttgatgcttgactagcgctttattatgccgtgttttagtgctttcatgtatcaaaccctgtgcttaatgctgatgaagagcattgttgaggaaatatggattgctttggg

SEQ ID NO: 180399 - DNA, 453 bp, Zea Mays
gcctttggctcagctgatttggctaagagtgccttcggcattgcaaccggctcttcaatcttctgcgtaagcgcaggttctttggcttcagtagccgaagaggtctcaccgccaaattcgggcactgtggccggttcaatgtagcacggtcggtgagtaagaaccttcacttttctcctcttcggcgcgggctcactcggagcagctgaagtaacatctttcctagaagttgcactctttctcttctgtcccctttgcgggtagcggtagtcaggatacataaatccgatagcatcaaaaactctatttagcctcttcttttttcggctcctgaaggccgtagatagtgcgttaccttcagacttggagtaggctccaagcagtttatcgctggtgttttcaacgcacttcagccagtcatcgtctggttcgataaattggtctccaaacctg

SEQ ID NO: 180400 - DNA, 302 bp, Zea Mays
agaaaggtgtgtttccatgcaaagctcgactaggttgagttctcaggctccaaacaacatacggcagctctctgatccactttcctgcgaacttttcattcttgtcgaagactttctttctgagcgcctccaatatcatcccgttggctctttctacctgcccattggctcttgggtgtgccacagaggcatatttgatctgaatgctcttttgctcgcagaaatcgaagaactctaagattgtgaagtcggatcccaggtcggttatgatgctattcggtattccaaacctgaatattatg

SEQ ID NO: 180401 - DNA, 993 bp, Zea Mays
aaggccctaataacttcattttcaaactagaggttatccattaattgtgacattgaaatagtggatgatcaaaaatcaagcaggtataaaaaacataatgaacattatgtaatttgaagcaattgatttggagttcatatgacaaagttatgaattttgcaagttttgggatttaaaaccctatttaaatacctatttctgattaaataaaagacccgaggacctaactgtaaaatactaggggcccgaatgaaagaaacaaggacgatgggttaatttctaggggaaccatgggcccctttaacaaaataactacgagaaggggtatcggtttctctcagcttggatctcagatcgacagccgagattatatcggcgaggcgatcatgcgtgcggggcgtgaggggctgataggcggggcattctgggcagaggtgagggcacgaacgtggctgacaggtggggtcctctaggcatgggcgcaggcatgggccattggatcttggatccacgaccaagattagacttagattaattaaattataaccattagatctggagtggacggctaggatcggggcgaccggctgcggcctcctcctccaaccacctgaggcggcgccacccgtgtccatgatggggagctcatcggagacaaggggcatgggggctccgggggtcctagggcgaccgggatggctttgggaggttgggggtctagggaactcagtggtgagggctaaaccgcggtgggagcactgggggttgaagatccacgacgaggtggctcggtagctgcgctagcaactccgacaaggaattacgcacaacagagagcgagggagggaaacaaagggggaaggggaggttccttacctcacagtgagtgtcgggatcccctcggtggcaacaatggcatgatggtggctcgaaatgttggcggcggcatcaggactacatgaggaacgacaatttagatcaggcagagcaaac

SEQ ID NO: 180402 - DNA, 585 bp, Zea Mays
gctgacacttgcagaaacacccttgcgctttcctctcttcacaacccccagtccacgacggcgaacggaggggaaccgagctccagcaagcttataccgaccggatcactcgatgaccggtgctctacttcggctgagaccaaattcaaaccctaacaagagtttcccctcaactaatttcactaacggcgctctaacacgctctgtccacggtggcagcgggcacgacgaacaatcaaacgcgttcctgacgatctaaggggtcttagtctaattggcggggttggggagcatgaggggcacacaagaacactgaaacgaaagggcagagggtatgagcggacctgagacgagctagccacgacgaggcctctttcacggtggcggaaagcaggtttgggggaagtgggaaattggtgagctctagtgatcaattgagggcacgacttggtggcttggtgcttgactaccctacggagctcatggcgtgctcaacttatagagttcgtgagcggtgttgcttaatttcgacgaattgcgctggcggtcgagaggggaatgagtcacggcggtgatctaccgtgg

SEQ ID NO: 180403 - DNA, 1290 bp, Zea Mays
gttgctcctgacaacattcggaaccttctatctattcgtcaattgactactgacatttcctgttctacggagtttgaccctttcggtttgttcatgaaggatcttgccacttggagtcttctcgcacggtgtgacagctttggcccctatacacccttcaccttcctgggtccactacatctttggcagcctcacatgttttgaccactacaacttcgtccactacttggcatcgttgtcttggccatccggatcctgatgttatgtccaagttgtctagtagttctgtcatctcttgtagttgaggcccccatgagtctatgccatgcctgtcagctgggttgtcatattaggctcgcttttcctcattcaggttgtgcgcccttttgatctcattcaccgtgatttatggatatctcttgttctgagtgtctcaggctataaatattaccttgtgattcttgatgatggctctcattacatgtggatttttctgttgcgcttgaagtccgatatgtccccccatgctttctcatttctttgcctgggtgtccactcagttcggtagcacctgccaagccattcagtgtgataactggacagactttgacaacttttctcgtgccatcttcctcaatcgtggcgtccatattcagatgtcatgcccctacacttctccctagaacagcaaggctgagcgcatgattcgcactaccaacaacatcatacgcttcctgctcttacaagtctcgattcatgttcggttctaggctaaggctctctacattgccaactacctgcttaatcgtctgcctattgaggcgatctgtgctctcacccctcactttgccttatttggctcacttctacctatgaacatcttcacgtcttcggatgtgcttgctatcccaaccttttcaccactgctcataagcttgcccacggttcgacaagttgtgtctttcttgggtactcccatgatcacaaagggtactagtatgtcgatctttccaccaaccaccttttaatctctcatgttgtcttagacgaggcttcctttcttttctctgcttccccctccacctctgttcctaaattggattcccttttcgcgaattgtcgtgtggactcccctatacaaccccacttgttttttcctctgcaggctcattctccgccgcgccatcagcggcctccgcgtcgttgtaacgtcgtgcatagcctcgttgtcccccattacaccccttgtggccctgtcatcccctgtcgtgccacacacggccttgccat

SEQ ID NO: 180404 - DNA, 550 bp, Zea Mays
gtggccatggccctcggctggtgagacgtcaagcggacccgttggtcaggcaccgaacgccggagaggtgagcgcgcagcggaatcggatggtggaaacctgggcactgtcgagccagggagcagaggcacaacggaggagcccggacgccggagggagctcagactatatctcttggacgcgcaccaaatcccaacggactagccgatcccggcggctacgatttcggtggctcgttacaaggagacggaggggatagagctgaccaagatggcccgcatggcggtgaactagagagcggagctgtgcgccagggtgggcagcgtggtggtgaacaggggtaaatgggccagaaggggaggaaacggcccatgacgcgctggtttccttttttatttttttatttttttttttggatttcagatttgaacttcttcctaaatttcaaaatccaatatttgaattcaaatttaggttggggatttcacatagtaatcaagttcataaaagtactaacatgaaggagtatatttattcatgtatattcttt

SEQ ID NO: 180405 - DNA, 592 bp, Zea Mays
aatttttctgtgggcgtgcattctaaaagaaaaaaaagaaggtcattgttcatttaccgtgtgattggttgcccgttttatcacctcctagactatcgtgtgcattaactttatctaaactcgtgtttggttgcctgcacgtggaagacgtaaccccgtatgaacagatgtaaaataagccattttaaaattatttatccgtatccacccatacatttaaaacatctatatccggtcaaccacgctcgcgcgagctagattgtgtacaagcagcgaaccaatcaagtggaaatgcgtctggcatccacgacttcctgctcctccacgtcccacttaaccaatgaaactcatccaaaaaggaaggggaagaagccatgaaatgaaacaggtccatccgtccattccgtcaatccggacacatacttgatcaggctcacattatgggcgtttactagtacgcatcacgtcgagtttctagctcattaattcgactaggccaaatgggttttctgctttcgagaatgtgatcggttaggttttggtgtgttgccggtacaagcaggcaactctctatgtccacccactaattttc

SEQ ID NO: 180406 - DNA, 276 bp, Zea Mays
ggaacgtttttggagtgggttgttttccatagtacggaaaaatcgtcaacacatcctcatacaagtaaattgcatgatcaaatatgtatttttcatgtttgtcattacgtcgaataatttgattatatggacgctcatatatatttttatttctgaatataccaacaatttacgaggagctgagctacgcttaatcatttctaggcttctgactgtattgtccacttcttccttgggtaagtttacaaataatgtttcattttccatggaatttat

SEQ ID NO: 180407 - DNA, 737 bp, Zea Mays
gcagaattatagttgaaataatgggctacaagtttgctgcagacagattggcatgttctggcacaaaaatccgagatctaggcgttgcaagttactctgtcaggcgctttgttgaatgtttccattggtacagtgaatggatagggtcaggttcagagaacctcgccgctggtgaaccgtgcgcccggattcacgccgccgttgtgattcgtgctcaccggtgaccaaataacgcttctgggcaaaagatcttcgccacaggataacaccggaggctggccgctgtaccccttttgctttgcggacggctcagataagttcaccggagtctgccgcccgtcgatcggatgccacgtgccttgtggcttcaccacgtcaccgtaagccgctctatatcactggctcgtcgccggtgactccgccacggtgaaagccactaattgtttgcgctagtgcccctcctcctctccggccgccgcgtgtctccatcaaattcactggccaccactcaagcacactataaattgagcacaccctcggctccgttaggtaatccagcatccaatccaaccgcttgtgcccttaattactcaccagagcccacgaattgctcttttcccccaaatcggtttccaccaccgtgaaagagtcctcaccgtggctagcttgttccaggtctgctcatactctctgttcttccgttttagtgtccttaggttctcctaatgctgctcgac

SEQ ID NO: 180408 - DNA, 908 bp, Zea Mays
agtctcaatagcagaaaaggcaccagaggacccgttcctttgggtttcctcccaaagggcaaaacttcaacaagccagcaaggtccaccccatagtgtttcgactagccaagttagagctctttttgcacttagtttgtagcaagcagtcaacctccagccaatgcttgttagcaccgtggtgaccccagtcacttcaagaacaactgcccacgactaaagccagcaacatctgccttctccaactcgttgaatggccccaagaatgtctcagcactagcctccaaggcaccttcctccaacagccaggtgagcaagcaacatttccataaccgggctcgggtgaaccacattgacgcccaggaagctcagtagcacctagagtagtactcggtgagttcttggtagaatttacccctaccgtagtacttattgattttggagcatctcattctttcatagccactagttttgtggaaaagcatggcattccaactgcacagttagaaatccccttaatcacccggaccctagggttagaccttctatgccacctcaagcgctcctaaatcaggattcttttaagtggggtagtgttcttggcagacctagtagtgataccatcgcaatgaatcgatgtaatccttggaacagattagttgtcccggcacaatgacatcataggttgtgcaaacaagacaatccttctcaccgatcatcaagggaagtcagtttcttgtcaagcccgaccgacagctcaagacccgatgatattcagtctagcagcagaaagcatatccgtggtggaagaattcatggatgcgtttacagaagagaagtagagttctacattgatccccttccaggaacaacaccgatcgtaaagagaccgtattgcatggcacctat

SEQ ID NO: 180409 - DNA, 669 bp, Zea Mays
cggcgtccgccggtgcgccttggcttggtgccccccagcacatggccatgggggccctcaggcgggtctgtgttcctcggctttggacttctccgacggtcttcgctttcaggattagatttccagcaagtttaaccgcccgatcaacctcatctcaggtaaatttgatcgtcacgagttctttttagtcgtctcctttggcagatgctccttgcaactgtgctcagagtctgtgggtcttcttcaatctttcgttggtggcaaggcagacttattcagggtctcacaacttgcggatcgggtctttcgtttttcgctttcttgcaagatcgttggtttcacagtttatcagttacgctcctattcctgctccgtgttcaaagcttatctgcacctttggaattctggcggccctaattggttcattgagtggcaacgttattcagtggaagaatctaaatcttggaaactggtttcacatcgccgttcttccacgacatcgttcgctactatggctcgaaagccagctctgtcaggtgcaaatttggttcctttgggtcgaccgatgaggtctattcgttcttcctcaggattgaagcagcggcactcggttttcgatcggatttccttcccccttcacactgtcagtgatcatggagttgatgttcg

SEQ ID NO: 180410 - DNA, 637 bp, Zea Mays
acttgggttgtataaaagtactatctgctaactaatcagtaaatacctaatccacagcctttgcctaaatacagaatgtcgggcgatagtaggaatacagaataaatacacataccttaatatcggggctcctaaacataaaacagatgcaatgcgcgatgaaattacctgattatagtgatgtataagcggatacaaatcacacatttagctggataataagggttaccatcaaatccacttcaaaatcgacagatagggctcaaaaactcaacggcaaactcggggtatttcaatctgggattacctggaacttcttgaatcggctccaatgctgggagattgaaggatgtaaggagtaatggaatggcgctggattggatcggcggaggattggcgctgcgctgatttggagacgctgaaatcgccaggggagtcgcctcccacgaaaggaaactctgcgcggctggggttttcttcaaatggccgctggtttatctccgttgaatgcgcgagtacggttttagaaacaggaaacgtgggagaggtggctggttcacgggggtaacggcgccgtgactgtgtccagttgactcggtgtggttcaaccaaaatgcccatgttgactagcctgggc

SEQ ID NO: 180411 - DNA, 600 bp, Zea Mays
gcaaaaattggtcacatcatcatcaccatctcctacttgtgcaacatcacaagttggtggctctcgtcttatcaagcaaaaattggtcacatcatcatcaccatctcctacttgtgcaacgtcagaagacgatggaacaaaatcctcgtttccggtaatagttgggtaaggagtaagtgtagctgtgccgttgtcaccaccaacaggccgagaaaaatcgagttttcttttggttaaagattcttcactgtcacataaaagagtgtcttcagatagtctccgctttctgttgtcttcaggttgcatgtaaacctggtcatccatggagtctttctgtgatgtattatcggtcgatacgtgttgcaaagaagaaccctccataagatatatctcagagtgctaaaaaagggagagttgggtacagagtaaaataaaattcatgaacagtgatatgtatgtatgctaccaggaatataaagtaaagaaaagaaggtaaatcgtgcattgtctggtagagttgaagtgttggcccttgtgcataagaaatcatgtaatatttttttccaaggactaattatcacctcctcgctagccttgata

SEQ ID NO: 180412 - DNA, 982 bp, Zea Mays
gttgttgtgcctgggcctggtcgaccgccgcggcccattgggtgcatcatctggtccagaatgctcccgctccttgctttgttcctccagtgcctcgcctgtgtcactgacattccccctggtaagctggttgtttgcccccaaacagacgcatatggaaattgttgtcgtagatcttgaatatcctcccacgtcgtgagttctggcgacatgtgagaccattggaccgggacctatgcacaagcttgcagccctttcatcactgtgcggtgttgcagaatcttgatcggcacactaaaatgaaattggttagtaggcaaagtcacagatgcagtgaaaccagtgcccaacgcatgcttaagctgtgacatatgaaaaactgggtgaatgcgtgaagaggaaggtaattgtagcttatacgctactgtgccaacacgctgcaacacttgaaatggtccgaaaaacttgaacgccagcttctgatgtgctcgaacagccacggatgactgaacgtacggttgaagcttgagaaatacccaatcacctactgcgaactcacgctccgaacgacctttgtccacctgacgcttcatccgtagtttggcacgctccaaatgctgcttcaccagctcagacatgagctgacgctccttcaaccaggaactcaattcagaagacataataacagtctgatctgcaatgccaaactgcttgggtgtgcaaccatacaatgcctgaaatggagacatgcctatagctgaatgtggagaagaattataccagaattgcgcgacagacaaccaccgactccactggtgcggacaggcatggacaaagtagcaaagaaaggtttctaagcactgattgacacgctctgactgcccatcggactgaggatgatacacaatgctcatctgaagctgcacatcatccaggcgaaacagttctttccacaaatggttgagaaacacacggtctctgt

SEQ ID NO: 180413 - DNA, 499 bp, Zea Mays
ggggcgtgctccagttcttgtcgtcgggggcgcggcgtcgggctccgggcggttctcaccgacatcgaacgacggcattggggctctagcagtggcgagcttcgggcggcggtggtcggtgtgagcaaagaggtgggagcgttatgagaaagctcggggaggtcgggatcggatccaacggggcgtgtggctccattttatagagaagagggaggatagaggatgccaaggaaggataaggaaggttagcggctggccatcaagcgccattgatggcgttggtttggtggggagagagtgggggagaggaagagggacgactggccgtttttggcacaatgacacgaggcggtgagggaggcgagtggccggggagagggagaggcatggggtaggctacgcagcggggcgacgctgctacatgctcacgcatgagtgcctaaggctggggtcaggaccgaggagggcacgaggccagggtggggcccgctagcagtgg

SEQ ID NO: 180414 - DNA, 569 bp, Zea Mays
acgaggtgttcacgctggcgcggaaacccgatttagggaaagtttggaattcacgagctacagtggctaatcggaggcgagggctggtgcactagacgtgtaacaacctaacggagctcactggggcattgatttatagggtccattacggtggcgcccaatttgaagaaatcgcgctggcggccgagaagaggggacgagtcaccacggcaatctaccgtggcattcactagacaaaggcgtacgtctattactggttagcctccacggctcaaagcgacgtggtaaaacggcccaaggcatggcgcgaccgaatgaacggcggcagccacggcgatgactgtgcggccacatggtcgggcaagtgggcacggcgacagggtgaaacagtgccccaagttcatctcctgtgtgatatttcttaccctgtgtagttagctgcactccaccgggcatgaatcgcagcgccgacgaggatcgaggcgcggagtcatcggcggcgagatacagcgaacctgcgatcttttttagtgtactgtaccatcagaactccattcagagcgcctgac

SEQ ID NO: 180415 - DNA, 933 bp, Zea Mays
gtgttgggccaaaatcggtacaggcggcccaacaatgagcagaagcgcgcccgcgccaacgcccgtgccaactttgcactgagctccctgtcattttgaatattccgaagcaaggtcaacacactattgagacgagtcactgacggtttatacggaacccctcggacttctaattctttaccggctgaagccctcgacgtcggacggcgatgcgcagggctccgacgagcgcgtgaaccgaggattttgctcagtggttggtgtcctactttggtcgaaaccaaattcaagttctaaggaccatttccccccaataaattttacggttggtgatctgccaagctctgcccgcgaggacagtgaacggcgcggacatgtgctcgtgttccaatcgattggcgggctcctagttcaattcggtggtttgtcaagcatcaccaacatacatggacataagaacaacgcgcgaatcggatggtgtcttaccagaacggactgaccacggtggagtggtgctttacggtggcggagaccaatttggggaaaaacgacgttgcgacggctctgggtgaaattggaggcggggattaaggctacacggccgtaagaaactatgctttcaccgtgcgcaaacgatttgggcaaaggtggagaggtcagtgcgaatttgactcgatttggtttactgttatgtgggtgatgaccgagcctcgccgcgaaccatgggctatttatagccgtggaggtccggcgatcaacggacaagcaccccgtgagtcaccacgatgaggactagtgctaagcacgtggcgcacggcagtaatcgaccgacggtgaggtcttatccgatcagtcgatgcgcaagggaggtacggcgagcctagctacggcagaaccatggtgatggcacggtggccgccgattaaccggggc

SEQ ID NO: 180416 - DNA, 479 bp, Zea Mays
attagatcccaggtcagtaatgatgctgttaggtattccaaacctgaacattatttcttgaatgaactccactgcctttgctaaggtcaaagaggcgatgggcttgtattctatccactttgtaaatttgtcaatggcaactagtatgtgggtataccccccttgagctttcttgaagggcccaatcatgtccagcccccatcatgcaaacggtcaggtcccaggaatagtctgcaactgttgtgcgggtagatgctgttgttttgataagaattggcatgcctcgcacttatggactaactcggctgcatcattcttcgttgtcggccagtaaaacccggacctgaaagcttttcccaccagagtctgtgatgctgcatgtacgccacattgcccggcatgaatctcatctaacagctgcttcccagtagccgagtgaatgcacttcatgaggacccctcctgcacctcttctataca

SEQ ID NO: 180417 - DNA, 368 bp, Zea Mays
ctgacgggccgggcctacccgtcagtgccccttgcgcccgctttcgtcgctgcatccatgaccggtgggaccaagtcgtcaggttaatcgcgctcgccaacagacttcgcgcagcgacctccgatatctccggcgaactcgcccctgccctggtttctcgctgattcgagccgttagcctataagacctgacccccacgaacctctgtgcccatagccccctttaatctagcaaatcgcggcaattgcaggtggctcaggcttgaactgcggctgggaatcggccgccagcaccattatcgtcttcgccaaaattccaggtgcacgaaccgtgtccgggaagccgtcgaggatcgtagcacttgtgcc

SEQ ID NO: 180418 - DNA, 690 bp, Zea Mays
cgggcccgacatgtcagtctctcaaccgcgcgcgcctgcttaagctcggtcgctgctcagtgccccccttgactagctcctccgctcaaatgaattacaatgagatccgccgcaatgaccggggtcatgcgatcgggggccgggattgacttcgccaccatgaaccccatttcttcgcctctatataatcggttgtggggcccctccttatcccctcagccgtgactccaaacccgagaaccgttgtcgccggggcgcatcaagcgcacattgtgctcggggtgccaccgtggggggggggaatcctcgccgtggccgttgtccgcgccttcggtggtgtcttgggcctttcccagaccgtggggaaggcgatcgtgttcatgttacgtgggttcgaccaccgacgtcgccagaattcttcgccgccaccgtggatccacctcgtgccgctgtcggacacccctgcaaagctaatcaccggtgagaaccaatcccctggattacccatttactacatagcactgcgcaccggttaggatcgagctctagtcgttgtggcgtcatggcgccacgcaccggcaatggcaccaccgtgggaggccctacgccgccgtgtttcggcgtcggggagtgtagggcgtgcgggggggcgttggatgcatcagggacggtccggattcgactccgagc

SEQ ID NO: 180419 - DNA, 372 bp, Zea Mays
ccaggcgcatagcagaaggtgtgcccaagcggctgagtgacctgggagggcgagatttctcgccggggttagaattccgccgtgcggtcgctgcgcggcgcgggcagctccaccaacgcatcgaccttgggtaagtgctcctccagctgactccctttaccccctggaacctgtaggaccttgcggtagtgtgtgagcgttgtgtgtctgccggccattgctcaccggagatcctttatccgtagaccgccgtaactcgagtattgccttgttctcctcaccgttgcgagcaatatgcacgtactgggtttcgcatgatccctcccatcgattaggaccgatagtagattggttgaagcaccaccctgaggt

SEQ ID NO: 180420 - DNA, 342 bp, Zea Mays
cttggacgggcagcgagagggaattggcctgctggggagttcgcaggggcgccatgggaggaacggtggtggctggaggtgagcagccagggagctcctgtgcgcttggggaagaaatgctcctgctctcgctgctggattgcaagggaagcaaggatccgactagggagcagaggggagataaaaaggggttagcggcacacgccattggttgaaaagggcggcatgctgcagagctctgcacatgacagactgctggcaggtgatggcaggatgactttggacgcccagttttggcattttctgtttggattcggacccggatcactgcagaagatttgt

SEQ ID NO: 180421 - DNA, 551 bp, Zea Mays
gtccatactccttcctcccaggcacgtaccaattcatcgatcaaaggctccatgtacacgcccattttattccccaggtgtccggaaattatcaacgacacgaatatattctgcctttgaaagcacacaccagggggaagattgattggggtaacaaacacgggccaacatgtgtatggggcagcgctcattccctagggattgaacccatctatggccagcgcaacacgtacattatgagcctcttcgtctttctcacggtgaatggcatcaaagtatttccatgcttcaccattggatgtgtgcaccatcttgtcaggattgtatcgttttccatttttgtgccatgtcatctgtttcgcggattcctctatcatgtacagacgctggatcctcggtatgaatggaaggtgtcgtaggattgtcaaggggatgtcgagctgcctcttctgtccatcaccagagtctacctccatgaacctagacgatttacacttgggacagtactttgtctccgcgtattctttcctacattgcacgcagcccttcgg

SEQ ID NO: 180422 - DNA, 757 bp, Zea Mays
ctgcgaatgaggagatcactcattttagtgccagtggaggctcgacactccttcatgacatgcgcttccaaaatcctgctctccacaggagagacatccgcatcgaaggtaatcgtttttggattatgctgcatgtggatttctataacacggttattcttccaaagaaacttcaacctattttgcattagcgttatataaagtggagtggttgtgaaaacattggtgatagggaaatgtctttagctttgagggcctgtgagaataagaatatgaaaagcatcatgactttcaattttgattggaatgatgagatcattgcacagttctactccactctgtggatcaaaagtgcagatgaagaaagtccctagaacttcccctacatgaaattctatcttgaaggaagttggtacaaagtcagctataggaggtttgtccacatcttgggagtttctgacaatgacatagctggagacaggataaaggttcatgattttctccctcctactaaagatgaagccaatgatctttatatttctgagaatgatgagtattggaagtcaactaatatgcaccaatattatagatatctcaatgctcttttcaggacgactctcatcccaaaaggtggaaatcagatgaatattttgggtgagagtaaagttcttctatcattcatgaaaccagatagcagtggaagactgaatgtttttttatatgatctgccaggagatcattcatgcctcatgctctc

SEQ ID NO: 180423 - DNA, 672 bp, Zea Mays
cccacatttatagcacaacccctgagctttacggaatgcatacactgatgataaacggtcgcttgttgcagtccccttgttggcctctgatgttctgaattcggtagtcttcgtagaagttgtcgccgccttgggtggaggaggtagaggcatagggccacgagcataagatttgctcgcgacagtagaatccagcttcttatagtccttggtccgggaaccatcgacgatctcctcctgcaactgagcaagaacgtaggcagtatccaaatcttttggccgttgaatcataacagtggatttaatatcaaaacgaaggccatctagaaatcgcatggtgtaatacagtgggtctgacatttcctggtaactattgagctgatcgaccaaatgagcaaaacgttccacatattcccccaccgacccttgctgccggatatgaaataattgacgcactaggctagcatgctgatctttcccaaatctctcacggatcaagttcccaaactctagccaagacaaactagcaagcttatgctcaactgaatttaaccaacgtgcagccgccccagcgaagtgcatggttgcaactttaacccacacacaagggtgcacagcgtacatgtcaaagtagtcttcacaatgtttttgccagagtttggggttttgacc

SEQ ID NO: 180424 - DNA, 567 bp, Zea Mays
cggcaggggaggccgccgcggcagagcaacttggtcgggcaacgcggggttcgcggctggtttatgcggcccgtaggggagagaatttcggcaaggtagcgccacaacgaccttgcggaggatccggcggcgagtttgtttcatctggttgaagaaggtggcgagaggggtggcgatttagtcagaggagtggaggagataagtccaagcactggggggtccacctgtcacacacacggtttagcgttcccagctaggtgacaggcgcgtgcggtaggagcaacgagcggtgggtgaagggaatgatagatggggcccacatgtaagtgccaggaataaagaaaaggggaagggaaggagatgggctgcgcaggagggaaaccgagttaggccagccagattcggcccagtcgagttcccaagcttttctctttttttgttttgttttctcccttttcagatttagatttcaagtttgaatctatttttgtgggaagttcaaactcaggttaattttctatatttacatgacaacataaactgaatttttgttcatttatattttta

SEQ ID NO: 180425 - DNA, 447 bp, Zea Mays
gtggtggtggatcagggaagtccttgtccaaagagtctgaggagtcatatgtagctccaaggagcttaagctgtcaaatctgcgcatccgcctcttgctctatagtcaagttcccttctaaaggtgtactgtctctgtgactgctagggcgtaacacatcctccagttgtggcttgtagactccaaaagataagtgtcttgacctaaaggtcacctaaaactttggcaattgaatcaacttcacaaacatatggcagagaaagtgggcatagagaagaaagtcaaccacaacaaacatagtgtgagataccaaggctccaagcaaccataactaaaggtaagtaagtgcctccttgtagcatatcttaggtagtagagtgcgccttgtcagggataagatccccggtcctagtcattcaccgattagcgaacgcatccagaaaaatc

SEQ ID NO: 180426 - DNA, 442 bp, Zea Mays
ccctgagttaagtaagcgtgagcatgtcacaccgccttaagccgttgccgacttaagccgattgctccgttagtagggtatagtggtcaccccgagttaagtaagcgtgagcatgtcacaccgtcttaagccgttgccgacttaagcagattgctccgttagtagggtatagtggtcaccccgagttaagtaatcgtgcagtttgacagtgaacaatttgagtgtctttgaagtctttttattgatgatatatttcccagtttacagaatacattgtcgtcccaatagcttttgagatatagctaggggtaaaacttcctgagatgttctatgttccatgagttcccaatttccgtgccgtccatttgagtgagatgatatgatccaggccgagtgacttctgctactatgaatggtccttcccatagtggtgatagtttgt

SEQ ID NO: 180427 - DNA, 717 bp, Zea Mays
ttcaaataatgctttggtttgcgtaaaaacccagttgctactagccatgctttctcatgacttcattgcttccatgtccatgaaaacagatttgtatccactgtaagataccatgaagtgtaaataattcaacacttctttccggtgagcaaggctatctctgcaatattgtatcactcaacaagatccaatttgagcatactcgtgctctgctatggccatagtcttttggatcacttggagcgcatatacaattgttgagatgtatgtgtcgacacttgtagctttcaaataacacaattctccagttgacatgaagtcattttcttatgcacccttatgattcatcgtgaaatcctaaaacgagaatcaagggcttccgataccctgcctcattattagtgtgcactgagctaggttgtgaatgtcttcaattcacaggataattcataacctctaggtgtccaccaacactaggttggttaccaacgaatagttggtatgcatttactatctcagaaggtcgaaccttcagcttcttgcaagcatcttaatcttagaatttgtgaccatacttctccccctcttatttacaacgtcgtttcaataggaagttgagtggcattccatttaaccactttttctagcacttccacaacgtattaatttgagtgacacctcatagtaaatgcacatggcagtcaatttgcaacttat

SEQ ID NO: 180428 - DNA, 336 bp, Zea Mays
aatgacatagttatgtaattgatctcacctcactgcgacttattttccccactggcgcagacgaactaggtgacgccagattggtaaacggtgatggcacaggctctagttgtagatcgggagagttgatacgagtgaggcagactgcagagatttcgtgtggatctaaatccatgaaaccgaactcagagaaagcctaagcgcaaatccggtcacagtcagaggaagaacacaagggagagagagagttgaattggtaagaagggcgaatagagctcaccgccgcgagatctccaagacacgagaactctcctagccgcacagccgcgaccacta

SEQ ID NO: 180429 - DNA, 710 bp, Zea Mays
accgaaccttaggtctatcttggagaaatacttggctccttgaagctgatcgaagaggtcgtcaatccgagggagtggatacttgttcttgatggtaacttcatttaacgagcggtaatcaatacacattctcatgcttccatccttcttagagacgaacaagactggtgctccccaaggcgatgagctaggacgaatgcaccccttttgctgaagatctgcgatttgaagcttcagttctgctaactcagttggagccatgcggtatggtctctttgcgataggtgccgttccagggatcagatctatgtagaactccacttctctttctggtggcattcttggtaattcttctggaaatacatccatgaatttttctactactgatatacttttcgttgccagattgaacatcattgggtcactggtgggtggctgtgcctgacaagagactgactttccctgccagtcggtgaggaggactgtcttgtctgcgcaactgatgatgcctttgtgtttagttagccaatccatccctaggatcacatcaattcctttggatggcaagacggttaagtctgccaggaatactaccccacttaaaaggattctgacttgggagcattttagctggcatagaaggtcggaccctggggttcgggtgaccaagggaatctctagaggagtagagggaatgccatacttttcca

SEQ ID NO: 180430 - DNA, 779 bp, Zea Mays
taagcgtgagcatgttgcaccgtcttaagtcgttgccgacctaagccaattgctccgttagtagggtatagtggtcaccccgagttaggtaagcgtgagcatgttgcaccgtcttaagtcgttgccgacttaagccgattgctccattagcagggtatagtggtcaccccgagctagtcgagtacacagattgatagttaaacaattcgagtgcctttgaagtctttttattgatgatacatttctcagcttacagagttcattgtcatcccggcagcctttgagatatagctaggggtaaaatttcctgaggtgttctatgttccatgagttcccaatttccgtgtcgtccatctgagtgagacgatatgatcccggccgagtgacttctgctactatgaatggtctttcccatagatgtgacaatttgtgtcgtccctcccccgttaaaattcggtggaggacgagatctcccactgcgaaggatcgatgtcgtatggccttatcatgatagcgcctcagagtttgctgatatcgtgctgattgaatcactgtattcagtcgctcttcttcgagtacatcaacatcctccagcctaatagcttcagcttctgttatgttttcaaagattaacctcggtgccccaaacttgagatcagcaggtagcactgcctctgaaccatagaccatgaagaaaggtgtgtttccatgcagagctcgactaggttgagttctcaggctccaaacaacatatggcagctctctgatccactttcctg

SEQ ID NO: 180431 - DNA, 570 bp, Zea Mays
attttgaatccagcaaaattggtttggttaaatttggttgaatataactcaagatataaattctctaagttttctactgaatttaaaaaggttaaatagaaatggataaaggaaaaacatttttgcgctggggtccttggcgaaagttcttaattgaattacagacaggtcctcggtgcactattcacatgagtctacagctctgcagaaaaccccctagggtttctggaaatcgaacctgcggtccttccctaatggaacagtggtcgtggaggaagaaaggggtggaggggcttaccgacggcgagactgctttggtgaggtggtcaagggtgtaggggaggttatgagggtcacgacgatgtgcgggtcgccatcggggatggtcggagttggccggtccatgtgcgcaggcgggggagctcgtcggtggcgaggagtccggcctaaccagggcacgattggtcaatcaaatgggtcagtgagcttcaccagagatcaaggaaggcgtgtgtgcaaggaatcagagaatgactcatcggattgctcggtctacgcgcgcaggcgggc

SEQ ID NO: 180432 - DNA, 350 bp, Zea Mays
atttcccctcaactaatttcaaggtcctagcccccaatctctctgcccacggtggccgtgcgatcaacggacaactcaaagtgttctcgtcgatctactctggtttagtgcaattggctgggctgatgagcttcaagagcacacaagaatgcaagaacaagagtgaggagaacatgatcggacctgtggagcgctgaccgcgacgagctcacacatgcggtgttcttgaccgatttgggggaaatcccaaattggagctctctggtgaacaatccgagacacgagtgggtgcgctggatgcttgaatacctagcggagctgatggcacactcaatttataggatccgggg

SEQ ID NO: 180433 - DNA, 776 bp, Zea Mays
cagagtctagaaaaactttggacatttagagatctgatagtattcgcccgaagcgtccttgctgaaccaatcatccaacttctcctgctgaggggaagaaaaagaaaaagagacgtcttcggcgagtgtcatgcttgaatcaggatgccggcccttctgctcctgctgccggggaagtgccagtgccaatttttactgaagctgaacccaatgggtgtgacccgactgatgctgaccccaatgggtgtggccttgatgatgctgaccccaatgggtgtaatctggtcagagctgatcccaatgggtgtactatctgtattattgatgaggatgaggaagaggaggaggaaatccccttaattcggaagaacagtcggcgctatatagccagtggggagagtagtggtgttccttctccagctttgtctgctctcgttggtctgcaagaattgtctttggcaaattttgatcaaactctcgaagatatggtccctgaagacctgttgtcagagccggcatatggtggaatgatggaaatttgtgctgacgtgcctgctgtcgaggtagagttatcccgagcagtgtctcgtgcctcatcgaccttggagcgcggttttaagagtcaggaggctgatttggattgcttcgttcccatggaagtggttgaaaatccttcagccttagaggtggctgctacagagaactcggtccccaaggatggcgcttgcgtttacccagcccccgagggtgttaccggtgatgatccgactcgggtg

SEQ ID NO: 180434 - DNA, 462 bp, Zea Mays
cgctagaatccacgaattttgaattcgccccaaatcagtctccgccgccgtgaagaacagctcgctgcggccagctcgattccggttagctcgcgtccctctgttgcttgttctagcatccgtaggcaccccgcgaacccctcgacccgttcaattgaactggaccaccacccatcgccgggaacatcttcatccatccgcaaccttcacagtcaccatggccagcacaaccctattgatcattagtgaaattaagttgggggaaaggtttgggatgagtccaattctgtgttcgtcgctcgggaaccctagtagttgcccaatccggccggtccaggagctcgccggacttcggccgcgctcgacgccgtcgtggactcagcacagtgaaggattagaacctggaggggttttctgtagtatgtcagcgactcagtgtaatagtgatagaacccagttatg

SEQ ID NO: 180435 - DNA, 539 bp, Zea Mays
ccaaaatcctccaagggtggacttggaggacgcttgctctttccatcagcgcggcgaggccatcccttgcccatcttgcccctgcccatggtcgtgcaagaagtggagaagtggcaaagaagaagagagcaaatgatcaggggcgagtgaaggaaacagtcagggcaagcgggctatttaaagaggttgaggggtgaccgtccactttctaccccgctcaccgaacatttgcaagatttcaataagcaattcaagccacctaaaaatgagccaggcggacccaagtcatctgctcaggcaaatgattacacccctccgtcacatcaaattactacttcaggacaacatgataaacactctacgcagggcagacaccccttgggcacacccattaggtgtatagcccgaaaatttcaagattttctgatgaggtgatacccataaaatatacgcaatgaatgtaccgcgacaaaaagaggagatcggctgaaacaggaggaagccccaatgtggttactgaagcgcaagtccaatcaacc

SEQ ID NO: 180436 - DNA, 393 bp, Zea Mays
ggtaaccggcggagttaagcacttcccacaagatggaaggaaagccatcgcgagaaaggaaatcagaactgaaacgagagtctcctccactggcgggggtgggtgaattcatctgcggaagggaatcaaagataaagattatggtggaaggaaaacgaaaaagagagcccggatggttctaaagaaacgaggttagctcaaattttaattcctcttggtgttttataatgcatgcatgctggaagaaacgttacctctcaagagaaagatagggtgcctttttagggcataaaaaaatataagtattggcccacggggcctaattaattagccacctatccctccctctatgcctaaggcctttcgtcctaggtctagcggtctagtcctgac

SEQ ID NO: 180437 - DNA, 721 bp, Zea Mays
gttctcgatgctttatcgtggtagtattcaatcggttggaccgacgagctatgttaaccttcaaggatgctaaaacatgacacagaggggaatgaacggacctaggaatggttgatcacggccgggtgccacacggcggcgtaaatgaccaatttggaggaaaaccggaatttgtgagctttggtggataattggaagtgaggaagggtgcgttgggcgtgtaacaagagggcggagcagggagggccttcaatttatagtaactacgtgaggtaagacccctagtggtaaacgggcatccacagtgacatattgcgatgtggtaatgtccctaagcacgtggcatccttgtggcgagcggtggacgccgatgatgacatctcggccaggcatgaagcaagtgggtatggtggccagctcacaatcttatccgcattcacgatcttttcacatgcccggtaatatccgcgtcgatctgtgcacaaatcttcacgacgagctcgaatcaccgcgctcgatcactagcggcgaggtacactacaccaaggatcttcttcagtgcactgtaccatggcgatgttcattcagcgtgcctgacaaagcgatatgaggagttcctttctcaaatttttatgtgccaacttgtttatccgactacatcaaagttgttgtccatcatgccagcttaaattttgttataaggttcttgctcatacctcca

SEQ ID NO: 180438 - DNA, 439 bp, Zea Mays
cgggagaaagctgcaggaaaccgccaccgtcattgtcctcccatgccgccaatctttgaccgaggggtgtccgggggtattcgcagggtcgcactgtgggaattcgtagcctcgcagcgcggggatcttcaccgggagccctagaattcctcaccgtacttcgtcgccgccacaaagtccgcgctgcaccgaggaccgacttcaccacgtggtctacgtcggtaataacccctccctgttgttcgccttgtcttacgcttcatctagccccgattgagagaagtctagagcaccagagtgaccagaggggtctacgccggtgatgcgcctccatgggggtcgccggcgccaccgtgtctgggcgcgggattggggaagacacacggggaccgttggatggcacatcagtggatgaagttagatctgtaggtataacctt

SEQ ID NO: 180439 - DNA, 281 bp, Zea Mays
ctgcgcgcttgtcttgagggtgatgcggtggtcatgcgcatgcttggggggcatccccggagagcgaggcaaagatgtccccaaaggagtccaggagctcatcgaggaggggctctatcgctgtcgtggcgtccagggtcggcgcgttggcggacgccacgcccgaccagcagatggtgcgcctttggtgctggaatgtcatccggtgctaggcgaggtcccaaacattggggcccaaggcgtcgagccaccgggtgccgaggaccacatcatatcccgcc

SEQ ID NO: 180440 - DNA, 1231 bp, Zea Mays
agggcaaatggcacacatgctgcagcaggagaccaaactggtgcatccagccaaatgccctggactggactggaggtgcagtattctgggggagccacgaaaactgcgctgccgagggaaaaaaggttcgtagtacaagaactgcacagcacactagcacagggagatcctcagatccggggatggcgcaatcaattactggcagtggcaacgccattaattgtttgtttactagtcatgggttaattggcatctgataatgatttattatatctatgaatgtgttatgtgtagggaagcattttctttattttccttgagccttcagtttcagtggcacgtacagacagtacatgtaaaatcgcttgcagtcgcagcaagaaatggtctgtcgactgtctctccaaagtttggcttctgaaactgaaagccattcaggtgcgccgttcctgcctctgtgttgtgttttagtactagcgtagaatttaagcgaccgttcctgtcactgctgggttgttgttgttgacaggcacatcctttttttctctcctctcgcagtcaactttatgactgactgttcatgtttgctttttctgacgtcgatgattgaacactaatttttttaaaaaaaaaaatctatcctagctagcatgctttaggccggttcatgcagtagttcgtccataccatgtctgtgttcacctggagatttaagaccactaatatgttattttttcttcttctgttcttctggcttgggaggacacattcagcctttgggccatgtctgtcttcacagctcggccgacactactagctaggcccaagaacttgttgggccagaatcactgtttctatcttctaatcttaatacatcacacctgtattggtcttattagcctgcccagctcaccctctgcatccttttcccttccttcttctgtttcttttttttttctttttttcttttttttgtgaaacaactcttcatagtctcgtttcttacggaaagtgaaatgcatccgttttccttgatatacatgtacttatgtagtaggctattgcattgcatacatgtatgtagtacagctagtgagcaccatgaataatggatggaggaatcaagcatgcaggtgcagcacgtcagctcagctagtgctagtgctctgaattattattactgacgcccgcaaacaaagaagcaagcgacgcaatccaatccagaatcaac

SEQ ID NO: 180441 - DNA, 385 bp, Zea Mays
gatcgggacgcttcactgtccatcccacaggcggcatgcctgttcgttccgctggcagactgcacgcccatactgccacgtgcacaacgcccatcattactcgaacgttaccaaggaagctgccgccgcatgtcaacactacgcgtgctgcggacaacatgggcctagagattgcacagacgtcacctgcattagttgctctaggtattccttccattatgttcctgggcccacatgtcggggctcagcatccttgtatgtgcctcccttgagctataaaagggaaggcacacgacgttacaaggcaagtcactcagactcacttagaccctcgggaagttctccaagctctcgagcatcagcaataccacacacagtgaagtag

SEQ ID NO: 180442 - DNA, 2533 bp, Zea Mays
tatagttcaggtatacctacaggcagtggcgaaagagtacccatgggtaaggaatagttttgtttctttgtgaagcatatcattattacgatagttcttgatgcttttcccttcccgtagaacatgctaggtttaatacaccactagtttcagccacttaaaacatttaatacaggctgacccccccccccccccccccttcaagaaggcgacaaatagctgcttatctggcctgcagtatataacagttgtgcgcaaaaaaccaacaccacatatggatgaggagaatgttatattgaattcacaattttgagtaatgatggtgaattggaaatattcacggtctttatcctaaaagagcaggttattgaattcgaatttcctattctatgattttacaggatatttggtaactagtaccagtactaagaatcaagtacataggcttagcaataagaggagcccagacactagacgttttggtctactagacttcaccctaggtgttatgttgttatggtggtggctagtgttcagtgagtgcaagtaggccgcccgagggctttgcccatggccgaacaagagggaaggggttccttcttaaatcttaattcttggttggttagattgatacatctcctctctttatatagaaaggtttacttgaaccctaagcaagcgatctttatctcttacttgacccctaagtaagtgattcttatcctaaccaaattaatctaacttatctctattctaacaaactaaactaatctaatatgtctggcaatgcacttgccataacactactccaccttccacgactgctcgtccttggactgtgctggtggccatggttgcagatgtcgatgttcccctacagacgtgatgcttagaagggcaccatctgatcgagttgcatgtgtacaaccaccgggatcccatggtgtagtctggtgtgtgatgatacctaggagtggtcacaacaacgataacggagatgccctcatagaggttcgtgatggaatgtggcggctctatgcagtgcgcgcctgcaaagaaccccatgctttctcaccgttggatgactgcttgtagtctatgcataactgccacaagttgtccggcttcttcacgagcatcaatatcaagcgatggccctagatggagaccatgagctacataatgtcctcgtttcgtatgctcgtaatggcgtgcaacgggatcaatggacgccaccatgtcctcgggcagagggtcgtccccgtcaaaggctgagaccttaaggcaaaagaggcaggtgcagcggcggccgcgcacatatggctcatcacaattgtagcacatgccttgtttccggtgcttcgtcatctccgtcggcatcagacgctagaatgggtgtggcagtgtaggcgagcctccatgcccgcggacggctgcagcgtcggcgtggcagccacctgaccctgagaatgtggcaaacgaatggagtagaaaggtgctcgttgccaaggtgatggaatctagcgcctgggaacgacgttggtaggcgtgcgccaaactgagtgccatgttgatgtcaaggggttggaggagctcgatgtcgatccgaatgcgatcgggtagtactgtcgtgaagagttgcacctgttgggctggggcgagccgcgagcggctccatgtggcatcgaaggctctagaaacgctcttggtagtcgtcgaccgtggtgcggaattgtaggcgggtgagctcgcccaacgggttatggcggaggggcgggccgaagcgttgctgacacaacatcttgaagcgttcccatgacaggatgtcgtcgtcacacgccaacaacacgttccactgttgtgccaatccggtgaggcggtaggaggtgagccacaccttgtcaacctccaaggcgcgctgaccatagaagaagtgctgacatcgtgtgcgccagacgagaggatcgtccttgccattcgggaactcaagcctgtggaagcgggaccggattgttatggttgttatgatggtggctagtgttgagggagcgtaaggaggccggccaggtatcttgcccacggcggagcaagaggaaagggtttttcttcttaattctttcttgctcaattggattgataatctcttctccttatatagagaggtttacttgacccctaagcaaccgatccttatcctaaccaaatcaatctaatttatatcttttctaataaaccaaactaatctaatatgtctgacactctactcgccataacctggagccaacaatgtggatttttcatgtggtggcagcaagttaggagtactcacaggttagcaaccagaggagcctagatgcttggtgagggcttaatagttaatactctggttgttttgggtgcctggacactatggaagacaagaaatgatgtgatattcaatggcgttgcagccggagtagatcgggccatacttcttgcaaaggagtaggttaacctctggatgttggcaggtgcaaaagggatttgtgccctg

SEQ ID NO: 180443 - DNA, 487 bp, Zea Mays
gtttaaaaaattaacaacactggatcctaacaaaccaatactaaaagatgggaattgcaaggaagtgctaagaattaatagaatcttcaatagtttccaaaagctacttctaattctagttttttggcaagattttaaatactctccaacaagtcataatccatctgcactcgaaaaactgattgaattgtcacaaatatatatatgcttgtatcaattgacaaatctggaggtggaagaacatggcaaagggtaagagaaagaatagagttctcaatgtcaagtaaaaagtctacgttcaccccctcacatataaaaccatctaaataaccccttaaactattgaaaaccacacaaataacctcatgaggtggttttgaaaatggttttactgatgtgtcatcttgaaaagtttatataaccccaacatattagggtctatataacccctgcactccccctccccaaatgtgaggctacttcgaac

SEQ ID NO: 180444 - DNA, 732 bp, Zea Mays
gttgaggcatctttaggcttgatgtttgtagcacttgaaggtaacatgcctgttgatacatatcctgtgctgttgcagcatatttgatcattgctaaatgttaaattttaccattttgtgatttttttatttagcatgcgtcaaatctgtgtttaattcgaacaaagaaggattatatgtgttgggaattgtatgactgggatgtttaattttttttggagagagcatagtgatatgttttatgtttaaacttgtggagcaatcacagggttgcaatccctgcgttaaccgaacagatggtttcaaagagagggattagagagggagaggggtcactaaaccgtaaacccccaaaggattgaatgccgtaggaacgatccagtcaatccctctctggataggatatatatacttgggggattacccctatcaaccgtgcaaatcctgaggtgacttgtacgagtggaattcctgctgtgcctgccatttgttagtatcccagatgcttcgggttaagttttggctatccattgcatcatcagcacgtctctactctctagaatgatgagttgaatggtagtcctaaatttgtttgccatcccaggaataaataattgaaggcaggtatcgaaggaccttctgttctgtctcgcaacatcaagtaaatcgaggagaagctccaaagaaccttgcatcctgattagtgttagcacagctgagacagtttgaaca

SEQ ID NO: 180445 - DNA, 288 bp, Zea Mays
tttgtgtttataatgcatgcatgctggaagtaacgttgcctctccaaaaatagggtgctttttagggcatccttagaaatataagtactggcccacggggcctaattaattagccacctatttctccctctatgcctaaggcctttcttcctaggtctagtggtctagtcctgacgattcgtagcagtttctaggcaagttttagattttgaaaagtggtattcagggtttactgtccttctctatggtggaattttctccgataccagctgtggcggaaccgcccga

SEQ ID NO: 180446 - DNA, 401 bp, Zea Mays
tcgggggcgctgtaggcagtgcgcctgcaactcattggggaagacgaggtgttaactgtggattccgtgatcggtggctgaggttgagcgcgcgcgctatgtgagtgggatttaatcttggcccctcgcgcatgatcggacgacatctgatggagcagtggttataaaatcggggttgtcaactcgactccaacggttctgctgcgtaccagttcgcatgggagtagaacctaattggagccgttcgctccagatcggacggctgagatcctggcgtaccccttcggcctcggcaattttattaaagaacccctctgctattttagattcaacccgcaatccacatgactgttcactgagtcttaagaatacttgcgcaaaggcccctgcaattctctgtt

SEQ ID NO: 180447 - DNA, 485 bp, Zea Mays
ttagaagaaaattttcctgaagcctcatgtttccaaatatgaatgtcatcatcttgagatagggctgtgccttcgattaaattccacaactgaaagaattgttggatacctgtcaaggacaggggtgccttgatatctctaacccaaggtctgctgtccaaagcttgctccaccgtttggaatttcagagctttttcgtccactttggccaccatatgagggaccagatcagagatagaggcacccataagctacctatcagccagaaaagggcaatcttgccattacccacatgagtttcaactgcagttgcgaagaaatctctgaccagagcctgaacagggaagtccagaccaggccaaggccaagaggaatcagtttttggaaccgaagccatctagcatgtaaagcccatcccatcagttgcaggtttgggattccaagccctccaaggttcaatggcctggttattttctcccaagaca

SEQ ID NO: 180448 - DNA, 964 bp, Zea Mays
cagagggaaaggagcccgcgcgcgcgcgcgctggcgactttgcacaggggtccctggggttttggctaactgaaaacgagttcctattactgtttcttgtgtcactgacagattgcagataagccctccaccttctatctcttcgcagaccaaagtccacgacggcgctcacacgcggagatactccagcgagcctctgtaccggtcgattggggcaacggcaaggttctccgagcaacagacatgaaattggggctaccttaatcatttccccccaacccaattgcatccaagaccaactaagaagctctggccacggtgaccgaggacaaggcggcaagatcgtcgtgttcccggcgatgggtggcggtctagttcaattgggcgggtctaagagctttaggagggcctagggatgctagaacaagcaacagagggacttggactgacctgagttgagctggccgcggcgagctgagttttgcggtggcggagagtcgacttgggggaaatgaacaattcgcggttgctggtggataattggaggcaagcgtgggtgcgttggcttcgtggtaacttggcgcaacagccccgaccatcaatttataggagggtaaagcggtggccagtgaatttggggaggacgcgcggcggccggaaatgaagaagaaggcgggcgcggtgaattcgtggctaacaccgtggcaacctcaccggcgttgataagacagtggtagggagtcacggtgacgcggtgtaaagatagagccacgcggcgcacggctgggaggcggcggtcaccggtgagcctatcgggttccatcgcgaagagctagtacggtggtcggatttgttttaccggccggacttatccacgacgacgtggcacgagcgcgaccagttcaactcgggcacaaatcacggcgacgacggcacgaatcacggtggagggagtcatcggcgg

SEQ ID NO: 180449 - DNA, 929 bp, Zea Mays
gcgcaacgtgcagatcggggaaagggctcaccttctgatggtggcttggcttggggacgatttgttggaagtcgacggtcggcagcagatccggtggtccgagcgtcaagggagttgcggcggttgtggtggaggtcctagggcagcactggcgaagctggagcaggggtggacgaagaggaggacgagctgtcctcggggcaggcgagcacgacgggcggggcaggacgacggtgtctccggggtgggggacgctcgacggctgtctcggggcttgggggcggacggcctcgcccggttgtggtggaggtcctagggcagcactggcgaggctggagcaggggtggacgaagaggaggacgagctgtcctcggggcaggcgagcacgacgggcggggcaggacgacggtgtctccggggtgggggacgctcgacggctgtctcgaggcttgggggcggacggcctcacccctacggatcagctcctcccccgttcaactacaggcgatagctccggtgacttcgctggtggccgccgcttcagggatcgccgcgaccgcgatgggcatgcgatcggatccatgaggggattgcatcgcggggcgtgatttgacggtgggatcacagtcagggggttacgacaggggcgggctttggccgggggtggggcgtcggggcggtttgttgctccgatgtgtagagaagcaaaggagtgcgcacacagagagggagcagggcggcagtcgcggcaacggggggttggtgttcacggctggagcgtctggtgggacgcgggtcgggcggtctcggcgggcactgagcgcggttgcctgggtggatgatggggtgggggcgcggctacgcagagcagaggggaagctgaggtgggaccgcatggcagactatgatgcggagcgaggagggggcat

SEQ ID NO: 180450 - DNA, 1215 bp, Zea Mays
aaatttggtttgaccccaatccttcatctcaaattccgtctttaaatgatgacgtgcttcatttatatctttttcgcttccaataatattgaggtcatcaacatatactgaaatgatacaaaatccagtggaggacttcttaatgaacacacatggacaatcatcattattagtgtatcctttaatagaaaggaaatcacttaagcgattgtaccacattcgccctgattgttttaagccatatagtgactttttcaactttacacaatacatgttacgatttgccgatggattcggtatatttattccatctggaactttcatataaatttctgaatctagtgacccatataaatatgcggttactacgtccatcaactgcaaagatagacgattttgtactgccagtgaaattaagtatcgaaatgttatgccactcattactagagagtatgtttcattataatcaatgtcgggcttttgcgtaaagccttgtgctactaaccttgctttatatctcaccacttcattgttttcgtttcgcttacgaacaaaaacccacttgtatcctactgggaaggtgcctttaggtgttaactttacttccgagaatacttctcttttataaagcgaggtaatctctttttcaatagcttctttccactgattccagtccgagcgttttctacactctaccatggatttaggatctagatcattaaggatgtcagcaacttgttcagagaaataagagtcgactacagtagccttgcggtcaaaggtttcgccagtttcaatataattggtagcaagttcatctacccttaaggacacatcaggatttctcgtatccatggtcctcgggttttccgatattacttctttgactatgcgcgcattcgaagagggttgtgtatcaattccacattgtgtttcatcaacttgatgttgatgtgcatttaccgtctttcttttctttaaaggaagtgaatccttattgattgccttacttctcccccttttattagtaggattttgagcggttttgtttggtacctccactctttcaggcgcgttcctagtaggaatgaaagactttattacacctttgtaattagtgaatgcatcaggcaggttatttgcaatattttgcaaaccaataattttctgaacttggagttcattttctttagtacggggatctgaggaggagat

SEQ ID NO: 180451 - DNA, 669 bp, Zea Mays
agaaaagtcaagtctcagcgaaagtcaaaagagactctgcaatccagcaggacatggatcaggcctccacagcaggactcggtccagcaagagcgtggtcaactctagatgcataacatcacaagccagcagcaaccaggagagaacccccctcatcgttagggatacccccgcaacaaggctgtggtggcaatgcgacttggtgcagaggcagaggccgaggccctcaccagccaataaaattctactgtgtcttacatggaaaagactcaatgcacccaaccaaggattgccctgagaccaaggcgacaaaggaccgaatggctagggctgccccggtagacaaccaaagggtcatcgcccatacctatcaaccgcaacagtaccaccagcatcaataccaaaacgagcacccatactaccccagtagataaaccccaatctctttccacagcaacaacgccttcaacaccaagacaggttagccctgccaccaccaccacaacaacatccaaatcaacacctaccacccccaccaccaaagaaagaagacttcgccaatccacccttctggggagtgattcacatgatcaccggagagtccagcttggatttcaagaaaaaacgacataaagggatcactaccaaagggtcaaccatgtcgtcgtc

SEQ ID NO: 180452 - DNA, 983 bp, Zea Mays
gtgtgcacaggcccacgtaggctgtttgaaagtaggccttgtgggctggatctgtggaccatttattgtcaacattaacacaaccacttctgataccattgagaagaaagagagagagagaaggcatgagtttcacagatagctaaattataactgagttcttaacttgcttttttgttgtttgaaacatcaaccgaccaccactagaggtaatagctacactaatgagatagttttccaaaccagattattcaccacttcgctcagatttaactgccaacaggaaacaaaaaaaaaggttccaaaatccaaaccacagaggatctgcaatgggagatgtgtatgtgcctggtattttggggggttgcaagatagcagaaagcgctatacatcagacagtagtgagacgttgcaaggacagtgagatatcgaaaggatttttggggattagaaatgttgctagacatcgacaaggaatcagtcactccctgctaaaggattggcacttcttgcaagaatctgtttttttttaaatgaccatttcgcacgacttcatggtaagagccataagaagtcagagtcgaggggccctaaattttaggtccaatgttaggaaggaattccttctggcaaaattcatggcaagctcatagaaagtagcccagcaacaaacccaactactcctacgacgacatgtataccgaacccccatgagcaaccctactctccccggccctttcatgttaggtgactgaccaaccggatgggaagatcgacatctatttgctagctagcttgtcctcccatgattgctcctccagtactcctgtcctggataagcaccccacccacaagcaccggaagaatgttcatctcacttgacttcagatcacggttcagttggtcttattgcactgcacgtcagttacctgcaaacttttatgtcacatctagcattactacaaagcctgcgaggtctcaag

SEQ ID NO: 180453 - DNA, 463 bp, Zea Mays
ggtcgccctaagatgagtaattgccaacgtgcttatgttggaataagtaagtgcgaatgtaccgtgccaatttaagtcattactaacttaaactgaccgttctgttggtagggtatagtgatcaccccgagttaagtaagcgtgagcatgtaacaccaccttaagtcattgcggacttaattcgattgctccgttagtagggtatagtggtcaccccgagttaagtaagcgtgagcatgtcgcaccgccttaagtcattgccgacttaagctgattgctccgttagtagggtatagtggtcaccccgagttaagtaagcatgagcatgtcgcaccgccttaaatcattgccgacttaagccgattgctccgttagtagggtatagtggtcaccccgagttaagtaagcgtgagcatgtcgcaccgccttaagtcattgccgacttaagctgattgctccgtta

SEQ ID NO: 180454 - DNA, 432 bp, Zea Mays
aaatatatttaagctttcacaatcattcaccccctctgattgcctattctagcatcatatgatcctacacggagacacaacgacggtggtggaacggcttcgcggcggcgagaggttgtgggcatgtggagtaggggaaacgagcaggggagtgatgcgaatgagggagtgggggtgtgcatggagtctgggggtctccgatttgaagctcggacaacacgtgagcgtggacgacagttgctagcgtggggcacgcagtgagcgtagatcggggtgacggttggggaagtgggggctgacgggtgggcctgggtgtcatcgacgaaaacagagcgggctctcgtgcatcggtgctgataggcgaggcccgattaggagtgagggaggctagcgaggcacatgcgcgggtggggtgagatgggtcgagtgggc

SEQ ID NO: 180455 - DNA, 926 bp, Zea Mays
caaagaagctacaaggtggcaacacatttattgttactattcctttctttgctaacttgttgacttctattgtttctatcttgtgttggatctttttgctcacttcattgcttctttaggtagtcaaactatcagaattggatgtgcacacttgttccagtacaagcaagaagaagggacgagaggcttccactacttggatatctcaaaaagttaaggattgtaaaagaggatcctactttgggcgcaaagaagttacaaaaaagattggagagacactacaacattcaattgttactttaaagtttggtctagaaggaagtctacgatggaagatattcatgggatttgggaggagagcttcgaaatgctatggagattcaaagcagcactagaaaattcatgcctaggaagcattgttgagattgattgcgagaagattgatgggcaaatgcatttctttaggatgtttgtggcaattagagcatgcgttgatggatttctaactaggtgcaggccttatcttggggttgattctactcgcttaactgggaaatataaagggtagttagccacacaactacaattgatgggcacaattggatgtatccagttgcatatgggatatttggcaaggagaaaaattccaattgggcatggtttatggcacaactaaaaagagcaattaggaattcccctggattagcaatacacactgacgcttgtaaaggattagcctatgctgtgaacaaggttttcaaaggtgatgtggaacaccgtgagtgttttaggcacataatggctaattttaggaaaaaattcaagggttttgtgctgaagtatatgtggccttgttcatgggcatgtacagatcataggtatgatacactaatggagaaaattgtagcatctagtcctaaagcaat

SEQ ID NO: 180456 - DNA, 449 bp, Zea Mays
gagagcttgtatgaacttgtgagcgtctaagtgtttctaccttgtaacgttgcgtgcctccccttttatagctcatggggggcacgtacaagggtgctaagccccgacatgcgggcccaggaacataacggatgtaatacttggagcaactaatgctagtcgccagtgcaatctccttttgccctgatatccgcggtctgcgtagcattggcgtgcaccggaagcttctctggcaacgtacgagtgatgatgagcacagtgcactccgcagcacgggcgtactgcctgccaacggaatggacaggcacgccgcctacgggacggcctggtcgccgcttgccagcggagtggagaaggcacattaaatgccgaggcggcacatccgtcaggctccacccgccggcttacgtcacgcgcagtaggccacatggcagcatcgggtctccacc

SEQ ID NO: 180457 - DNA, 761 bp, Zea Mays
atgaaaaaccacttaataccaattgaaggctaaatgaaaggttgactaaatacaacaatgcatgcctcagtggcacctaagccaattgaatactcacaggaagtataacatttacacgcaacttagacatgcttcataattagctatcattgcatcacatatactaattgaaaaacaacacgatcatgtctaagcccatcatagttaagaaggttctttaggtacaccaaaagaaacaacattttaaggcataagtcttctaaaacacgatgctaccaatgaaatgcaagaacacagctatgatcactatcaatggaacttcaagataaaattgcacagttccattttccatacctttgcctttttgagagtatttgttatcaccaattcagggctccttacgcatctcatagctcaaaagggcacgacatggatttgaaattctcacaataccaaaccagggtaatcatgtgaacatggactaaacaaaatgtcatgtttgcacatagtatgacttacacacagttacccgttttatccatatacaccaagagggttaatcgctgtggatataacgaatgaaagagctacccatgaatgattcaaaagatatatcctttagtgcactagtcatgattaaacaaacatcattatgattcatttagcacaggcaatcataaagcgtcactactccaaagacaggtagcacgacaagctaacttaagagcaacactaaattgcagttatgtacttaaaataca

SEQ ID NO: 180458 - DNA, 510 bp, Zea Mays
gtccgcgcacggagccagatggtccgcgtatttaaccagacggtccggcacagagttttttgaggaggatggatacccaattccgcatccgtcccagctagacttcccatctcaccatacgacacaccagcaccataatataatctaccaaacccgtgagagtgagtactttccggcccctagaaggccagaaaggaatggccagtcctatgagcctcatagggcatgtattaacgcgccgctaaacccaaaccaatggggaggaaaacaacataccaacatccaaacaaactcacccatgttggaccaaagagtcggtggtctcccaccggctgccatcgatatagtaagagaggaaatagctagggcgttctgagataagctcggagttagtatagtccccggggggtagtcatatcagagaccttataatagccagtttgaccgtctcccatacccacaggggaccagaatacccgaattcgcaaagttttcgggtgaccaaggaaa

SEQ ID NO: 180459 - DNA, 851 bp, Zea Mays
aaggttcacgagttcaccagaggttagttacacactttgatttgggcaaaataagaatcaaagagtgggtcgacagagggggatgtcacgacggcgttctacagagcgggggcgtgttccggggaaatgcttcagccaaacttcaattggtcgatactgagagcaataggaggctacaaacgatctagaacagggagtaattgggaagttactaacccgaagagcactgaccacggtggagtccttcacggcggagttaagaacatggaggagggatttgtggacagcgtgagttctttggtgagaatcgagtcgattgctcagacgctgaggtgcgggatgtgttgaagaagtagaatccgagctcaatttataggccgatggccggagttggatgaggattgcggattctaggtcgcgctggcgagcttaccgcgcgggcgagccacggcgatggtccggcgaccaccgtttaaccgggcagcgccacctcagtgattcaccgccacgtcgccgagaatctttaccgtggccgccgccgacccatcccgaccgccgtggcattcttatcgccggcgaggtcctgatccttatcctcctggcactgtaccatcgctatgcctattcagtggttccgacagagcaacttcagggcaaattctctctagatttcgcatgacaactttatcatccctctgcatcaaagttgtagagatacaaaccagctataatcttgccatagcagcagtagccaaattcctattaaatcaagcctgaattcatgcccaaagtctctgtggttgcactgtcagtctgaaattcagactttaacagcctgacagccagacttt

SEQ ID NO: 180460 - DNA, 484 bp, Zea Mays
caaatttgctgcctcgcacgtgtggagcaggcgcgtgcactgtcgttgacggataggagagagatttggagtagaaaaagtacagactctgaaaatgccgtttccagtgctctctccaagtttacagctgccggtgaagtagcttgctgcagcaaatttttactgtataccgaactctatatcgatagagtaggggatacagctagtcactgcggacagccttagtggttagctacaagactgcttgagactacacatgtccaaatgaaccggaccggtagtgagcccatgactcggtacgagcatggccccatccgattagaagtgtgcacgggccgcctcggccgggtagtcgtgtcaggcttgggtcagtcgtatggcccacggtacaggcatgggtctgacccgattaaagggtaggcacgataacagactggttttgtaacggacggtctcttttagctgcaataatgataattttgtt

SEQ ID NO: 180461 - DNA, 714 bp, Zea Mays
gtttggtttgattctagatataaccgagtggctccaaaaatagaatattcttccaatacgaaggatctctgggctccaaaaaaacacccgaactcatccgctcgggagcacatcgcgtctccattcctctcccagggcaggtacgctcctcccgtcgctcgttcctccccaatcttttctgccgccgcatatgcctccagccaccatatgagatgcggccaccgtgtgcccctagtctccagccgcatctcctctagccgcatctaccgccgcatctcgtttccctgtgcccatacactaccttgcttcttctggatctgccgaggcatatgagatgcggccagagcagccaccatcagatctgcagagcagccatggccgccgagtagtccacgaacaacaacgatttttggattttttttttccattgccgagcagccaccattagatccattgtccttttgtgatttgcttttttgtccttttgtgatttgagaacaccacaagtccattctacgattagcattatttctgcgattgagaacaccgtcagatctctgcggagcacgccatctaatgctttcatttttttacaggtgcaaggattgcaagtattcagagaacaaaaaagacttcagagcttaaggtattataatattttttattttctcatttaagcagtgaaattaagcatgcatgtgtggtttcaattgg

SEQ ID NO: 180462 - DNA, 298 bp, Zea Mays
ggaggtgtaggcgcatcaggtcgaggacgaggagtcagtgcaaacgcaggcagggagtcggagctagggctggtgctggtgctgactcggacgctggctgcggtagaggctggggctagttgaaagttgcctagagggggtggataggcaagcataaacttttcaacaaaaactagagacgaactgggtaaaaccggttcagtcggtttgcacgagctccactaaagaatgagatataaactgaattgatctcgaaattcacccagttaactttggaaatgagatgttctagtttatc

SEQ ID NO: 180463 - DNA, 632 bp, Zea Mays
ctgaggctgagctgaatccggagtcgccagaatttactcctccatttactccctccacctctcccaaatttatggcctccttcctcagctagcctcctcgccccctttcccccggcctccccttcgtcactttccactatccaaagcttcttcgctcctgcttcccttttcacaccaagcaggacctgccggtgccaaacgcacgccgcatcacacagaagccaacaaggttgagaagagactgaggaggtcagccagccacttgcccacctccgagctgtcccccatgacaccaccgccaccagcaacccaagtaccaaacgactgggccgcagtcccgcaatagcgtcaagatctcccctttgacctcccccttcgccttccggccatggtctgctgccatggcggccggcgccgcagcgccgcgctcctattcttggccgtggccgtggtcgcctgcgctgctgctgcggcggcgcaggagcccaacaccgacgcctacttcgtctctgggtttttctccaagctgggccgcgccgcgccgtcctcgtccggcgccaacggggtgtgctcctggtccggcgtgtcttgcgacggcgcggggcgggtcgtggcgttcgtggccgccggga

SEQ ID NO: 180464 - DNA, 669 bp, Zea Mays
caaaattttacaagctcaatgttgaaaacgagaatatgaatttacatagtagattttatatcatatttactcacaatcaagaaaagagaccaaaaattgatttccgaataagtattcgttttcatccctaaactacattgatgcagtgacaagtactgcaaagagaattgtagataggaaaacccttgggctctctagtgtgcatgtagccactgattggattcgaagccgagtcccccattgaaagagaaaaccaactattcttgggagtaccgcgggctggctaatccttaggtctagtgacgcagacatcccagaggccatggtgaaggcatacttgaagcagatctttcgtaacattggagattatcctgatagatgctttgttaaagcctattctcatcatacccccatccaaaggcatgcatataatctctattgttggattgccatttgcattatgcaactatatgatcctcaggactctgagagatatcagtcgtgctcacgattacgagcagctcaaaccctcacaaattagagttttgaaacggttttatacgataagataaaaggttatataattgttattgtttgatattaagaaattattgtgtttttcatatatctactatataatgaagctatacatatgatttcgatcctggc

SEQ ID NO: 180465 - DNA, 1371 bp, Zea Mays
ctattacagagacctcttagattcctccaccaatcatacaacgactctgatgtctggtttcctcccaggaaagaacagttcccccatatcaatattttgttccacacctctctactgaaagggcaatctttgcataaatgggttaccgtctctagtgctgagttacaaagacaacaaactgggttgcactgccaatgtcttttctgaaggttgtcagcagtcagcactttattatgcaaaagagtccacgcaaaaaaaacgacatttaggttcagtttttgctttccaaatggggtcaattttcattgtgcaataatttgctgcaaattggatcttataagcgctgcttgcactatagtcaccatcttccatccatctccaagaaatggagtcttctagatcattgagctcgtgtgtactattgatggcctgccaaaggccgagcaattccttgaattcttctgcaccatcgtagggagagcgtaactggatccaacggttgtttctcagggcctggaaagtcgaaatgttcttccttttttctttgttgaaaagacttggtgcaatgtttttttgtgcttgaccatggatccaactagatttccagaatacagcagtttttcattacccaccttcacacaagtggaagcgttgaaaagatcttcatctgattcatcacatggcagctgcaaattcacccatgctttgtctttggccttccatcgaaaccatagccatcttagtcttaaagccctcgcaaaacgattcaggtctagaatgcccaatccccctttgcactttggcaagcaagtagtagaccagttgatcaaacagtgacccccgttgcatgattcaggattacttcctttctagaggaaacttcttcttatcttatcaatttttttcaatagccatttttgagccgggaagaccgtcagatgataaataggttgcgcggataacacagatttaactaatgtctctctacctgcctttgagggaagccttcctttccatcttgtgagtcttttattgattttatcaactaaaggttgtagctcaattcttttagcggttctaaagtgaaggggagacccaggtatttcccgggtaacttagcgactttactgggggaagacttctacaagatttggccacaactcctccgggtaacggatcgaaaaaatttctgttttatcgaagtttatcttcagccctgaacacccttcgaaagtctctagaatcgattttagaactttgagatctgctttatccgctctaataaacacccctgcatcgtctgcgtatagggaacatcgaagctttgcccctcttggcaggacccgccccagtaacccagcctcagctgcc

SEQ ID NO: 180466 - DNA, 544 bp, Zea Mays
caggtggtgaacttcggtgagtggaggtggacggcctagttgcgtgcgcagggcaagagaggggcgagagagctcggctggaggcacaaatgaacggaggaaagagggcgagcagtgtgcgggcttctaaaggggcacaggtgtgagaacgtggccggagaacgcgcggtcgtgggatcgtccacggcgggggggcatgggtgagaggttagggacggctgaggggcctgacaggtgggatccacggggcagcgagaggaaattcgtgaatggtcggtcaacactaacggaaagggcccaccacgtagtgggagagaaggggcgcgagtgcaagagaatcggcgccgacaggactggcccaccgggcagcgggagggagagaggggagagagcgtgcgggcgaaacaggctgacaggcggggaccgctgtcagcgcgggcaggcgctcgggcgcgcgagtggggtttgggccggcctgggctagctgggacgaattgagtttttctttttttagggaatttctaatgccttttctatttatttt

SEQ ID NO: 180467 - DNA, 1098 bp, Zea Mays
ctccctggtacagccctgcagtgtgtgttcaggtggcggtggaagaggaagtgctgctgcagggggagggtgctgctgctacgactagtggaggtggtggtgctacagaggttgaaggtactactgattgagagaagggaaggaagcttggttcgtcttagtgtttgcaaacattgatgatgatgagtttagaggagactagagcaaaaaggttggaggaagaggctggaaaaagagcaatgattcgtggtgataagaaagaagaggatccactaatcacaaaaagtgagatgagaaatgagatgaggagtctgattcaggaactcatggggctaggtatgattggtcccaagactttgcctatctcatctgaaataaagttggaactcgttccaaatgatgtgaagctagaagggagcaagaattacttgagttggtctaggagagtgcgagtgctcttaggagataaaggagtggagcactatttggaagagggttgtgttgaacatgttgataggctcagccctgaatggagggtttggtataccaccaactcggttattgtggcatggttgttagcatccatgtatttgtctgtgagtaagatggttgaagccatgcgcactgctgcacaaatttggaagaccttgagcaatatgtattcaagaaaggggaatgtgatgatgatgatggaaatccaaagtaaggcagatgcagtgaaacagacagggagaccagtggaacaatatgctagtgaacttcagtacttgtggggtgaactagatcattacgctcctctacaaatggtttgtcctcaggatgcacaggttgtccacaagtggatagaggacaggagagtgactcactttctaaagaatctggatccagagtttgagagcaggagagctgccttttgtcaccaagagagtcttcctaccatggatgaggctgtgtcagcaatgattaatgaggaaagcaggctccaggtaatgacaactaatgatcctgtgaaatcagcctatactgtaaatgatgatagagactgctataattgtggtgataagggacacttgagctacaattgtcctcatcctcgtg

SEQ ID NO: 180468 - DNA, 867 bp, Zea Mays
actctggccactattctactcgcgccgctgtacccacttgtgtcacggccgctttggataggctcgccggagttagccacttcgcgaccttgcgccacgtgccttggtgctttaaccatgccgtagtgagtcatcttagcccacccgatcgtcgctggtgagccctccacgataaatgccaccaatcgcttgccccagaacacccccttctctccgcccgctgcgtgtctttccctgaattagtcaccaccgctcatggatcctataaatagagcctgtcgtcggttccgcaaggtagtccagcatccaatccaccagctcgtgcctccaattactcactagagagccccaatttgggatttcccccaaatcggtccgaaacaccgcgcatagtgacctcgccgtggctagctcgttccaggtccgttcatgctctttgccctcctatttcagtacccatatgtcctcctgatgctcctcgacccgttcaattaagctagaccgcgctagatcgccgggaacacttctgttcatctgtagttcgcgctgtctctgtggacggggtgatttagagcccaattccagcaattaagtaaggggaaatggtcgcgtagggttgaattcggtgtccagcaaaggggagagctagtcgttgagttatccggccggtgcaggctcaccggagctcggcctggcgcggttcgccgtcgaggaccgcagattgtaaagaattagaaagggagggaccttcatgcaaatgttagtgagacaaaacaatagtgtcgcggactcttttgggttgtttaaaaagctagggtcttctgtgtagagtcggcaacgcaggcgcggtcgcgcgtgttttcgcct

SEQ ID NO: 180469 - DNA, 377 bp, Zea Mays
gtgagacactcgtcctcgtgcccaatttcccttattgcaccctgtgttcgtccaatttcgcctttgctggtgctcgaccgtggcggtccgccgtgctcgcgcggtggtcggtcgaattagcccgggtctagttcaccggagtagttccctgtgtcacccctgtctctgctgaagccagccaaggccttagcgcgccttaagtcccctccccgtggccggaatcactcaccggagttactccgacccgcccgaggccttctcactgtcgttctcccctctctgcccatggattcatggccctttccccgccatcaagttcgttgtggcaccctcttcccctctgcccatctccggcgacccaggagccaccgtagccc

SEQ ID NO: 180470 - DNA, 364 bp, Zea Mays
gtccgtctagaaaccagttatgtatatatatcatctacacttttatcaacaataattgaggcagctggaggtttagttctcctctccaaattaaatagtgggttccgggttttgctaggttgagcatgtgtcaatcgtgagcggtgaaaggacggcagcatgactagctagctagggggatgtgatgcatgtggattatttaattaacaataataatgcacaaagaatatggaatgtgaccttgccgttcgtattaggatattggtgagagggcttaagtgtgacaggccttagctgatcaaaagattccatctattcatgctttaatcgagtagtagtgtactggaaatcatcaccggacggc

SEQ ID NO: 180471 - DNA, 1250 bp, Zea Mays
cttgcggcagtgatggcgagcgaggacctgttgccgctgggcgcaacgacttgagggcactgaggttggttcttggttgtggcttgggtgagagcgatggcggctagcgcctaggatctggcaagacaactgctagcgtgagggcgctatgggctggcgcatgcgccgccgatttgccgaaggccgaagcacggccacacgatcgtgttggtcgagcagagcctacgccagtgccgatgacgatggctgaggaaggagtcatgtcggttttttctggaaggatcccgtatggtatgaccgtgtcgctgtaaatgaaacagactcgtgaacgtttgatgcatatcgtacggctgacgaagaaagggatgacgtggaccaacgtggagagaattttgctcccacggttaatatatagaaataatgaaaagaattgaaagctaaacatgtttgagtagtactgcaagtgaagtggcacaaataaaagctccatttccaagatatctcatgttggtaactaaatccaaactatatgtggagaaaaggtaaacaccataatcagctaacaacatagtttcacgcaatttgaatggatttgtacaggctgcgcttaacactcccgattcagggaaggagaagagactgacctgaatctcatagaagacgacagtgagtagcatgagaatggttccgcccacgacgaaccccatctgcgcgtcgagctcgtctatcatcccgggccggtaatcaaagctggcgatgtgcgcaaggaggtcgtgcgtattgatagccagcaacctggcgacatcagccattaagttgttagctgttaatctttctgagccaagacttcttcgagaaactaatctggaaacatcagctcacgactccgacacgaaccactgggtggaaattcatcaccgttgtggcaaagtattttctagttgagttgctcgccgtggcgcggtcgaccataccggggcggaggcacggcaaccctgtagagcgcggcgaggtggcggtgtgtgccggcacttgggacttgggagagctcttgacgggggtggaggggaggacgaagcacctaggtaacggcgtttgagggcggggagtggactatctagaaccttcacgacaaatagagatgccggataggggtagctgggggttgtacgaaaacggtcgcctaacggctccttcgtgcatcatctagaatggtccttcgcttggaggagaaagagcgtgtgttagag

SEQ ID NO: 180472 - DNA, 1088 bp, Zea Mays
catcaccagcatacagggacatgagaacaacgcgcgaattggatggtgccttaccagaacggactggccacggtggagttgtgctttacggtggcggagaccaatttgggggaaaaggggaattctccggctatggtgggcaatcgaggggaagaacgggtgtgtgggcttcgtgatgacctaacgcagccgtctcggccttcaatttataggaggagcgagcggtggtcgcgaatttggacgagacacacggcggctggaggaaaggaagctttactggtgcagtggattcgtggcctctaccgtggcggtcattccggtgatcaacggagaggctagagggagtcacggcgatgcggtggcgaggttgggacacgcggtggacaacgacgatggcacgacggtgatgagattccaatccgagggcggtgagaaaggggaggggtatcatggctggccggggtggcatccagctcaccggcggcgaggatttttactaggctgtgcttatctgacagccacggcgcacgaatcacggcgagcaatgatcaacggcggcaggccaccgacgacgagcttagctggcagtctgatccatcgagacactgtaccatggcatattttcgtcaggcacctgaaccaacccccttctaccgactgtttcccctgattcttgtgaataaccgggcaagactccttaatagagtttgttcttgattcaacaatcttcaatccatatacaggacatttgggtcaaaaccgaggggattcaatgatagggcgcatcaaacttgcactcatctcactggaaccttattttgactttaggttcagtttcagctttctgaaactgttctgacagagcaacgtgtaacaagtttttctctaatttttgtgtcacaactcaagaggatatctacatcaaagttgttctcctataataggttaacaaaattgatgtggtgacctagggcaaaaaccctagaatttgaaagatacaaagctcaaaagttgagcccatagcactgtttttcagacttagtatagaactcatttgaggtctattttgcaattaagtccaaaactca

SEQ ID NO: 180473 - DNA, 405 bp, Zea Mays
ctcttggtaagttatcctcgactcagtgaacaatcctagtggactgcgggttgattcagttgtttctcggggtctcttacgcaaaaagcccaggccgaaggggtatcaaggtattctggctgcacgatcctggatgagtggcacggattaaatcaagcgtcgtctgaaccggtacgcagcgcggtccgtccgaccaacggtctacgacatagattcaattaccccgaactcagccatatctgcccgatcagagccaacagctcagacttaaataactgcgatggaatcctagacacacgattcagatcggatggatctgtgtaactggccgaaccggtactctgggttctaatcccgaccggcgcttctagatccagcggtccgtcctcatcttcttccgccgcc

SEQ ID NO: 180474 - DNA, 302 bp, Zea Mays
gtcgtcaggagcacgattgttattaccttgctggcggtgtggcataccttctgtgttttgatgaagacgacgacggaggtgcaaatctctggtggccgcttcatcataattaccttcttcatcaaacaccgcatcatcgggaagacgtggacgaggaggtggtggtggcggtgcttgttgttgcgtctccaacacagcaagtctgtcgacgatctgggacaatcgttgatccagcctctcgtaagtcttgccaaggttcatgtcaatgaaggcatcatgcactgatttgtggaccatctccg

SEQ ID NO: 180475 - DNA, 328 bp, Zea Mays
aaaagctttactgggaggcggaagcggtagcgtttttagtgaggcgaaggccagccaacgaggctagtaacctcagactagcaggtatggattagcagatttagtgtccagctcaccaactgaccctccctaagtagggtttaggcccaccaataaaaggcagggggtcggtttgggggttaaagaggataggcaacaagaaggcggtcatcgggcagcccttttgttgtgcaacaaataggccgcccataggagattaggaacctcctgcgatgcgaaacgacgtcggctccataccgggtggtaaaacacaaatggtatgggtttc

SEQ ID NO: 180476 - DNA, 416 bp, Zea Mays
caatggtaaaccctgggagttcaccattgatgagaatgatttggtttgtttcaggggccgcctttgtgtgcctcagaaatcagaggtgaagatggatatcttgagagaagctcataaaacgccttacaccgttcaccctagcgaaaccaaaatgtatagagatttgaagcaaaacttctggtggaagcggatgaaggttagcgtttctaagtatgtggtcgcctgtgaagtatgtcagcgcatgaaggccgagcataagaggcctgcaggtttactaaagccattggaaattccagagtggaagtgggagcatatcaccatggattttgtggtgggcttacctcgttctcttcagggcagggatgctatatgggtggtagtggatcgcttgactaagtctgcgcactttattccca

SEQ ID NO: 180477 - DNA, 1080 bp, Zea Mays
gttggggaagaccttgcaaacactagggcaaagcctgggtcgtaagaacagggctaagatgtgcagacggcggaggaggacctcaggcgaaccagaggccgctctagcaagcaatacccgccgtggtgggggataatccggcgcactgaggccggccagggcttcggtgagagggtaggagtactttacgcctaggtttggggcacggggaggggttgtaccggtcggatgtcgtggatacgtggaggcccgacgaggactggctccagcaagccataatttcccccggtgagacgaagatagtgcaaaagaagggtgggggaatgttacttacccagaaatggtgctcgaggcagcttggcatgacgcgagggggctttggttggccggtcaacgagaaaccatggcagcggcgaactccgacctgcgcaggggaggggttgagtgcggaccggacagagggatcgatgaaagagaaaaccactgcaggttcaccgtggccgaggcgacaacagagacccggcgaggccggcggaacggcggagcaacatcgggggcggcactacgggctgagtgagcgcgagggtagggagagagtgaatgaggggcaggggtgagctgagggaggcaccgagtcttcacctaggtgctcgagtgacgtgggcgggcgagtcgtgggggagtgggcgcggttgaccgcacggggcacatgccataggcacgagcagggcggttgcgggggaagggctgggtctgacgagcggccgcgagttagcgagggagcccgcgggcgagcgaggcacgacgctgacgaggcggtcccacagggcagagagggagagggcgagcgagcggaacgtagcgccgacaggtggggcccggctattagcggacgcgggcgcgggcggctagctgggctgagtgggccgaaaggccgaggagggagggtggctgggcttcttctccgttttcttttattctaaatttcctaatccttttccttttgtttttcttcttttgaattcaaattcaaacatgctccaaattcaaattcaaataattcaaatatgtgcatcaaac

SEQ ID NO: 180478 - DNA, 593 bp, Zea Mays
gattgaatcaccatatttaatcgttcttcttctagtatatcaacgtcctccagtctggtggcctcagcttctgctatgttttcgaagattaatctcggtgccccgaacttgagatcagcaggtagcactgcctccgaaccatagaccataaagaaaggagtgttcccattcaaagctcggctaggttgagttctgaggctccagaccacgtatggcaactctctgatccactttcctgcgaacttttcattcttatcgaagaccttctttctgagtgctactaatatcattccgttggctctttctacttgcccatttgctctcggatgcgccactgaagcgtattttatctgaatacttttttgttcacagaaatcaaagaattctgaactagtgaaattggatcccaggtcagttataatgttgtttggtattccgaatctgaatattatgtcttgtatgaattccactgctttagctgaagttagagaagcgatgggcttatactctatccacttagtgaatttgtcaatagcaaccagcacatgagtgtatcccccttgagattttttgaaaggtccaatcatatccag

SEQ ID NO: 180479 - DNA, 622 bp, Zea Mays
cttttgactttctgcttttcaacttaggtggaataatgtgctgtttcatagttgtttgaaaagagataaaaataagaggtatattttatacttatttcacccaaacaacttttagttttcttacagatgccacatcacaacagcctttttataggccacaacaacatttccccacagcacagctcaaacaaacaggtcctgcttctgtggccaactccaacaacatgatctgtcgattccgatcaccctcattcacaaatcaccactgcaatggtccgtaggcacaatccttcaaattagggctttggttgcctccaaggctcccacactttctaacctatgattctacagtcgcttatccttgtatgtggcaatgaatccacctttcctaagcactacatgttgttgatggttgttgacctctggcgtcctgagatctgcatgctcctctgccctcattaaaatcttacaataggcagatgcctatttccctctttctcccattgagtaatttctgcctgagtctaagacccggtgttccctaccccacttcaattttgtgcaaggcgatgaaaatacatataccaatttaagaagagattccaaagccatgaagatcgca

SEQ ID NO: 180480 - DNA, 940 bp, Zea Mays
gctgagaaaacaaatcctggctaagcttatagccttggcgtgtttgcagctagctttttctaagattgatgtggccccccgtgcccagcgaaggcgcaaaaatttcctcggccacttaaaatctcatcaaaagcttcgacttctccgctgatccactggacaactccatcagggtcaccacagataaatttttgctcaaaagaatatgccccaaccctggcgaagctgtccttcaatttcttggcgcattccaaggatatttcataacaattttctttcgaagcccgaagctcatcgacgttcttttctgctcttgaccgttcaatcttgcaaatctcatgtttcattgcctcgacttcaaatttttcggctccttcagcaaccttgtttttcagctcttccacttcggctttatgagctttagcttacgcagcaagactagcctcgttagatttcagcttctctaccaagaaaagtaaaatcctatccttctcaagagcttcgtttctcaacgatataacttctgagctaaggtttccaagagttatttggcagctctcatcctctgcatctttttgggttttcaaagccttacttaaaatcaagccctggaaaacgaagagtgaacacgtagtgacgataagaaaaaccacaaaaaatagtttgatgtaacacagatggcagaatgacaaatcgaagtataagcaccttcaggctgttgtaggcgaggctatctacaagctgatctttggtcatcgcacacaagccgagttcgagattcggataccccatatgatccatcatttcgcgacaaacatcgatatcattaccatcaggtagacagtagaggaaatcatcatcattgtcccctccatataccaaggatccatgggggtacttcagctctttagcgtaatgctctgtttcggcagcttgccct

SEQ ID NO: 180481 - DNA, 410 bp, Zea Mays
ctcatgtttaatcctctttgtcacaacttttcttaaaactcttgtatggctttcagaaacattacgcttcttcagagctggcatgaagtcatcttcatcagaatcaagttgtactgtttcattgatcaaattttgactgtcaacatttggaggatttccaacttctggacatggattagactgttctgcggacggaatgtcaacactgaaacactcctggcttgactgaattgttatacgtttggggttatttggaggacggtccacgtgcttcatttttttaaattaaaagctgcatacataatacacaatattgtaaaaattagactgttggatatgcatatgtatttattgtgtggtatgattgaatcaatgaacctagttgttttaaataccaagcataaaagcac

SEQ ID NO: 180482 - DNA, 1052 bp, Zea Mays
cagatcttctctcgagcgccgtggatcgacgattcgtccatctatcgtcgagttcttcacagcatcgtcgtgcagcatagctattgccagcggggcagggcagggcagggacggaactgaatagaccggccgcgcgcgactgactactcatcgtacatcacatcactacccacgcccgcccgacgctcgcgcgcgcgcgagaaagaaaggtggcggcaacgaaagctgtgtggcctgctttaatttactagcaagtcacacagtgtacgtgttgcggaaaggcagctccatgattgtcagccatcacagcagggagaacaacgggcgcgacgacgacggcgaaacgaggcgtgcggatcgatcggcgatctcggacggggcaacgacgcagcgcgggccacgccggccgagccgccgccggggcggggtcgcacacgcagacgacaccggctagtgcgtgcggggctgctgagatagagacccggccggccagtccgtccggccgagggccgatgccgatcgatctggggctgtcagctttgcggggcctagctagctagagctttatccgcagcagcaggccggcttaaaaggaacgggttgacaattccctggctgtgatcatgccgccgcctgactggctggctggcttctgcccgatctcgaagcgttgctttgctgtgctggactgctagctggtgctggaagatggaggatggggactggagatggagagagaggcgtgtcaatgaagtccacccagtctatagctagctaggcccggccggaagatggcctgactgctgtcgtgtcgacctttttttttgccccaagcgatcatcggagagggtacggtggaggaggagtgtacgtagcagcttctgttcgttgccaaacctgggggcgtagaccagatcagcggctaaacggtgggctctgtgtaccagagatgagaacgagagatggtcgtcgtcctgaagcccttttccagggaaggagtcggagaggtctaatttaagcgtcctattcgctcgctcgtacctagtcctagc

SEQ ID NO: 180483 - DNA, 668 bp, Zea Mays
gggaatctcgacatcatcacgcgccaggacgatgatgtgccccgtaagccgcctttggcccatactcgagcgttgtttacaaccactacgtcatgggaggcctctacgggttggttaaggactcacggtccaaacaccgacagttggcgcgccaggtaggggctagtcgcgtgaaacatccccagttctcgccagcgctctagatggcaggttctcaccaccactcaggcttgggacaacgatcaggttcgggagtcttgagttcatgtctcttggcatcgagtatgacatggtactcctactgcctgcccctcttgaggatcaaggctcccgttgcctcccttcacatcataagaggcaaagacggagcaaccgcaatcgtgccccatggggcactgtgtgagcagaatatgccaccgggaatgatgacggtgttgagtctctctcaagggacttggtcggtgtcaacatttcacgtggagtgtctgtgtcaacattcctggcaccgcctactccaacaaggaggtcaccactcccccatgacgtcaagcaaggggcgtcagcaacacctgccctcccacccacgggtcgggaggagtcagatgctccctggagagacatgggaggagacgaaggagaactgtctgtgttcaaccccatccccttcc

SEQ ID NO: 180484 - DNA, 432 bp, Zea Mays
tctgaatatgtcaccattcgaagctttatatgggaggaagtgcaggacccctctatattgggatcagactggagaaagacagttctttgggcctgaattgattcaagaggcagaagaaaaagtccgtataattcgggagaatttgagggtagctcaaaccaggcaaaagagctatgctgataatagaagaagaccactagaatttgaggaaagagatcatgtgtacctcaaggtgtcaccacttcgtggaatgaggagattcaaagtcaatggcaaattgtcccctcgctttattggaccattcaaaatatttaggcgagttggagagatggcataccaactcgagctacctgctaatctatctgatgtgcataatgtattccatgtgtctcaacttaagaagtgtctccgtgtccctgaggaacaattacc

SEQ ID NO: 180485 - DNA, 694 bp, Zea Mays
ccatccttatgcttgctggctgggtgtgtggtagcatagttgctagttgctgtttgtggcatggaggccagggtgcaaaggttcttgaactgacccacacatagcagggattccaccaagttttggaacagggttgatgaagcatagcgctggcatgtcctagacggcttgcctgatttgctcaaagattgtgaggcgggggtagattgtgttgaaggcgttgctcctgctggtggcggtgcagccgttggagaagctcagaggcgtgcctggtttcatgcaggtggttgtggaggtgcctggtgctgctgacctgctgtagtttggtgctgctgacctgctgtaggggtgtttggtgctgctgctaggtgtgcgcgatggagctgatgtgggggtgcctggtggtggtatagctctgtcgaggtttgtgcaggaggtggtggggccatagctggtagagcgagtattgatcttggagctgaatgttggtagactcccatgacgttcactgtcctatcatttcgccagaatctcatcgcatgaggtggtggggctgagagaagccaaccatggtgtgccgaggatgacatcggtgtcgttgctgagggtcgccaggaaggcactggaaggtcttgttgctgttgcgaagcaggatgctgaaggaggctccccaacagggggacatgactagctg

SEQ ID NO: 180486 - DNA, 924 bp, Zea Mays
agcggagccgtccgatcacatttctagagcccagattagatccgaataattttatgaatcggtaagcaacgcggaccatacgatccagattggacgcgcgagattagatcaagctctccttgaaacggtatgcgaccgggatcgtcgatactaagatcgacgcccaggagacgagcaagccacattctaatccgacccatccaatccaatcccgacggcccagatgttaattagatatgatccaatcccagtcgctagttccggatcccacagttcacaccggtccggttgaatcgttatgtcgcttctaatctcagccgcacacaccagatcgaagggccaggaggccatcgtccaccccatacccatccggcacgatggagctttctccccacgacggcgacaggatcggcatcgggtgccccacgcatcaacgacgcactcctgacccgactacccttcacataacttgaagcataaggcaaacccagtcatgggtgtcttaccggggatggagatgcggtcgacccagtccacggtgtggagaggaactgcatcggtgtgaaaacgacggtgcggaattgccaccgcctctgcccgaggtcaacacccgattccttccgcccaagcgccccaccggtgcagtcatgagaggtaaaatgctgccgagaaagccaatccgcgaagaccagatcccgccctggtgttcgtctacagcgccatcttccacacaggttgcgcggagcccagaggagagggataaggggagggaaaacccatgccatggatttatagatgggtgaagtacgctatgctcgaaggaacggatccgtgattccttcgcggaggttgggatcgccgcggagaaggtgaccccagttgcccagcgtagagggcccaccgcccagcttccctacggcaccg

SEQ ID NO: 180487 - DNA, 567 bp, Zea Mays
ttcggcgctggggcctggacattgtcgggccgcttcccacggcccaagggaacctcaagttcaccttcgtcgccgtcgagtatttcaccaagtggatcgaggcaagagcagtatccacgataacagcgaagaccgcccagaaattcttctggcaaaacattgtctgccgattcggagtcccgtccgagctcacagttgacaatggcaaacaatttgacagccaagactttagggacttctgcttctccattggcaccaagctcgcctttgcctcagtgtaccacccacaatccaacggcgtcgtagagcgcgccaacgacaagattttcacggcaatcaagaaaatgctcctcgacgacaagaagggtaaatgggccaacctgctacctgaagcagtctgggcactgaacacgaccgagtgtcgggcaaccagattcactccctttcgcctgctatacggatcggaggccatgaccccgcagggaatgaaacatgggtccccgcggacaagtgcttcagcagtacccgacgtcgacgagctaacatccaaagatctcatcgacggag

SEQ ID NO: 180488 - DNA, 463 bp, Zea Mays
gtgcaagtttttcctttggttagcgagtctaaatagatgttggacagctgaccgtttggcgagaagagggctggaacatcctgactgttgtgtgctctgtaatcaagaagaggaaacaattcaacaactgctggctggctgcgtcttctcaaggcaagtctggttccaggtcctttccgcctgcaatcttcaacacctatgcccctcccttggggaggacaacttccaagtctggtggcaacgcgcggagcaaaacgtaccaaagcagcggcgaaagggtttcaactcggtggtctgcttggttgcttggtggttgtggaagcatcggaattactgtgtgttagatgaaggggctgcagatatctctatagtggtgcgggagattagcgaagatgccactaactggcgccttgctggagcccctagggctgagggctgagttgtttcccggtcttatggataa

SEQ ID NO: 180489 - DNA, 922 bp, Zea Mays
gtgttagttgttggacttattgcctattaggatgcacacctagttttactgagtgaatattacccatgggtaatcaggttcaggttttgctttaccatacccacacccacatacccaatgagagaagaatttctcacaaatctgtacccatggggattaaaatatttccatacccaaacataataaagaaataccccatgggttaacgagtatcaggtcctcattggcgcctctagccctggtcctaagatgttgagtgggctttgaggtttgcctgactgaatgataaacacaaaaacaccataattttttagagtggttcgggccgccggagcttaaaaccctacatccactgttagttgtattgcttgagagcttgactgtcgtgggtctgaatgagctctgctccgccccctttaatcgtaggtgccatcccttttatagtccaaaagggcacattacaagggagctggccccgataggtgcgtccaggagttactataatacaaagtgtgaggcatcgaggtagagctggtggtgctagatcttctggagcgtatcttcccttggttgtcgtgtgggatccttccatcctactctcttgccccatctaatcggaatgtaggtgtaggccttggcgttggttgcggtgtagtctggtacgttatcgtgcataggggtgtataggtggtgtcgtcctatcctctccgtctgttccaccccattttggtaacatgtagggaacaataggagtcataatgagggccacccatgcagcacattgagtcgatggtcttgccttggtaacacgagagtaacagtgtagcccatgcgttgcggactaggcgtgccattgtgaatcatctggccctaagcgatgttttggtaattaatggcaaccatatgtagactaacaattttt

SEQ ID NO: 180490 - DNA, 770 bp, Zea Mays
gggactaccgccgtgggctgatttcccatccacgctagcgccagggcttcaattgtggtcgggtagcctcgctagagcgcatggaagacacgacgaccatcaattcgagaaatacggtgtcaatgctggggcgattcctcgtcagacttgaaaatccaccgcctggccgcttccctccgacgactgcgtaccctggcacgccaaacctaggtaagaagcatactattgtgcccgccttcgtcttccccgcgcgtagctcaacaagaagcatagttggcggtcccctactcgggtctgggtggctgcggccatggtgccgccgttgccagcccacaccactgcctgtgcacgggaggtaggagaacccgcgggagccctcgatctctgagtgcacggttgcgattagatcgcaggtatcgcttcaacctgataaatcagaaccgtcgactcactgatgggcggccacgattcaatcaagcataccccttcggcatgtgaatcgggatcgttgattcgtgatcgcgcgactcggaacagatcgggcatcataaaatccgggccgttcagtcgcgatccaaggattccgagcccataccggttcagtgggagtctgatctaatctgcgccatcagccgtggatcggacgactcagatagtgccgcaacccttcggcctcgcggattttgtgaaagaacccctaaggtatttacaattcaacctgccatccacctcgggtcagggctgtgtcggtagattttacagaataaacc

SEQ ID NO: 180491 - DNA, 369 bp, Zea Mays
cttgtatgatgggggccatggagtagcctgcaattctgctgcctagggagaaacatcatcaaaagtaaaggaatcatgattaaaatcatcataccatgcatcctcgttgaataggcctttcctcaggcatcgatctgtgccattggattcttataattgtgacaactgtatcctccaactcgaagagacggaacttcatttatttttcagatacaactttgctagaagatgttggcttgtaataggcaccactccgccaagaacaatggacctaatcaataatttactgaggatcagaatgagatggaaagtaccatggagaatggaaattatcatcatcatgtcctggtgcatttggaaaagcaggaa

SEQ ID NO: 180492 - DNA, 379 bp, Zea Mays
ttgtcgctccagccaccgatgtccctctccttcgttgtcgttgccggatccgccctccctccgtcgtcctagccaaagagaagtatgcggtggctcggtcgtcgactctgcacaccgcgcgccagacaccagatctaggtgaactgcttagttcctccattttactgttgctatctgccctcgtgcctccattttaatgtattaaatcactcttctttttcggtgcagttcctgcataagtttgcccaatctggcacattcattcactgattcttgttccccggacaaacctgcgcgtgacaagagaactgcacctgttcagtacaacctacgcaagaagcgtgccaaaaccacttccacggtaagttcttttgtgcat

SEQ ID NO: 180493 - DNA, 593 bp, Zea Mays
gggaattatctcccccctcggtcagggagacagccggatgttcgcgctccaagttgggctgaatcccccacagacttggagatagctgaggccagggttctgtttgccgaggttggcttgttgaaggagaagggtctgactgccgaggctgtggtcgctgattttgtttttaagaacattcagccactgaaggacagagcgtacccagcttatctgtaatgtggcatcactgattcgacccgggttaccaacagaaggattcctgctgtggacctggtaagccggcttgagatgattcttagaggcaaggtgtcgaatatcggtgctcctgttgcgtattcagcctagaatctgcctccttccaaggctttcatcagttttgtgtcaaatcctcctgctggtgacaatggtttgggccttagagtgtgaccctctcctgaagaggttgaggctttggttgtttcgcttggtgaaatccccaatgacgagaggcaggttcattttgagatgcctataggcccgagcgacgcagaaataagtgccatgctggacatgttggctgaggattcctctgattcggctcctgctgaaac

SEQ ID NO: 180494 - DNA, 298 bp, Zea Mays
aacctgaagcagtttaaggcctttggcatgaatgtgtgctacactcaggatttgttcaattttctttttaccccttcatgcattctaagtcaatgtcgatacttctttcattttagggagacaacttaagcagtagcagacaacaaaaattgatagtgggttggtttcacacggaccctgttgaaagctagaaaaatgtaagggaaagcaaaaaatgtgaatgggtacatcatattctcagtgaataggatcaaacagaaagaccttgatatcaatttttagttgctggagtcagggg

SEQ ID NO: 180495 - DNA, 771 bp, Zea Mays
tttgtattgaaaatcactttctaatattaattatctgatttttactacacactggactgcgcgttaaattctaaatagtgcaggggctaaactataagatttctaagacttagtaaacatcctccctggacggcgggtttatttctgtgaaagtagggggctcatttgcataatcgcacggccaaaagggtatcaatgaatcctagccgtccgatctggttttagcgtgcaggattagatctagcctgttatgaaacgatacgcgacgatcaccgcacgatctcatctctacgctccagatttaataacccctgaaccactctcgcccgtccgacccgaaacgggcggccctcgttacaccaacccaaccggtatgcttcttctaatttgggccgtagatcgtgcaatcgacggacccagcgtaacccggcctcctccgaccggcactggcggcgccgcccaccaaattgcggcgggcatcgctggagcagggccgactaccatcctggtgcgctaaacccaaagggaataggtgctatacgaaggtggggcaatgcgaacaatcatgagggagatttcatcttcaatcccggtgcagaaatcctaggcgacgacggggcgcggcttcacgacggagggaatacgccggtgcgcaattcgcgccatgatgtgggacttctcttccatttgccgacgtggacgacctccccaggtttaggtgaacctcctcggtcacaccccgtggacggaatccacctccaccgcgagtta

SEQ ID NO: 180496 - DNA, 677 bp, Zea Mays
agctaacctacggtgatgtgcaaaaaaatgaaattgcagctagcgcgagtgcgataggggatggctcaccagggatttggccgcgacggtacccagtccacggcgcggggcggagttgcagcggcgtaggaacatcggcgagaaatcgcgtgcaccctagccccaaatcacgccagccgagcgaatcacgtgcaccagcgagcctcaacgaaggccccagaagcctagccgaggccggagcgacggccagagcgctagtccgctttggcgtggaccgcgtttcgttaacacgacgtcaatggagctagtaatggatggctcgggtcactgatggttgagaggagagcggaggggtttggcttcgatgtttaaagggcgcccacgaggtggttccacggaatcagagtccttcgacgagaatcgcgcgcacggcgagctcgcgtctgttgcggagggtggttgaccaggtgcgcgggtggatgaggtacgcagtggagcggggctggcactgaccagtgggacccatgcggcaaagggacaagcgagagcgagcggctggggcgcgggtcccgcaggcagaggtcgtgagggtgagcgcgcgcggttgtgatgctgccacgatgggcccacatgtcggcaccgaggatacaatgcgcagagaggcagacgggtggggc

SEQ ID NO: 180497 - DNA, 484 bp, Zea Mays
ggacggccgaggtgaacggcgagagcgtcgggcacgcgtcgcggcgggaggcgacagagcgggacgactgcgtgatgcggatgctccactccacgtccatgggcgccggcgtgctgccgtccgatatgtcccacccgtccgacggcgagctcacctacatgcgcgcgcatttcgaccgcctcgtcggttccaaggactccgagacgtactacatgcacaaccccgagggcggcaccgccgggccggagctcacaatcttcttcattaggacttagaatcaaattaaaccaacaacctcatctctggtatgtgttctttcctgcccaaaaataattaaatgctcaacgagatggagacgtgtgaaatgaatagattttcttgctgctcaatccgcatttccgcggccatttgagttgttcaaagaggacaatggcaaaacaattatataatggaaagaagaaacaactaaataaactacgtagca

SEQ ID NO: 180498 - DNA, 526 bp, Zea Mays
aagaaaatcaaggcctcgaggcccctagtgcggtaacaaagagaagtattgccctatgccaagacaaatagtcatgacttgattgagacatgtgtggcattttccataacctttgtcaaacacgcatgatgctcatcctagagaagtgtgtcttaagggtatctttatgcaagctcctcggtttcctagtgtcccataagggcatcaaggtcaacccagagaaagttcaagccatcaagctcatgtggcccccgactcgcatttgatagcctcaatgcttcatcggggtgcatggcagtgctcaactgcttcatcaccaagcttggagactaggacctctaattattcaagcttctccaaggctctgatttcttctaatgggtcgacaaagctaaatagacttttcaaacactcaaggagtatctcacctcccactagtcatgattgcccctgagtaggacgagcctcttcttctttacatgactatgacacctgacatcgtcagcatggtaccggtcgttgagag

SEQ ID NO: 180499 - DNA, 689 bp, Zea Mays
gtggaatctctgcgtgcctgttaaaccctcgtgagtcgctgacatgtgggccggcatgtcaggctacgatttcggtcacctccgtgtgggccgcgctgtctggtgctttccccttcccccgctcgctcggctttgacccaatctcaacagctcacgcctaaaatcgccgataatctcgccgataatctcgccggattgttgtgtcaactcggcatcttccaccgtgcctggcgtgtataaatggacccccctcggcggcaatcaccatccccactatccgagcacccaacatcaactcgtggcggaaaaccaaagaaataggtgccgggccgccgccggcgtgtaggcgatttgacaccccctgggcctcgacgtgttgctcgggcgcttctctcggtcgtgggtgagctagtcgtgacttcacacggaaggatgggatccatgggtagcctggattgctccgtgggaaacaacatcaccgcctagccatagggctgcgtggcctgcttgctcgatgtcgcgaacccagggatgaggtctacatctcgattcgccttgctccacggattgtgttggaggtggtttcggggttcggggacttcggctgctggtcggatttctcaccggagatccacaccgcgacgtgaaccgggagctttagacaataaaacccccccggtaagtctcca

SEQ ID NO: 180500 - DNA, 539 bp, Zea Mays
gcggaccggttcgacatgacatcattgtcactgcttggaggcactatcgtgcctgcagaaggtcgaaatgaaggacaatcaccatattggggacgagaaccaaatggtggaggggacataagaggagtagtatgtggaggagtaccatatgttccatatggaggaccaccatatgaatgtccatgaggcatggaggagagtatggataagtgaatgatggaggaggaggagcatcgctgataggagcttcggtggtacaaggaggagaatcaatggcaggagcatctttaggaggaggagaagcatctatggaaggttagtagggatacaaggaaggagaaaaattgagagtaaagggtgtgaatgaacaaaaacacccctctctatttataggccaaatcgatttttttatttttttggacttcaaatggttcaaaagggcgtggatcaattaaaacacgttatgtcgctaaaggcggttggtactgaccggtttagattggtatcgattgagtcgtccgtccagaaggcacaacatg

SEQ ID NO: 180501 - DNA, 295 bp, Zea Mays
gttagatccaaaccgtagagctataatctaatgggtgagaatcgacctcggctatttagaatttggaccgtagatctctgatccagtggcctgcgcggcataccgcttcgcccatttggtgatctaatctgtaccatccatcgtggatcggacggtgcagatccactgaaacccgtcagccgcgtcagttttgcacatgagtccttcagttatttaagaatcaacccgccatccacaggaactattcactgtgtctggggaattcttacccgagaccccctgcacttcccagaaa

SEQ ID NO: 180502 - DNA, 463 bp, Zea Mays
cgacataacacactactagcttgttcaatcagaatcacaatctataagtatctcatcatcagagtcatccgtcgcacaatcctcaacgacaacctcgttacacttgctgcattgtcctgcatcaaacttttccgtatttctcttgtaataattggcttctgcttcatctacagcttgggagaataactgatcctcagcctcagcctcaccacacttctgcttgtaataagtggcatctacctcttcggcgccctaagacataaacttgtcctcctcttgagcacgtaatcctgcctcaactagtgtgatgagctcactcaaccttgatgtgtcgtcctcctcttccccatgtaatcatgcctcggcgagagtgataagctcactcaaccttgatgtgtcctcctccatcagctccaccgtcaccattttttcttgaacgtatcttgcacgagcctcatctgcg

SEQ ID NO: 180503 - DNA, 525 bp, Zea Mays
tttggaagaagagattcgtaaaggacaagagtctgatgagaaaatcaaagaaattaagacacaaattggtttgggtaaagccccagatttcacggaagatgatcaaggcacaatatggtttaaaaagagaatatgtgtactagaaatcgaacacctacgccaacttattttgagagaagctcatgattcggcttactctattcaccctggaagcacaaagatgtaccaggatctaaaggaaaagtactggtggtacggtttgaaaagagatgttgcaactcatgttgcattgtgtgacgtgtgtcagcgagttaaagccgaacaccaaagaccagcaggattactacaacctctcaaggtaccgaaatggaaatgggaagaaatcagtatggatttcatagttggactaccccgtacttgggatggctatgattcaatatgggtcatagtagacaagttgactaaagtggcacactttatacctatgaaaacaacttactcgggagcccagttagtagagttata

SEQ ID NO: 180504 - DNA, 298 bp, Zea Mays
ggcttcttgtggagaggtagaaaggaagcaaaaggtggacattgtgtggtcgcttcgggaaaagtttgcaggcctatgattttgagaggtttgggaatctctagtttcttagagctgtgttgggctcttcgaatgagatggctatgattgatgaaaaatgaccctacccgaccatgggttggtcttgcaattcaagtcccatgtaaaggcgccccatgtaaagctagatctttcttctctgttgtgctaaccactaaaattgctaataccttattctgggtggacaaatagatcagtg

SEQ ID NO: 180505 - DNA, 425 bp, Zea Mays
gcgtcgctacaaaggatctcagcaccagagtcgctacagtaacctgtatactagttagatggggggattgccaaactaggcgtatgactatgcatgaaccagaatacgacatctggtgaacaacgtcagcaagactactttagacaataggtcgcgtcctccttcggacaacaagtacccttgtaagaaccccccttgaactgtaaaagggggactctcctcttattctcacacgagcaccctttgtaatgtgatccttagagcaatactcgagcaccctttgtaatgcaatccttagagcaatactacgatcaacagtacactgactagggcacaagcctgaaccactataaactccctattcgaatcccttgatttaccattcggggtgagtccacgctagcctcccacaccgaacacaaatt

SEQ ID NO: 180506 - DNA, 571 bp, Zea Mays
acggaaaaaaacttcaggtgagtttgtacaagaattcacatgacttctaatactagcgtatatggaaactttaggcccaggtcccagctatcaagatttcaaaagtaaaactatgaaccaaggaatgcatcgttgaagcctaggtcccgttctttttaaagacccaatttcaaaaacaaaaatatctaaatagtatcggctatagctattaatcttatgtctattaatttttatgtctatgtctatatttaaatatagacttaataaccataacaacaggggcagagctctcagtgtggcaagatatagcgtccaccatactttgattttctagtgaatttacctcaaaatcatgtgtaccataagcacatagaaggatattaagtttcgctgtgaaaaacttagcatcgtcggccggaggaagaacaaaaacgcatgtactttaggagccgtccgttaccaccattaccagacctctagggtatgggccctttggcctttgcttggcacattgacagttaaacagaaacacatgtactttacgatggatttgggtgctggtttaaaatta

SEQ ID NO: 180507 - DNA, 695 bp, Zea Mays
gaggatgcgagcctacaggtggggccaaagcttgtacttcgcctcaacatggcctgattggtgattggcgcgccgcttccgtgcgtctgctgacgtactcaccgtcaatccgccttcggtcatgccaactaccatattttttctcgcggctgacaggcccgcagcccccatgcctggtggtttcgtcgggccacgcacggggcgcctcgataccgctgcattggtttaaaaaattaccttctgtgttttgccgcgaccccaaggaggcgcactaccggcgcatgcggcgattcgctctctccgcacccgggatctggcactcacggagtatgacttgtgggcctgggcccccgtgtcatagactgggctgttgtctcttgcggcggagatgaagaggcgcgctacaacgtgcggcggttcgttccttctgcacccgaaatccaactcgcaaagtgtatgacttgtggacctgggcccccatgtcatagactgggctgcctggatctaggtgcccgtcacgcgtgatctcctgcggcgattgaggggcgcgcggaagggtttccttgagcgaggacactggtttccttgaaaaaaggttcacccccgcgtgcagtagttaccctttcacattctcttccaatcgattgcgcccttttgccttcgtgctgcttcgttccacgcccgcaccaccggct

SEQ ID NO: 180508 - DNA, 736 bp, Zea Mays
ctggtactgatgtagttgcacaaagcagcaaacgccaccaggcagccttgcaatttttctgtattcacgatagcaggccccctcagttcgaagcaggattggataggccactagatcacatccttaatatcgtttctttgactcaggtcattcttcacataaaaccactgcttcatccatgaaccccagccattttttcaaaaagttggcacgagacgccttgcatcagaccgatacacgaaggtatagcatccgaagttgttatgatactgctctttcccagtggccttagtctgataacacaactcgtaaatattgcaaaagcaatcagcatctggttccaatccctggctccttattgcccaaatgaaaatcccaaccttaattaatgcgtcaggggtgagctaacgaaggaaaatttcaaacttcttcaaaacttcgactagaaacttgtgtaaggtcgactagaaacttgtgtaaggagaaccgtagctcagccttcatgaagcttcaaaaaaccactacctcatctttttcaggaagtgaaacagtattttcaccgtcgattctcactatagacacatcacgaaagtatttgcttttcatagcctcaacatgtcctttcttcacggttgatttcccaaataccacatgactcggcctccacggccgatcttcggcatcatcattaccactttcaatatcaaaatcttcactgtcaccagaatctacaaac

SEQ ID NO: 180509 - DNA, 681 bp, Zea Mays
gaaagaacaagcacacaaaagcacaacgtagcaacacacgcacaagaagtaaatgcaagagcatagtataagaacacacaagaatagctcaaaaatagcactccaatctgtcacaaatcacgagagggagtggtcgcagagtgtcgaaatgttggtgtgctcttgagatgcttggatcttggtagaaggtgcctaagggtcccttttatagccctaaggtacctatgagtcgttgcagcttcatttggaagcccaaacattaccttgtctgtgtgtgcaccagactatacggtatgcaccaaacagtgcatagtaactggcattgaatcaatcagcgcgacagtcttccttttctggggggcactgaactgtccggtgctcccaaatgattgttggacgccacagtgagagccaaagtaattgttgcctactggtcacaccggattgtccggtgaattatagcagaaattcttgaggctgaagagttagtcgtacaggccatcggactgtccagcatgcccaccgaactatcatgtggtgcccagcccagcccaaaaacttctcttttgagccaagcttctttaacttcttttggatcaacttgagaggttccatagcacttagaccaacataattagcacacaaaacaattgacgaagtgttgggaccatacctttttca

SEQ ID NO: 180510 - DNA, 321 bp, Zea Mays
gtgaattccaaggatagggatgggtaccataccggtgattagatcccgaggaggcttgttctcgccacgcggcggcttggccgcaagagttggaatccggcgacgaattaccagtcgcccacatgatttctcacatggccgagcccccgaagacgtcctacattcgatgctgatccttccagacccattttcctaggccaatggcgaagaggaccaaccctcaacaatggcggcactctgttctcccactctcgcagtaaatggcggaccctggcgcggcgtggagaagctaggtgcggtgttgaggttttatacccgagc

SEQ ID NO: 180511 - DNA, 824 bp, Zea Mays
atgggcagcaaatttctgttctatcgtcatctcccaatcaagatatccctcagcatcataatgacccgaaaaagatggtatagaaaatttaatcttagcataagggtcgtcaggagcacgattgttattaccttgctggcggtgtggcataccttctgtgttttgatgaagacggcgacataggcacaaatctctggtggccgcttgatcataattaccttcttcatcgaacacagcatcatcgggaagacatggaagaggaggtggtggtggtggtgcttgttgttgcgtctccaacatagcaagtctgtcgacgatctgggacaatcgtcgatccagcctctcgtaagtcttgccaaggttcatgttaatgaaggaatcatgcactaacttgtggaccgtctcctccatttgctccttcaggagcttgttgtttgcctcaagatcttgatgtctaacacattcatcgaagtctgtagggatccttgcttcttcgtcgcctaccatcgaaacacaaaaacaggaaacaaatggtgaaggttatccctaataatttgactacacgctcctctcaggtggaacacaggaacacgctctaatgtatcttaccaagctcttacaagtgtatgatgaaatacaagcaaaggatggtacaatcggaggctggttcatgatacttaccaagagggagtgaaaccgcgattgcaaggtcatagctgtattgatcagaagaaagtatgtggagcttgggaggccaaaaactaatatcaaggattagcaaaaatcgagtgcagattagcgaagttcaataagtgtccaaagca

SEQ ID NO: 180512 - DNA, 559 bp, Zea Mays
atcataagaaaaagtacagacttgccaaatggaacatcctatgccaacctaaggatcaaggagagttaggaattcagaacatagaagttcaaaataaatgcttgctaagcaaatggctttttaagcttattaatgaggatgggatgtggcaacaattggtgcgtaacaaatatcttaagagatatccgttgtcgaatgtgaaacttaaacatggtgattcacatttttggtcggggttaatgaaagtaaaggatacattccttaacctaggaaatttcattattaaaaatggagaacaaataaggttctggcaggacatttgtatgggtactcaatcctttatgatttgttacccatctctttatcatattgtaagacataaaagtgccacggttgctacagatttggctacagtacctttaaacgtatcattccgtagggcgcttgtcggtcaaaacctcactttgtggtataatttagtggcaagtatattacatgttcagttgagtgtcgatagggacatttttaaatggagtttaactaattctgggcagtttac

SEQ ID NO: 180513 - DNA, 457 bp, Zea Mays
ggcttgtaagatgaagttgcgtgccctcgcgtgtctgtgcctgcgagggcgttgtgtgccctcgcttatatattcctaaggttgatgctgtcgtttctgcttttgttgtactggttcggctgcgcccttaggcggcttctgcgcggagtctttgcgacagacttcgggttttctcgcacttgctgtgcttagtccggctgcacccttaggcgacttctgcgcggatagccttcgcgatagacatcagatttttttcgcacttgttgtgcttagtccggctgcacccttaggcgacttctgcgcggatagtcttcgcgatagacatcagtttttttgcacttgttgtgcttagtccggctgcacccttaggtgacttctgcgcggatttgtcgcacgcgagggtggctagcgcttagcctcgcggtgacctcggattggtcgaatatcgaaggccgtc

SEQ ID NO: 180514 - DNA, 494 bp, Zea Mays
ctacgcgctaacaactaggccccgaccttcaaccttctgtgctgggtgaacacatgcgcctgtgccactggatggtggtgccaacctgtcaggtccgtcctcaaccaccaagccacactccgcggacgccatcgcgatcctcgcatccgtgagcattgacccagagctcatcgtcgcgcgcatataaaaggaccgggccgcaaccttctctccttctgcaatcactcacccacaatcgcctgcgacgagtccctcaccgtgaatatcaccctcagctggcggtcgcgaatgtcagactgcccttccaccaccgcttgaagacaattgatcgccgccgcgccttgtcggacgtgccctggtgcttaccctgaccctggggagcgagtgcgtggccatagctctagagttttgccgccaggactttgctggccggtgttgtgactccgccgcgagccacgattccccgtggtcagaccccactgcttcatcatttc

SEQ ID NO: 180515 - DNA, 602 bp, Zea Mays
tggtacaaattctacagagcgcaggggctagtttataaagatccagggcttggctgaaatttgttttgacttgggaggatggcgggttggtttaacaaaagtgcaggggctcttttgaaagaagtgcacggcgaaggggtaactaggatccgagccacatgattagaaaccgagggctaggattagatcggccaaacactgaaccagttggttttctgggccaccggattgaggatcgacggtctagattttaaagtcacgcgatcgattttcatccgcccgatcaagatctaacaaccgctggtgaatcgttatcgcgcttctaatcttcaccgttcattagaaaatcaacgccacacgccatcacccccaactcagccaccagtagggcggcgctacacccaaccgcggcggagggttggccggagttcagccatccggcacaccagtgccccaatttacaagcccatacgcgctacacggtactgagatcaaggcgaattggtcaagggcacacttacccatagttcggatgccgaggtattccgaccacgggcggtgtggatctgcggcgactctggcccgccggtgagaaattccgc

SEQ ID NO: 180516 - DNA, 680 bp, Zea Mays
ggcagctccacccgtggaggttgcaccatccggggtggcagctagggctgaccatcgttctacaacccctagaccagaaccatctccatgtggccgggtcaggcccccagtgcctcccatcctccggcgccagctctcttaaccgcgaccccctacagtgcacctccgccgccttcctacggcatgcctccttacggcgtgcccccgacgacccgccctgcctcatctcccgcctccggggacccccaccacgactccctggtccccgttcgctggaggctgggcccagcctctctagccaccgcctatagcaccatggcgttggctccactctctcctgactgggtcatagactctggtgcctcctaccacaccacccccaccgcaagcatgttatctcgctctcacccacctcattcctcccaccccgcctcgatcgttgttggaaacggttccactctgccggtcacctcagtatgtgccttggttctccctggaccgttctatctcaacgacgttctcgtagccccccacatcacccacaatctcctttatatccgtcagttcaccaccgacaattcttgttccattgagattgactcctctggtttttctgtgaacgatctgaccatcaggacccctctcacccacagtgacagcgtcgggcccctctacacgct

SEQ ID NO: 180517 - DNA, 750 bp, Zea Mays
tttgatgagggtggtgtgtgtgttcattttctgaagcgttgttgtgatgtcttcgtaggcgatgagggatgaagaggtggaggacctcgccagcctagagagctcggtgatccgaaaggacgccaaggtggagacgggagcggaagagcaatcctcactaaagaaaggtggcgctgagggccctgcgatggcggggacttctgcgctggtttaaagaatatagtaggagtggtttgatggtgtttgctttgtatgatacttaagatcggctgcaacgcaggttccatcgtctggacccgcgcaagcaaactttgatgataacgagaatgatgaatcattaatgtgttgaagtgtgataattcttagtagtgacgcatctaatgatgaatctgatgttgagtcatggtcttcggagggtgagaggttggtgagcccgttcgctgggatggacgacgagtctttgaaagatgatctagattattttgtggcgctatatttgtctgtcgtggagtcttcgtcaaggctcgcccccactgcggcggccgccgaatgggaatggagaggtctcgtctccgtagtggaacacggtcagaggaggggacctgtcggatcatacgggcaccgatggccaagtcatgtttcggggagggggatctacgggctctttttgatggcgaagagttgagactgatgctgttcaatttctgtgaagctagccttatcccgaaagaagagccaatgtaagatgtg

SEQ ID NO: 180518 - DNA, 530 bp, Zea Mays
gcaaaagtatgttggcaggaccttaggatctccactacgatatattattaaagcacagttgtttttaaagatcatcatacaaaatacatctggacatactatgtagatcactttatgctctgattggctgaagtaagtctttgggtaattgttatgtttacagtaacttttatttctgatggtgtttcttgctatgccattttcaggttaggactgtccttgacatagaatgtggatttggtacctttggggcgcatctttttgagagagatctcttgaccatgtgcattgctaactatgaagcatcaggtagccaagtgcaaattacactggagagaggcattcctgcaatgattggttcatttgcaacgaagcagcttccgtatccctatctttcctttgatatggtgcattgtgctaaatgcaatatcgaatggtacaaaaacggtatgtgtgaaagtcttctttcacatgccctggccctcattgacgattataatgttattcagcaatgtcttaagttggcactt

SEQ ID NO: 180519 - DNA, 376 bp, Zea Mays
tgaactccattaaatctcacaacaacacggtggcaggctccaagacgccaagggcacgagcaaaaaacaccctaactgaacccactcggatgactcttctctcaccgtcgctctcattggggatgggacttagtacatattggactcacaatgtttgcctagtggcctgtatgtggagaggatgctaaggggaggggtgatggtgcgatgacacatatgaaggcacatatataggtgtggcggtgtaaaggggaggtagcatagtcgcggtcgtgacaaatcaatgatagtctatcgctccaaaccccccaccaaagggactagcaggtggatgtggcagtgacaaggaagccctagtgagaatggcctagattca

SEQ ID NO: 180520 - DNA, 521 bp, Zea Mays
ctcatcatgttcccattggtatcaaccttcatgttcggacccggcctggatgtgcacgacatatatacaagttccacatgctacatgcacatcttgccaaagactatggcaattcgagctcttccaacttcttctcaagacatgttggaatcgatctcatcaagaattttttttaacaagttttcaatttccaactcgggtcagatagaaaatcggtgcaacacgcatgagtcctactcgaacacgaccaaaagttatctacgccagcttccaaaatgacatcccaagctagactcgatggacctcaagatcaacatcatcttcttagtaccctaggcctacacggtagacgattctacacatttgccttgtgaagactacggcagatcaaacttcccaatcaactagctattaatacttagctctaactgctattagctagtttggcctatttagtaaaataagctaacaattagctataccccggcccgtttaaatccaaaaggaattattcagcaaac

SEQ ID NO: 180521 - DNA, 546 bp, Zea Mays
gtcataacatctcaccccatctcttcaaacagctcatcatcgagttgaacatctgggtaacggtccttgaagtcgtgcaatggctcccaagtagtgtcatctttggtcagaccctgccactgtacgagaacttgttggacaccatggtgtaactgggcgcgcaacgctttctttggagcacgcaacaaccaaccatcctaaacaagtggcacgtgtggcgaagtggttggagggttcccgtagaacggcttcagcagtccaatgtggaacacatcatggagacgggtgccggtcgggaggtgggaggtggtaggccacctgcccaatttgctctgatacttagaaggggcctacatagcgaggcgccgaggcccaatctttcccttgggtcaaggctctagcgagcgggaggtggagaaggcagagccacacccaatcacccactttggactcgagctcgcaatggtggtcatcgtagtaccatttcccatgctactaagcctatctgacaaatttcccagaggaaagcatctcgatcacgtatta

SEQ ID NO: 180522 - DNA, 459 bp, Zea Mays
atataaagaataaccttgaggattggggctttgtatagcaagttcttgtaacaattcttgtgcttgtggatccagctcataagacttgagtacttcttgaatccagactggtgtagcaattgatatagcagctagctgaacacctgctggcactctggacaaggcatctgcagccttattttcactccccttcttgtattgcacagtaaactgtaatcctgccaactttgccatggcctttttttgtaggtcggtggccaatgattggtcctgtaaatgactcaagcttttatggtctgatctgataacaaatgaccccctttgtaagtagcatctccacttgtcgactgccatcaaaattgccaagaactccttttcataggtggacaatttgctattgttgaccccaagtgccttgctgtagaaagcaatagggtgcccattttgtgataacactgc

SEQ ID NO: 180523 - DNA, 486 bp, Zea Mays
aaaaattgaaccgattggatttgcatgctcacagggatcgcggagattcatgttccccgtgtttggaggagatatgtgtgccagccctgtttccttttctgttaagacttaagactgctaccactaccagtgtgctgtaagcgttcgtactgttctgtgtgcgtgcgtgtacgcttttagatttcttttggccttggctgctcagcttgatttacgaattgggacgccgcagatagatagaaatagacattgttggttctatagttgtaattgagctactaggttgttggaataggcagcttcgtgtggtgtggtttcatttagcatgcctatcatactactattggcatatttcagacttttcagtacctagtgaatgattgtagcaagaaatatggacgacgaaaaaagagcgctttccatctgaaacaatataccatttctcgtcttgtttagtgcatatgaacctcaaatcttaatggctca

SEQ ID NO: 180524 - DNA, 535 bp, Zea Mays
gaagatgctatttttggttctttgctgggtatgaatattgataaacttgaagataaagttttgagtatgtttgtaatggatagtatcagagaagatcctttgcgaattgaggttgacagtaaaaaactggcaataactacacaagttgggcacattgtctttggcctacctactggtgcacgaaattagacgattttaccgaagaagagaagaggagagctcacagaggtctgagacggttaattaatgcaaggccgtcaggcaattatggcaacccgggagtggcagaagtgcctcgctatgtcattgagcactttccaaccctcgtggtgtagaaatggcaaggggatccgatcctcgattcaccacggagaatttccttattaggggacggatataagactaatttaatccccgtggggatctaaatggggggaatttaatccccgtcgggttcgtgggaaaccatcccccgtccctgttccccgtgtacccgcgccacgaaacttttttattcaagttagttaatttattt

SEQ ID NO: 180525 - DNA, 649 bp, Zea Mays
gaagtcctgagctcgcctgaagtttccccggacccgccctccattcactcatggtgagctcgccccttcctctctctatcccaaccctcctcgcctcttgccgtgctcggcgctgctctcgctcactgtggccgaagcccggccgaaccagcccaagccgccatagagccgctgcgcagacacgccaccgaagttcgtactccctctgtggttcatcgctgtgaggggaagcccatcgcctacccctctctctctttcgtgcccttctcggtgctcaccatggccggccttggtcgagcccgttgcggcggcaaggccccgtggccaagctccccggtgcgcaccgtcagtcgatccgcccagtcgtgtgtgcaacagcagcctcaccgccaccgcgcatcatgcgcaggtcgtcgaatccagtcccgaaaccggtcgtcgtgcttgtgcaaccgcgtgtgaattgggtgctgtcgaagtttagacgacgttcgtctacccctaaacgactcccgtctaccccccgtctacctcgtctattcccctgcgctaattaatttcctattcgattgtcgatcagtaaactgagtactcaattggattaaaattatgattttagttaggcgattgtaaatatgtgataatgtga

SEQ ID NO: 180526 - DNA, 1197 bp, Zea Mays
gttgggtcagggacgcgcgggggtgtacggtcgagaccggggtggcttttatagccgcgggcgcgggcgtggggttggcacagtgtggggctgcgcacgtgggctgagcgccgggggcgtgctctagcgtcgctagggcgcgttgaacacgtggtcgtgttcatctgcccgagttcttgcgccagcagagctccaaaatgtgcgaatctcgccaaatgtcttgtgcaagatctcttcctggcacctagggctagctagtttgtgtaagttccaatggaagatctgcactagtttgcaagatatgcgggcgccaagtcttgtctgtctacactgttcaccagtgacaaaactgatgtcaaaccatgtcaaacgaccttggtttgatttcaaattttcagggatgtgccttgggtaatttggccacttttttctatttggtccaagtggttttggcgccagcacaagggtgaacacatttgatctttgggctaggggtggttttggggacttagagaattttgaatggctctagtgtgctccccacttggtgaattgttttggggtttttattgggcctttttgtaatacctctcttaatatattttgtagacttactaatatacttcatctttggtaaaggttcccttttgtgatttggccatttgcccactctttcccctttaatcccatggttagggtttaatggcttaagaggggaattagggttttagaaccttgtttatgggtgaaaattgtatgaaggctagggttcctttcttgtgatgatcaatacttggcttaaccatgcttctaagcttttaatgccttcacttcctaaacttagcatatagggtaagaggccaaaagtgtgctcattgggctagggccttgggtaacacctggggtgttacaattatgaatctgttcatggagttttgatttgctctgttcaaacttcatgaaagatcttattttccttcacttttcctatctatgaagtttgagagggttttgtgcagattttgaggcacgacactgccaccctgttggcccggcactactggccaacagagcgacacttccacttgcctatttttgttgttttgcttctacatttctgcagacaattgacttagctctactctaggtttttggtgcagtcaatcgatactggattgatctacatagtgttttgct

SEQ ID NO: 180527 - DNA, 446 bp, Zea Mays
ccgagctagggatcgagcgaggcggagccagaagggggatcaggcaaaccaagaggaagccactcgagtggattacgcacccatcctaggactgactaccataaatgactggtcgcattaactgcgcctagcaccgagccacgataggaaagtcagacctccttccactcatgacttatgaagccataggcctaagacccactcattacctaccaagcttaggcctgagtaccctggcaatctatagggcctacagcacgacgagtcgcattgagactcaagctatggaggccaggggccggcgcgacatagagaaagtaatgatgatgccaaagctcctcgcctcccacgcgcaaccggacttaaagagcttggacagagagcttagacgaccaaggcgcataacgacaagcatgttcctaccagggtagaatgcttcgttctac

SEQ ID NO: 180528 - DNA, 572 bp, Zea Mays
ggcgcctgctcgaggacggatcggtcgacttgtttgccgagcttgcgcaattccagcttcaaatcgtccatggcggcgtcgaccttgggccgccactggtcgaaatcggctgtcgccgactccagagcgcccaagcgtccttccttgcgacgatcggcctccgtgaactgactttcgagcgcagcaaacttctttgtcatctcgtcaaggatcagcttcgtgttggcatccatggtttggcgacgttgctgcgatcgagtgttgtaatagggaaaaacagactacgccagaattacgactccaggaatcgacgaatctgataccagaatgttagcagaggcaggggaggaagatatttcgtggagcagaagaagaagaagaatagcggggaagcaggtagtggtattgtgatatctgataattgccgtctatagtgttccgcttattacatatatatatttctcactactgcctcagccattccggcccacatacacgcacattgggcttgcgcactcgacttgccactcgtggcccattcacagaaggtgtctttccagcagcgccttcct

SEQ ID NO: 180529 - DNA, 444 bp, Zea Mays
cttattcgcaaggtggcgcgaccgaaggggtatgcaagcgcgccagccgttggatctcaacctgacggttgcgattagatcggtccatataatgaaccggtatgcgattgcggccacaggattctaaatctacggtcagcatttaatgggacgcgattcaataaggaccatccgatccgcccaacggctcggatcaaatcaccgaaagggtacactctgctcttaatcggagccattacttccccgatcaacggctcaaaatccaccgtggaaccatctactcttagccctccgataatgatcctatggcacagaagccatcttctacttccagggcgaggacacagcggcgaccattgttcccgcgacggaccctcgccgtcgctcaaccagtgttccccgtacacgcgccacagattccccaatctgaatcccataatcgct

SEQ ID NO: 180530 - DNA, 410 bp, Zea Mays
gcagccagaccgcagagatgtcgcagaggccaggcaggcaccagaggcgggcgtcgcagagcgtgttcgtgctgccggagaacttcgcgctggaggacgtgccggcggccgtggccgagggcggcggcgtcgagcagcggaagcccgcggccgcagacgcccccgagctgcaggcggcgaggcaggcggggcgccaccgccgggccatgtccatggccgtcgcctcccgggacctggagatgatctcggaggacattgggattggggcctacaagtacggtgcgtagaggtcgtgtgtgcttcgccagcttgttggctgctacatgctgctcccgtcctctggaccggcggtgcttctcgggccgtttagctaggagcggaagcgagtggctggctgtactccgatcggg

SEQ ID NO: 180531 - DNA, 301 bp, Zea Mays
cggcggtgagcccgccactgtaaatgccaccaatcgcttgcgccagagcacctccttctctccggccgccgcgcgtctttccccgaattagtcaccatcgcgcaaggatcctataaatttagcacaccctcgactccgctaggtattcaagcaaccagcacacccactcgtgcctccaattgttcacctgagcccccgaattgctcacttcccccaaatcgggtttctgccaccgtaaaagggtcctcgccgtggctagctcgtttcaggtccgatcttatcctctgctctcttgtttcag

SEQ ID NO: 180532 - DNA, 802 bp, Zea Mays
aagttcatactccaacagttccctttcagaatgtacgacagagtcatggagagagaatcactgtcgtcttccccgcatacggctcaagatgcacacttctctgcttatgaattcaaacacatggccaccagcccaccaccatttatatgacaaagatgactacgtgaaggggaaaacacaatagagcaaataaaaacataacagaacacaaccccattaatcatccaggcttcaatcgtcaagagctcagcgaagaacacacaacagtggggggatggcatggacatccctctcggcctctcctacagaccatgcccaaatcaccacgatactcatccaaatcgaaaacaaaactagcaggttgaagccacaatatcttgtctataaatcaaacagtagcatccggttctggctcgaagccagccaaacgaacttgcccacaatctatcagcagagatggcggagctgcctccgtgggagaacgtacgggagcggctcagcgtcagggtcggcttcggtgacaagggtgtaggctggctggccgacaagcgccgaggtagctgaggaaggcggcagccagcacgcgcgacggcgtgagcagaaacgtggattggaaggagtaagaaggacgcaaatttccgccgtgagtgacagtaaaaccctacgcgcagcagggaagccaaatctcccaaatcaacctccaaacacgacgctcgcatcagcctataccgaatccgctgagagcatgctgagccccccgaactttcccgaccactccgtcccgaatctgtactcagctccc

SEQ ID NO: 180533 - DNA, 459 bp, Zea Mays
aagcacacatcctaggccttggtgacttgcatcacaatatatatcaaaattcttctgtagatctggcataatcagcactagggttgccaccaatttagatatcaattggttgaaactatcttagcattactcagtccacttaaactccttgcccttttctaacaatgaggtcataggcttcgcaatcttggagaacccttcaatgaatcgccggtaatagcctgcgagtcccaggaaactccggacctccgagactgtactgggtatcttccaatcaaatatcactgttacttttgccggatccacagaaattcctcctttggagatgatatgctcgagaaaatgtacttcatcaagccagaaatcacacttggtaaatttggcataaagctgattatcccataacttctgtagcaccatatgtaaatgttcctcatgatcactatcatttttggaata

SEQ ID NO: 180534 - DNA, 437 bp, Zea Mays
tctctgatcctctccgccatgtctggcgaccatccattgagtttgtgggtggaaatctcaggttgcctgacatcactatgtcggctttcctcccagggatgtttgaggtgtgtgttaggtgtcctattaatgtcaccagctcctgccctatacctctcaggctctcttgtggccgaacagtattcaaccctatgtccatgaggtggtatggtatgattataatgcgttgctggtggggcaccataatgttgctgcgatgaatgtggaaaatgtgcatattgcgcagctctcggctctgcgtacgcatatccagacggtctagcgtaagaggccggatggtccgcgacctgtccaaacgacccgaaggtatatccggattgtccagccgtatatggtgctacgtgggtagtctcgtacccagaccgtctatcgtaaag

SEQ ID NO: 180535 - DNA, 823 bp, Zea Mays
gaaaattccccgctcgcgggtatcaattcgttttgcgtgcggcggctgctggagaggaagacgtgtgacggtgtgtgagttagggttagaaaacattctacatgtttgcatttggctggaaacctggaaccaaatttttttttttgctaggccattaggctaactctaaccatttttctcttccaaatttattcctttaaaaatctatcacacaaagattcttccaatatatttcacctaccgtgcgatcgttcctcttacacagctctcctctaatcttagcttattcgttgcgactttaatctaaccgtggctgcaacttatacagtattttgtctatatgaaatatagctattgcggctgaatcatagggtttagggttttagacaattaaacttaaaaatgtttaatttgcaattaaaaaagaactagggttatatatatattcgggattcaagtggttagggttatatcatgcagtcttcaaactgttccttaggcgactcctattttcatcacctaacaaacgacgaagggcttatttctcttgttgcctcgcttgccagttgtcatagttttgcacatctaaagttatataggattaattgagttagacgcgtgtttggtttatggtcatagttgtggcacggtttttcttctgttgtgtaggtcacacttgtcagcaacttgtagaatatatagcaaaatcctctctgacacgtggaagttaagcgtctaaccatagataaaagtttttttagcacattgggaatgcaaaacaaagcatggccgaaaatcccccgtcggagatcgggctcgtcgc

SEQ ID NO: 180536 - DNA, 507 bp, Zea Mays
tgcttgtatatcattcccaagggcagtggatggtctcctaatgccgaagcaagaccatataggatgttgaataatccccttaatatcctccctttcacttaggtcattcttcacgtagaaccattcctgcatccatgcctccgaccatctcttccgaaatgtgggaactgggtagctcacctcagagcgaggcacgaagctataacaactgaagttgttgtgatattgctcttttccggtagctttcatatcataagacagctcatggatgttgcagaaacattttgcatttggctcaagtccaatggctcctcatggcccatataaagatccccaccttgatgatagcttcgggagtaagctgatgaaggtaaattttgaaggttcttaggacttcgaccagcaatttatctagagggaactgaagccctgccttcatgaagcttctataaactaccacttcgtcagcttcgggcagtgggaaattattctcccctctagctctca

SEQ ID NO: 180537 - DNA, 395 bp, Zea Mays
accactcaatgttggagataccctgttggccaggtactcttgcaccagatctctagtgctgatctcttcagccacgaccctgaattatgctacagcttgttggcatggtgaccccgacgacatgcggcacaggggcctagtcagcccgtagcttaaactcagcgggctcatcactagcgtcttcaacttctccctcttcttctcatcagccttgatatagaccactcacttttccaaccggttggccacttggtgtgatagctaagcaccggggccttcatatccttgcgatatgcgaagttataacagccaaagttttcatgcagcccgtcttctctggccttcgtctggtaatttagctcatgcactcggtaaaaagcttcagcattcgggtc

SEQ ID NO: 180538 - DNA, 834 bp, Zea Mays
gggaggccctggccacggaaagcttcgccccagcggcgaaatctccacgccggtgagcaatttcccccgcgtcgatatgaaatcccacacgaaagcttcacggataaacgcagggagcactggcgaagtcccccggctaatcactggggcagtatcgcggctggaaattactaatgccaacggcggcggagctttccccaacctcggtcattcacggtgagttaatagcggcggagtcggcgatatttgggtgagatgaggattaggcactcatcttatggccttaaatctccaggaggtcggcccgagcgcccgcaacaacctccccgtaccccggattccgcgcgcggttcgttggagctccgcagagccggcgcgcgtggggaggaaggtgagagctgacacgatggcccacgcaacagagactacacggcgctggtggaaagacctgggtggctggcgaccgggacccgcatggaagtcaccaagcgcgcgcgattgagtcagctagtgggccgcaaaagagaaggaaagaggagatgggccgaaaacgaagtcggggcccagttaggttagttttgttttattcttttcttttccatttctttttcttcattttcaaatccaatttgaattcaagtttaaattcaaactttatggctcatcatttacactatgtttgtacagttaaaagtattaagtttaaggatatttatatttttaaatttttatatcattcctcttcttcttattttcaaaaccctattttcaaatttagggtttaatcaaacttcaaataattattaccttattatttttatcctcattatttta

SEQ ID NO: 180539 - DNA, 1060 bp, Zea Mays
aatgcgtcagagtatgaagcactgattcatgggttaagcatcgtcgtatcactcggcatcaagaaactgatggtatatggtgactcgctagtggtcataagccagataaacaaagactaggactgctcgactgattccatgggcaagtactgcgcagctgtgggaaaactgtaggacaaattcgaaggattggagttccatcacatggaaagagaccgcaacgcagcagtagatgcgttgtcgaaactgggatccagtcgggcccaggctccacctgggatattcatccaagaaatatcacaactgagcatcctctcgaatcaggtggaagagtgcaacgccttgagccagccagagtcagaccctaacgactggagagaccctgtcatcatgtacataaaaattaagaagagccggatgacaaggctacagtggaacgcatcgcgaggcagtcagcccactacaccatcatagggggcttactgtacaggagaggtggagcaggagtcctcatgaaatgcatccacccggctactaggaagcaattgttagatgaaattcatgccaggccgtgtggggtacatgcaacatcaaggactctggtcgggaaggctttcagatccgatttctactggccaactacaaagagtgatgttgccgagttagtccagaagtgtgaggcatgtcaattcctatcaaagcaacaacacttacccgcgcaacagctgcagaccattcatgtaacatggtcgttcgcatgctgggggctggacatgattggacctttcaagaaagctcagggaggctatactcatatactagttgccattgataaattcacaaaatggatagagtacaagccaattgcctctttgacctcaaccaaagcagtggagtttatacaagacataatattcaggtttgggataccaaacagtagcatcactgacctaggatccaacttcaccagcgccgaattcttcaatttctgtgagcaaaggagcatccagattaagtatgcatcagtggcacacccaagagccaatggccaggtagaaag

SEQ ID NO: 180540 - DNA, 470 bp, Zea Mays
gaagaagtgcaagtgcctgcatttgctgaaactgatcccaatgggtgtaacctgcctgctattaaccccaatgggtgtgacctggatgacgctgaccccaatgggtgtgacctggatgacgctgaccccaatgggtgtactgtccgcgttgttgatgagggtgaggaggaggaggatgaaatccctctaactcggaagaacaaccgacgctatattgctagtggcgaaagtagtggtgttccttctctagccctgtccgctcttgttggtctacaagaattgtctctggccaactttgatcagactcttgaggatatggtcccagaagacctgttgtccgagccaacagatggtggcatgatggacgtttgcgctgatgtgcctgatgctgggctggagttgtctcgggcggcgtcccgcacctcatcgaccttggagcgcagtcttaagggtcaggaggttggcccggc

SEQ ID NO: 180541 - DNA, 320 bp, Zea Mays
cttggtggagctcagttgttgagatagctatcatcatcacagttccatgggatcctagcgacctccacgacaatgacttggggacaagtcgtatttttaaggaggggacaatgtcatgtaccagaagcgatgatgggctcaaaggaggcattgggatgggctagcatgggcccaagtggtattgcaacaagctatgctcaaaaggtaacgacatgggaacgagaggggatggaacaatcagaacctaaactctctaccactggcggttgttcgtcttatcctcccctcttccctctcatgtacctccagtcttctagaac

SEQ ID NO: 180542 - DNA, 512 bp, Zea Mays
gcttcctgaaggatcctggggcggaggatgagaagaggattgacccagatccccctggtggggaggcggggcaaactgctcacgatcatcaaagtattcttcatcttcttcttcatcttctggagacatgaaaggcaccccatatgcctactggtgccactcattgatttctggaggaggcggatggagaggcacatcaggcgaacgggggcaaatggcatacccatagaggaagcttgacgacgaagattgtcgtcagtctcccgctgccgccgagccagctcatgtacatctgaagatatatttctgcacatggaaaagaatgttgcaatgccatgggccagacgagcacccatcccacgaccacgacctcgaccacgaccatgaccacgtgatgtgggagatccacgaccaggagatggacgcgagggtccggcagcagcaggtccacgagagctagagggcgctttcctcagacaccctgctggattgtttggatcaatccagaaggg

SEQ ID NO: 180543 - DNA, 825 bp, Zea Mays
caaaagtgtaattttcaatttgtgtgcgtaacaatacctacttaaaaatttggataaaataatccaaactaaaacagatataaatatttatgcacatcatgagtgggatttgctaatgcacccagtcttggagacttgaactaggaatgaaattgaatatttgaaattgaattgaaaataaaacaaaaacaggaaatagaaagaaaaaaggaaaagacaaacaagtcatgtgggcttacactcgttcccggcccaacttctctctataccgcgtgcaccccagcccatctcaactcacccgcgccgtgtttgcctctctcctgtcaaccgagcccacctgcctgctgctcggtgcatgacactgatggcctaggcccgctgctcagcggcttgcgcccggcacgtttctctatcacattggtcgttcccttgttcatcttctccgccagatcgagcgggcgcacaccattcgccacagattccaagcggggactgagtccctcgctcgcataatggctgccgaaacccacgcacttctacggggtataaatactaggcgcgttcctgcccttgctcacctcatccgtgcctaggacaggtgtcgaggcagccattcctgagtgcttctccgccgaacgacaccgggacccgccaccgccattgcacctttccggtcgccttgtcggtgcttgggtgagcttcggccaccaccaaattcacacattgaaccacgaccttgtgcaaatttcttgccgcaccaccgcgcaatcgcttcgctccgtggacagcctcaacgccatactcaccacttgtaagtagcaggac

SEQ ID NO: 180544 - DNA, 773 bp, Zea Mays
ctccttctctgtacttcggcgagcccagcacgatgcaagggaaacgaacagggaagcagcagccatggcaggtgtaggaagatgctcgccgggtatctggggtattgggtgaggtgcttggctgctcacgatgcttttggttttctggaacgggatgcggtggcttgggttttatactccagaggataggattagccttagctagatggctcagctgttgcaaccatccaggaatctaggaggtggttaagtgcgcgtcccgaacaaactcagagagaaggaagatatgggccgcagtagttgtagttctggctctaggatctgcatgcggttgttagaatggaggtggtgctaatcttcgtatccacatgcaaaatggccggtccacgcgctacgaagggagaggccgagtaggaagcaagtttgttatgacatgaacgtgacatgcacaagcagcacaccaccagctcgacgtgcatgtgcatgtgcatggcacatgatcctgtagttgtggctccgggagtggtttccatgtgcatggctaggcggaagaagggcaacggaagaagggcaacggagaagatactaggccaggaagggaaaacgacataatgatctcaattctctaatttccttttgtttttatttcccttttcaattccttttggatttctatttctagatttcaaactcatactcaaataaaagtttgagttagatgcacaaaccaaaatctcggcatggatgcaaagtgccttttacctatttattta

SEQ ID NO: 180545 - DNA, 612 bp, Zea Mays
aattaggcggtagggtagggtaccatatgaatgtggtactagttaaggatagtgagaaaaagcgaacgtaaaaggcttccctatcggccaattctcctaattgtgctaggaactggcctaagtgctcacatgtactcttcccacattcatcagaaaaattgaagaaattcggttcctagtcccttgtgggtatgttgtagagtcaaatcggtggttgtaaggtttctaataagacgatcctgaactaggcatgctaattcgtagcctgtctcgaaataattcggttatttcttcccgaattttatccatagtagccggtgtgtaggaccagatcacgaaatgtgaagctcgaaaggtcaggtgttgttatgccggctatatgtgtgaggatagtctatggtgcgtggtggtgggaacccttccctatgcatctggtcgtactctgtcctaggtgttggaatgcttcggctttggtggaccaaaggcgggggaggtaatgctgttgtggtgtagagtatgactacatgttgtcagtatggtgccaatttatgtactgcattctagacggtccgtgatagggcaccagacggtcaatgaagtgctagatggtcc

SEQ ID NO: 180546 - DNA, 726 bp, Zea Mays
attctgccagagaaaggcacttatcccaattcttaccatagtgtaacacacatgccctcaacatgtcctcaagaatctgatttactctttctgtctgaccatctgtttgaggatggtatgctgagcttctaatcatggttgttccaagtgacttttgtagctgctcccaaaaacatgccacaaacagtgctcctctatcagacacaatagtcctcgggattccatgcaaacacactatttggtcaacatagatctctgcatatttttctgccttgtgggtggtatgtactggtaagaaatgagctgtcttggttaacctatccacaatgacccaaatggaatcgtggtgcctggaggtgtttggcaatcccacaatgaaatccatgcaaatgtcctcccactttcaagaaggaatgggaagaggctgtaaggtacctgctaccttcaaatgactggccttgattctttggcaagtgtcgcactcagatacatacttagctatttccctcttcatcctggtccaccaatataaggatctgaggtcatgatacatcttgttactcccggggtgcatgaaaaacttggaaagatgagcttcgtccaatatttttttcctgagttctggatttttaggaacaaccaagcggtcttcaaaccatagaactcccttgctgtcctgacgaaagcatttgtacttatccaccttttgttcgagcatttccttaa

SEQ ID NO: 180547 - DNA, 644 bp, Zea Mays
caaggccaatgttgtggcagatgccttgagcaggaaagcccagtgtaattgtatgaacatggatgcaagagtaaccaccccaagctgaacctagaagtcatttcctccggtgctttgagttatattttagtggagcccaccttacatgagcagatagtcatggcacagattggtgacaagggtgttcaagtcattaaggaaatgatcaagcaaaaggtggacaaatacaaatgcttccgtcaggacagcaaaggaatcctatggtttggagacagattggtggttcccaaggaccctgagcttagaaagaagatattagatgaagctcacctttccaaattctccatgcaccccggcagtaataagatgtatcatgacctcagatttttatattggtggaccaggatgaagagggaaattgctaagtacatatctgaatgtgacacctgccggagagtcaaggccagtcatttgaaggtagcaggcaccttacagcctcttcccataccatcctggaaatgggaagatatctgcatggattttatcgtgggattgcccaatacttcccggcaccatgattctatttgggtcattgtggataggttgaccaagacagctcatttcttgccagtgcataccaccca

SEQ ID NO: 180548 - DNA, 340 bp, Zea Mays
gtttcccctcagctaatttcactaatggtgcactaacacgccctatccacagtgaccatgtgatcaacggccaaactaacgcgttcccggctatttaagaggtcctagtccaattggcagggtcggggagtatcaggagaacccaaggatgctgaaacaagaaagcagagggcaagatcggacctgaatcgagctggccacggcgaggcttctttcacggtggcggaaagtaggtttgggggaaatgagaaattagtgagctctggtgatcaattgagggcacgacttggtggctggatgcgtgactaccctacagacctgacggtgtgctcaatttata

SEQ ID NO: 180549 - DNA, 435 bp, Zea Mays
gagatgcataaagcatgctacaagttaaaaatgatgatcggagccatgtacagaggaataaatgtactgcttcaagtagtacccaaagaccatcgcaccacatgggatccaaactgaaacagagctgcacgtgcgaagaccatcgcaacacatgggatccaaactgaaacagagctgcagcatgcaagagaaacatagtccagggacatacctgaacaatggcaatagcaacaatgacagacccgtttaaaagcacctacaggacctactatgacctgcggcaagaacaaaaaatagggaaggaatcaaggacaacacgcaggaacagattcaatttctattgatgcataggtgctcttggattgcaaaagtagtaattaaatagagtgagactctgatctgccaccaatgcctgccatgcatatggtgcctgca

SEQ ID NO: 180550 - DNA, 885 bp, Zea Mays
ggaggatgaagaggaccaacaacgtatagtgtggagcgtggctaagcatggccgtgaccgtgcatgcgccggacagcacggtcgtgtgcaatatggcgacatgactccgataacatactctgttgaggcgtattatcgaacagcttgtgtgcgtggaccaagtcttcagcaaagtccaaaggcaacaccaaattcttcaaagcgccacactggctgatggaggattgggacaagcaacaacacatagagtgagacatggcggacgatggacaatgttggcgaccatgcatgcattagagagtatatgttggtgtggccctggtgtgggcgcaaatggcagtaagaaccggcgacgcccaccgtgaacggcgtcggtggccatgtttggcgctggtgatgtactggtggcgacaggaggcccgacgtggcagtcgggcagagatgaggtctgacatgaggaggaggacgacgagcgacctggttgccgacaaagagaggggaggcgcagtatagaagaatgcaccgttcctgaagaagcaagagacacgcagggagcgagggggagcacgtgcacgtcgcctccttcgcctaggctcctccaggcgggttcgcctcgactccttcgtccaactattccagtggaggaagcaaggtgtcagatttactcttttaatggatgtccggatgcttccagcagggagcggaccccggacgcaacatcgctacggaaggagtcggttgatgaagagcgctagcagggagcggacgtaacatcgctacggaaggagtcggttgatgaagagcgctgattcacgatccgatggcaggaattaattaaagtgacgtggctaaatggtgtgcatgctttcctcccgcgtttaatat

SEQ ID NO: 180551 - DNA, 453 bp, Zea Mays
ggcccaagcgccatcatttgggctaggccaacccctggccttcgtagcctgggtctcggcgcgtcttgtcgtgttacgccctggcaacagcctgcgtgcttaggcctagtcccgataggtcatgagtgtgtcgttggtcaaaggacgcacgggccataaatgcacccaatccgaggggctcgtaggtcatgagtgttatgcggctagaggggttcgtaggtcatgagtgggaggtagaccggcgcctccgctgtggctcgaggtcaggcatagttaatgcggccgtccatttatgatggtcggtcttgggccaagcatgggatccacttgagtgatttaccttcagcacgccaagcccccttgtccggttccgccatgcctgaccgtaggctctgtggcgcggggttcatccgacggtgggttcttctaagaaagacgttacctatctccttc

SEQ ID NO: 180552 - DNA, 681 bp, Zea Mays
gggaaggagaataaataacaatatggaaatagtaatgtttatattcatgtttagatcatatttgatatgaggaaatctgaatttaaaataggaattagaatttgagttgaatggtggaaatttgaaatagaaatttgaacatgtgaaagaaattaaaatagaaaagaaaaggaaaaatgggaaatggggaaaacactggtatggggcctttggggccaaattcggcccatcctattctgtccgtctcggccgcgggtattaggcaccgatagatggggccaaaagaccggcgccatgttgcggctgtgcgtgtgacccgctgactggtgggcccctgcctcacactcgctcctctcacttccgcgcgggctcaggttgtcagcacatctctcaccctgcaccaataggctccgacgcgaacgcatcgcctcgccagggatcctccagctgttgcaaccacccgcaattgatacgggtttaggtgggacttctgggtatttaagcaagaccgggccacctccttgtacatcatgccgaggtcaccatcgccgggcgcatcgaggatcaggactggtcaccactatcgccgtaagcggataagatcgccgccaagcagtcctctcgctcgcgtcaccgattctaggttacgggtggccttcacaagtcactgagtcatcccac

SEQ ID NO: 180553 - DNA, 341 bp, Zea Mays
ccgaacactgcctctgttcatctgcctggtagaggtagcacgccagatcaccagcgatccgcacgtcgcagcagagcaaagatatcgcggggagcaagagtagtcaacgcacgaatggtgggcacggtgtcgctagcggcgggctacggctccgatggcgtgtaccgctcgccgcgcctggtggctgccatcgcctccgacccgggcctctccgtcacggacctcgtccttcgccgcgccgcggcgtgcccctccgcacccgcgctcgtggacgccgcgacgggccgcgccctcaccttcggggccctccgatccgcggtgctcgtcgcggccgccgcgct

SEQ ID NO: 180554 - DNA, 622 bp, Zea Mays
tagggtatgaaattcacagacactaccctgcagttgaaagaatgcctgttcatctaccaaatgagaactacatcacctaaaatgcaacagctaacatgtctgaaatattatcagaaaatttccttagaaaaaccatgttgacagagtggtttacaactaatgtccaaaatgaaaatgcatgtaatctaacatacattgacttcccatcaaaatggcgatgggacgacaaaacaaggagctggaaatctagagaacaaagagaaggcaaaataggccgtatatactacgtccatccatccgcaggcgaaaaatactacctacgaatgttgttgctcactgttaagggtgctacaagttatgaggacctcagatcatacaacaacacactacatccaacttttaaagaagcatgtcgagcacgtggtctactaaatgatgataacgaatggtatgaagcttttgacgaggctgctaaatgggctacttcagatcaactacgtcaactctttgttaccatgttgctctattgtgaagtgggtgatgaacacatattttttgaaaaggtctggaagcttctagctgatgatatccaatataatatgcgtaggacattacatcttcc

SEQ ID NO: 180555 - DNA, 775 bp, Zea Mays
gggttctattctaaaggaaggtggggtttcttttgcaaattggcggtcgaagggatattgttgggtcatgaccgtaggatcacccgcatacggtcaggattagaacgggtcccagatttataatatcgacgtgcgagactcaaccgttggatcaaggatcaagagtccaacatggttcagccgaggcgttaaccctccatttaatctaggccaccggtggacagatcaatggctagcatcagccccggctgatgatcaaatctccactattaaacgcaacatcaacggtacttggccaaccccccatctccggtcccaagcccaacggcgcacagagcgcagccaccgggatacgctgatacggcacctcggccataatggacgcacggaaggcagaaggggcggtaagcgatctcaccttacgacgatgcgtagcaagggaaagcgcaagcaacaactcgcggggcctgggcgtggtgctcggttgctcgacgaccggaggtgcggtggttagcagcacgacacgactgcgagagaaacgaccagagcgcgagagcagggaaggctttatactgcggcgtgggcgcgatcgcgacggtggttgccgagatccccggcgcggcctcggtgttctgtttcgcaggagaagacgaccaccgcgcagggcccacacgtaagcgacgcaagcgcgcgtagacgcgaggacgcagcctggcgcacgatctcgttcgccaaagacgtggtgtccatatgcgcgcgctggcgagcggcttca

SEQ ID NO: 180556 - DNA, 446 bp, Zea Mays
agggcgttacacatcttgatgctagcctgatagctgtcgttataagagaactcagccaaggcgagatgatcctcccagctacccttccaagatagaacacaagcacgcaacatgtcttccaaggtttggatagttcgctccgactgaccatcagtctgagggtgaaaagcaacactaagagaaagcttggtacccaaagcgctgtgaagactctcccagaatttggatacaaatttagagtcttgatctgaaacaatagacttaggcaccccgtgaagcctgattacttctttcatatacaagggaaccaactctgaaactgaatttgtggtcttcatgggaataaagtgcgcagacttagtgaagcgatccactacaacccatatagcatccttgcctcgaggagaccgaggtaagccaaccacaaaatccatggtgatatgctc

SEQ ID NO: 180557 - DNA, 603 bp, Zea Mays
gtctttttagcctggacaaactacagtaacctggtagagctatgtttgatgaataattttggtgcagtaaagtgggcatgtggtgttgggaataaagagaaagggagagctgaacttggggattcagtcgagtaaaacagtggcagccatttcagaaaaatttgatggaaatatcttcatccatcaattgatctagggaattctatggtgtgccataccaaaagagacttatgtgaagggggagtttatctgttacagtttcaccacaccgaggataagtttgagggggtgcaaatcctatctacttggtgactcagctgctaactcttgccttgctgtcatacatgcagtgaaggtgtgttggactttccccctgtgctttcaccttatgtggtaaccatgcagtggatgtgtgaagtatgtgggctctggtttagtgttgttaaatgtcccagtgaagcaccacaagttcatttatgtttgtcttgccatagtgtgttgaacccaacaaactgtgctccattattgtgtcatgtcgattccatagcttctccgtcgtggataacctatcccctacaccttggttaagctctcaacctctcc

SEQ ID NO: 180558 - DNA, 553 bp, Zea Mays
gaaaaacataaccgacctgattcaggtcaaggaaatctacccggcaacgtctaaattcacgacatcaagcagaaaagacattaaccaaaaggagccagagaacatcatcaggctgcgacacagcgcacaaaccataaggtagtctagacaggactgacaataaaaaaggggacccaagccacaaatcagccatccagcatccagataccgacggttactccaaatccatcttctggacgtcatcatcagcttgcccttgaatttctctcccaggattcctcgcatttgcagctttcagcagaagcttggccccgtcctgaagtaaatcttgcagctctttcttgctcaaacctgcccagttaaaaatcaatgcacaagcatgacacacaatttcaacaggagagctgaccacaatgttttgaaagcacacattattcctggctttccaaattgcccaacaaatggcagcagcacaaacagtgctaatttctttggcatcacccaaattactatcaaaccaaaaccagcattgatgcaagtttccaggaacaac

SEQ ID NO: 180559 - DNA, 802 bp, Zea Mays
aattcttctcatgctttctcaactgttttgaagcataggctattacttttccttcttgcattagcacacatccaagtccaaggtgtgatgcatcgcaatacacatcaaatcccttgtgaatgtctggcattaccaatattggtgcagcggttaaccttttcttgagttcttcaaaacaattctggcatgcttcatcccacttaaactctttacctttctccagtagtgaggtaagaggtttcactaacttggaaaaacctttaataaatcttctgtagtatcctgccaatccaagaaaacttctgatcttggacgcatcctttggttgcttccaatttagtatctcacttatctttcctgggtccactttaattccaccatcagtaacaatatgtcctaagaaagcaacttccttcaaccaaaaatcacacttcgagaactttgcatacaattggttgtcatgaagcttttgtaggactagccttagatgatcttcatgtgtttcttcattcggagagtatatcagtatgtcgtcaatgaatatgaccacaaactgatccagatattccatgaatactttattcaacaaattcataaagtatgccggtgcgttagtcagtccaaacgacatgaccaaaaactcatataatccatatctcgtagtgaaggctgtcttgggtacatcatctgcttggatctttaactggtgatatcccgaccttagatctatcttcgagaatatcttagctcccttcatctgatcaaataaatcttcaatctgaggtaatgggtatttattctt

SEQ ID NO: 180560 - DNA, 487 bp, Zea Mays
gctaactcaaaatatttcccagactcaggcttcccacatatggacggcgggttcatatgctaaaatatcaggggctttttcagaaaagggcgcggcgaagggaaaccgatcagatctggccgtccgatccttggctgatggcgcggattagatcagacacccaccgaaccagtatgggctcgggatccttagatcatgactgaacggcccagattttatgaagcccaatctgttccgagccgtgcgatcacaaatcaacgatcccgattcacacaccgaaggggtatgcttgattaaatcatggccgcccatcagtgagtcagcagttctgatctatcaggttgaagcgatacatgtgattgaatcgcattagttcactcggagatcgagggctcccgcgggttctcctacctccagcgcccagctcggctgtgcaggacgccccgcggcggcgcggcccgccggtgtgcctgcaagcgacagtgcc

SEQ ID NO: 180561 - DNA, 414 bp, Zea Mays
ctcgcttttcttccgcagataacctttttcccgaagcatgtcatacaatataatcaagagcttcagaagatgcttcgagtgtgggagtggcagttggttcagacagaagttgttctgaaacttctctttccgtttctttatctccaatttccagggattcctttttggcgggctttgagggcccagcttcgggtttggcatgactctttgcagcttcggcttcagtttcctttgtttcaatttgcatttttgaagcttctgctgttttccctggagtagagcttgaagtctttatttcttccagtacatctagtacgtggaccatccttttcctcttaggggtaactgtaagatctttttgtgccttcggcactgtcacctctgccgaaggacttgtaatttctgatatctttg

SEQ ID NO: 180562 - DNA, 631 bp, Zea Mays
cttcttctctactggcttccgtgcctccatctctggcgcctcctcctcaccgccagcgacagcagctcccctccggtgatcctctggtgatcaagcctctctgtgctcaggccttgcttctttcccctctggtgagcagtttcttctcccccttctcttctctctgtcctcttcacccaatgagcaccccactcccccacctttgatttcttttatcaaatctatgaacttcctgtgaatcaaagtgttggatgtgtgcccttgtgtcccattatatctccttgcaggtcttgagctccttagggagggtttcaccacctaaaatgggcatttctccaaaaccctagaactctgcacgtcacatgctcggtgaaatgcccaaaccagccaaaaatgctccaattaaacccaaaattttcaagcaccttcaccatacctccagtaacatattagccaaatttcacgccaatccaatataccaggcttcgattttatccaattccccgttttgagcgatcaattccgagccgagtgcccaaattcctttttcttcgcctaaaatcaaacccagcgcacacttcactcatatttacccatataaaactattcatgaagtatcggctcaattcca

SEQ ID NO: 180563 - DNA, 551 bp, Zea Mays
gcggaaggaagagcagagagaaaatgagatggccgccgcgactggattccgtcctagccgccagtctgtaccaattgggggtcttgggtgattcgcctcgacacgctgatgatgtctgcgacctcgccacatggtgtttgagactgcggggaggaaatataccgccgccgccgcggtggaattctctgccgtgtcgcgccaccggtgaagaaccctcctcgtcgtcgtcccaatacctgcacgcggttgtggggatgcgccagcgatcggggaacctgtccgtgccatcgggatgagctagacgaccccgagtcgaggggaatttcatgccggagtcttcacctcgaccccgatccgccgtgcgccgcgggtggcttcgtccagctcccaaatccggtaaatttggcccctccatagttcgtcgcaaccgtagcttggtgtagcgcctgttagttttgaaataggagcgcccgtgcgttaatcggcccttcgccagccatggcaccgccgtggttcttggatggcgccgctgtcccgagctggggagtggg

SEQ ID NO: 180564 - DNA, 662 bp, Zea Mays
gcagccggaggagcagcactggagccaccaacctcgtgatcatggatcgaggtggcacaggaggtggtggcggaatccctagatcctcatcatcatcggaagaagtatctgcaattgcaccctgatcctcaaactgtcttatggcctcatcctcaaccctgatttgtgatgctggagatagagctagaactatgtcctcaggagctaggcgatagaagccgaactgcagtctggaggcctcgagggtggactggaactgaggaggttggatcaactgagcaaatatgtggcataagtagtgagcgtacggcagctgacatcgcacggagaccatccaaaactgtgtcctcaatctcacaaatcagaaaatcgaccacgtcaaactcagagtgtgagatcaaggcaccaagtagccaaagctggatatgagtggtggtctctctgtatcccatcctcggtagcagtgtgcgcctcatgagctcatataggaacttggttgctggagtgaagtctgctggagaaagcagcgacccatctgtggacagaggtcgaaatagggcggcgacgtgagcagtgggaggggcaactccgccgtgagggtgacgaggaggatctgacgtgccatagcacaagctgtggagcctcatcgacgactcaggaaa

SEQ ID NO: 180565 - DNA, 508 bp, Zea Mays
caccgaggctggtcttcgaaagcatagatgaagcagaaactaccaggctagaggatattgatgtgctggaggaagagcgattgaacacagtaattcagtcagccagataccagcagaccttgaggcgctatcatgataaagccatacaacaccgatcctttgtagtgggagacttggtccttcgccgaactctaataggggaaggacagcacaagttgtcaccactatgggaagggccattcgttgtatcagaggtcactcggccgggatcataccggcttactcaaatggatggcacggaagtggggaattcatggaacatagagcatcttagaaagttttacccttagcaaggcctcaaaagctaccggagcaacattgtactctgtaattggagaatccatcatcattaaagttttcattttcaaaggcattcaaactcttgactatcagctgactttgattcaattggacttgttatcaacacgcttactcgacttaggatgac

SEQ ID NO: 180566 - DNA, 286 bp, Zea Mays
accatcgctagcaggagggttggacacaaactcagaaaatggcctgattggtggcaggttccaagcagaataggccacaagagcaccagcatttgaaactctgcccctcaggatcatgtccagtcggctcatcagatcttcagtggggattctcatgttcgtaacccgggtagaatcgttgacgccactgtacaaataagcagggtacgccctgtccttcaagggttggatgttcttgaaaatgaaatcagcaaccacaacttcagcagtcagacctctatccttc

SEQ ID NO: 180567 - DNA, 515 bp, Zea Mays
ttctctctccctctcgattcgatctgctagtacgatggcaatgcggccacatcatttctctctccaccaaggcgaacgctagtttcccacgtatggtcatggaagcaaggaacccagcagcaggcttatgtagccgtacgatggagtccggccccgagatcttagaccgagaagatccgaatccggcggcgatggcttcgacgggcgaccaggaggtcgttgcttcgactgagagctaggggtgtacgcgatttgggcgaacccggagctacccgcgagttccgcggacggttgaagaagatgatgtcctggatggcccactcctcagccgcaccagcgaggcgatgagtcgttgaccgaatggatgcaggcgcgctccagagaggtggatgaagcgcgggtcccgtctgcagtgagcgtgagggaagtgaggctggtggcgctagggtaaggcgcggcaagagcgctgacgcgcgggggttactgggccgcgcacaggagattcggcccacgcg

SEQ ID NO: 180568 - DNA, 711 bp, Zea Mays
gtcttaagtcgtcgccgacttaagtcgattgctccgtttgtagggtatagtggtcaccctgagttacgtgagcgtgagcatgtcacaccgccttaagtcgtcaccgacttaagtcgattgctccgtttgtagggtatagtggtcaccctaagtcgagtgagcgtgcagattgacaataaacagttcgagtgcccttgagaatgaagtctttttattgatggtgtacttcccaattacagaatacaatgctgtcccaatagcttttgaaatctggctaggggtaaaatttcctgagatgctctatattccatgagtttcctatttccgtgccatccatttgagtaagacgatatgatccaggccgagtgacttctgctactatgaatggtccttcccatagcggcgacaatttgtgacgtccctcccccgctagaatttggcggaggacaagatctcccactgcaaaggatcgatgccgtatggccttatcatgatagcgcctcagagtttgctgatacctggctgactgaatcactgtattcaatcgttcttcttctagtatatcaacatcctccagtctagtagcctcagccttagcttcagctatgttttcgaagatcaatcttggcgccccaaacttgagatcagcaggtagcacttcctccgaaccataaaccataaagaaaggagtgtttccatgcaaagctcggc

SEQ ID NO: 180569 - DNA, 1236 bp, Zea Mays
tcacaccaccttaagtcgttgccgacttaagtcgattgctccattagtagggtatagtggtcaccctgagttacacgtgagcatgtcacaccgccttaagtcgtcgccgacttaagtcgattgctccgttagtagggtatagtggtcaccctgagttatgcatgagcatgtcacaccgccttaagtcgtctccgacttaagtcgattgctccgttagtagggtatagtggtcaccctgagttaagtaagcgtgagcatgtcacaccgccttaagtcatcgccgacttaagtcgattgctccgttagtagggtatagtggtcaccctgagttaagtaagcatgagcatgtcacaccgccttaagtcgttgctgacttaagtcgattgctctgttagtagggtatagtggtcaccctgagttaagtaagcatgcaggttgacagtaaacgatttgagcgcctttgagaatgaagtctttttattgatgatatatttctcagtttacagaatacaaggccgtcccaatagcttttgaaatatagctaggggtaaaacttcctgagatgttctatattccatgagttcccaattttcgtgtcgtccatttgagtaagacgatatggtccaggccgagtgacttctgctactatgaatggcccttcccatagtggtgacaatttgtgtcgtccctcccccgttagaattcggcggaggacgaggtctcccactgcgaaggatcgatgccgtatggccttgtcatgatagcgcctcagagtttgctgataccgggctgactgaatcaccatatttaatcgttcttcttctagtatatcaacatcctctagtctagtagcctcagcttctgctatgtttttaaagattaacctcggtgccccaaacttgagatccgcgggtagcactgcctccgaaccatagaccataaagaaaggagtgtttccatgcagagctcggctaggttgagttctcaggctccagacaacatacgatagctctctgatccactttcctgcgaacttttaattcttgtcgaagactttctttctgagcgcttccaatatcatcctgttggctctttctacttgcccgttggctcttgggtgcgccaccgaggcatatttgatctgaatgcttttttgttcacagaaatcgaagaactctgagcttgtgaaattggatcccaggtcggttatgatactattcggtatcccgaacctga

SEQ ID NO: 180570 - DNA, 919 bp, Zea Mays
ctgccaccttccaagtcctttttcgattttgtgtcaaatcctcctgctagtgacagtggtttgggtcttagagtgcgaccttctcttgaagaagttgaggttctggttgcttcgcttggagatcttcctaatgatgagaggcaagttcactttgagatgcctatgagtacgggtgatgcagagataagtgctatgttggacgtgttggctggggattcttctggcttggtccctactgaaacagtggtattcggtattccgaacctgaatattatatcttgtatgaactccactgccttagctgaagtcagagaagcgatgggcttgtactctatccatttagtgaatttatcgatggcaaccagcacgtgagtgtatcctccctgagctttcttgaagggtccaatcatgtccagtccccagcacgcaaatggccatgttacgggtatggtctgtagttgctgtgctggtaaatgttgctgctttgataagtattggcaagcttcacacctctggactaactcggctgcatcactctttgctgttggccagtagaaaccagacttgaagaccttcccaactagagtcttggatggtgcgtgtatcccgcattgcccggcatggatctcatatagttgttgcttcccagtggctgaaagaatgcacttcatgaggactcctattgtgccccttctgtacagtcttccccaatgagagtgtagtgagctgactgccttgcgatgcgttctgctacagttttgtcatctggatcttcttcattctttatatatctgatgattggctccctccaatcatcagaatctgactctggctagctctgaacattgcactcttctgcccgttctaaggaaatactcgggcgtgatacttcttggacgaaaaccccaggtgggacctg

SEQ ID NO: 180571 - DNA, 719 bp, Zea Mays
ccttccgccacgggtcgtaggtcaccgtgggcaggtcagtcagtgcatccatcccaggtatggtgctctctatcgcgttcgttaggttcttcggtccctttttcgcctagtcgtatcccacatcgacggccagaacccagaacatggcgtgctccggcgagccttctgccgtggtccgctcgggctccgccgctggcgtgttccagggaggaagaaagcgcctgggacatcagatcctatgtggacggctgagatcataacacacataccctttcgcttagtgttgcctcgaccgtcgatcttgcagtgagcgaatcagattaaaagaaacatatcccttcctgtattgaacttagaccgtggatgggagattatgtggtggggattgaatccgacttgattgaatatgggccgtcgatcacggatccggtggtccctagtgcgtaccgcttggataaggatgcgatctaatctgcaccgtgcgaagacaatccaacggccctggatgcatgatacctcttcgccgatcccatttttgtaaaagagtccctgagtaccataaaaatgaacccgtcgtcctgtgcgggggaaaactgagtcttaggtaattttatgagtgagaccctgcgttctctgttattgtgtgcgcagcccgggactcagagaaaataggagaaatgaatttggaaaatgaatttccaatataaaaagaattccag

SEQ ID NO: 180572 - DNA, 325 bp, Zea Mays
gctttggttcacctgttgtttaacgctagctacagaagttcttcactaccctaccaacaatattcaggtgttgaatggtccgatgtgtatccagcataagattttgtggggtcttctctttgtttggaatgaatgaacacaacccacatgtcactgcacgaaatgttgctaatttgctcaaggatatagaaggagatcctgatttggccgaaatagagttatacatttatccacagctcttcttaagtagattgggggttctccctatcgctggttggaccctaactgtgaaaagctttcttgttccagactctgttgtaatgct

SEQ ID NO: 180573 - DNA, 505 bp, Zea Mays
aaaagctaagctatcctaaggagcgctactccctatcacatctactcccagcacggtatctagtgggcatatgaggcaatgctagacttcggagaaggaggtcctcctgagcgagctacactagcggtgtccatgctagaagctggctcgggatcctcccccttgatatccacgtcctcatccacgtccaagtcctgatgcatctccaggtgatgcatgtccaagtgctcgttcgcctcctcaagttgttgctgggtattctggagatggttttctagaaccttgacggtgtggttcctttcttccacttgctcttcaagctcacgaatttgggtactcatttgcttagtctggaggtccttctccaccaactcagtagatagatccaccaccagatcctcccagtcagtgatggtgacctttgcatcctgagccaagcccatcaactgtgacatggcctcgcgctgtaggacctgtaggcggtaaagtgcactcatgcatcgaa

SEQ ID NO: 180574 - DNA, 727 bp, Zea Mays
atctagagcagtgccaactaccccctatgtattaggagccctgggcttgaaataactaaaagaatccccaaccaatcgagcaaatccggctcagctcaacccagtccaagcatctggtcacgctgactgaaactacccacgaaaccatggtgaaaaaccaaccacccctaaaactgtcccaaccaatgtttaccctgtgtgtcaccgtgccgagatccatggaggattggcccctctccccaagcctagattcaaggcatcacctccttcctcgctcctgcggcacccggaggtggagacgccctgtggcggttggtcccggctgagatcacgagacgattccaagcgggctcgcgtgtctctcatgctgtcaggccatagcagatctcgtgcaaggtcactgaaagggaaatgtgcccttggaccaattctatttattttaatgatttaaagcccaacacattactatggacaaacatctccttgtatgagcatgaacactggtggttgtaaagcaaattgtgagatataagaaaaggcacctttgggcttgaaagtgggcacattactagggacaaatgtgaagtcgagccaaaaggagcaaaagaaagttggcacaaaaagaaacaagttgggctgaaatgggctacaccggatggttctgtgccacccaccggacaaattggggtgcatcggacggtccggtgaccgtccaggcaaacatgcc

SEQ ID NO: 180575 - DNA, 481 bp, Zea Mays
caaaacggcaacaaccagactatccatgtcatcaaaaatttgtcccccgtttgattacaaatcaacggtccatatctatcactacatcagtggcaagtaaacaaagaaaaaaaaggacgaggctctcatctggagagttccattaaagctggttcaaaacggcaacaaccagactatccacgtcatcaaaaatttgtcccccgtttgattacaaatcaacggtccatatctatcactgcatcagtggcgagtaaacaaagaaaaaaaggacgaggctctcctctggagagttccataacttccatctgagatctgacactttgcctttggatgcttctggcttcctccgcccccggtcctcttctagtcgcttcgtcttccatcgctttcctcatctctgcatcattctttcttagttgctttgtctttcgtcgccttccttatctactttgcttcagcctaaacgctttgtctactgccg

SEQ ID NO: 180576 - DNA, 848 bp, Zea Mays
agaactaatcatatgtgtcaaaatgatgctctgacctcctcggcagccgcttgaagtgccggtggagctgttcgcggaagaccgacggccggtagacagcttcgtcgatccttctctccaggagacggtcgaagatctccttctcgatgccagtgtactcgtgtgaggcgtcggcggccgaggagtctgctactgggtcggcggcggaggacccgaccacggcgacctccttcttgtcatcttcgtcctccattgcgctcccgcgcgcggtgctgatatgaattgcatgccccttacggctcgatcggacataagtatatcgcgtcggaattccggccgatagctagcgcgcgcctagggtttaccggctgccgaacagtgaggagttctcgagggagggtgtccgatggcgacgacgagacgaacaaatgtgcagacgggggaatccaagggaatgatctctggcggcggcggtggagacagcgacagcggccaaactactcgatgtccctcatgatgccacgggtcactgctagctagtcgatcaaccagagtttcacacacatgtatcgaatatatacgttttggctgattagacagatcgtcttggtcttggcacagataatgatgtcccatacggttcggtgtttttattttcctccatttgtttgtgtgtgtcccattatggctgattgtttggcacacataactaacttctaaggacatactccaactttcgacgtttggtaaagatttaggatcaaagttagctaacttccaaagagtccttagcaattaacatggacggaccaaaaacttccatcttatagttgaatcgccagaagtta

SEQ ID NO: 180577 - DNA, 593 bp, Zea Mays
atacacaaaaaaactttgtgtgtcgtccttggggctacaaatagaagcggtggtcggccttggctggttactgaacaccttagggcttttgtgtcgttgcttgagtatgcttgggaccctctaactcacttgtgcaagtagcaatcgcattcgattgcgagcgagtgattgccagtgcattgtgttgaaagattgcaagctgcgacactatgttaccgagtttcaagctagtgtgcttgttccttttggaggttgctacctcctagatggcttgatatcttgtctgaaggttgtgcacgtgccaccacttgtaagaagatcggcgacaacctttaagcttgcctcaatggggattaagaccaccaaatcttgagataaaaaatcattatttcagcactatttttcctgtttgcatgcaattcgcttcactaacttgtttctacttgttcatacttgtgctagtgagtagtgatttcttttgtttagctagtttgcttgtgtagcttactagttgtttgtttatcttgtatagctaagtagtagtatctctcctattaagtttatatagctttgctatttgagtagtgctagtg

SEQ ID NO: 180578 - DNA, 579 bp, Zea Mays
ttagtccgtggcgagtccgcaaagctgggctatcgtcgctttggcgtaacagccttaaccgcccacccgtttgccctggggtatataactatccctgaggggcccgcttgcgaggtctttgtctcgattgggagtctagccgccacttgtagtcactaccgccgacgagcagatacgtggagccgttgttatgtatcatcacggtggttgtcggtcgaccatgaggggaaggtgtgggcctcacgaaggatgctccgctgtgactaggcgggcgtggggaggtcgtgttcagcggcaatggctcgccgctgtagaagacgcacaagggaagccatcgacgcaccaccatccacctcataggtacagtgctccgcccttgatctgctaaattccatacgtcacacgtagattaagggggaaagagtattgttgcgccgggccctggaattggggctcatcgcggtcgtacactgtgtgtcagccgccgcgcactggaatttggggtttacatcacattgatcccaggatgccacccacatttgtgtccaatacctcctaggctaagtatagcatttctcg

SEQ ID NO: 180579 - DNA, 618 bp, Zea Mays
aactcccttatccactttcctgtgaacttttcattcttattgaagacctttttcctgagtgcctccagtatcatcccgttggctcgctcaacctgcccgttggctcttgggtgtgctacagaagcatacttgatctgaatgcttttttgctcgcagaaatcgaagaattctgaacttgtgaagttggatcctaggtcagttatgatgttgtttggtatcctgaatctgaatattatgtcttgtatgaattccacggtcttagccgaggttaaagaagcaatgggtttgaactctatccatttggtgaatttgtcgattgctaccagtacatgagtgtatcctccttgagctttcttgaaaggtccaatcatatgcagtccccagcatgcgaagggccaagtcactggtatggtctgcagttgctgtgctggtagatgttgttgttttgacaagtactggcaagcttcgcacctctgaactaactcggctgcatcactcttcgctgttggccaatagaatcctgacctgaagaccttcctgactagtgtcttggacgctgcgtgtattccacattgcccagcatggacctcctccagaagtcgcttcccagtagatgag

SEQ ID NO: 180580 - DNA, 976 bp, Zea Mays
aaattaatttctgatattaatttctgattttcaatgctctctggattgggcctcaaatttcagaaagcgcaggggctaccacgaaaaatatcctaagactcagactgacactgttgcggactgcgggttctatttcaaaaaaatacagggtctcattaacaaaagtctccgcgaaggggtatcgcggatccagggtcgttggatctaagtcacgtggccgagattaggttgatcaccatccaaaagcgttgagcaatgagatcctctggatcccgcaccaacggtgtggattttaagtgcatacgatctgctttcacccacacgatcctggatcaacggttaaggccaaccggtacgcagagactaatcgggaccgcccatccacgaatcaacggctctggtgccgtcctcaaccccctggctccctctctctctctccagctaatccccacgaccgagcgccattgacaccgcgctcagatccagcagctcgaaccccaatcctttgatcccgatagagctacgtataaagcaggtagtagcaggggcgatgagatgatgctcaccagcgaaccaacgacgaagaattctagccacgagaaggtgcgatccggtgatgagatacggactccaacgagcagttggcggccacctagcaccaagctctatccgcaggagacacgagcagcttccccgcaatcaagcgaagctcgtctgccagtcgcgcgctccgattgctagggatgcgtaggtttcccaccgcggcggacccctcccgcgtggtggtggtgcttctgtcctttcggcgatggcgagctgcgagaaggtatggcggcggctagtagggcgagacaacagaggggtagggatacatcgagtagggagtcgtggccttaaagcgtggagctgcacgtgccgcggattccgagtcagccggtggaagcgcgcggatccgttgcaaccgttcgccgcgagg

SEQ ID NO: 180581 - DNA, 554 bp, Zea Mays
gtttttgatttttcttcctctgatattcgtgttgtctagaataccggacgtgtccaaactcgcgtccaaaatttctagacgtgtccgaaatcatttcggatgtgtccggtttcaagtctagttttctagaagcagttccgttcatgatgtttttgttagttcttgtgtagttttttcttgcatctttttcgagtgatcttgtgtgagcttgatagttcgcgtatgacatcttgctacatggtatcttcttgttacacgtatttagatcaaatcactcatgcttgctttgtgaggtttgggtgagagccgaggactgaactttcgaaagaaatttgaggctcccattcacccctcctctggtcgcctttccgatccttcaattggtatcgaagccggttatggatccctccaccttaatcagttcatgatccataagaaggcaacatggatcgcgaatatggccatcatggcaaactgtctgagttcgatggagtcaattacccattttggaagatcaagatgaaaccgcatctcatggggattgactggtgtgt

SEQ ID NO: 180582 - DNA, 1753 bp, Zea Mays
aaaccccccaaaaccaaaaattaaaatccgccttctttcttctcccccgactccctcttccggtaagaatccggcccgccgccgccgccgctagcgtcgccgcgctcgctgcttctagggctgcgccttctcgcgcctccggtgccttccctgctccccacgatcccctgcctccacaagcttccttcacctgctcactccaaccgctgccgccatggcggagaagctcagggatctaagccagccggtagacgtgacgctcctcgatgctactgtcgctgccttctacggcaccggatctaaagaggaggtaatctcttccaccggaccatccgcggattacctgcccccgaccgactttagggtttacttcggttgctcgagcttcgagtctatccgagctcggcttgctaaatgcgaatggtacctgttttgctaaactaggatactttagtgtttagggttttttcttctgttggcgatatggtttggcgtgccatatgttagtccgtctctgaggcgccgccgccgccttatccttctccgttcacacttaccctatctagaccttcggaatgactaaatgttaaagcaaacgtgaatagtcggggtttcccccactccgagctgactggtcctttctcgtcaccagaggcctaacattgctagtttttgtgtatttgttttctagcctcgtggttttggcattgaacacagataactatatctgctgcctttcgttccagaggagcgccgctgatcagatactacgtgacctacaaaacaacccagacatgtggctacaagttgtacacattctgcagaattcccagaacctcaacaccaagttctttgcattgcaagtaagtttgtccactctgctgcctgttgttatacatggggggggggggtagcttgtgctcaaaagggaggatggatgctatgtttatgccctggtttgattggtttaaaatactacatgcaattttcaccccagtcttgaacttaaaaggcttgcttgtacagtcaatatcatatctacagactcacataattaccttagaatgcatggctgaccaaggtcaactcctgtttccattacttccataatatgattgcaagtttgcaactatgtccagccgcaaatggaactgcataatcaaggctatctgtatcatgataactttctctgtttatcactacaaggtgcaatttctttatcttcaagattagttataactgtaccccatgaaataaggctaagcaattgtcgcatacagagccttttaaggttctactttattttttttcaatctaaggttctactctctacttctctagcataggaacgtgaggcaaaaatcatatcaatgatgtaaatggaagatagtttctgagtgggctaactgctgcacgtgcggttcgagtgttttaatatttagcatgcgatgattttgtaccaacattcatgcagatacttgaaagtgttatcaagtacaggtggaatgcattgcccgtcgatcaacgtgatggcataaagaattacatatctgatgttattgtgcaggcaaggattagtatatgtcattttattaacatttgattacacttatcaattaataaaatctgatccatttaattgtttttgtgctactgccctttttgtactgttgacagctttccagcaatgaagttacctttcggcaggagaggctttatgtcaataaactcaatattattttggtgcaggtaa

SEQ ID NO: 180583 - DNA, 318 bp, Zea Mays
atctgaacatttggctatcgctgtagcctgaaatttagcttaggtttcgtccgcgctgaaactttcttagctcaccggtggcaccactgtctcagattcagaggacggaggatttggcaagggcagcatagaccttggaggcctagaggtgcgccaggtcaccacgtttgccaaggtctggtccaccacacagggcggccaagacggcctcggcgccaccttcttcaagccctcgccggtgcccgccggcttctccgtgctcggccactacgcgcagcccaacaaccggcctctcttcggccacgtcctcgtcggccg

SEQ ID NO: 180584 - DNA, 787 bp, Zea Mays
tctaggatttaatttcttataggagtaaacttaggctagttaaaaaatcttcattcgtgttgctattctatcaaagagctaccaagttgtgatagcctcggtattgttgtagccgacatctcgataatggaagacttgatttatcaccttggtgataaacctgagcaaccggaggaaggagttgaaatagactccaagtgttggaacttgtcgacacgtggtctagctaatccaaacagtgggagaacggggatgatttgatgcttgttaacacagtgtattagggcaacagtgtttttcagccttccgcaatgggtacagtgcgggggtatttataggtaactaggggacggtttcaccttatcaaatacagttatgccctcggttacctatgttatccctggaatattcccctctcaagggttattacaggtcattacatcgtgattaggtataacacggacacacacaccattaaccctacccacacagtggcttgcaagtgggaccaagcggcccagggcgattttacacgggcccatagtctcagcaacgcgtgggtggcgacataagccttcgtgctccatacgctaggtcttcaacagtcggtgaggccttcgccgttcctggctctaacgaggaccggcaaggccttcgcctacttcgtacgttccctctgtcttagggccttcgtccattagtcttcgtctgccttcgcttttcctctgtcatgatttatccctgtcaggaaacagtaaagcgaggggagtggtacaccttcgctcca

SEQ ID NO: 180585 - DNA, 700 bp, Zea Mays
gtccctcgctcgccacaaggctggtttgggttgtccgaggcttctcccagcgtgagggcgttgactacgacaagaccttcagtccggtcgtcaaaccggccaccatacggtctgtactcagcatcgccgtgtcccacacctggccgattgaccaactggacgtgaagaacgcctttcttcacggccacctcgaggagaccatctattgtcagcagccgccaggattcgtcgaccctggtgccccagaccacgtctgtcgtatgcagaagtccttgtatggactgaagaaagctccgcgggcctagtaccagcgcttcgccaccttcattcggtagctcagctttgtcgcttccacctctgacacgtcccttttcattttccgagaggggacgagcctcgcctacctactgttgtacgtcgacgacatcgttctcaccgcctcgtcctcagccctccttcaacgcattatggctcggctaagctccgagttcgccatgacggatcttggtgccctccaccacttcctcggcatcgttgtcacatgctcctcagatggcctcttcctctcccagcaacagtacgttgtcaagcttcttcaacacgcggggatggctgagtgtcatccgacactgacaccagttgacactcacgccaagctatccgcgaccgacggggttcttctgtgagagaaggacacatt

SEQ ID NO: 180586 - DNA, 542 bp, Zea Mays
cttcttcctccgctgccttttctccaatttccgaggttttctctttggtgggctctgaaggcccagctttggcgtgggcccggctcattgtagcttcggcttcggtcagctttgtctcggtttcaacctgtgttttcgaagccttggcaatttttcctggagtagagcttgaagtttttatcgtctccagcacatctaatacactagccatcctttttctcttggggttgctgctagatctttttgcgtcttcggcgcctccactcttgtcgaagggcttagaacttctgatgttttcgtctcttcggttctcggttcttcaattttgtcagtcttcggcattgcagtcggctcttcaatcctctgcgtaagagcaggtcctttggcttcaatagcggaagaggtctcaccgacaaattcaggcactatggctggttcaatgtagcgcggtcggtgagtaagaaccttcacctttttcctcttcggcgcgggctcgcttgaagcggctgaagcagcagccttctcagaagttgcaccctttc

SEQ ID NO: 180587 - DNA, 348 bp, Zea Mays
gctgaattcagcccgatcggcccatgtccagacaaacgcgctcgcgcgcacccgcactggcaatcttgtggaggggccctcgatcatttgaacaaacagtaaagaaccctcgacactatttctttgtatcactgatgtttgcacttagacccctaagcttctatttcttcaccggataagtccctggcgacggcacgctcactcgctggccatctccttgctgagaccggccatgaacagcgacaactaactaaaccaagtgctggactagcgtacccgatcccaggcgaccctaattggtcccttaattgagctatcccgacccggagttcttctgtccacgacgac

SEQ ID NO: 180588 - DNA, 774 bp, Zea Mays
tgaaactctacttcttcctcttaataaaaagcgtgtctcatgttactgtcgagagaagaaaaaaactcggcatcataatttcataatgcacatgagacatgtaccacctgcatatacaaacaaaactggattcctgttcgcattttttttgtgtgtgttgatgatcagacaatcagtccatcgtggaagagagtagacacatacacctttattttttatgatacatgttgtccctttggtagatgtcatgatggcaaccaggcagcagtacctgagaattgagaggtagcctagcctcttgatgtgagcactgtttggctgccttcaggctggcgttctgagatgaaatgttgcgtagaaattgaagcacctcactactttcgattagatctggctttcactcgtggagtgcaggcgcagggcagtttgcagtctctcttgaccagcccacacttctgcatgcttataaagtgcacgcacactacaacactaaatctactctctcccaatccttccccgtctctcctgtctccaatgtgcatggcacgggcggaggaaaagaaaatattttgctgtgcatgacaagatgtttgtactgggggagatcagggttcagatcacatatgtcctcgtgatatgtcaaagaagatcttgtggaccatgcacatagatcacacatgcatgcatgcatgcatgcagatgcagtgcagcagcacaaggctgccttgcaatgctgtagctgtcagcagcagcaacaacaaggcctgcagccat

SEQ ID NO: 180589 - DNA, 400 bp, Zea Mays
gggttgggtgcgccgggttgccggatctctgtgcgccggtgaactacaacaccgccgtggggagctcggctgcaggcgtaaggtaggagatgtactggtgccattgatctacagggtaacggtctagattagaaaggtggttgtggctatcggatcgatgacggacggcctagattatatcaaggataccccccttcgatggattggtctagatccgttgatcttggatccatcggctgggactctcgcgtcggtgctttaagggaagaccgttagatcgggatccgaccactgacgttggacaccggttcggagcctgggcttctaatccgcacccttgatttgtgatcgcgcggccaccattcacccgtaccccttcgctgaaaccgttttacaaaag

SEQ ID NO: 180590 - DNA, 785 bp, Zea Mays
ctatgcccggggataaaaaggcgtggaccggtggctccgctacgaaccctaggaccaaggaccccctaggtttctgccaccaccattaggaccgagagagtaaggaatgggagagtcagggcgctactgctgtggggatcgagctgggctgcatccctgtccgtgaatgggagtcccaaggcatcgcgggtgttcaccgcaaccgtgccgggtcttccctgatgcggtgggatttcatcaagggcagaattcgtcgtcggagttcaatgccctggcgcctcgtctgggttgcggcgatgctctagctcacttttgcggtggacggaggaaggaagaagacgcgactcggatcgttgatccggtgatgggcggaccagattagtggaacacaacactttggccaggggcaatggagtccgtagatcatctagcgaacggatgagatggggttctagtgtatctgttcgctcattttgatcgagccgtagattctaggctcgatggtccggatcgggtgggtgcgcaccgttggatgacgatctggcggccttagtttagtaccggttcggttagggaaagatttaatctgagccctaggtttctaatcggacggctagagtttacccgtaccccttcgccatggctagttttcaaaagagtccccgcagaattccataactaacccgccatccaactcggaatagcctgtgtctggggaacctttcaagatagcccccggccttttataaatgagtactagaacttgaataattcatagaaaattc

SEQ ID NO: 180591 - DNA, 713 bp, Zea Mays
actgcggctcgaggaacacgacgcggcgtgttgtgttggctgctgttagtgcgacgtctgttgtcggggcgggtgccaagagcgtcgtgtgttggattgggccagagtgaaaccactgacactagtgtgaatttatgtacacgtgctttttttaaaaaaaactacacgttcgtaaccgcacaaaattctcgtgggtatccctgcagacatatttatagccggagcgagggacctatggtgatgagtgatcgatttgatagaggtgataaaaaagataagggagatccgttgcatggcaagaacactgcaggggtagggcagctctctcaaataaagggtgttcgggtcgtggtctgtgcctgatcaaggtgatgaagaagatgagggagatccgttgcaagggtgttctaacgtacttgaagaatgaggaatacatgtgacgtccttattcatcctctcccaatgcttaagcttaactttcaaggccttgctgatattgtgcgagaatatttggtgggtcagcggaacttggaaattcatgctatccaacgctcccaccttggtcaggctctagtcatatttcgttttgtttttgatcgggacaacatggttgcattgggtccgcagcgagcgctagggtttaccattaaggtaatccaccatgattaaggttggaatcaacgggccttgaacttcaatagggagtgttggct

SEQ ID NO: 180592 - DNA, 1671 bp, Zea Mays
ggccggctaaagcttagtcgactgagacctatctggctgggtcgtgtctagccaaggtttgctgaagtagtcggatgagttcaaccgatagagtcctggttgactaaggtttgaccagccaacttgttgatattatttggtttggagttttccagaaaacccagacttggtacccaatggatgtgtatgtcgtcttgtccgcagagcagtttcttaagctgataggacgcaatgatacgtgtgagcagttcaattattgacctctgatgccgtgttacgatatgttttgcaagaagtgtgagtcggttagggtttaccacgcaggggagcgctcatcagcacaacagtgaaggagctcctccccgtctccactgcaggccacacctagtctaccaccgcccggatccttcaccatccggtcgatctacatatctccttacttgatttaggagagactgtgactgggattgggggtgatgggggtagagtaagagtggacgggggtcgtgtaccttgcggggatgggcgaggcaaccactgtctccgaggaagggggcgcatgcgttgatggcacgcaatgtcggccgcggtgggggcgagcggggcaggtcgcaggggaggtgaatgtgcagtgaggggggaggcaggggcgaggacgtgtggtggaggccgggggcgctagggtgggggcacggtgtagccctggtggacgcccacactgaacccttatagagcagtagagatagggcaggtataataggagccctggacttcggataataggagacctggtcggtaacggggtcaggggagcgtacaggaccactggaactgaacgcgtgggtgttcgaccggaccgtgacagggaacgtgcaggttggacgtcatcgtgaagtgtgttatgggtaaaacgttggtcagaacggcaagggtgttatcatatggtagtgggcggaattatagggattagattcctcatgcagacgtggattcagttaattgtggccgcggaatttatggatcttccatggagcataaaggtggaagggatagataaaatatggaataagatgttaaaagatatggcgtaacacatatacgctataaatgttgtgtatatagtatataccatttggtataaaactttgagttaatatggcgtaaatagtgattgagggatatttggattctaggtgacttgctccattatcggtaacagtttgaaaaaagtggaaataccctggaaagggggatgcggttacacgtttagtgtagcatccatcattgtcttcatatgaaaaaacataaggcttcagactgcatcaatcgttggcggtggagatggccaactctggataatcgccggcgatggcaggagatggagttgtgattcgtcaagacactgaggcagtcgttgatggtaacttaatggttacaccacctcatgttctaatggggcctcgaatcaacgagataagcaatggggaggaaggagaacatcggattcgacctccgatgtccaatattagctcccgggagatggatacacctcaagtactacattcacatgtaggttcaattgttgtatttgatagttgtttgagtagattgttatgagcataatcatttgtacactctacattgtcaatgaattacagcgaacaaccattg

SEQ ID NO: 180593 - DNA, 1117 bp, Zea Mays
aacaactttatttgagggaatccaaatgtgtgttcggtcaggcaaagttggaatttctgggtcatattgtaagtgcagcaggtatcactacagaccccaacaaaatcagagtgatcagggaatggccaaaacctgcttgtgtgaaggatgtccgtatttttttgggcatggcgggttattatagaaagtttgtgtccaactttggaatcatcagtagatcactcactaatctattgaaaaaagatactgtgtttgtatggactccaacagaaaatcaggcatttgtgactctgaaaacagccctgattcaagctccggtattagctatcccaaacttccgcaaataatttatcattgaaacagatgccagcgggggaggaattggtgcagttctacaacaggaaggacaccctattgcatttatcagccgagctttagggccaaagaatctgggattgtccatttatgagaaggaatgcatggctattctctttgcaatggaacaatggcgctcttatttgcaacatggtgaattcataattaaaactgatcaccagagtttaacccatttggatgaccaaagattgtctactccatggcaacaaaaggcattaaccaaattgcttggtctgcagtttcggatcacatacaaacagggcagcgaaaaccgcgtagcagacgcgctgtcgcgccgtcctaacttggggcaggatgattttaagctgcaactgaatgctacttcggtgtcatcagttattccgagttggctgagtcaagtagctcaaggttatgaccaagatccgagtgccaaaaagctactgagttgtttgcttacgggtgaaacaatggaacactacactctgtcccagggcatcattcggtttaagggaagaatatggataggagcaaacaaggccatacaacaaatgattatgtcggaactacatgaaagtgccattggtggccactctggatttccagtcacataccgtagaattaaatctaattttgcatggccaggcatgaagcaacaagttcatgattttgttcgtgcttgtcagatctgccagcaagcaaagcctgagaggacaaagtacccaggactattgttgccact

SEQ ID NO: 180594 - DNA, 1559 bp, Zea Mays
agggagaccccgctcggacaccctcggggcctgggccatagtttgcgctacccacctgagccggatcgcctccggcagtaccctcgggggctgggcagtggcttgcgtttccagcacgagccgaatcatcccccggcaacatcctcgggggctgggaaagtgtcaacaccaccattgaggaccaagttctctacagtagccgcctctaaggctgaaggtccctcaattacttccatgggagcaagacgatccaagtcagtttcctgacccttaggaccgcgctctaaggtcgatgaggcgcgggacgctgcccgagatgaccccaacccggcgtcgagcacgtcagcacaaacctccgtcgcaccatcatccgctggctctgataacagatcttctggaaccatatctgcaagagtctgatcaaagtttgtcagggacaattcttgtagaccaatgagggcagatagagcaggagaaggaactccactactttccccactagcgacatactgccgactgttcttctgagtcaaaggaacctcatcttcttcctccccgtcgttttcatcagcaatacagacaacacacccattagggtcagcagcagatggagcacccccattggggtcagcagcagatggagcacacccattggggtcagcagcagatggagcacccccattggggttagcagcagatggaacacccccattggggtcagcatcagtaaattcaggcacaggcacttcttcagcagcaggaaccgaaggaccaacatcccgatccaaactagatactcgccgaagacgtctctttttctttttctgctcatcagcagaaggatcaagttgattggctcggcaagggcatcttgggcgaacactgacaggtctctgaatatccaaggttgtatcagtttctgggagaggctccctcaccaatgtcccagcaggagcagcatcagaagagtccccagccagcaaatcaagcatagcacttatctctgcgtcactaggatccaaaggcacctcaaagtggacctgccgctcatcatcaggaatttccccgagcgaggcaaccaaagcgctaacttcttcggcagagggtcgcactctaaggcccaaaccgccatcagtgataggtggattcgacacaaaatgcgtgaaggctttggtaggaggcaggttccaggccgagtatgccactagggcaccaacatttgataccttgcctctaagaatcatttcaagtcggttcaccaaatctgcagcgggaattcttctgttggtaacccgggtcgagtcagctagacctcggtacagataagccgggtatgccctatccttcaacggctgaatgttcttaaagacaaaatcagcaaccacagcctcagcagtcagacccctctccttcagcagaccaacttcagctagcaaagcccctgcctcagccacctcctgatctgtgggggactcggtcccaactcggggtgcgaatgtccggctgtctccctgaccgtgggggagagaattccgtggttctcaacaataaaccactca

SEQ ID NO: 180595 - DNA, 772 bp, Zea Mays
catcatgacaaaattacgacttatatcctccagttacatcagttcaacagcaagcaactcccactcactaccacccacaacttactgcatcgcagaacaatacccagcttactgcatcgcataactactagccagcttatattacatgacagagggatatgcagcacctgtagtccatgaggtttctattaccagttatgtttctttctaattcatttccatagttcttaaattatgttctaacacaatacagctacactttaaccagtattatactcttatgtaaacattttagatcgtaccaacgatgctggaaccatacacggtttctgcaaaaccattgttgacgcacagaaaaaatcagagatcatcatgaagattgtgtgttacatctattcttttatgaggatgatcttcagggagaacaccttaggttcttggtttaccattgaagactgagttgaccgcatacagtttcacatataaagatcaatattttcgccagtttccgtatgagcagtcttctactgttggtaatgatacattgttgatagacagctattgttcatgtcttgtatattagccccttgtttatgccgtacatattcagatattatggtgcaagtggaaagattcatatcagtatttgccatggcatatatatatagctacaaactgttctcagattgcggctgtaactcgtgcagcttttagagtcaacataacaatgaagtttaggaccagcatacatacgcggaggcaactaattagc

SEQ ID NO: 180596 - DNA, 836 bp, Zea Mays
cgcgacgttagctgggttgttgggatgtttcacggggttgttgggctcggtttcccaactcctctcgtgtataaatgtgcgtagatttaccccctgctccattgtctaccgacgtggcccatcaacgccgtgaggagagagggtgaaagcagtaaagggatgcacacgcgacgtcgacggtagaccgtagaagcacgtggaagcatcgcccacacccgatgcagtcttgggtcgctagaattgctcatcagagcaagggttgggccaccgtccgccgtcaccatcgctagggcaacacatcaccccggttggggtaagttacccatgaacgaattccctttctttccctcatcgcgtagcatctatcggggaggaggatagcacactagagagccagttacgcttcgccggcgttgggccaccacagggcagggcggcgccgccgtgcacagggtggtcaagaggtgagggctaactatgagccactgatccttctttggatggtatagattagctgaggaaataacccttgagtcagtttgatcaggaccattgatcattcggtcgagggctaggatcggatcactatgtggacgcaaatcaggtcgtggttctgtgatcctacagctaggactcgtaccggttcataaattcgggtggatctagtctgggccgtgtgtttatgatccagcggcttagataggaatgtaccccttcgctgtgaaaaagtttctaaagagcccctcatcttgtaccaaatacaccagcgctccactcctgttcaaacaacttcgcgaactggtccaaaaccttataaaaccgaccctagctttcta

SEQ ID NO: 180597 - DNA, 968 bp, Zea Mays
tgagggcacggtttgggtggcttggtgcttgactaccctacggagctcacggtggcctcaatttatagtaggcaagagcggtgtccattgaatcggacgacgacgcgcgacggtcggaggagtgggaggtcactagcgtaaggaattcgtggcatctaccgtggcagccctcaccggtgatgatcagacagccgaagtgagtcacggcgatgcggtgaatgtgcccaggtatgtggcgcaaggccgtgaagcggctgtcaccggcgagctcatccgaagcgaccgtggcaaactcggtacggtggccggagtaaactattggtcggaagatatccacggcgatgatatttactcaatcccaagcgttatccaaccgatccgagcacgaatcaagacggcgaaggcacgaatctacgcgcggctcgtcggcggcaaggttctctgaacttgatccgccacgttcattgtaccatggtgattaccatgcagtcagtctgtcatagcaaaatcagagccacttttctcctcatttcatgtgacaaccccatcatcccactgcatcaaagttatatcccaattaaccaactgcaatcttgctatggggaccatgcccaaacttgcgctggatcatgttcaaatctgggttcaaagattgcctcattacactgtcagaccaggttcagtctccagacagcttgacagcccatctttgggtgtatttttcttcacatttttcataacaacagtgttgcatccctaaaacaaagttgttctcctttaatagatctacagaattgatgtggtgacctagggcaaaacccttatggtttgaaagttacaaggccccaaagttgagctaatatcactaatttcagacttaagcaattggaatatgagtggggctcttttgcaaataagtccaaaactcaagatttaggttgcaaatcttcataattgtgaaccatata

SEQ ID NO: 180598 - DNA, 593 bp, Zea Mays
aaataatttaccttgccgagaaacttctgcacttcaaccttacaggtcggaggtcccacattccgaatagacttgattcggtcatggtctatctctataccatgttcatgaatgataaatcctaaaaacttaccagccgacactccaaaagcacatttacgtgggttcattttcaaaccataccgacgcattttatcaaaggctttgcgcaaattagctacatgagaactaaactcagtcgatttgactacaatatcatcaatgtagacttccatagtgtttcccaacagctcgtgaaagatcaaattcatagccctctgataagtagcaccaacattttttagaccaaatgtcatgacaacccactcaaataaaccaatgaagcctggacatataaaggtcgttttagacgcatcttctccggccatgaaaatctgattatatccagcattaccatcaagaaagctaataattctattccctgatgcactattgattaatttgtcggctatgggcatgggatattcatctttaggagttgctctatttaagttgcgaaaatcaatacatactctaagcttacctgatccttc

SEQ ID NO: 180599 - DNA, 295 bp, Zea Mays
gtgctgaccaaacatagaagaagaaccaggtgatgtccgatcaatcatcgatggtggagattagaagatggtgcctttccagctcattttgattggggtcgtagactttaggttagacggtcgagatcatgggccacatactggttcagtttaggccattggataccgatctagcagcccatatgagacattgattcattaaaaggctagatcaaatctgggctctcgaaattagatcggatggccagggatcacagatactgtaggccgcgctgttttgcatatgaaaccctcg

SEQ ID NO: 180600 - DNA, 630 bp, Zea Mays
aggaggtgttgatctacccgcacgaattcgtcgaagaagggccgtagctaatccagaaccataaatgaattctcctctgaatcccccgcctgttgatgacatggcagctgctcaaatgtgactactgcaacaaatgtctaacatgatggaaatagaggcacagatctgtcaagaacgataggaaatgcaacaagaacgccaagaaatgtgtcaagaatggcaggaacgacaacaactaccacctccaccaccaccagctctgcctagggataagcattgggagtttatgagtcataagccacctactttctctaactccttggacccactacaagcttatgactggttaaagtccgtagaaaagatgctcaacatagcccagtgcactgacagggagagagtactctatgcatcgggtcaccttactggccccgctgtggattagtgggatgcatactgcgcagcacatgctgctgctaacaccattacctaggtagaattctccactcacttcaggaattaccatattcctgctggtctcgtgaagatcaagaaaaaggagttcctatccctcaaacagggagggatgtcagtaaacgaatacagagacaaattcatccaactatcccg

SEQ ID NO: 180601 - DNA, 931 bp, Zea Mays
cagaccctgaggtgttatcatgataatactatacgacatcgatccttcgtagtgggagacttggtccttcgccgaattctaacgggagaaggacagcacaaattatcacatctatgggaagggccgttcatggtgtcggaggtcactcggccaggatcatatcgacttactcaaatggatgacacggaagtagggaattcatggaatatagagcacctcaggaagttttacccttagcaagaactatcggagcaatgttgtattctgtaattgacgtcttcaataaaagatttcactctcaaaagcattcaaactattggttatccatcgacttcgacttgattaaacttggaatcaaaacacttactcgacatagggtgaccactataccttactaacggtgcaatcggctcaagtcggagacgacttaagacggtgcaacatgctcacccttactcgacttagggtgaccactataccctactaacggagcaattgacttgagtcggcaatgacttaagacggtgcaacatgctcgcgcttactcgacatagggtgaccactataccctactaacggagcaatcggctcaagtcggagacgacttaatacggtgcaacatgctcgcgcttactcgacttagggtgaccactataccctactaacggagcaatcgtcttgagtcggcaatgacttaagacagtgcaacatgctcgtgcttactcgacaaagggtgaccactataccctactaacggagcaatcggcttaagtcggcaatgacttaagatggtgcaatatgctcgtgtttactcgacatagggtgaccactataccctactaacggagcaatcggcttaagtcggcgacgacttaagacggtgcaacatgctcgcgcttactcgacttagggtgaccactataccctacta

SEQ ID NO: 180602 - DNA, 811 bp, Zea Mays
gcattttttagagatggttagtgacgaaaatagcgtgtcataaaactatgacgacatataacatgtcactaaatttatgacggaaaaacatgaaacgtcacagatgatgcaatgccacgcatgataggtgacaaagcgattttcgtcacggatatgtcataaatttcaaaaattgacataaattcaaagtttggtaacataaagggaacgtcacaaaaggtcacaagtgttgtagtgactctccgccaccgtgaaacgagcttcaccgtcgccagccgtactccggtcagtccccgtcctctgctcccttgtttaagcattctgatgcggctgtgatactcgccaacccatccaattgaattaggagcccactagtcgccaggaacacgactgacttgccgcgatggtcacggccaccgtggccagagcaatccttgtcaccatttgtgaaattgggttgggggaaatgctcgggatggattcaattaggtgttagtcgctcgggaaccctagccgttgccccgttcggccagtaccgtgggctcgccggagctcctccgcgcgctgccgtcgtcggggacctagcgcggtaaagagataaaacctcagggacctcggtgcaagttgtcagtgactgttacacatagtgtctgaacccattcgcagtttgacagaaacgcgggggccgttctgcaaaaacctccagggcgcgggcgcgcgcgtgcgctttcccctctggactgggccgcctgggctgaaaccagcccattactgttgaagccttttcctttttctttttcagcagagcttt

SEQ ID NO: 180603 - DNA, 579 bp, Zea Mays
gaagggagtgaaacccacctccccgcacctccggagctgccattagacttagcccaagttctggccaaccaaacccgactcattgaagtcctcaccagaagccttgagaaccagcgcccgaatggtggaaggcctcaggacaggatgggagatttcctaaggctcaagcctcccacattcgctggatccagcaatccgctcgacgctaatgactagctacgcacaataaaaaggaagttagaagccatcggatgccctaaaaaccagcgtgttcatctggctactcatcaactttctgggatggccctatcctggtgggataccttcagcgctgccgtcagagatgctacctgggcagaaattgaagccaccttcagagaacatcatgtgcccctaggaatcatccagctcaaagaagatgaatttcgggaattaactcaagaagggagatctgtcagtgaatacgtctacaagttcacagaattggcacgatatgcgcctgacgatgtcagcacggaagccaagaagatggcttgtttcttgaaagggctaagaccagaactcaagactatcctcgcc

SEQ ID NO: 180604 - DNA, 466 bp, Zea Mays
gcccaactaaagaccacagtgaaaaaatctaatccctaatccccaatgaaagactccatgctcccgcatcctcctagcgccgcagcgagccgacgccgacgcccgacgcgaacaggaacggccaagccaccgtggtcatcgctccaccagctggtcagatccgtgactctgtcgccagttgctgtcaccccgagcagagccgtgttcccttgcccccgcccgcggtccacctccggctctggccacctacctccgctcgtctgctaagtcgtcggggtggcgccaggaatgcccatgccctacgccgagctccgccccggccgcctgttgccctctagtagagctctgcccagagctcctctccgtggacccatgaccctcgcccccgcctagggccactacccgctgggcgctggccgaggcgtcaagctccagctttgcagttccaccctatgcccctgcctag

SEQ ID NO: 180605 - DNA, 596 bp, Zea Mays
gccaagctacatgttagggtcagtttcaacaacagttgctagcagatcttgcctataactttgcattttctagcacttcctatagcaaaccagagtagcaatgccaccgtagccagtacaaatggctcatccagctgccctacaaactccagtagttccatctatacagtcttgtgtactttagggctatagagtctataccaggttgccccgctagtctaatgtccatcactcatatcactcgagctcctcctttgttggttgacttacctatagcactagagccatcaatttttgtagctctttgtgactgttaccaccaagacccttccttcatcacttacacatctgacccctcacacacaagttgttctagctcctcccatcaaccaaccagcaccagggaccgagcttgagctagcacctactaaacaggcaataacttcttctaactctaatgaggacattgttctcatgtagttcaacctgtcacctcacccttcagcacttaacaccatgtatttgcccctcctcaagattcacaggttttatagtttttggagcttgacaccaaaggggaagatgggagtataata

SEQ ID NO: 180606 - DNA, 715 bp, Zea Mays
attcgaagcgattagctgttaagtcctgatattgttgattgtactaattgtatttatatagtgaagtcgatagcctgtcttagtcgtctttttatcctatatgtagtagccgattaaatgtcatggttagttgttacttgtgcttccgaatatttagaaccgagccatattgatgaatttgcttccactaaaatctatgatatacatgataaaagagttgtacaaatgtttaaagtatttaaagtggtcagaatgcagtttcataagactatgctagttgataatgaattatccgttagatctaagaataatgtttaatgatgctcttcttactaaaccaattagatgttttaattaattgatatgatatgcaagttagtctaagtgaatagtttagaaatactcgttaaataacttctattcttaatttaagtctttagtgttatatattaatgaacctaggtttttggtgatcttttgacgtatgcgctagctttaaaaaaatgtagaacctatgcatggcttaatatttcttgatatttgagttaggtctagttaagatagagagggtgattgttgtatttagtaatatgtcgatactagtatcatgaatgttgtaatgcatctcacctttaagtgtttaattctatatcgtgtagcattgtttattcttgtgctagttcttcatatgattcattcatatgcatcatgcatc

SEQ ID NO: 180607 - DNA, 601 bp, Zea Mays
aatgagcggtcttggtcaacctatccacaatgacccaaatagaatcatggtgccaggaggtattgggcaatcccacgataaaatccatacaaatatcctcccatttccaagatggtatgggaaggggctgcaaggtgcctgctaccttcagatggctggccttgactctttggcaggtgtcgcattcggatatatacttggcaatttccctcttcattctggtccaccagtacaaggatctgagatcatgatacatcttgttactaccggggtgcatggaaaattttgaaaggtgagcttcatccaatatcttctttctgagctctaggttcttggggacaaccagtcggtctccaaaccatagaattcctttgctatcctgacggaagcatttgtatttttctgccttctgttcgatcatttccttgataacctgaacacccttgtcaccaatctgtgccatgactatttgctcttataaggtgggctccactgaaatataactcaaagcactggaggaaacgacttctattttcaacttgcataactcatcacatagggtggtgattcttgcatccatattcatacaattgcactgggc

SEQ ID NO: 180608 - DNA, 1104 bp, Zea Mays
tggaagttccagatccacaccaaacagttctacattcacatttaaaaaaaacaaaccgcataaatttcacgtgggggtggtggccaacagatcattcaccactcgtgcaagtgacagatagatgctgagcagccccaacgccaggtcaacactatatgtcacttggtgcaattgtgcctacttactctacaaaatactgtttcctgtcatactcaaaccacagaaatgtagaccctgacatttgcccaggttcatatcattcatcatggctcccctagcataagggtgggaaaaaggggttactgctaatcacgctagttaggcaatagaataagcacggccgtgtctccagaaaggtgagagcgaaagcagtgaagtggtctaaaaagcttttcaccactgcagtaatcaggagacaaggaaacatgtggaatgggcaaaccgccgcatacaggagcataaaagaaccgcaaaggcattattaaactagcccccccctaacgcgcggctttatcggctaagaaagggatcaggcagaggtttacaataaccatacccgacatggtggcatcgcaggaccaccagcaagggaacaaaaggctccagagcctaaaaggtacatgctcctactaatgctgctgtataaactaatacgtacacggacaagttcagagagattagaaaacaacaggatatgggagtgctgtgacaaccataccatacgatacgatccaggattgctgcatacgctgccaatctgcgagaaattgtagaccctatcccgtcgctctcgacgaacagaacagattcgcaaacccggacgcgacaacctgcaaagctgtaagagataaacaggtgcgggtgaaggctcattttggggttagtgaaagatgcatcctcagctgaaaccctgagcagaatcagaattttaagtgtgctccttgggacaaatgggcagtgccctgcctccacatgcacaccaccaactaataacagacaccagtaaggagagaaaaaaaaaggggcgccgcaaaaggagaagagtggagcatataacttgtaatggggcaggcacaataaagcctgattccaggggatcataag

SEQ ID NO: 180609 - DNA, 742 bp, Zea Mays
ggatggtcagcatagacaatagcgtagtttggaccctagaatggccatccattttgggagccttaattttgtcttccacaaggaagggacaatgatcagggcccaggatgccagaggtttcggtgacctctggctcagcccccttaggaggaatgcgggctgcaaagcgcaccacaatccactcataccaaggtcgtaggggtgttggaccccgtctgggactcattcctggacatcctcctgtcaggatcagaggacgggctcacttccctgtccagtgaggggagttgcaaccctagccatgagtgcttcgcaaccaacacaataaaggaccgtaccccccttgcataaacctagagggagcttccgccagtgtcatgatacgtgccacgacgtctgccctacctcagctcaacctgcctcttcgaggataaccattgagccctagcccttcacggagtagtcagcatcccgcggtagggagacagggactaccacggtggtggacggggcagccacaccgagttgcagggcgaaggcatgccatgaagataaacgtctcccgtcacctagcctacagcgagcgtgggccgcctcgtttcccttgagcaagccaaaatgtcgcgatcaccgcaactcttctaaacaaactccccaaggaagatactccaagcgagcgaaaaactcattaggcaatccgagatctcctcaccctcactatgcaatagtaagtcgagagctc

SEQ ID NO: 180610 - DNA, 716 bp, Zea Mays
tcagcatactcgtcacaccatcttaagatgtggctcgaacaacttcttttgtttatcctttatctgtgggtagcagtcatccttgttcttagaaaaataaacacaattcttagatgcaatctaggccaatcaaacaaacatcgtacatataatatgatttcttggcccagcaacaaacaaataagattatgcatggtcaaaaacatgtatggaccggttgtcaaaaacctagaaaaataaggattacatcaacgtacgaaaaatgccaggcttatccttactctcgtgttgcttgttgtatagatcctctcaattcccgactattcttgtctctaacatggcaagaacttcccagatccctggaatctctactatatttaggaaaccatcattattatatgtattaccgatcaaaattcacaaggttaatccgctgcatatttttagggagacgacatgaatgtggtacgagtatctaaccttgagctggtcgcgggagacgtcgagcgcgaggagaccgcagatccggacaacgggcttcggcagtaggcgcagttgccgagtggcgaggttcactcgctccaccaccttcccttcctccccatacttgagaaccagaggtgattggggcggaataggaggaggacgatgcgcgcagcgggcgcaatcgcaggcacggtgggcggcgacatctcgcgggctaggggcaatcgcgg

SEQ ID NO: 180611 - DNA, 561 bp, Zea Mays
cccgcgcccagccgtgcacgcccgcgcgctctcgccggtccacgcctgcccgtgcaccacgccgcgtctataagagcagggaagcctcggccatactccctccgcgcctcacttaacctctcaagcccagcacttagctccgacgagctctgcgccgcccgccaagcaacccgagcgctcgaccaccgtggattgacccctccaagccatccccactcaatttcgtgcctcggttagcttcaccaaagccccatagagctccccgaagcaagaaaccgggcgccacttcaccggagaagccgttccaccctcgccggagttgtaatccccgccggcgcacgtgaccacgactaaccggtaagccatagccaattactcgcgcctacgtcttccctagcacctagtgaagctcaatgaccaacttgattgaactctaccgccctggataggccggagtcctcgccgccgacgagctcgtccgcctacgcacgtggaccgacctactccaaccatcaccagagatgacccgcacatcggcgtgaccatcaagacctcccctac

SEQ ID NO: 180612 - DNA, 532 bp, Zea Mays
gcgggttatgaatcggtacgtgtctgcagccgttggatcagagggcaatggattggatttaattagtctatatctattcgtgttcgcgggatcggaatctgacggcccatagctattttccccagatccaaacctagccgtcaatctccaatctaacggccagtggcccttcttccctctcccccaaccctaacaccggcgagatagctcccctgctcacctgcacggcggcgctacactggtgagatatccaattcgcgcactaacttgctaatctcccaatccgacagctcctacgcacagcagagatgaaagcgagaccagtgaagggaaaattaccgaggattagctcttgggtgaagccagccatggcgtgaggcagaaccggggcggtgtgatgtcgacggcgagaaattgactttggcatgcgacctcaccacccaattgctggcaccgatagcttccccaggcgaagacgaccctccaagacctcacttcgagaacgaatttcttccaacgacgacggtcgctg

SEQ ID NO: 180613 - DNA, 469 bp, Zea Mays
tgaacacgcgagcaggggaacttgttggcgaggaggaaaagggctccaacaaacaacaatgtctaacagcagggcgctcgggaaacttcagcgcagtggctttgtggctccagaacaacgacgacgaaagcagagacagaaatagtgatgtgcgctagagagagcgggaggctgcgacctttataggcgagggagagaggaaatcggacagacgttgggcaccttgaagactgtctgtaccgccacattgatggctcgagaaatagacgtcataatcctctaataatggcgccatgaagctgagtataggaacagaagaaccgcgcgacagggtgggcgtggaagacgagcaggtcgacgacggttgtgccatgtcattcagacccagaacttgcgttagattatgaagaaagcaatggagtgggtcccaaatgacatactaagagagagggaggcatgaacggccggg

SEQ ID NO: 180614 - DNA, 693 bp, Zea Mays
atcagaagtcgttacactaaggaacgaagctctcgaaaaagataagatattgctttccttagtggacaggatgagatctagcgaagccaaacttgctgcacaaactgaagctcacaaagtcgaagttgaagatttgaagaagattgcagaaacgagcgaaaaatttgaagttgcaatggcgaagcacgagataagcgaaattgaaaaatcgagggcacaaaagaatgccgaagagctccacgactccaaagagagatgctacgaaatatccttggaatgcgccaagaatctaaagaacaaatttgcaaaggtgcgagcgtactcttccgagcagaagttcatccgcggtgaccccgatggggttatctagtggatcagcggggaggcggaagcttttgacgagatactcagtgatcaaggggatttctgtgcttttgctggtgcccgcggtgctgtatcaattttggaaaaggtcggctgtgaccatgcaaaggctgttgttcagccagaatttgttatctcagccgacgacattaagaatccttcagccgaagtgtcttcgttaagcgttaaattttattccaagtatggataaagggcggacatgagatagctgacgaagctattaggaaaaatgaaaaagaatctcacgacgctcaagaagaggccaaaagagctgaagaagctgcagag

SEQ ID NO: 180615 - DNA, 1022 bp, Zea Mays
cccgccatctcacgcaagaagcgtgtattatctgcggtggcattgaccatggcagcgatagcctcggccaacgtcggtggtactggtggcaggttgggagtatcttcctgaccacgggaagtcctcgccccatcatgtgcgcgagtccgtgatggtatatgaggcaaagaaacatttggggaaaaatataacatgccaacatataccatcatattacattaccaaaatgtaataattatacaaactccagcgtacaacgtgactttgctacttattttacataagtataacatctaacctatactattctagtcttcatcatccttggtttcttcatttcctgctgcgagagaccgttcgtcagcaaggttcatggaaggaggaggcctaaaaaggtccaactccctcatcaggtccttctcctgctgtccccgatgatctggctcccattgcaacagcatcggcaggcacgtccaggtgcagtcgagcatacagtacatgtacttcctcatgtaaagtattacagtacacttgtaggctgtcgagggccgcactaagctctgccacacgagctcgagcttttgcttcacagtcccaagtgatcgaacgcaagttgacggcccaattgatggccgaatcccgttcagatatctcataatgcaagcggttgacgtcagctgacaattcagctatatgttggttgttctgcgtccatatcctattctggtgacgtagctctgtccgaagttgttccaccttggcctccaagtctccgattgggtcattgctgccgctactactcccttcatgtctgggggctaaatgataacgaggcatgccaagaggtccagtagatttgcgtgcagttttccttgtacgcgccatgtctccataagaggggaaattttattagtataattttaatcatgatgcatgcataacctaataaatacggaatcaaccttcgttgatccacaacttcctatatcttgcactccgttaccccattctacaagataagg

SEQ ID NO: 180616 - DNA, 515 bp, Zea Mays
atttagaagaaaccgctgcggatagccttagcccttagtctagcacggttgcacccaacccaaactaccaaaccccctcccttcttctcttcttggtccccgcgcgcgcacttgcatcattgcatgcagcacacctgaacaacttgcctgttgtactgtaccacgagcagccacatgatgacgctcctcaagacgtacaaccacaacgacaagcagcaccagttctcgcttcccaagaggaacttcgtcacctacgccgtctacgcgctcatcgccgtcgcgctcctctacctgttcgtcgacccggcagctccgcctgctgcgggttcgggtgcgactgcggcatcatctacgaccaccaccaagccatcatcatcactacctccttctccttattacgaagcatcatcgccgatcatcagcacttcatcagcagccgcaccgctgtgcgactactccgacggcgagtgggtgccggacgcccggccgccgctctacgacggcacgacctgcgg

SEQ ID NO: 180617 - DNA, 479 bp, Zea Mays
gttcgttttttcgacgttgatgtctcattccactgtggtgctgcacctatgcttttgttccttgaaccaggaggccgtcctcgcttacgtccagataggttagccaatcgaaccctattatcctccacagttaaacatgtacgactgttgtgaccatcagctatgccacatttctggcacttcttgctcatcttcttagctcctttcgcacccaatttaagaacttgttgctcactacttttgatcgttcttcccataggcttggccttatctggtcttgctaagtttacaccttccatatgaaactccagtttctacaaatcaaagatattaagtcagttttcatattcacatattcatcatatactatagcagtgttattacctttctagcttccacatccgtagcactactatcaaccagacgcatatcagtgttatgttccaatgttaatattggcatattacattgatcatcgt

SEQ ID NO: 180618 - DNA, 494 bp, Zea Mays
tgcttgtagaaccgttttagtacacatcgcctaacagtggtggagcgtaaggtaaaaatgaggtatagctgtggagaacaaaaaagagaaagaaatactgcactaggaaagattcaaacttggaacctatcgcacacacgttacacaataactactacactacatatctgatttaggtacggcgccccgccataaccagtgctcccccacgtactgtcgcctaagcctaagcgcttgcgcgggctcggagtgatggacggcgttgacctttcccccctgcgcattacgtacctgagttgagattgaggcctgcatgtgtgcatgatgcacccgtaacgcgaattaatgagatttttatatatggggtattctcactcgaccatcaccgccccatcctcaataaagaaggccggcgtggcgcgtacggacgcgcaccaccacgatagcatgcactgcacaaaatctaacctacgaccccgattgaaaactcctat

SEQ ID NO: 180619 - DNA, 380 bp, Zea Mays
gccaattcatccctaggatgacatctaacccttgagttcccattactactaggttagcggggaagtctatcccccttatttcaatccttagattcggacaaatcctatcagactgaacttttcccccaactgaattaactcttaaaggtaggatcattggttctatggggatgttatgtgcttctacccaagatgtagaaacaaaagaatgcatggctccagtatcaaataatacttttgctggataggattcgactggaaacatacctactgcctcgtcctgagcatcctggattgcttcggcctccaggtggttcacctttccacggttgtaggcctgaccacgacctccgggtgcttgctgtggcgctccttgtctt

SEQ ID NO: 180620 - DNA, 793 bp, Zea Mays
gcggaggtggaggaggaaccccaaaatcatcatcatcatcatcatcatcagctgctgtaccctgagtgtcgaactgacgaagagctgcatcctcggcctgagagtcaaaaacaggagcagaaactggcacaggaatctcaggcgcaggacggtaggatccaaaaacgaggcgagaggcctcaagggtgccctgaaatcgaggagactgaatcagctgcgcaaagatgtggcacaagtagtgagcatagggcaactgccaacgagcacgaatcccatccaaaatggtgtcctcgatctcacaaatcaggaagtccacaacgtcaaactcagagtgggagaccagggcaccaaggagccaaagctgaatatgtgtggtagcctccctgtatcccatcctcggcagaagagtccgtcggataagctcatataaatacttggctgctgtagtaaaatctaccggtgaacgtcgcgacccatctgtgaagggcgggcggaacagagccgcgacgtgagctgtacccggagccacaccgccgtgagggcgacgaggagggtcagaagtgccgtagcagaggctgtgaagacaagtcgtcgactcgggaaatccaaaaagctggcggatctgactggcagtaatggtgacatcctcgcgctcaaaacgaaacctcatccaatgatgatccgggtctatccatacagaggcgtagaagactcgtacccactcctcaacatacctgccgcaggtagtcagaagggtctgaaggccaggcagataggtgaggtgcacctcaga

SEQ ID NO: 180621 - DNA, 596 bp, Zea Mays
gacaaactgtcatggtttcagaaactagggggaagtaagatatgtgttcgatagggatgctagcgcggactcactccaaatggtaaatcgctgggatttgaacgagaggtctgagacatcagaggtatagtggttcgggttcgcaccctactccattgtagtgctgatcgtagtattgcgatgagtgtgttacaacaagtgtgcttgtgtgcctataagaaagaaggcccacccttttatagttcaagggtaggaccttataggggtgacttgctctctacttggtatgaggttggtccattgccctagcttgacgttgggcacctcgtgttgtgctatctgtagggtcgtgcgtagtcgtagccctggtaaggcacatcgtctcgctcattcatcatatgggtccctgtagcgagtctgctactaacatcttcgtagtagtatgcagtgggtcccgtgggtcaatcccatggcacgatagcaagtagcgtagctttcctgtcatcatgggcctgccttacttgccaacgtgcgtaggcatacacccagtatggtgtatccgttacatcttttcaaatattctgggtactgtagac

SEQ ID NO: 180622 - DNA, 1496 bp, Zea Mays
ggagttgcccatgtgttttgagattgttgctgttgatggtgcgttgattgatcttgttgggtgcgagcgaaggaaccctatgattggtgttgaccagaattgtggttcatgttaccatgggatgaaggctgacttgggaactattattaactaaccacctcctgttgtagtgcccatagcttgtcctttttcaactgatttaatttcaaaatttaacatgatcttggtctttgttcctcctagctgctagggatcctttctgtttgagggtatttcccctttgtatgtgaagacttttgtgtaagagatattgcttagagttgatgcagtgacctctccgtcctcaaaggcgtcgaatgcgaagaggttgaggacctctgcctgaagcgaggcgaacgacaggattctggtgagatctgaccatgtagtgggctcataaaagtgacttttgttgtacaagtggttgtggcttgaggtttcggaactaacagtgtaaacattgcctttgtaggtgggagcgatgggttccttttatcggggtggtgtgtcgttttgggttggcttagcctttgtgcccttcggttgggtgtcgatatctctggtggctaaagtaactctagtttgtttggtgttatcagcggagactgccttcgtcatctcaatgggggtagagttggatcgagtggttttctaggaggcatcatggggtctggttttcgtcgcgagcacgatggctgccaaatgttgggccagacaggtggaccctaacactcgggggcacatgataaacatggtgctccaaaaaacattaggttgggaacagtagtgtctcgtcaagcatgtcccatcagttacaggtcgtgtatttatagggcgactagggcatgtaaatctaaatacaattttgcatccgactactggctacatccccggtatatgttgtgctatggggtaattacagtacaatattaacgcttcggaactaagtacaccagggcactcacccaccctgtaggatgaagagtgggcctagcagggcaactgtaacccttctgtggcccgctagcttagctctccttcgaggccttcgagttcctaggcgtcttcgcccgagcatgcgatacaccaccagcgaaggcttcaacctcacttcagtcgccacggtttggctctcgcttgaagggtatggtaagtgccttcgccttcgatgagccccgcgagtgcttgccttctcatggtcttcgtcgagcatgtccaattaagaccctttgggcgatgcgagcctggcgaggttccccgttgcgctaagtgcactcagtcattgttagttttatcttgaggtcgtttctgcgcttggtagatcgaggtctggtttggcctccgccccaacactaacaccagcatttgaatgaaagctatgcaaccaccccttcatggaacccaaagtcttctcaaactgcgactgatgctttgtcttgagcaggactccccaactc

SEQ ID NO: 180623 - DNA, 546 bp, Zea Mays
atttttttattacttggcggtttcttgtagcgccacttcaaccccctgtccgccctctgcttccactcccacgtcgttatccggaagagcaacggggaggagaaagatcctctccctcctcctctgtactcttctttcccgtcccctccacgtctcgtctcctccctcgctgcggtgcgggatacgggctagattcagtcagcgctcatgatccggaggatcgagggcaacaaccagcgcggagcggcacaagcctcacgtgtccgggatctcttctccgcccagtaggcttccttgccttcgggcggtttccaggtgagggagggcgactcgccttcgtctgattgctttctctctttcttctttcgtgcgatgttgatagtaccacctcgccctcggtgccgcgcccgtcgccacgatctggtctgcagatgctcatcttgactcctgtgcgtccagtgaaaccctcacgtgacgggactgaaaatgaactcgactggaatcagtatagtgtccgattgggggggggggggggggggggggggg

SEQ ID NO: 180624 - DNA, 1279 bp, Zea Mays
atatttagagatggaacagttctttttgtgctttaactgacagatttagaagctaaaaagcagaacaatacctgatctattgcagctactacatcagcagcaaaaccaccaaagcttttataaagagctttatagacagcaatgctgaagaaacaaattattatattaatttgggaaataaatcagaggtacattcccaaaatagagggcaatgatcttactgtgcacgaggagccatgccacttgcatttccaaattgatgcccagacacagcaacaggaattccgtgatttccagcagcaatggatgccgtatgcctgcagccacaaatcttagaatcagaggaaatttttattcaagtaataccacatgattcctatggcatggttttttatttctttttcaacgcatttggttttaattagaactaaaaatgcatccaagggagtgctcgcatatgcagcaatagctgacctgaaagaaagaaataacaaaatgaaacaacaattctagcagaatttctgcatcttatctgacaacgatctcttacaaaataacataatcaatgttctataacataaactcctgttgagcaagtacgtaatagggaacttatgcctatgaagaattattacacgatggcatgtgaagtctagtatttagatctagtactataacaaagtagtctgatacccaaacaataaaaaaatctgtggcatacaggtgcgcaatcaaaaaatgtgtatggatgtctgcacaactaggagctaccagatccaagtacaatagacacagtaacagaatatcagtagaagggtaaatttgtctaggtatcaacttcgaaaggagctacttacgtcccatggccatcactatcagatggtgaagcaagatcttgagacgcattgaagactcctctagttattgcagatgctgcaaaatgccgagcccccacgagctttctattgcaggatccagatgggaaatcatttgtaacctcacaaatgccagagtagtgagcaggtactggataactatcagttgatagatcatctgcaaagctagggtgggttggatctattcctgtgtcgatgaggccaatgacgacaccctgacccgcgaattgcggaccaccttcttgcacccaggctccttgcggcagtccaaggaattcaggggtatgagttgttgctgtcctaactgagtaatccagcatcacatttgctacttcttttctcctagatagcttatctgcctttcagtacaagcaaaaaaaaaa

SEQ ID NO: 180625 - DNA, 1099 bp, Zea Mays
cctattttacctactattttgtcagtgccatgtttgtttgtcaaatttgtccagatgaagctgcatcatcttctagctattatactgaccgtcacttgttcaacgccgttcacttgagcttgcagctgcaacagttgtttttttttctcagtgaaacagtgtgggtgcagcagcaacggcaggtcggcagccttttcttgcttattgctttgagggctaggcatatgccactaatcaaagtagcccaaggagaatgccaaattttaagatcaacatcctcaagaataattgtgggtttcttgtaatggcctctatactaagtcatgccaagccatggggtatttcttccatttccaaatacatacatacgctcgaaattcccaatcatgccagaaaatcctctcttctatagttctagtgaagtgatccacactcgtaaggacgactctctcccccaatacgaaaataaatcatcaagcccgtttgtagcctctccaatatgcaatgcaagcatccgcaaggcagttaccttctgcactgtagcgaaccctgactagtcgttcttagcagaaactgcatgataaatgacaatgaacgtagcccccaaccaatagccctgtgcagctagcgtcgccctcccaattacagagagacgacgaggacgttcttcctcctcatcaatgatctggacaatggttgcggcagttagaatctcttgctggcgttcacgtgctctttgccttctccaagccatcctgcaatcaaataattgaagaaaaaaacagctagggttcttacctaaagagtgtctttcctttacaaaccctttcatttcaacagagaaccaactaatcaaacccattgacaacaaatacgtggatataagcctctcgtttacctcaaatcctatgctccggcgccccaatggcggctccatcctgccacctagacgcctcttgccgtcactcgttgcatggtgagccacaatacggatctgtctcctccctctcgtcttcagtaccaccgcaaagcacgacggcgacactgataccatcgcgccacttgctccaccgaactatcgacacttgacagttctttt

SEQ ID NO: 180626 - DNA, 299 bp, Zea Mays
ataatcatcatcattgcttaagaaatccaacgtgctaggatcaaaggcagatgtggacatgttagaaaaaggaaacacggattcatcgaacgtcacatggcgagagaggataatcaggttggagtgtaggtcgaggcatcgatagcccttgtcatcagaggaatagccgaggaagacacacaacgatgaacgaggagataatttgtgagtggcagtggcagataaattggggtaatacgcatagccaaagacacgaagatgagtgtaattggggtgggtgtcatagagggcaaagaacg

SEQ ID NO: 180627 - DNA, 1044 bp, Zea Mays
gtcgatgctccaaatgactgtaagtcagttgcaacttgcgagcagatcctttggccacggccaaggttaagagcaggatttctgggattagacaaatttcaatatccatttgttgtttgataggatataggaattgaatatcaggatttctgggattagacaaatttcaatatccatttgttgtttgataggatataggaattgaatatctttagcatggaaacttatttctttcaaaaaattgcttctcaaaggatgaatgagcagttcacaatgaactaatagggtccatgatttctatcaaaaacctttctcttgtagttgaagcattagccattgttgctggaatgaatccaaacattacaagctggtgaaacttttattcttatgtctttgtcacctttggcaaatgacaaactatcttgtcacagacctttattttttcagtaaccctgtttcatgcattcttgagaagaaacattcatgtagtgggtagcaagaggaggtccttgactatgcagacggtagtcatggttggtactggggcgaggctgttcacctcagggccctatattggggaagtaaaataggggtagagatgggaagggagataagtcttttcttaagttcatggttacatgattacatctaggtttatgtaagcaatgagtctcaacaacctcctagttctgagaattatcaatccaaccactattaactcaaagcaatctaagaatctgaactaagagaccaatcaaactccaaagtcctaacagactggaactgtagcttccgagcatgctgtcacgccattttgttactgttgttatcgtgctgttcttcttggcctggtgggaatagtggttgccccacataacaatttgtctctgatgtttagagtatctggaagcttggcagatcttttacgctatctgatttcttaagagtttgttacagtatttccgaatgtactggtatttgaggaagaaaattaacttgtgcctgctatgtacgtgtaaaaacttgaccaacctatgaggaact

SEQ ID NO: 180628 - DNA, 273 bp, Zea Mays
aaacaagggttccgctggagagtggcttgtaatattttttggttttgtaagatacttttgagaactatcaatcaaacaacacttatttgtatgctatttgtccttgctatgtgtagtgttactaactcctccctggtacttggcccccctgggatgtaggctcgacgtgtcgaggctggataccagtatacctaagggtaaattagtagcctggtccctaggaggtagtctctaaggtttgagactacctgcgtctggattgggacctacacc

SEQ ID NO: 180629 - DNA, 555 bp, Zea Mays
catgatgccagctggattgcttgtgtgggggctttgcggtattatattacatggctccgcctcgttaaaaacctcacccccaggagaaaaagagtgcgggcctgattgacattgtttgaagaattacaaaggcacttgggccttagatcttagataaagaatttgcgcaggttatctatattccatgaatgctttaggtcttcgccggatgatgtggtgagcctgtaagcatttggcgatgtttttgtcttgacgatgtatggcccttcccactttggctcgagcttgccccgaaactttgttctaatggttcttgtgagtactaggtctccttctttgaattctcttgggacgacattgttgtcatgccatgccttactctgtgcttgatacttgttcagagcttgcaaggcgaggacacggtctccgtcgataagatctttggaagttgattcatcgacatcagggatggctaattggtttgttcatggggatccgtgctttaactcttgcggtgtcattgcctcagatccgtacatcagacagaagggtgtg

SEQ ID NO: 180630 - DNA, 343 bp, Zea Mays
tcgttctggtcgctggaagaaagaagagggattggtgaccgttggatccagttggacggtcacgattagaaacaacttaccggttggaccagattaaatcgtgagcgttggctcggatctagcggtcaggatcgggtgctggcatgggtggttttggtccgttgatccacgatcgtagggcggctatcgcgtgcggtttaatatttggtggcgatctaatcggggcactcggttgccgatcggacgacccacatcaacggataccccttcggcttgcgcgtattacaaatgaaccactgcactttacataactcaactcgcagtccttagacagggtcgcctg

SEQ ID NO: 180631 - DNA, 565 bp, Zea Mays
cctgcaatgctggtaagaacgttgtaagagcggggttagacgcttcataatttgtattccaccacctccaccaccaccctgagagatagttgtagggttcacattgtttgttgcctttttgtctctgttttgtgctaacaatgacaggaccaaagaatcaaatggacaaggacaaggggcctaagcttaacgacgatgagtgtgtctctcagatggaattgaaggagatgatgcgcgcgatgactgaaacttttaaaaaataccaggactctgcggcgacatcctatgagcatcttgatcgacaagttgatgaacttgttacacgcatggacgtactggaggctcgtcccccaccaccaactccagccccagctcactctcctatggacgacgacgacgatgacgacgatgtgtatgcaccgctgcgacaacgcctcgcgcgtaatcgacaaggtatgggaggtaatggtagacatcgtcatcataatcctgaaccagactatgatccatttgctaagattaagttctctattccatcgttcatgggttcttatgatgccgaagc

SEQ ID NO: 180632 - DNA, 938 bp, Zea Mays
ggggaatcagattttgggttgtggtcttcggagggtggaaaattggggagccctttttcgtggacggatgatgaatcctcggaagatgatttagactattttgcagcgttggatttagctgcagcggagtctccgttgaggaccgtcccccgcgaagcgtcggtgactttgatcggtgcgctcccaggtgacttgtgagggcgaaaaagatgggggtgttgaaacaaagcgtctgtgagtcttcgcaaggtgttagaagacatcgtcgaatgggcatggagaggtcccatctttagatcggaccacggctggatcaaggtgcccatcgcgagttactggcgtcgacgtctaggtcatgcatcggggaaggggacctacgggacctttttgaaggggaagagttgaggttgatgctatttaatttctgagaagctggtcttatcccgaaggaagagctgatgtaataatgagtgttgccatcgccgttctttggtgaagatgagtgaaaatgctgccctcccccccttcgctgaagaactacgatgggcacatttgtgatgggtgaatatcccgtgtgtagtgtacaccgtgtagttgtaacatttgttgtgcgctaaattgcgcttggtggcgcctttgtgccctttatattaatatatcgatgttattttgtgatgacttcgtgttttttgttgtgcctattgtgagtttgttgtacccttaggcgatttttgtgtggatagacgtgtgcgtgccgtagacaacttcgcacccggtaggtgttgttacgttcgtgttgcgttgatccggctgcacccttgagcggcttttgctcggacaatgtgtgtcttgtaaacgactttgcaccatttaggtggtgttacgcacttgttgtgcctatccggctgcacccttaggcgacttttgctcggataatg

SEQ ID NO: 180633 - DNA, 1144 bp, Zea Mays
aagatgttgttgccaaagccgaaccaactgttcccgaagctgacagtgatgatgaagaggatgacatcattttgagtccgagcaagcctaaccacattgagtttggaaaatccatagttaaggcaagagatttggtttaatgaagaaattaggataatttggagaaaataatgatgaactggttcagtttgttggggaagaagtggttccagaaccaagagatgtcgaagtcgttgtttttaagagcttcttcagagtaggactttggttccctctatatgagatgatcggtgaagttttaaagaagttttaaatctaccttcattaactaaccccggatgctatagtcagactcagcgtgtatatataggatttatgaagtcaaggaaaaactactaatggcgaaggattttgcagagtacacgaactccattaccagactaaggcaagagctgatggactgcataagaacttcgggtgttacaattttgcataccgaaaggatactaaggctcatgtgattggatattgcaccaagtggctgactggctggacaagtgaattgttttatgtgaaagctgatgaaaagaaaagggagaagcttatgactatggtgatgagtcccctgagattgagtttcggtatgacacgaccattgtgcaacatgcaactcggctccccctggtagttagtcgaagtggaattcagagtcatggcagaacacattagcactcaagatttggtgcaagaatacctggccaacaaaacctttccaacatctggtgggtgagagataccgaagaagaaagaagggaaaaatttgagctcgttcggttgccataccggtttaagtttcaggattctttctgcgacccttgtgtcgaatggttggaaatgatagagacattgtgcaatgagatcattgggaattatatgaagaagaaagatcaattgttgaaagctaccttcggcactcggaaaaaacgaagactaaaccgagtaatggacgctcttaacttcaaatacctagattatgaaagacttgacgtaggagccgggggagcaaataaaaagagggttgtaagtattttggaaagacaagccatgcgattcattgaaaaagatcagagggctgctaaaaaac

SEQ ID NO: 180634 - DNA, 361 bp, Zea Mays
ggcggctgcgtgcagtcccttggtggcgacggcatgcctgggagtgtcgtttcagatgaggtatagcatggcacaaccgaccaagctgggcactgcagtgcatccatcgatctgatccagtcttgccgcgcccacctaaatcctatctgatttgcacacccgcctctctactctacaagacctggaagacgagcccagcgtgacaagtagttcgatggcgcggagcgccaagcgcagccgcaccaccgaggtgatcaacctgtcaaagtttgtgttcaggtggtctctgttcttgttcattagtagtagttacttcaaatcaaggttctgaacattgttttgctctctgttcaaaacaacc

SEQ ID NO: 180635 - DNA, 449 bp, Zea Mays
atccgcgtccagtggatcaggtgagctagcgaatgtaggtggcttatgactcatgaactctctatgcttgtctcggggtggaactggtggtggtggtggaggcagtggtacttgttgttgttgctgttgttgttgttgttgcatttgctgttgcagctgctgttgttgtgccctcctttcctagcgtatctcctctcgctcctggcgcaactcctatcgtatatattctctttcctgacgcatctcctggcgttcttgctgcatctgggcacgcatatcagccatagtgtccgccatttgctgcatcaccgccatctgagcagcaaccagtgggtcaactccgcctggtggaggattaggaggatccatctctgcaggttgtggctggggttgtctgtatattctccgagtgtgtcgattaggaggcaaatcaattccaccaccccgcc

SEQ ID NO: 180636 - DNA, 587 bp, Zea Mays
ctttttcactaaaagaactggagagccaaagggactagaactaggaatgattagcccagcttgcaataatgcagtcacctgacactctatttcatccttgtgaaaagctgagtatctatagggtttaaaattaactagcaccactcctggaaccagtggaatgtgatgatcaaactgtctagcaggtggtaattgagtaggaactgtgaaaatatcaacaaactccttcaacaacccttgaatatctgcatcaacagtctcatgttgctcctcctgcactttttctactaataccaaagaccaaacatcattccctgagatccatttttgcacatgtaatgctgaaacaagctctacctgagaactggtctgattcccatcaccatacagagtaacttgttgatcctcatccttaaactgcaacactttattgacccaatcacactccataggattgtgttgccttaaccactgataacccaaaatagcatcaaaagtccccaaaggtagaattctcatgtcagtgtgataaaaatgcccatgtgcccaccattccaaattcttcaccatagcctggctgatcataa

SEQ ID NO: 180637 - DNA, 435 bp, Zea Mays
cccacgagtatccctggctacggcgtgcatgcggatcatccctggcacaacccgtactggtcatggctggtattggctgctacggctagcgatcagaaaggcattaccaactaacagagacctcggaacacgcataaatttgacacggacgcaccgagaacggcttgtccacgagcacggcggaaaccgcggtgtcgatcccgtgttcctaatcacctatgcccgaatcggtcaaacggatgctacggtgagctttacgtgcctacatagctgctagaacaacacttgagaggggcagagctttaccagagtggtctggccatggatgagctgttcttggcggcgcggcggaccgaattgggggaaaacggcatcgcggtggctctgtttgaaattggggttggagattgaggctactcggccataagaagctgt

SEQ ID NO: 180638 - DNA, 477 bp, Zea Mays
caggtattaccatcaggattactctagtttagtttatgtttttcttcctataactctagaaaattgccatacaaaaaaattccgctatcctagaaccctgtttagccttgcaatttcgtttcagattgctttgttgagtttgtgtccgtgttcgagtcttgttgctggtttaggtcgtgttgtcatcgtagttcaactactccgtcgctgttatttgtttccgccgctatcccatccacctttcccagattacaagtcgagacaccacattactcgatttgccctcgctagccaccttgtgtgaactctcgccacgctagccctagattaggttgcaagccgccttgcatcgcagcccctccttgtttcatcatctggcgcttacctattgcttataccagggaggtttgtgcccctatgctccatagccgccgctacggttcctgccaatttgtgcctttgacaaacataacttga

SEQ ID NO: 180639 - DNA, 527 bp, Zea Mays
ttagaactcgaatattttgtgagcagggtgccagaaagtgcccctggtgccgacaagtaaaacgttgtttttattcttggagtgttaatcgttttgttgttagagtatagtagtcaccctgaacagttgtaaaagtaaaaggtgttatgctggtttcagggtgttttccaatttcagccgatcgcttggctggcagggcatagtggttgccctaagataagtggatgtgaacatactgtaccgacttaagtcattgctgacttaagccaatggttctgttaatagggtacagtggtcaccctgtgccaagttagcgcgagcatgttgcaccgtcttaagtcgtcgccgacttaagccgattgctccgttagtagggtatagtggtcaccctaagtcgagtaagtgtgagcatgttgcaccgtcttaagtcatcatcgacttaagctgattgctccatcagtagggtatagtgatcaccctaagtcgagtaagcgtgagcatgttgcaccgtcttaagtcatcgccga

SEQ ID NO: 180640 - DNA, 515 bp, Zea Mays
ctgggaaatgccgaaggagaccaccaccgactctagcgaaggtggtctggtccggctgaagtatactttcagcttcagggagaagtttgatgagccaaacgacgactggctaaagtgtatcgaagctacaagtgatgaactacttggagcatattcaaaggcggaagataatgctttgtccgcagccttcagaggtcggggaaagaaaagactgaatagagtttttgacgccatcggcttcgtataccccgattaccgctacccagtgcggggataggggaaaaagaggaaaactgttgcttcggccaccccagttgagcctgtgccgaagggcaaaaaggtgaaggttcttacccaccggccgcgttacattgaaccggctgtggtgcctgagtttggcgtagggacctcttctgctaccgaaataaaagaaactgtcccgactgcgtagagcattgaagagctagctgtaatgccgaaggtgcttacagtcaagctggttgaaacgaaggttg

SEQ ID NO: 180641 - DNA, 1046 bp, Zea Mays
gtttgggtcgctagaagagaggtggtacttgcagagctatctaggcgaatcatttgtcattaaagcattatatgtaggtgttgaaataggtgaaatttgtcgtggtttggaaaaccggtggataatatgatttatgttaggcaagatgctagcgcggactcactctgaatggtgaatcacagagactcatcagagacaggtgtttatactggttcaggcttgcgccataatccagtgtagtgttgattgtaatattgcttgggagcgtgttataacatatgtgtttgtgtgttggaaggaagtggccctgcccttttatagcccaagggtaggattttacagtggggacttatattctactggtatgagctcggctcgttgcccttaaatggtgtagtccctcctgacatcgtctgtagggtcacgcactgccgtactcctggtatggcgtactgcatcgtccgttcgacgttttggtccctatagcaagttcgatgttgatgtaacggctttgtctaacgtcatggcctcatgggcctcgtgtcatcttccagcatgcgtaggcatacatgtatcgttccgtcctttctgtatgtgggtcactgtagagacttcgatgctaaggtacttacgacagggattgactagccccgtacgtgagtgggggtatgcttgagactgtacgcagtggcatgccgttgggattggtagggacttttcggaactgtacccgaggcccggacgtggtttggtggtgacacgtcttatcagctgacgcatgtcaacaacattggataggcccttcccctttgctggtttgctcggcacaagacctggtcgtttgctctgcctcatggggttgctcgacagatggttttacttccctagccgattgaaaacttatcgcactaacaatcaagccgaatatgaagccctcttattcagtttagaacttttagattatatgagagtgaaatatgtgaggacatttggtgattctgagttagttgtccagcatattttataagaatatcaatgatcatatg

SEQ ID NO: 180642 - DNA, 960 bp, Zea Mays
ggcccagattagatcacctatcaagtgaaccggtatgcgacacagaccgttggatccccaagcagcggcccagatttaattacccgagatctacggcctagaaagtgccacgccaccgacatgacccagccatcggatcgtccatccgcggcacatattttatttcgcgaataggtacgaggtgttttgatcgtagccgcccaggccagatcaacggtcgcggtttttttcttcttctcctgactgaacccgagtaggggcagcacggaagtgcccagggcggcggcgccatcaccggggttgtgtgaaattgagctgcggtgactaattctctggtccaatagaagctatgcatagtggggaccgagggaaacttaacgaaggtgcttaccaccgtcagaagatgaagtgggggctcggccacagggacatgcgatccatggcggctcccaaattccgatgagaaattgcggcaggttcagaggtcgttccaatctcacgccaccatgccgagcatccaaatgggccggtgattcacccagccccgccatgcacgcatatccattggtggctcacgctcgctcagaagcatgtcagcaacgatggcatgacagataagggtgggcaagggggcttggcgagcgccgagcgccatggcagaggaggtgagggggcccaagctgagaaggacatcggcgttgggcagaggagtaggagcagggccacccccacgcaggagcacccgcacggcaatcctattccccacggcgtcctccccgcatgcttggcgcggcgcaggacaacccagggctgcagcggccgagaatttatagaagcaggggggaaacaaatccatgcgggcgaggcgaggggatcggcgaacgaactccaggaatcgcggcgagccacaggcgcgatccgcggcgaggggttcggtgttcagttggggaaggagctact

SEQ ID NO: 180643 - DNA, 471 bp, Zea Mays
tccaaactgaggtggtaaaggagcagtcggtgcaggagtaggtgctgccaagtactgaggaaaacttggtacagacaagtactgaggagtcccggacatataaaatgcagctgagggggcggtacagaaaattgttgctcagtggttgccatcatgttgatagtgccctgcgaagaggaagtagtcactggctcccatttaagtttcccatttggattcctcctacacaccacatccttgtgatcctgatcagatagagcacctgccactccactgacactcagcacgacgatgcgcttcaccacaacggaaacacaccaaccccaacctaggcttaggaacaacccgatacctctgagtactccctcctgaagtacccgatttggaggacttgccacaataggggtggtggcgctattgttgagactttcccttcttgtgggctagacccccagtgtagtctctcctccc

SEQ ID NO: 180644 - DNA, 821 bp, Zea Mays
cttggatactgtatcccttgccttgcccttcttcttttgagatttacccttcttcaagttgggtttgttttggaccgccatcacatggtcgctgctagcagcgtttttctttaggtcaccctctgctgttttcagcatgccacatagttcattgaggcccttctctgccccatgcatatccatgtatatggtagttcataatgaagtttgcatagctaggcggaagagatgccaaaatgaagtcagtagccaactcttggcttactgggtagcctagcttctccaacctctgactgtaaccaaccattttgattacatgtggcccaactgctgcgctttctgctagcttgcattccagaaatgctttggacacattgaacctttaagtcctagcctaagtctggaacatatcattgagagccacgatcatatcgtacacctcatggtttgtgtcaaactgaatctgcagctcaggcttcatgcaagcaagcatcaggcaactcacttcaagattatcaaccattgctttcttgtaagtggttttagctgtagcagttgcatttttcaccaggatcctcttgtagtggggtgtctagaacgtcttccttttttcagccctgagaacaattctcgggttatggatctaatctgtatagttttttccattttacttatcctttttaagaattgatcgcaaagtaaatgttggtgtgctaggtgtcatttatctacaacaaaataatgcaaaatactaagacaaaaatatccatgatagagtaaatcatattaaacatttaatagaatctactcccactaaaatc

SEQ ID NO: 180645 - DNA, 2201 bp, Zea Mays
ggagcttgctgagcctcctgagcatcaacgtgatttactcgtgcccttccttgatactaggtcttgttctgctggctgatggaggagggcgccttgggggcgggtgctgaggtattcttggagccattcaccgagttggagtaagcaggtcctgatgccttcaactgggggcagttgttcttgaagtgactggggtctccgcagtgccaacaggcatttgctggcggttggttgcttgcaaccgagggggcctgaaagaagctctgactctgctgactgaaacgtgatggagtgggtccatctggtctaatgaagcttggtcccttgggtggaaacccaaaggatcgagttctctggtgccggtcttgctgctgagctcggaggacttagaatttcctcttgaggtgacctttctcttcttcccttgccctttccactcgtatggctttgtttgagaggtgcgagaagctgaggaaatcttggctggctaggatggtcttgagttctggtctgagccccttcaaaaagcgggccatcttcttggcttctgtgctgatgttatcaggcgcttagcgggccaattctgtgaatttgtgcacgtactcactgacagattttccatcttgagttagttcctggaattcatcttccttgagctgaacgatcccttggggcacatggtgctctcggaaagcagtttcaaactctgtctaggtaacatctctgatggcagcgttgaaggtatcccaccaagctagggccatcccaaaaagttgatgagcagccaattgaacatgctgattctccaaacatccgatggcttctaacttccttttaatcgtgcgtagccagtcatcagcatcgaggggattgctagatccagcgaatgtgggaggcttgagcctcagaaaatctcccatcctgtcttgtggtcttccaccattcgggcgttgattctccagacttctagtgaggacctcaatgggtcgggtttggttggctagaacttgggctaaatctaagggtagctctggaggtgcggggaggtgggtctcactcccttctccatcggcttctctttcatctcttaggggaaaccctgctccaatcccggaggcggtaggcatggttttatccgaagccatctgccaggggagagagttactattatgcatatgccaatttttttcaaccaagttattttattcattacaccagttcattacaagcatacagctactacaagtcgcactacacgcgagcgctttctgaggtacttccgaactcctgttctaaagtgtccccaaattccttgagaaggtcatcaaggatagctagggacatatcctcgacgtcggacaaattctctatcctggagggaggtggtgctggaggggctttcttcttccgctcagtctggcatccttggctcttggtcttcttttggattttcttcatgggggcgagcttctttagcttcttatcgtaatccatcttcagggttcggtaggcttcacgagtgttggcctctttgccctctgctatatcgagacactcttggagggacgccttctcctttttaagttccttgacctactgctctaagctttccacctgagagtttaggtgggtgcagtgggaggaaaggtcatcgtagtggttatcgagagtgtggagatatccggccatgtagacgatggtggggtcatcctcggtaggatctctccttgacagggcctgaagtcttttcctccaggtgggggtatttttgttgctaggtgggaagtaacgaaggggggtttcaaaaacctctttgctatagttttggcatagctatcggagggcttttcgggcaacattttggcaagtgtctgggaagtggtgtccagtgaaggtgacttggaaaggagggtggtttggataacttcggctttctcccaggtagacttccatagagcacttctcaactccgttttcgcggtattccttccagacatattctggcttcttgcttatccccatgcgaagtgcgcaactccgaaagagatgaggaaatccttcctcctctgagcagtaggatgttctaatgatccaagagccttccatctggtaggagaaaagaagggtctgttaatatcggggaaaggagagaagatttttcttagaggtaagaggtgttttcttgttaaggcaaactttta

SEQ ID NO: 180646 - DNA, 713 bp, Zea Mays
aatttatataattggaaataagaaagaaagaaagaaatattatacaacacaaaataaagttaaaaaaataatgaataaattcatcacacttttaggtatgtccaaattgtactattaatctgagagtgaattttccacaagttgaaatttaatttgaattggaatttgaatttggaaaagaagaagagaaaaaaatgaaaagggaatttctggtgacctgggccaaatctcccttggcctcagcccatcaggccctttctcccaccgcggcccagcaccattcaacctagcccgcgctaatttcactgactggcggggcccgctggccgaccacaccattcgtgcgcgccttgcgcggacgcgacaactgccatgtggggccaacttgtcagacttatccccttcatcacaacaaccccgcatggcgcccttggattctgagctccgtgaaccatggcatgatccccgcgcggacttcctgacctcggtgcataagaacggatccgcacccgcccctcttccatccactcaccctgttccaagccatggggcactgtggatttctcgccgttgatgaatctctgccgccggtccgccctgcgccgtggctggccctgttcccgccttcttcatcggtgaggcctcgctcgcgcttccctatggtcatcatgacgttttgctctaggatccactaggaatcgaacaccggaacc

SEQ ID NO: 180647 - DNA, 276 bp, Zea Mays
tcactaggtgcactgttggctatcctcaaccatgcgccaaacaacagaacactcgggattctacaggttggttgacgacgccactgtttactactaacccattaccattaatcaattgcatgcccacaggaattaagtcacaataaatccaacatatattattttgcagggctttgctactgggctcatgctcagcatgtctttctttgacttggcttacgatgctgtcaacgccatcggctttctgagagggaacctctgggtaagctagctaag

SEQ ID NO: 180648 - DNA, 406 bp, Zea Mays
gcctcacccagcacataagtgcacttaggcaagcgcagaatagcgccctttcggacctgttttggtcattgacatggtcttatgaacactactctaccatgattccttgaatgtgcgccttaatatattttaaatgcaatacaattttagcagaaaactacgtactgagacgaatctatacatatcatttgcatgtccaatacaaacattatagtcaaagttttcgcctgcgtgtttgagaggtattgcttcatgccttcatgtccaggataaaaatagtttgctccatactcgtctaattattgaattccagtgttttcaagatcataggtttagctttccaagctgtagcagtataccaaatatttcttggcttcctgtataatcttaagctagtggaattgtg

SEQ ID NO: 180649 - DNA, 403 bp, Zea Mays
gtttgccgcttcggagtaccgtccaaactcacagttgacaacgacaagcagtttgacagccaagacttcaaggatttctgcttctccattggcaccaagcttgccttcgcctcagtatatcacccgtagtccaacagagtcgtggaacgcgccaatggaaaaattttcacagctgtcaagaagatgctcctcgacgaaaaaagggcaggtgggccgacttgttacctgaagcggtctgggcgctaaacacgactgagtgcagggcgattgggttcacccctttccgccttctatatggatcggaggccatgaccccacaagaaataaagcatgggtccccgcgaatagttgcgtcagctgtccccgacgtggacgaacccacttcgaaggatcttatcgacgg

SEQ ID NO: 180650 - DNA, 1017 bp, Zea Mays
atgaactgcttggatcatattccaaggcagaagataatgcattatccacagcctttggaggccggggaaaaaagagattaaatagagtttttgatgccattggctttgtttaccccgactaccgctatccgctgcgaggacaaggaaaaaagagaaaagttgttacttctgccactccagatgagcccgtgccgaagggcaaaaagttaaaggttcttacccaccggccgcgctatattgaaccggccgtggtgcctgagtttggcggggaggcttcttcagctgctgaatcaagagaacctgctcctcctgtgcagaaggctgaagagccggctataatgccgaaggcaccttcagttgagctagttgaaatgaaggttgacaaagataaggctgaaaggtcaaagactgaagaagtaacaaagatgccaaggattttaagtccttcagcagaagcaatagtgttgaaggcagaaaaaagttctaccataacccctaagagaagaaagatggtaaatgtattggatattttagaaataaccgactccgtaagtcctgctcctacagggaaggttgtcgaagctgacaaaacggaacccacaactgatactaagcaaatagaagtcgagactacaacaactcaggctgaaaccgaggcagagcccatagtgcctactgagacgaagcttgccaccactgagcaggaggccgatggaataactctagatactaataaaggttttgagaagagtgcggccaaagaggccgaatcccttgcccctgaagcactctccgaagatcttgattatatcgttcgacatgcttcaggaaagagattgtccgaagaagaaatttttgaagctaaacactatgcccgagaactgaagtatccgaaggaggccttagtgtttaacggtacagatgaagatgatttcttgtattgtctcccggacaacaaagaattatccgtctgccgggagatggccagaatatgggttttccgaagctcgaagctag

SEQ ID NO: 180651 - DNA, 902 bp, Zea Mays
ccaccgctgtggtcgcgcgcacctgcggcctcggcgtgcgcgcaaccgccgccgtgagctgcgtccacgacgcctcaaacccaaaaggaaaccaacctcctccctcccacgttctgcccaaaatcctctctcgttctacgccgcgcagggagcagtgtttaaaatagcgggctaacccatttatccccggccttctccagcggctacaaaaggatatatcgggatatatctgcagctaaatgttttagcggttttcactagacagtacacagtagacacttagacagatcctcccatgatcccaattcccagacctcacactagccactgattgcaacaagcaaagcagccccaaaatacatttatctcacaactagccgctgattccacaaaaatccaagtcattgatctcacaactcacattctcacctacaatttaaaatgcacctcgaacaaaaacagctagccgctgattgcaacaaacaaagcagcccaaaatacatttaccattcacaaatgtaaacaactagcaaaacattcaccagaaaataatatgcacattcagtcagtcattcagcagaatgtaactgaagcagagttcacctatgtagtatgtacaaaaaaaaagaattacaaagtatagtaactgaagcagagtttacaatttacacttgaagcggagattataatcagctagcagatattgacaaatgaaaagtagcttcatcacaaatgtaaactagcttagttcaaaaatgaataatggcttcaaattcagatgtagtgacggaatctgaataaacatatgcagtgacagaattttcacaggctgttgtacatagtaatcaggctgttctcgttaagagtttcattgtgttatttgcaataataatcagatcaac

SEQ ID NO: 180652 - DNA, 1013 bp, Zea Mays
tgcgaatgcagtgcctgttaatggaaattcatctggttctgaaactgaatcttggtcatcagatgggggtgattttgggagcccattttcgttgattgaggagtcttctgatgaagatttagattattttgctgcattggatgtggccgcggtgaagtctttgttgcagcctgaagtgcgcgaagggtctactcccctagctggggtgatagccgaggagcaccgccagcgaaaggtggtgtcgaagcacaatgttggtgagatgtcacgaagtgggaggcgtcgacggatggggatggaacgatcctgtcttcgactagatcgggacggccaacgagatttgctctcctcgacgtccaggacatgtattggggagggggatctgtggaatctttttgagggcgaggagttgaagatgatgttgtttaactttcgagaggcaggccttattccgaaggctgagccgatgtagcatgtttgctgccctcgctctcgtgttgcggtagtgagtgaaaacgttgccctcccccggatcgcaatagagagggagggcaacaagatgtgatttgtattatttatgcaatgtggccggcgagccccttgttgtgtgtatgtaaactatgatgacaccgcatgctgcgcttgttgtgaggttgtcccgacttgtaatcgtgctggcgtggcacgtaaatgggatggggacctcgctttccacagcgatgttggacacttatgatgcatacctggctgtgcccttaggtggtttttgttcgaccgtgtcagatagtagagacttcacacctttaaggtgatcgtaatagactttgcaccattagggtgatgtcacgcatttatgcatgttcggctgcacccttaggcgacttttgctcggatttttcttatggtaaagactttgcacccttagggtgatgtcgcacacttattgtgcatatccagctgcacccttaggcagcttttgcttggatatgtcttatagtaaagacttcgtaccc

SEQ ID NO: 180653 - DNA, 403 bp, Zea Mays
caatctaacactattaccacagtcatctcaatttccacccttgcttttctagatgcttgctcaaaaaatacatgcagttccaagctccgaatcctcaagcaagaggtgtcactggatcactgagcatcagtagaatcagagaacgaccacaacagacaaaataaatacagacaggaaacaaatgaactcatcaaactaattaaatatgcaaacaagctataagcatgatcactatgattaaatctagaaagaatccattgagtaagtacaacactaaaccaaaagaacactagtttaatttcaaatttggtaaactactcattagtgattgaggttccacttaccttttgaagatcccaaacaatcgaccattttacagcacatgatgcttagaacattcacc

SEQ ID NO: 180654 - DNA, 662 bp, Zea Mays
aaaacatgtagaaatggccttatggtacatttctatttcgggtgggccacgacggcctaatctatacggatgtggtattcgtcgcaaaattccatgaatttattccccgtgaactgcgtaccattgtctgtgataatcgagttcggcacccccaaatcgatggatgacgttggtaatgaactttacagcttggtcgaaggtgatctttgtgataggccatacctcaatccacttggtgaacttgtcgacagtgactaggacgtgcgtgtagccttatgtgccttttttaggaatctaaccagatcgagccctcagattgcaaactgccaggtaatggggattgtctggagcgcctgcgcgggcaggtgggtctgccatgcatagtattggcatccttcacacgttcacactacctggtgcgtgttggacacaacaataggtcaatagaaaccctatcagaatgtgtttcccatgaggcttcttggggcgacgtactatcgggggggggggggcaaagctcgagggttgcctgctttcccgatgagtttcgtcaaaacgaacacgcttggttcaaagaggttggtaatgaaaacccctggtgggacaattgttcgtgtcaatgccatcttcacgatggtgtctgcctcttcattaccccgtct

SEQ ID NO: 180655 - DNA, 275 bp, Zea Mays
ttgggcactcagctcggaaacgatcgctcaaaacgggaaatttggtgaaatttaagcctggaatctcggattggcgtgaaatttggcaagtaggttactggaagtgttgtgaaggtgcctgaaaaatttgggttcaattggagcatttttggctggtttgggcatttcaccgagcacgtggcgtgcggggaattaggttttcggtgaaacggctatttgaggtgtgaaaaacctcccgaaggagctagagacctgcaggagagttcaaggaatac

SEQ ID NO: 180656 - DNA, 592 bp, Zea Mays
gcatctcccagccgcttccgagaggccacactatgtaagcaatgtgctccttgactaagtccctggtgccaatatatgtgcaaactgtgttatacgcagcttggcacgcttctacgtcattcccaagggcaagggacgacctcctgatgccgaagtaagaccagatagggcgttgaatgatagccttaatatcttctcttttgaccaggtcatttttcacataaaaccactcttgcatccaagaccctggccacctcttccaaaacattggaactggatagctcacaccagagcgaggcacgaagctatagcaaccaaacttattgtgatattattctttgccagtggccttcgtctcgtacgatagttcgtgaatattgcaaaaatgtcttgcatctggttctaacccctggctcctcatggcccaaatagaaatcttcattctgatgatagcctctggggtgagttgatgaaggaatatttcaaaggtcttcaaaacttccactaacaatttatctaaagggaaccgaagtcccgctttcatgaagcttctgtaaacgactacttcgtcagcttcgggcaaaggggcact

SEQ ID NO: 180657 - DNA, 495 bp, Zea Mays
gcttgtttcaaggctgcaaaggaagcttcgtgtccggaagtccatacaaatatatcgccctttttagtagacccgacagaggtcgagccaaaagaccaaaatgacgaacaaagcgacggtagtaccctgccaaacccaaaaaacttcgtaattccttcacagtcctgggagaagaccactgagaaacagcctgaatcttgcttgggtctgttgctactccggccgctgaaatgacatgaccgagataggataactgaggcttggcaaatgaacatttagtcaacttaatttgccattgatactgcatgagtagttcgaagactgctcgaacatgctgaatatggtcttcaaagctcgaactgtagattaaaatatcatcaaagaaaactagcacgcaacgacggagtaatggtgctaatgttgcattcatggcgcgttgaaaagtggctggtgctccggtcaaaccaaaagccataactctaaattcatagtgac

SEQ ID NO: 180658 - DNA, 474 bp, Zea Mays
ggtcgcgacgtcgcaaatcccgcccatgccgcgcgaagaactgaccacgcgggtcttgcgtcgtcctgatttctcgtcaccaccgctgcaaaccgaggtaacaccgccttccacaccttcgctcgattccctgagaggtttagcaccgatcaattttgtgtttgggtctagttgggcgtgatggacgcgttcgccggcgaagcgccgccgctcggatgcagcgccgccgtctctggcagaactaagggaagaaggagagccctgggccgttgatctgtcaaggtacgccccggatcagtggtggataacatcacttcatttaattaaatcagagccatcgaatcccaatccaacgtatagcatctcataccggttcgtaaaccgcgttatctaatcgtggccctcggaatgagatccaacggccgtgatcccgcgataccccttcgcgggcgcagattaacacaaaggcccctg

SEQ ID NO: 180659 - DNA, 285 bp, Zea Mays
taaggcccaaacacggccacacattgtgttgtgtcgacctagacccacaaatagattgggctgtgtcagacttggaccgtgtctagaattgtgggctttagatcggcctattaggcatagctcaaatgtagaacaacgatatgatcgtgatcgcagctggcactgctaaccggctcgaccagtggacgtcctcgactccacgctgcttttcctaaggctatccgcagtggttccctctatatcacttttgtgtcacatcatcaacatttcattcctacttttttt

SEQ ID NO: 180660 - DNA, 574 bp, Zea Mays
aagcgctcggggcgtgcgcgagcgaatgccagtgctcgctctggcgcctagcacggcgtcaagcatgaggcagcgcagagagaggtcgagttcaagcacggattggctccagatctttgagattatggccatgatcccgttgagagatctcttcctctgacattcctttgtcgtttatgtgtggaggcttgcaggttttgctaactggatcaagagatagagaggggagaaatctggtttgtctcactgccgcgcatagagagaagattgcgggtttgacgtgtccaaggcacgcgtcccgatgccatcttctgacatgagatagaggggttagttaggcacaattttgtcaatggggtcattaggatttgagctagggatcaaggtgaacacgctcggtctttggctcaagggctgaaattcagaattctgaatttcataaatccctattgaaccctcacttgagaagcttgtttggagttttcattaaactattttggccaagcttccataatctttattgtagcttatttagtatacttcaatgtttataattggcctaggccatgatttt

SEQ ID NO: 180661 - DNA, 828 bp, Zea Mays
gaagtgcttctaaatggagtcccaggaaaacgatttcactgtaagcgtggagtcagacaaggggaccctctgtcgccccttctttttgtccttgcggcggatctttttcagtcgatcattaacaaggctacagaatgtggtattcttaagcttcctctcctgaacacatgtggacatggcttccctataattcaatatgctgatgacactattttagtaatggaggcttgtcccaaacaacttttcttcctaaaggcgatattaaattcctttgttgaatcaactggtctacatgttaactatcacaaatctaacatctaccccatcaatgtatcagaccagaagatggaaattctagcaaacatgtttcattgcaatattgggtcaatgcctttcacctacttggggctacctttggggataaaaaagcccaacctaggagctttccttccactcattcagaagataaagaagtgacttgcgacaacttccatttttctatctcaggctggcagactgcaaatggtcaacactgttttttcctccctaccaacgtattatatgtgcactctcaaactcccaaaatcggtgattaaacatattgacaaaatcagaaggcactgtctctggagaggagcacacatcaatgcaaagaaacctccacaatttgcatggaaatcagtttgtaaaccaaaagttcaagagggacttggagtaatctctaccacttattaagactgcaatagtagtctgccattctgtgttctgccaccattctctgttctgcccattccgtgttctgcctttccgattccctcctcctcacgc

SEQ ID NO: 180662 - DNA, 333 bp, Zea Mays
cgggtggttctgccacaccgggactcggcgattgctcgtcggagttcgtttccactcatcaagttgttggccaccgcggacggctcggaccggcaccctaattcgtggtaatgatagcctctctgtatttcccatactttccttgctgttttgcatttcgccgcgtccgcgtaggagcttcgaatcgggcaaattgcatgcgtgggggtcgcgctcgccttttaccaccatggccaccaccgtggagtgctctgttggggaaggggagattagggccgtcgatcggctagtgaattgttaggatcagtgcatggagtgggaatgcttcgggcc

SEQ ID NO: 180663 - DNA, 877 bp, Zea Mays
cctgatgccgggttagagttatcccgagcagcatctcgtgcttcgtcgaccttggagcgcggtcttaagagccgagaggctaatctggattgctccgttcccatggaagttgttgaaggtccttcagccttagaggtggctaccacagagagctcggtcctcaaggatggtgctagcgtttgcctagcccccgagggtgttgccggagatgatccggctcggatgggtagcgcgagctatgacccagcccctgagggtgtccgagtgggttctccctctcatacttccatggatgttcatgtaggatcttctcctccgcattctggttgcatggcagcagcacgagcttcgagtcaggaagtggccttataggccgacgctcctgatgacagagttttgatttctgctgatgacgctgaattggtccccactgatgcattgcggattgctctggttggtgatccttcatcgagccatcaactgatttcccatgatttgggggttccttcgtttttctccaacctttaggtaatttggtttcttctggtctgactatactccaggtagacttctgttcttatactcatctgtttttaatgtcaggcattggttgacgagatggctggtcagctgagattgtagggtgcctctgtcccagaaggagctatctctgacacattggaatccagtgctgcttcggcagcgggtatctgatttggagatggtgaatgctggttagtgccctttgtttcttctttggctgcttgactgatctgctctttagctgaacacccttgtgtgaccgttttcttgatagataaggcccggcggtattctgatcttgaggagaaatattctcaaggttagacggacttgg

SEQ ID NO: 180664 - DNA, 631 bp, Zea Mays
ttttggactcacgtcgagcgattaaattgtatagtgggtattcaaacacgtcgatcagactacgttattaatcgaccgagttatggcattggctgagcactggctgcgccctggcaacacgacgcagtatttgtgccgttcgaacttggctgtgtcatgtgattgctatgtcgcgctctctattaatcggattgctcccgttgagtcagaccgtcatcgctgaatcgcgtattttttgcatgccctgtaggctctgtctgtctgccgcgagccacaattgcgcctgttgcgcacgttgcgtggatttatcgtgtatcccaattatcgagcaataattttgcctgttgcacttattacgaaggcgtgttgtgttgtcgtagccctgatggtcgcacacgcgttgacgccacatacactagagcttgtactcgcgtagattgtggtgggttattcaagcccctgaagtcacatcataacgcaaccttcgtaaacaattttatttagctctatattttatttgcttgtgttgtgtggcatcatatatttatttatattgccaagtggccataacaactatatcaagctctatagtgcttgaataatctgggaaattaaattgaaatacaacaga

SEQ ID NO: 180665 - DNA, 480 bp, Zea Mays
ggtcgaatagcctcaaatcaccctctagaggtgcaacattagttttgtcgcgctcctgaaagcgagtaggtggaataggtggagtgaatgagggagtggaggtagcagtggtaggagtgatagaggccgcgaatgtggtggaatctatgggtgtagtggaggttgctggaagctctgaggcgggtggtggtggtatgatggcaagtgtggaggaagtcggtggagtgataatggaagatggagtgataggctgaggtgagggatcaaggatggctggagaggaacataactgagacgactgatgtctgacacggtaggcaatctgatctgagccaatctaaatacttccccatgctccaccctctcagttgttgctgctgctatcgctgctcgaatagatttatcaaatttgtgcttcttcttgcctcttcgctgctcttaataaattgccttgcccttatcctgtctaggagggcaagg

SEQ ID NO: 180666 - DNA, 459 bp, Zea Mays
gggtcaccctcctatcctctacccacttatgagccatttgtgcatcctatgggcaaaccatttggagaggagcataatgatccagctctccccataagtgtgggagctcactagcatattgttccaccggtctccccatctgctttattgcatctgccttgctctgaatttccatcatcaccatcacattcccctttcgagagtatatattactcaaggtcttccagatttgtgatgcagtacgcatggcttccacccttcatgctaacagtagaagacatggatgccaataaccatgcaactatcacagagtttgtcgcatgccagattctccattctgcgtcgagcttatcaatcggctcaacacatgtctcctccaaataatgctccactcccttgcctcataggagtacacgcactcttctagaccagcttagataattcttactaacttctaac

SEQ ID NO: 180667 - DNA, 838 bp, Zea Mays
tggagtttgtcgccgaaatgtagcagcttgagggaaggattgaacgcctccgcacacaacataccgaggcagtgagggacaagtcggcgacggagaataaaagccgcaatctgcttgagaaactctcggcggcggagaaagagagggaagacctcagccgccgacttgccgaggaaaatgagggcacagaaagagctcgcgcgaaggcccaggtcacccgcgcagaagctgacgccgtgcgcgctaaggctaaacttgccctcaagcgcgccgccgacaaggggtcagagctgaagagcctctgcagttattgtgagaagacggaggcctccacccgtgccggtgttgagcgggcgcacacgctgtttgtggaagcgtaccccgagctcggcgcacagactgctccttttgataaatctggggaggaggtggatcttcgctttcttgggtggctgctggaggagctagagtcactctcgtccatcgtgacgggcctcatgtcctatgcatctcttgtcacctgcgagggggcgtcgaatgccttgtcccgcgaaggatgtaggcacttcaaagtcttcgaccgagcgagcgaggacttcgaccgcggaattttccaagttgaagatgatgtgttaaagcggtccactgcgacgctttatgataagagtggggtcctcatggttgtggcaccgtccgggagaggtccgatcgagcactggcgcaggtatttattttattgtgataatatatatatatatatatattgacttaactttgaaatgttttgttgtcttcgtagatgatgaatgaagaagaagtttacgacctcgtcggcctt

SEQ ID NO: 180668 - DNA, 765 bp, Zea Mays
aaatgtgactacatcaacaataatttagcagagtgtttcaacaactgggtcaaagatcgcaaagacctgccagtagttcaactagcagacaaaattacagagcttattatggtcttttgggagaaaaggaggagaattggtggcaaactatgtggaactatcttgccagctatagtacatcaattgaatataaggtctagaggacttggtcatttaaaagttgtaaatgctggaaatggtcatgctgaggtttttgataatagccccaaacaagacagacatattgttgatctaggagcgaaggagtgctcatgtctggagtggcagcacactgggacaccttgtgaccatgccatagttgtcatcactagttttagaattgaaaggatcgaaaactatgtgcatgattattattcagtacaaaagtttagagaagcataccgtagagtcatctatcctataagggatcgttcacagtggcctcagtttgatatggaccctgttgtaaaaggacctttagcaaaacaaggtgttggcaggcaaaggaaattacgaatcaaaggttgtctagaaggtgggagtaaatctaagacaaccactaaagaaggtggtaggcaaatgaaaagaggtcctatacgatgcaaaaaatgtggagagcttggtcacagacaaacaagttataagtgcccactaaatggtaccaagaaaagaaataggaaacagaggagccgcaagtatgcgggtgcaaatgaaccttcacagacc

SEQ ID NO: 180669 - DNA, 417 bp, Zea Mays
cacattttaatcactttactcctcatgacaagagttaaagtatcaaggatcttgataggatactcagtataagtcagatcatcttgaacactaagatcctccataggtagctgctcttcgggtaccttgaggcactttttagttatgatacatggaagacatcgtgtacatccgcaagatggtcggtaattccagttgataggaaacttctcccactcgcttcaggattaagaatggtccaataaagcgaggggacaacttcccattgactttaaatctcctcataccccgaatcggtgacaccttcagatacacgtgatcaccctccttgaactctaacaattttcgtctggtatctgcatagcttttttgtcttgactgtgcagttctcaagttctcccttatcaaccggacttg

SEQ ID NO: 180670 - DNA, 537 bp, Zea Mays
tgatgctgatggcgatggggtcagtgccactgtcatcacggggaacaagagcaatgcaacaggcgtccccatgaacatgacggtgacagtgagtgagtaactctggcgatcgatatttcactacaattgagctgtcatgcatgcatactataaatcagaacagaactattaatttgctgctgctactgcagatgccttgggtcacgacttcatagcatagaacctgacaatcagaaacacagcagggccggaaggcaggtaggctgtggcgctaaggtcaaattcgaacaagtcagtcatctacaggagcagcattgaaggtcatgaggacaccttgtacgtggagaacgggatctagttctacctgcagacctcgatctggggcatcgtggactttgtatttggcaatgcacagccaagttccagagctgcccgctgttggtgcgccgcccaccgaaaggcaagcacaatgtgctgacggcctagggctgcaacaacgcaagccgcgagtctagcttctcgttccacatgtgcacc

SEQ ID NO: 180671 - DNA, 504 bp, Zea Mays
gccactgtaaaagtgtagcgcgccgtggactgagccctgtgctcgacgacagtagaaattggtagggagggtgagttcgtaacatcgttgattgggcgaggaacgaaggaatttggagatagaggtcaggttagccggaatcgccgcgcgctggtggagagcccccgcgggcctctgctccacctcccctggtcgtcggaggtggaagagtgtacgcgcgccgtcggattgccagcgagcggtggagattagaaccacccataccctttcgttctagtgaattgtagccgcagatctcgaaaccgagggttgggtgttgtggggtgtgctggccgttgatctaagatccgaggatcacggttacaaacccctttcatttaaaacgcgatctaatctcggccttcagatttgaatccaacggcccgtagtgcagcgtaccccttcgtggtagcatttttactaaagagcccctctaagatccttaaaacaactcgccgtcccggg

SEQ ID NO: 180672 - DNA, 703 bp, Zea Mays
tttcttactattatttgtagggtattaagtgcactacatcttgtataattggcccaagacatgatcaagtggttttcataactttttggtcatacttacctatagtactccaattgtccatagggggtgcattagggttttgggcaatttctccccctttaatgtacatggtaagccaaggcatgacatctaagataggttgcacttacttaggatcttgagctccaaatttggtgtacgttttcccaacttaagtcacatgtgatgatgggcttacttgtatagccttgagtgaaaaccctaagtaacacctggggtgttacaccacttaagctctgaaaacgatcaaacaaaaacgatgagacacagtgaaagggatcttggcaggtgaagtctaggtaagcagcacatacctcccacttgggtcctcgggccttgggccttggaccgctcggccttgaggtcctcggtgagggatccggcttggcaccgcagctcctcccgctcgtcgtacactttctagacgttctcctctagcaagtgaaccttctctgccaagggtgccacctcccaccgtgtgaccggggcctcgtccctaagctccaagcacaacgtcaggagatctgccgcctcgacgctttttcaggcaagctgcttgtttgaacgatcaagcaagcctatctggcgcaatagcgcatcctag

SEQ ID NO: 180673 - DNA, 422 bp, Zea Mays
gcgtggacgaggaggtggtggtggcggtgcttgttgttgcgtttccaacacagcaagtctatcgatgatctcggacaatcgtcgatccagcctctcataagtcttgccaaggttcatgtcaatgaaggcatcatgcactgacttgtggaccgtctcctccatttgctccttcaggagcttgttgtttgcctcaagatcttggcggctaacacattcatcgaagtctgtagggatccttgcttcttcttcgtcgcctgccatcgaaacacaaaaacaggaaacaaacgatgaaggttatcctaataatttcactacactctcctctcaggtggaacacaggaacacactctattgtatcttaccaagctcttacaagtgtctgacgaaatacaaagcaaaggatggtacaatcggaggctggt

SEQ ID NO: 180674 - DNA, 495 bp, Zea Mays
tcttgctctagcttcgtgacaagaaagagcttcggcaaagataaaaattttcaacttcgtcaaaacgcaaaaaattcaacatcaaatggccagggtacattcgacagctagagttactcgtgacggagacaaagtcaaagctgctgaaattgctccgatctccaaagttatgaggtggtcgggattggttgtgattgaaggcgctgctgacgaagagtcacccgctgttgaaaccgagcagacagatattgaagagggtgacgttaatgaaggagagattgattatgatgttattatgccatcgaagcccagccatctggattttgggaaatcaactgtgtctgaagctgatatgactatgatgacgaagctaggttacttcaaggaagccgataagggattggtttgctttggcggggaagagactatcccgaagccgaaagatgatgaagttgtagtttttaagagcttcttcaaagcagggttgagatttcc

SEQ ID NO: 180675 - DNA, 630 bp, Zea Mays
gtcgtcgtcgacttaagccgattgctccgttagtagggtatagtggtcaccctaagtcgagtaagcacgagcatgttgcaccatcttaagtcgtcgccgacttaagccgattgctctgttagtagggtatagtggtcaccctaagtcgagtaagcgcgagcatgttgcaccatcttaattcgtcgcctacttaagccgattgcttcgttagtagggtatagtggtcaccctaagtcgagtatgcgcgagcatgttgcaccgtcttaagtcatcgccgacttaaactgattgctccgttagtagggtatagtggtcaccctaagtcgagtaagtgtgttgattccaagtccaatcgaatcgaagtcaagtgatagttaacagtttgaatgtccttgaaaatgaaaactttattgatgatgtattcttccattatagagtacaatgttgctccgatagctttcgaggccttgctaagggtaaaactttctaagatgctctatgctccattaattccccacttccgtaccatccatttgtgtaagccgatatgatcctggccgagtgaccttcgatacaatgaatggcccttcccatagtggtgacaacttgtgccgtccttcccccgttaga

SEQ ID NO: 180676 - DNA, 496 bp, Zea Mays
tgttttcatgcctgaattggacaaattcgtagtggttttcatcgatgatatcttggtgtactcaaagaacaaagaagaacatcccgagcatttgcatgtagtgcttcaacgtctgcgagagcaccacctttatgccaagttgtcaaaatgtgatttttggctaaaggagatcaaattcttgggtcacactatctctcaggcaggcatggctgttgatcctgataacgtgcaagaggtgatgaactggaagccacccacgattgtccgtcagattcggagttttctaggattagctggtcattaccaaagattcattccggatttctctcgaactgcgaagcccataactgagctattgaagaaagaagccaagtttgtttggggtcagaagtgcgaagatgccttccatgcattgaggcaacatctgaccacagcaccagtgttagcgcaacccgacaacagcaagccttttgatgtgtattgtgatgcctatggc

SEQ ID NO: 180677 - DNA, 452 bp, Zea Mays
caatcgtcaagttagttgaaagttagcttcgtcttaataaccgaaatggcgagaatcaggtctattgctaggctgacaaatgaaggtggagagaccgaggcaacagaaacaacgccaatctcagaagttatgaggcgctctgggttggttgttcgagaggaaggagaagcttctcttgaggaagatacccgtaatgccgaagctgggattgttgttgccgaagctggaagcgatgatgaagaggatgatggtatactgagtccaagcaagcctagccatatcgaatttggcacatccactgtgaagccagaggacttagttatgatgaaaaagcttggttattttgggagaaatgatgataacttggtaaggtttgcgggtgaagaagtaattccagaacctaaggatgatgaagtggtggtttttaagagcttcttccatgccgagcttcg

SEQ ID NO: 180678 - DNA, 658 bp, Zea Mays
cggtgtgttgggaattgctcgccggactccttccgctgccgtgggatctcgcattaccgtggccggagacccctacactacagaatccggtacaatactctttatgctcttagcagtccattggtattcgcgctagaccggtcagaatcaaggttaggtgatgggggaaccgtgcgggtgtggtgcgtcaatggcgccgtcgcgtcggagggcggaccgccgccgtggccgtgttaggagggaatggatcatctgggggtcattgatctattaacgtggggatgcgatgagatcggtatactgttctgatgcgggagatccgggccgtccaactcagatcgggcggaccgagatagggtttgtggtttagaaatccggaccactgatctagggaataatggtcctgagtagaagtgtaggctattatgctcaattaaacctgagtcaatgatctcagatcctatggttgttgttgcacctgggtttggggaggacctagatctaatcctgactgcatgcgtgtgatcctgcggtcgaaaaccaagaataccccttcggctggtcgatttaacgaatgagcccctcggtttttagggaattaacccaccgtccagcgccggagagttatgagtcttggaactatttacatagtaaaccc

SEQ ID NO: 180679 - DNA, 450 bp, Zea Mays
agatgcttgggcgcgagagtgcgataagcgtaaccgaccccaagcaccttccctttctatttatgcgcaggcatagagagccagaatgctgcctgagggtggaccctccacgaacagcattagaggatccacagtttcgaccgcaaccaccttaggccccgagtagggaggattgtatgccttgcaggtttcacacgcctagggcagagcgccagggggcacgatgcaagggatacaccagtaacggatgaggcggctaaccaccacatcatgtcacatgcgcacaatacagagaataggttgtttcatgtcccatcatgccacccacgccaaacaccacatcatgccacctatgcattccccatcgaacacaaatcttattgtctcccggttttcgaaaccatgacacatctagattttttccttaaatctgggtgtcacaacactata

SEQ ID NO: 180680 - DNA, 990 bp, Zea Mays
gtgatgtcagggaggtcgaggcagtcacgtcgaggtgcggctcgtcgttagaggtgaccagaattgccccaactgcgtgcgcaggtggcgaaggttgatggcggcgagcgattcgactcatcagcggcggtagcgcttgaattggctggtcgaggcgcttcaccgaagtatggtagtgttgtgggctaagggaaatggccggcggtgcactgggtggccctagccatgttcaccagcggagaagtttctccaacgagcagtggcaagccgatgcaggggtgtagaggttcggggaaagggctggacagcttgactaagctacaagggttacgatggtggcctcggttgggattgcggtggtgtggttcgctctggccgcggtggtctagcgactgggaggaatgtgggcggtggcatttacggtccggtgaaatcccggtgagggactggcgaggctgagtggctagcatatttgtgtccattgagggccgaggcaaggttttataggtgtggcacgggcgaggagagcgcaacacggtggtggcagaccgacgcgccgggacacgcgcaggcgtggctagtgcgcgcgctagcgtgactgctagcgtcgagcacatggcgcagtgacttgagcgcatcttctcttgcatgtatggcttcaaccagtgctgatcttggcaagagatgtgtatggaatatctcccttgcaccttaagctatcttatttgtatgggggtcgaaagattttgagctgtgattaaagagatatggagtgtgcaaatggtgtttgtctcactaaccggatccgagaaaaaaacactatgttgtcatgtcaaaatgtttggtttcatgttcaaactgtaccaggtcatggctaaggtagttaggcacatttttcataattggggttaagggttttgagctctgtagcttagtgaacatgtgggctctttgggatagggctgattttggagtaatacaaatcctgat

SEQ ID NO: 180681 - DNA, 1000 bp, Zea Mays
tagtggccaccccgagttaagcaagcgcgaacatgttgcaccgtcttaagtcatcgccgacttaagccgattgctccgttagcagggcatagtggtcaccctgagttaaataagcgcgagcatgttgcaccgtcttaagtcatcgccgacttaagtcgattgctccgttagcagggcatagtggtcaccctgagttaagtaagcgcgagcatgttgcaccgtcttaagtcgtcaccgacttaagccgattgctccgttagtagggcatagtggtcaccctgagttaagtaagcgcgatcatgttacaccgtcttaagtcgtcgccgacttaagccgattgctccgttagtagggcatagtggtcaccctgagttaagtaagagcgagcatgttgcaccgtcttaagtcgtcgtcgacttaagctgattgctccgttagtagggtatagtggtcaccctgagttaagtaagtatgcaggtcgacaatgaataatttgagctctcttgaagcctttctattgatgatatatttcccagtttacagagtacattgttgtcccaatagcttttgaaatatagctaggggtaaaacttcctgaggtgttctatgttccatgagttcccaatttccgtgccgtccatctgagtgaggcgatatgatcccggccgagtgacttctgctactatgaatggtccttcccatagaggtgacaacttgtgccatccctcccccgttagaattcggcggaggacgagatctcctactgcgaaggatcgatgtcgcatggtcttatcgtgatagcgcctcagagtttgttggtactatgctgattgaattactgtgttcagccgctcttcttcgagtacatcaacatcctccagcctagtagcctcggcttctgctatattttcaaagatcaaccttggcgccccaaacttgagatcagcaggtagtactgcctctgaaccatagaccatgaagaaaggagtatttccatgca

SEQ ID NO: 180682 - DNA, 412 bp, Zea Mays
gggaaatccgaaattagagctcggtggtagacgatctgaggcacgagcgggtgcactggcttcgtgacaacccaacggagctagcggtaccccaaatttatagtgtccaagagcggtggtggctaatttttgcgatggcgcgctcgcggtcggagaggacaagtcactagcgcgagcgctatcgtggctttcaccgtggcaaggcctccggcgatggacgagcttgctacaagggttcaccgcgacgtgttaaacctcccaggcacgtggcgcacgatcggtaagcggccaacgccggtgaagatcattccggccggccatagaccaagtgggtacggtgaactcaacagtgaccgagttcaagccaatccaggcgctaagatcttttattcccctcagttatccactttgc

SEQ ID NO: 180683 - DNA, 1141 bp, Zea Mays
tgagttttggtaaacgaaccatggatggatgtgatagctccctaggtgactcgtgtggatagcaatgttcagccatgaaaccagagaggcgagacgggtgcccaaagaacgtacccttgactgggatgtgagtctgggcacctcgtggccctaactcatagtcccagtgctgatgttcaacgcggcggccgaatggcccattggcgtggtcaaatctagcagatgggcgcggaggcgctaactcgtacgggccaaagatgcccggttggtcaaagttggttggtcgaaattctctctctaggaacttgccaaccttcaacatctccagcgtcaagtcttccaccttcttcgcgaggtctggcttccatacttcaacgttcgtcttcatcagctccagcgcaatgaggcgctcctcaccacacaaagcggcgacgtcgacctgctgatggatactgtcgcagctatgtgtgaaatgttggtagacctcctcacaccgcgcctccacccactggtcgatgctatcgtagtgcccaaaaatttgttgtgaggcaggtttccatcttatgcatttcatcgagcaccttgcggacggtggtgtccacttattccataatgccagatctggtgcgccacggtacctcactgagtggatctaggctgctagtctgataccagatgttatcaacctcgctgggagaggaaccagcgtagatttattctggcatggagaaggggaaaagggaagaaggagatgtcaggaggtaggcgacaacaataattgcatgttatctgatgtatgatggtttgtttcgttcgcgtacatgcataagaatatgtcacggactcagcctccacagactaagccagatctgacccaatgcttattacacgacccattctggcccattcagttgcacattctcgcgccacacatgcacacagcggtcttcagctgttgttatcttctcggccatctcttgagctccttatgcctcttgcgcacgtgggttgctgacactggatgtgaagcaaggttgtaggggcacatttgttggcgggtggggatgaggatagatggggaggaggctgagcggccttgcacgtaaggcagagcacggaatgtggggggagcaagagcaaa

SEQ ID NO: 180684 - DNA, 512 bp, Zea Mays
caatttcagagttcgagctctaaatcactctgtccacggaggcagtgcaaaccacgggtgagcatgggtgttcccgacgatctagcgtgttctagtttaattgaatgggtcgaggagcatcagtggcatataagagtgctgaaacaagagagcagagggcaagactggacctgaattgcactgaccacggtgagagcttgttcacggtggcggaaaacagatttgggggaactgagcaattcatgggctctagtgagtaattggaggcacgagcgagtggattggatgctggaatacctaacagagccgagggtgtgctcaatttatagggctcttgagtggtgactggtgaatttgaactcgcacggtggcggtcggagaggaggaggtgcactggcacatgcgattggtggccattaccgtggcaacctcaccggcgatcactggatgggctaacacgagtcacagcggtgtggttaaagtgccgaggcacgtggcgcaaggctgcgagg

SEQ ID NO: 180685 - DNA, 1053 bp, Zea Mays
cagggatcagtccaagcgaaggggtacacgcggttgaatctgggccgtttgcggcgagatccgcggccgagagcccatcccctacctctggtgaccgcacggcgacgccaacagacccgcacggcggcgcccaccggcgagcgcgctccacagcccgccaccacccccaaacccaaattaaatttcgctgcgcaccgagaaggtcatagcggacatctacgtgggatcatacctgcgctccgagaggtggtgaggccggaccacgacgatgggcgcagctgcggcggtgggagcagctccggtgccgaattcacgcgccaaatgttgcccacggatgaaattgtacggctgagcacgctctgcgcacgatatccctcccccgagcccgcgcggcaaatcaccactctctctgttcccctttctcgctccctctcgtctggcgacgacgcggtccgtcgagatgccgagtcgctgtgtccctcgtatgcacgcacggcttgagcacccggtggattcacgagttggatgacacagggctttatactccgattggttcggtcagtggcggattccgcggagctcaagcaggtccgcccatgccgagcacgcgcgattcgcgcggcgaaggaagagggagatgggtcaacggctgaccaagggggcccacgcgcagcgagaaacgggagaaccacgcaagcaagcggccgatccaggggaccccacccgtaagcgagagggaaatcaaaagcgtgtgaaagagactggcaggtagggcccaatcgccagtgcttcacccgcgcaggcacgaagtcggccacgcgcgtgcgctgaagactgggcagtgggccccacgcaccagtgagcccgggcgcgatggtgttaggtaactgggccgaaatcaggcagaaacggcccatgaagcccttttattcttttccatttttgctctaatttcttttctccatttccaagttaaatttgaattcaaacttaaattcaaacttctatggctcatcacttcaacttatatttgtgaaattagggatattaatt

SEQ ID NO: 180686 - DNA, 978 bp, Zea Mays
ttggtttaactctgcttgatttcaggcgcacctttcctcggcctcagagtaacaccgagtcatagctaaggaagcaacacacaatcaccaaaaaacatgaacgagcaagacaagagttagcaagggatgacataaagacttaccagcgttagcagccttcacatctactgcttctgaagagcagcaggatcccactatgacaaagaagatatctgcttgggcacctaagttgcctgcgccttcagctggacggccatgttattcaaaacccactacaaaacaaaaatcagaagatagggcacccatcctgaaaatactaagaagtgtgagctacacaaacaaatacctgcaagttcgctagaaacactagaagacccaaagttgttgtagccaagatatccctagaagcagcagcatccgtggaagccacaagggaagcaggaacaagggctgaaggctccaaatcccctagataaagtgcaacactcattgggatcatagcgccggaaccactgacgtccaaagtggttgggtcgcctggaccaggtccgatgggtagggtagaactcgttgcaacagcatcgtcaatctaaggcattagtgatccaacatgaacctccattgaagcagcagaaggagaaccaactgcgacaccctcgggggttggagaaccctttggggctgcagtgtcctctagggccagcactaggttggcggcatgaccgactaatgcaggagctccctaggggacttgcgggcttacctcgggcctagccaacaaactagcaaaggatgcttcatccgagcgagctatgtgaacattgataacattaatttcaggtaactcatgcagcagcgcctcccgaatggcctcctcaagtacatagtcaatatccgacatagatagaccttagatgtccaccatccttgctagggcagcaagactcaaagtatcactccaagtcttagaacatcgct

SEQ ID NO: 180687 - DNA, 702 bp, Zea Mays
aaaacgcacaaacatccccccgatcactcaaaatttcttcgaaggcttcggcttctccacttatccattcaataacgcattcggggtcgcctcgtacgaagttttcttcggcagagtaggcacccactttggcgaagctagttttcaattttttcacacaatccaaggatttctcgaagcacctttccttggattggcgaagttcttcaacatttttatctagataatttttccagtactcactgatctctcggttggcctgtgcgagcgcacaattctccttagctttggctagctgtctccgaagatctttaatttctgttttctaggcttcgacctgggctttatagttagcttcatcttcctttactttatttaccaaagaaatcaaaattttatctttctctaaaccttcgtttcttagatcaatcacttctaaacgaaggttattaagggccattgtatagccttcgtcttcaatattcttctgcgtcctaagggcattactaagaattaagccctgcaaaaaggatgaaagaattgagtgtggtaaataaaatacttgattctcaaattcaaagttaacttctatacctttatactgttgtatgctaggatgtcggcaagatcatccttcgacaaaattgaaaggtcatcctcaagcttcgggaatcccatgcttttacctatctttcggcaaac

SEQ ID NO: 180688 - DNA, 382 bp, Zea Mays
tcggcttcggcctgtgatttggtttcagtttgagcaattttctttgcaggagcagggcttaacgcctttgtagtctccagcacagcatctagtatgttggccatccttctcctcttgggagttgcggcaaaagccttttgcatcttcggcagatttgccttcgtcggagggctcagaatttttggcatccttattattacttcaacctttggctcttcggccttatcaaccttatcttcgactgccttgattgtatgcgtcttcggcattacggtcggctcttcggtgctctgtgtaatcgaagcagtttgtgttgcttcagctgctgaagtggaccctgcgccaaattcaggcacccggccggttcaatgtacgcggccgg

SEQ ID NO: 180689 - DNA, 1013 bp, Zea Mays
tggtcacccagggttaagtaagcgtgagcatgtcgcaccaccttaagtcattaccgacttaagccgattgctccgtttgtagggtatagtggtcaccctgggttaagtaagcgtgagcatgtcgcaccgccttaagtcattgccgacttaagccgattgctccatttgtagggtattatggtcaccctgggttaagtaagcgtgagcatatcgcaccgccttaagtcattgccgacttaagccgattgctccgtttgtagggtatagtggtcaccctgagtcgagtaagcatgagcatgtcgcaccgctttacgtcattgccgacttaagccgattgctccgtttgtagggtatagtggtcaccctcggttaagtaagcgtgagcatgtcgcaccgtcttaattcattgccaacttaagtcgattgctccgtttgtagggtatagtggtcaccctaagtcgagtaagcatgcagattgacaataaacacttcgagtgcctttgagaatgaagtctttctattgatggtgtatttcccaattacagaatacaatgccgtcccaatagcttttgaaatctagctaggggtaaaacttcctgagatgttctatattccatgagttccctatttccgtgccatccatttgagtaagacgaaatgatctaggccgagtgacttctgctactatgaatggtccttcccatagtggcgataatttatgccgcccctcccccgctagaattcggtggaggacaacatctcccactgcaaaggatcgatgccgtatagccttatcatgatagcgctttagagtttgctgatacctagctgactgaatcactgtattcaatcgttcttcttctagtatatcaacgtcctccagtctagtagcctcagcttcagatatgttttcaaagaccaatcttggtgccccaaacttgagatcagcaggtagcactgcctccgaaccataaaccatgaagaagggagtgtttccatgcaaagctcggctg

SEQ ID NO: 180690 - DNA, 479 bp, Zea Mays
tattccagatatcatattttccatagggaagcgacattcttgagatggattaaccaaactcaaacttgaattgaaaggtaaactttggtaagtgtacacactagtgattagacaagggttaatacaataaaagataggtgtatgtggaggaaactaatatggactctatgtttcgtagcatggtaaaattgcttgggggacaacaaggagtaaaggaccaaattattccatataagcccccatgttggtcacttgtttttggttccaaagagggtaccagtagacaaggcaacacaaataagtacgaatttgagcttctctcatttgttcaacttcatttgaaagtcgatcaaaaggagaagcttggagcaaagttattcaaccgttcgcattttacacaatgaaaccgagccttgatgaagttcatttcatctttgtaacatgacaaatatgtttcgagctctttctagctctcaaat

SEQ ID NO: 180691 - DNA, 609 bp, Zea Mays
tactagtaccaggagttcaggcatcgttccacaaatccaaacataaacacacacaattgtacctagcagttcgacaacaacatacaaccttcgacattactacatagtagattgttcacgacctaacgactggtagttctatatatacttatttgtcaaactccagaatctgcatcaacagctccaggactggtcgctatcgtactcgattccgaaatgtttttccaaaatttccctttgagatatgtcctcagggctcggcagggactccacctcaagtgttgcatcgatgtcatgttctaactgacgttcctgatgttcaacaagtgcttctctcttggttgttgcatattttttaatggacaatgcacacttctcaagcttgtcgcaaacatctccaatctaaaacaaagtggtcttaagtgtgtagaccgactcaggtaaagtagtttcgacaaccccatcagttacaagactgcgaatgatgtcgacatgtgcctcaatcacttgaactgcagtctcgaccatgtcgagggggtctttgtccattgactgaaactgaaaatgaccaattcagaatgtggtcagtttctgttggtacgagtggac

SEQ ID NO: 180692 - DNA, 726 bp, Zea Mays
atcgaaatcccttagaattccagggtgctatctaaaaagaaatggtctaatctgtaattatttttgcattcagtaggatggtgggttaatttgtcaaatgtgtaggggctctttagcaatactaccccggctgtctacacacgcgcgatcccaagcccttagatcatcatcggacgacccaaaacacatccgaaccggtatgcgccgctggccacatgattctggatcaatggagaggattgaatcggcgaaaggttaagttggttttaatatcgatcgttggctgagggctcaacggcatccgcgcccaacccattaaaacgtgacaaccagaggcggcgccgcctgctcacacggcggggaacccgccggcaaccgcaccatggccccccaggtgataatttcttcccccagaaacgcgctacataatgtggaggtcggggcgaacttgagaatggtggatttaccgtcggaggtgttgggatttggggtgcccacggtgtgacgcggcttcgcggcggtgccctgacttaggagagaaattcatcgcggtccgaggcttctctatgatccgtgtttgtcgtgtgcagtttccaagcgacgcgagcgaccctccttaacaaccaccaagaggttggtgcctgcgcaggcccgaatcgaccatggccgtgattccggacaccccccgactcctacttgctcgatcctggcagctcaagcggaggt

SEQ ID NO: 180693 - DNA, 459 bp, Zea Mays
gttagcttagtgtgtttgtgttgtaattcttgatcaatgattgtagttgccagtagttttgttagtgtgctagagcagtgtgattaggaccaagagacatagtctgcccccttgagttagggatgatgaaaatgagtcatcatgatctcctaggcatgataaagtcaaggtagttaccgttgagcaacaatgcaggatgcgtaagaggctcgattacggttatgaagaggcaatcgttgttgcagccatcatagagcaagctgagaggggtggttctatatagataggttcatatgcaatatgatactgtcattgtaatacccaattttttggagaaatacaataacccttgggacaaagtgtttaagtgattttgtttattttctttagcatctcaacaaatataaggcttgatttaaaagcaattaacaaataaaataaccaaagcaaatgtgcatt

SEQ ID NO: 180694 - DNA, 637 bp, Zea Mays
cgacgagggctctttcacggtggcagaaaacagatttggggagaaagggaaattagagagctgtggtggctaatcggaggcaggagcgggtgctctgccttcgtgattatctaacggagctagcggcatgcttaatttatagtgttcaagagcggtggcctccaattttggattggcgcgctagcggtcggagaggaagaggggcactagtgcacacgattagtggccataaccgtggcaacctcaccggcgatcactagacaggttagtatgagtcacggtggcgtggttagagtgccgaggcacgtggcacaagaccgcgaggtgtctaactccggcgagggtagattcaaagcgaccggggcagagcggacacggcggccggacggaacagtgccttaagctcatccgtggtggagatcttttcaccacgagacgttatccgggcaccggtgagcacgaatcacctcgccggcgtgaatccaggcgcaggggtcgccggcggcaaggtgcactgcacctgggatctcgttcagtccactgtaccatcagagttcttatcagggtgcctgacagagctatttgcagagcccagatctcaaatttccatgtgacaacttgctaatccacctttaac

SEQ ID NO: 180695 - DNA, 704 bp, Zea Mays
cgagaagaaagctgggacaagggaaagggtcgcggcggtctccttatatgggggtagggcatggaggataggccagagcataccagactaccccgaggttcacggcgggtttatggtgagcttgagattgtggcctagacctgggcatggacgcggagtccgggagccgttgcaacgaaccggaagtcccggccgaggggttgcgcgagcgatccggttgaggggatagagctgacgagggcttgactccatcatccaacgagcgaggccgaggcagcggatctcacccgccatttacgcgttcggtttgggaggttgaagaagatggtggagctgaccagcgggtcccaacgaacagcgacgcgcgcgcaattggaaggagtggacagaggctgacaagtaggacccgcgcgtaagtgacactggtaaaaagaaaaggaggtagcgtgggctgagaaggggggaaggaaccgcgggtggtgggctggcgagtggagaaagtgggccggccagggaaaaatggcccaagcgcaggcttcctttattcttttccatttagttttcttatttcagatttctaatatccaattcaaatttgaatccctgtttgaattttctgatttcaactctcaaggatagctctaatgtaaagctaaatcctcttttcattattatgtatttttctccctattatttaattatgg

SEQ ID NO: 180696 - DNA, 770 bp, Zea Mays
ttgcctctcgtgataatctggacaagctgtaccatgatgcgagcacctccttgaccattctggagaggagtcaccgttttaccatgtaggatttggaccatcgtcgtgacgaactgagggcatcccaggatgaagtgtcccgacttggcaagttgttgtctaccaaggattccgtcatcaatgagctgcgtgcctctgagagacttgttacacaggagctggaggtcgcctgcctctcttcaaggccttggaggatgaccacgtcgttatgaaggagatgtgcgacaaggccatggataaggttgttcgcgccgggcggatcctgatgaggagacccaacgtcgtggtgcctgaagacattgtcactgatgtcattgatgcgcttgatgccggaagccgtccatcttcttccgctgctcctgcaatcgatgcttcctgcaagaatgctccagcgcaatgatttgcctgaaaaacacttgttcattgagttagcactttttagaggaaaagtgtaacgtgaattctgtgcgcgtgtaattgttatgtttgaactgattgttctgtcagcaaggtgctgaaaacacccctaacaccgtaagcgagatatttctttttcgaagtactcctgattcgagttggctattttgttactagggtatagtgatcaccctaacttgtgtacgtatgagcaagtcgcaccgacttaaggcgtttccatcttaagtcgattactctgttagtagggcatagtgatcgccctaagtcatgta

SEQ ID NO: 180697 - DNA, 720 bp, Zea Mays
cgcgtccagctcgcaagacagcaagagtggcaaatttccagtggttcatttacgaatttgtggccaaccgccgtggattttgtaagaaaaaactagaaaccgtgaaatgtaaaaagatcaagccttttttcattttaaaaaggggagatcgaccttttttcaccactcaccaggaggcaggaccagggcgttcctttgcttttgcttgtgtcattgtgtggttactgctgctctgcttgcttttgctcgtcgtggttgtgaaacaaacctctggtggaagccaacgcagcgaccggcacatgaaaggcgttttgttttggaattcgaacttgtgactgccgagccttgttcgaccggtgaaatttcgctggactgaaattgctggattcaaatccggcggtgataaagtgggttctgaattcatgctgatgataaagcggggatcggtctgactccagtgtcgttcgtcctcccttttggtagcaaatgcagcgcgtgttctcgggctggccactggcctggcctgcctgcaagcggaatactaagcagggtgacaggcccatctagacttttggccctctcttttgcggcagcgattcaattccctcgtaccatcagaactggacgcgctgcactgctgcaggcatcgaccggtcactgaagctttgctgcgaattcaaaccaagcagccacagggataccggggtccgggggccgggg

SEQ ID NO: 180698 - DNA, 846 bp, Zea Mays
cttcatcaattagaagtcgcacttgctaaactttgcatacagctgatgctcccgcaatctctgcaataccgtatttagatggtccactactcctcctcactttaagaatatatgagaatgtcatcaatgaataccactacaaacttgtcgagataatccatgaatacactgttcattagattcatgaagaaggtcggcgcattcgtcaggccaaaagacataacggtgtactcatacagcccatacttggtaataaatgtcgtcttcgggatgtatggaggtcggatcctaagctggtgataacccgacctaagatctatctttgaaaacacgctggcccctctcagctggttgaacagatcttctattctggacaaggggtacttgttcttgattgtgacttcatccagagctcggtaatcaatgcacatcctcctagtgccatccttcttctccacgaacaggataggggcggcccaaggtgaggtacttggtctgatgtaacctttctctgacagctcatctatttgcttcttgagctcaaccaactctagtccagataccctgtagtctcttttagatatggggcggttctaggaataagctctatggcaaactcaactttacgctcaggtgtcatacctggtaaatctttagggaacacatccggaaactctgacacaaccttgatagtctcaagtggaatagcctccttgctatcaagagccatctggtgacaacctcctttccttagctcgagtgagactagctcagtaaccacttctcctagtataacatctattccatgagtacccatcactatgaggttagcgggaaactctatcc

SEQ ID NO: 180699 - DNA, 485 bp, Zea Mays
ggtttgttatgacttgcgtcaaacaaatcaagcaaacttggtggcctaagctagcgctagtaaggctgtctacgtctctctcactgtttcaaactttattctgtaaacagtataatctacagtgcaaaacaatattttacacgttcatatatacgcatgctggccttaggctatctccaacaaaactaggaactcactgtttaattacagaataaagtttaaaataatgagctagatactgcgagatagcttaagcacatccaaaatggggagggggtagggaagaacggcaatgccatgacccaaccaccgagcaccaacacaggggccggccgctgccatcacgcacaaggcatgcaacggtctccgcacgtacgtacaaattaatccatatatcctcccgccacaattcgtcatgcccgccataaaatacaacgacgtccgcatcaacgacctctcactctcagtcaccgcgtatctgcgca

SEQ ID NO: 180700 - DNA, 647 bp, Zea Mays
gttcgtaggaggagaaacgagcactcgtgtcctcttgtgacaatctgaacaggctataccgtgatgctagtaactccttgaccatattggagaggaggcactacttcaccatgtcggacctggatcatcatcgtcacgagctgcaagtatcccaagatgaggttctgtgacttggacaactgttatcaaccaaggattccaccatcagggatctatgtgcttcaaagaagcttgttgcacaggagttagaagccgctcaactggctgtcaaagctttagaggacaactgcgtcgttttgaaggctcagcgtgacaaggctatggacaaagtcgttcgcgctggacggatcttgatgaggaggcccgacgtcgtggtgcctgacgatattgtcgtcgatgtcaaggctgcgcccgatgcttcgagtcgtccttcctcttccctcgctcctgtgaaagacattgctaacaaaggtgttttgatgcagtgatgtcctgcaaaacattcgatgtaatatgaattctatgtgtatgtgatggttatgttagaacttgaatattttgcgagcagggcgccagaacatgctcctagtgccaacaagtaaaatgttattttttcctggagtgctaattgttttgctgttagggta

SEQ ID NO: 180701 - DNA, 443 bp, Zea Mays
gattttcacagctacgcaatttctgatttgaattcagaaaacgaaccttttaccccggcttcattattattgacgtcaatatcacatgtctcgacgccaacataaatgacgtcgagatcttgatctagtaagtcgagatggcgcctatgtggtaggagatctgcgtcgtggttattggcgccaacctaccttccaagaaacggacgctcggttcatctctctatgagtggtgcataatggttataatatttgaaccatcactctatgagtggttcataatggttataatatttgtacgatacatttatgtagcacttatatgatttactacaaaatcacatgatacgatgtttatataagatacaagcactcgcacgactagcaagccttgaaaccataccgcataagcacattgaagcgcccagatcctttgggactcaaat

SEQ ID NO: 180702 - DNA, 858 bp, Zea Mays
cttcggcggggttgatgaggaggtcttgggatgtatccatgatcgcgccagagcgaagatagttgacactttatcaaagagtgtcggctttctgaagctagagactgatataccgacgacaacatattgtcgatagcttattctactccaacttcaaggtgagacttttgactaagttactattattatcctcgtgatgaattgaatgttctgactataacttgttgttgcagagcatgctgctaagcaaagcgctgaaaatgcagcaggataacaaagataggaaaaacgagattataattgaaggcttggaaaataagataaaatatcttgaagcttctctagagaagaaagatttcctgctgcaagcagtcgaaggctccctcgcggaagcacaatctcagaacactaaattaagcgaggaacttgacagtgttcaaacaattttgaagaaaaaatccaagcgatttgaccatgaaacaaaagaatttcgagcaaaggctgaagctgaggccgagaagaatacgaagctgcatgagtctttgaaagaccaccggaacaagtgcgcggattttgccacccggtgcgtaaaccgactgaagggaattttcaactcagttggagctgctgccgaagagattacccgttcagccgaagacatccctagggctttcgaacatattgaaaacgaagttgacgccctcgtcgaagttataagcgggcacaaagatttctgtgccttggtagcttctcgcgggacggctgatgcgtttatgaaggcgggatgtactcatgccaaggtggttaacaagccaacttttaatctttcggcgtcagatataattgatatcccggccg

SEQ ID NO: 180703 - DNA, 530 bp, Zea Mays
attttaagtcggaggtcaaactaaaattaagcagtaggtatacacacaccattaattaattgaaaaacacatcgatttaatttgttttccgttcgtcggctgtaattatccaatttgtacacgatggtttctttgtttgtttctgaaaccttctcgcgcgcgcggtggtataatatcaacgtcacgatcagagtacgcgtgtacacgtactgcgctctcgatatgcacaagaccacactaacaaagctagccaagcgtccgtcgcttggacgagctttttgccaatctaaaaagaagagtaaaattaacttgaatcatttggagttcatctaaattcaccgcgaggaacgacaaccctctgctatatggtatatctctcgatttgtttaagccggtgaagccgtcctgctgcctgccaaatagctagactctagcaactactgagctttaaaaagagaaacaaaattaaagaatggcaacctttttacggccaaccccttttaacgtctgcccaacgaatcttctcttcg

SEQ ID NO: 180704 - DNA, 432 bp, Zea Mays
caaactttgataaattcatcaaatataagtttaattatctttggcatgatgagtgaccattgtatggggtagttaaccttgtatacctttgactatcactttgatggtttcttgcttgcatatgttcaatgttgttttagtggtgaacctctattctttacatgcttaaaactgattcaaatgcatagaatttatacatcttgtgcatgtgatcagttcgagcatctcctaacacatccatatactgttgtgcacatcgcacaacaccacttagatcatttttacattctgattgctatactactaaagcccttgtatttctgcatctctttctgctcccatgcatatcctaacagggagaaccattttgagggggagttgctatttttgtggatttgagcagtgttttctaagtgcaattatcaacaaggg

SEQ ID NO: 180705 - DNA, 594 bp, Zea Mays
cgggcacggcaatggcccagtagccagggaaaagacctaggccagcccccatcccacgcggccactccctcagccccctcacatttttgcgctagccgccccagacaatgactcgacacagtggattcaaatccgatcagcgattctgttaccctagccccagtcccgtcgtcgcccgccgcatcgcgctcggtcatcgccttatcggtgtggagccatcaccggtggctcacagaatctccctcttctctccctcctgtcatccacggcgggtacgatatggactagctctctccttcctcccttcctgacttcccgtgcattgtcggtggtctgctcagctcggctccgtcgtcggtgtgctccctgcgcgtcttgtggttgtggatctacctcttctctcccacctctactatctactcccaagcagctaaccctaatccctaagtccctaacctaaatcgcactcggcttctcctaatcctccgtcgttttggtcaagtcacaaggtctgttggccagatctccatctccctctcttctccggtgctccggttgcgcaggtattctccatcttcttctctactgctcgac

SEQ ID NO: 180706 - DNA, 704 bp, Zea Mays
ctcacatacacaacgaaagagataggtaaagcaccactcttgaactaggatggaaaagagaaggctttaaaagttaggttcaaagtaagcgttaaggtaaagatatagatattacaaaggttaaaggcgataatagacagcagtgtaagagataaatgtgcaggagaaccaagggcatgagtacaataaagaatggagctaaggccagactggcacgtggcaaagatgaggttacgaccaaaggcgggagaagtaaaacaccactctcgaactgagatgagagattggagattttagataacaaacataatgtaatcaccaaggtaaaatcgagagatgagaaaagtaaaggagatagcaaacaaaagcacaacaaagactggagtttaaaactcgcaagtgacgaagaagggggtacgaccaagggaaaatatgtaaaatgcaactctaagattgagatggaagagatgagatttgaaagggcatgtataagataaaacatcaaggaaagatatagaggtgactagggtaaagatggtaataatgaaaagcgtaactatggatagagttaaggcaagactcgtgaaatggtgaagtggtgaaaacaatcgacggtaagataggtaaggttccaacaggatggttgaggtaaaaattcattaccgagggaagttataaggaaacaacgagatcactaaggatgt

SEQ ID NO: 180707 - DNA, 438 bp, Zea Mays
gcgcgcgcgaccactgtcctaggtgccagcgatcgagctgttgggcgagaggttgaagatggactaggtagagggaagaagaaaggttgttcgccgttcgatcgtgatgaacggtagtgattggatcgtcactggagttcggccgaatccgatctgtgccattgatcgagtgatgagcggtcctgattataaatccgcgtaccccttcgtctattatatctagacggttagatcctgatcggatgactggagttcagatcagttgtgatccgttggttttagatctagcggtagatatcgcataccgattcagcgtaagtcggatctaatccgggtcctcggttttgatcgaacgacccaaatggcgcgataccccttcaccatgacagattttctaaagagcccctggatttctaataaaccaactcaccgtcccct

SEQ ID NO: 180708 - DNA, 490 bp, Zea Mays
tcagattagttgctatagaaatctgagggaaaatcgagttcaaaggttgactgtcaggcgactgatgaagatgcgccatggtacagtagctcgatgtggatcagaccgccagcgcggctgtcctcaccgccgacggctccctccgccgcgattcgtgtcaccggcgtcgggattcgtgcctggctggttggatagcgcagtggggtaaaaagatcgtctttcccctgtgcgctggacgccactccaatgacccccgtacttcccctctggcttgcggctgggatcgataagaacgccggtgagccgccgtcgctgtgtcttgcgccgcgtgtccgggcgctttaccacgtcgcggatagttacgctaggagcgtccggtgatcgccggagataccgccacggtagaagccacctagcgtttgcgccagtgctttcttcttcctctggccgccgcgcgtcccgcccgattcaccggccaccgcatgcaagc

SEQ ID NO: 180709 - DNA, 1086 bp, Zea Mays
gtattttcattcataaagaattattaggagacatggctaaaataaattatacctcaataaaatgtgcatcatgccgaagttcttgtgatgttgcctttgcactttaaattatgagacaagtttgaataagaatttggaaatagaattaagaagagaaaagataaaggatataaaaatataaataatatatctaaaatatctccaagttagtacttttaactgcacaaatataatttgtaattattgagccacaaggttaaatttaaacttgaattcaaatcgaaaaatggaaaaaggaaagaatattatgtgcaacatgattctcttaaattgaggaggatttaccacagagcaaaattgaattttgaactttgaatttcaaactcaaagaaaaaaagaaaaacagaaaatataacataaaagaaaaaaaagaaaagaaccccagctgggctccctctcacgctttcggcccaacttcatacagcacacgcgtggcccatctacccttctcacgcgcgcagtgacttcgtggttggtccctggcgccagaagcttcttcctcgcggactcggctggccgaaccagccgccgcggatcccgcgcgtgggccaagtccgctgctcacctgtcagctgactggtgggtccgcttccgctggggcatcttccacggtgggttgttaccattgcgccgaactccccgaaaactactctacgggccgacgttgccttcggttcttcccctgccctttaaatgctagcgattttccctcgccatcaagcgtgcgaaccgagctaccagcgaagcagtggggtgatgggtcaagctcgcgggttgtgtccgtggctttggcggcggcgtgatgcctcgacgcgtgggcaattcattgccgggctgttggatcgccatgggaccgccaactaccggggtcgacaccgccatcaaccgaatcattggtgagtcttaggccatcacgttcacctcgccccgtattttgcgaatccatggctggtcggggtagggagctccgtggcaccagatcggacttcttcggttggatcgccgccgcgggagcactgttccgcc

SEQ ID NO: 180710 - DNA, 1186 bp, Zea Mays
gtggcggtggcgtaagatatttgttggaggtgtgcgggtatatgccgtaatatggttatactcgcgacgaggaaagatgtatgtattgtgtaacacgactcttaggtcgctattatataaccgtgtgaaggatgctcccgagggtcatgtgactaaaaggggttgtagtggcaaagctagaagtaagtttaatatttttaaatgattaattgatagcacctatcgacatcgtcatgatttttgttgtatggcggatcgatgccttgtcgttgtagttttggggaattttcggaaatgtgctggtgctttactgatggggttgaatgtacttgtgatgtattagaataactgcgtgtcgtacgagcatccgaaaatggtgaaagttggtgtatgttggtaattagaaaatagtcacgacgttagccaatagccaagcttatgccgaaatgtaaaatatgggaactttgagttgaaattatgcttatataggcatgtggattaataataataattggaagaacagtcgttcaaattggtcagtccaattaagaatgattttgcgtgtgaggtgaggtggtgacatgccaaagtagtcaccgcttccctatgtttataagtcgagtcaatacccattaggcgttcattaaatttcatgtcgcacatagtgtttggttgtattcgtgacaaggaggtataggttttactcaattagaagtttggttgatgtggctaggaaatttgtttcggcttgggtaatgaagtggtgacgtgaccaagtagtcccctggttatgagtcaggtctagatgtgttatgccttcgccgtgatacccatcgcatatgctaatttgatatatatgaaaaatgaaatagacgcatcatatgatttagtggtgctggtattgtgatctaagtacattatatatgtgtgataaatgttgggcttgaggattgtctttcgggcgaggaaggtgtaatagacttatatgtgtagaatgattaagctagtaataaaaaatgacatgaataaaaattagtgagtctacttgttagtacttatttgattattttaactctaacaaatggtaaagtgttagaataattcaagtctctagagcaaggcaattcttgaattatataaaagctgaaatttattgattgttgttttggactgcacgcactgtttt

SEQ ID NO: 180711 - DNA, 807 bp, Zea Mays
gtcgttgccgacttaagtcaattgctccgtttgtagggcatagtggtcaccctgagttaagtaagcatgcaagtcaatcgtaaatgaactgagtatccttgaaacctcttttttattgatgacatatttccactttacagagtacatcatcatcccagcagttttgagatacagctagggataaaactttctgagatgttctatgttccaagagttcccaacttctgtgccatccatctgagtgaggcgatacgatccgggtcgagtgatttctgctaccatgaaaggtccttcccataagggtgataacttgtgtcgtccctcccccgttataatttggcggaggacgagatctcctactgagaaggatcgttgtcgcacagccttgtcgtgatagcgccttagagtctgctggtaccttgctgattggattactgcatttagccgttcttcctcaagtacatctatgtcctccagcctggtggcctcagcttctgctatgctttcaaagatcagccttggcgccccaaacttgagatcagcaggtagcactgcctccgacccatagaccatgaagaaaggagtgtttccatgcaaagctcggctaggttgggttcttaggctccaaacgacatagggtaattcccttatccactttcctacgaatttttcattcttatcgaagacctttttcctgagtgcatccaatatcatcccgttagctcgctcaacctgcccgttggttcttggatgggctacagatgcatacttgatctgaatgctcttttgctcgcagaagtcaaagaa

SEQ ID NO: 180712 - DNA, 489 bp, Zea Mays
gtccaggagagggtgcttgctccgcgatagacgaaggcggccgtccacctgtaggctgcatcacgcggtttcctagggcgtcggcgggtgaagcagatgatgggggtgctccattgcgggggagtcgtagctgcaccagcgcgcccgagcaacgtggtggttgttcacctccgcgtacaagaggctgcaagacatggcgcccctctgcaacgctccgtccggcgctggccctcatctgcggcgaccgtgcaactaccacgactactctccttcgtacaagggggtctgctggcctcgccaccatcttctctagccacaccaccctttgcgcactggtggccgcaggaccatgaggggctgcactacatgggattcacttgctgcaagcaacaccaacgttggcctccacgggcccgcctccaaaggctgctgtgtctttacctccatggttttagctcgcactctcctcttcactgtgcaacgtttcct

SEQ ID NO: 180713 - DNA, 756 bp, Zea Mays
tgtaccggccaatacactcaaagaccagcaccctatcttagtcgagaccgaattcaagacctaatgagcgtttcccctcactcaatttcacgaatggctacccagatggttctagccacggtgacagtgcggacaatcaaaggaacaacgtgttcccggtgatccacggtggtctagttcaattagaggggtcgaggagcttgaggagaacttaaggacgctagaacaaacgatctgggagcttgaattaacctagaataagctagccgcggtgaggctaaaccgagcggggttcttgagtgttttggggagaatccaaaattggagctctctggtggaggatttgaggtgcgggtgggtgcgttagttgcttgattacatgacggagccgagggcgtgctcaatttatagagcccgcaagcggtggccggtgatttggacgacgacgtgcggcggctagaggaacaaggagttactggcgcaaggaattagtggcatctaccgtggcagccctcaccggcgatgatcagacggctaaagtgagtcacgacgatgcggtgaatgtgcccgggtacatggcgtaaggccgtgaggcggctgtcaccagcgagctcatccgaatccgccgtggcgagctcggtacggtggccggagtttatctacggcggtgatacttactcaaccccgagcgttatccaattgatccgagcacgaattgccaacatctccgatccaggccgaactttggatcatgta

SEQ ID NO: 180714 - DNA, 399 bp, Zea Mays
gagatacgccaggaaaggagggcgcaacagcaacaacaacaacaacagcaacatcagcaagcaccactgcctccaccaccaccaccagttccaccccgagataagcaccgggagtccatgagccataagccactgacatttgctagttctcctgatccactggacacagatgattggctgaagttcgtagagaagatgttgaacattgctcagtgcactgactgggagaagatgttatatgcttctggacgtctgataggacttgccgctgattggtgggattcatacactgctgcccacgatgctgctgacactatcacatgggcggagttcacgacgcagttcaggaaccatcatataccagctggattgatgaagattaagaagaaggaatttcta

SEQ ID NO: 180715 - DNA, 353 bp, Zea Mays
aaactctcaggttcgtagccatctcgggttgagctgatgctttgtggacttgttgcttaaatttagcccaccacacgaaaacatggcccatgaaacgctccacaaatggctcaatatgcgtatagacagaactgaggttcctgcacgagcccatgcggtcatgcggcacagtatcactacgcgtctacgcctccgccacagtcgctagcaatacgagtaccaaacagcccagagagcaaggactagctgatgatataaagattactctgaacgcaacgacatgtagcaagctgtgacgaaaagcagtagcactggtgggtccggtgctttcttctgaacctttgaagacataa

SEQ ID NO: 180716 - DNA, 359 bp, Zea Mays
atttattattggttatgggttacgggggctttgagtcttcgatctgacgatatattatgggagctccgagtcctcaatctggtagttgtgggatatgcttgtagccagtcgttctgatgattccaataggctctttcttagggttggatctcctcatggttttcttttaattaaataagtctgtggtgcagacactaatttctatgaatataacctatccatcattgtttcacttcaagtctggcactgccatgtctctgtatgcttgatagtctgtctaaaccttggagtagcagattgccatgggttgttgtatcgatgatgcttaagtatgggtaagctagatagggatgcaagta

SEQ ID NO: 180717 - DNA, 1193 bp, Zea Mays
gcaatatattaggcgccacagagactaaagattagtccattattttcaatccctaaattgtcaaacgttctgaatatttttgttccctagaaccaaataaggtctagactaaattttaattgtggaactaaaagtcaccggaataaagaaaccaaacatgcttttagtattaaatatcctggagatgaacgcattattctatgtagacatgtccgttgcctttgcctggtggactgctggtggtacggtctagtatggtggtggactggtggctcggtgttagcgagaagggtggggggaatctggagcccggccaagtgctccagacaaaatccacttcatcagtcagagtcatcaaactttacagaccgtctacatgcaccaccaaacctcccatccgtggctgccctctctctttcgttcccgcgcgcttcccacttccttccattccaccgcgctggccctcgtgggactgcgagacagagagtgagaggaagctgcgtccctcgctcgtctgcacagcaaagtggcggccgccgtaggaagaggaaggcgataccataccctaggttgccgtttcgtccacgtagtctctatcgtcgtcgtcgccgtcgtctctgccgccagagctcgccgcctgtatagctagcactcgacggcttcgtgggcatgctagccctgcagggacgtgggaggaagagagatagtgccataggtaggactcctaacttgtagctagtagctagggaagagctgctttgatagttggattgcgacatgctttaccacaccattggctgctttgggtggtgctgccggccggagagagagagagagagagagagacgttaggccggccagcgctttaggttcaatatatatataaaaaaattgcatcaaaagctgcatcatcctttagtccccttgggaagtattctcgccagtgtcttgtgctccatgtcctttgcattccctcctttgtgtagctgctgtactatactccacagtactttttcggtgagcaggtggccatggagctacttgagctgtgctgtattgtgtgtactcctcttcctacatgtgttgtccagctgctagcatatgctttgctgccccccctcgatcgatctcctctcctctataaatccagctcctgctctttcttctacctccatctccttcacgccttctcg

SEQ ID NO: 180718 - DNA, 380 bp, Zea Mays
ctaaagtgcccgaccgaaggggtatcggatgcgtacagccgttcagattacaatcaacggcctggattttatagcaagctacacgttacgcatgcgctcggatcacgatcctgcgatccacagagcgccacgttcacaccatatcccaatcgttcccctacggatctacggtcacgatcagttcacgcgattgatgactctatgagttgatctggtccgctcatcccgaaagggtaacctaggatctaatcaggaccgtccctaaaacaatcaacgacccatgtttgttcttccctacccacgcggccggtaggcgacagaactcgccatcacggcggagctcgccggcgagctccccaatctcggcacaaacgtggtcc

SEQ ID NO: 180719 - DNA, 829 bp, Zea Mays
ctatttacgtagagtctatccactccaccgggggaaaatggaccaactcctaggttttttatctgacggccacgcactccacacaaagttgcttcgcctttgtgcaccattcactatgacgccacgtgtcgccactaattcccataggaatcaccaccgtcaatctttaagcccaaactcggtcaaaaacccaccgcccgtagtgctaggtgtctttttgaggttcaaccaccataccctcgtcagtatcgcactgtgtgcgtgccccccacatccaagactcatgtctcgctagtcctcgaccacaccggtaacaaggctcgctccgccacgttgtcgcgccggtgcgtgtcccaggtgtcagccaaaacggctagtcacccgatgactctggtgaatgattatggggaggctacactagcgcaaaacaaagtttttgaccccataaaaccaagaactactgcggttataggtcatggaattaccactagacgcccagggcagcagaagacgtctcgatgtagatgaaagcgtgaagcagcgtcgtgcagatgcagcacctctgaggtatccacacgtacagggagaaagcgccgtgtaccgaactgctaggtttgcgacagcggctaggcaagggtgagagacgggcaactgctcgtttactggtggctaattagggttcacttaaccacaccattgcccctcattatacaggcattctagtgggcttctgactctaaagcccatcagtaaccctaaagcgttgtctaattcgaatctaatccgagttaggcttccttccccttaagtgtgtgaccctataggttca

SEQ ID NO: 180720 - DNA, 455 bp, Zea Mays
tttgttttcaattctttttcaagaccatggtttccgagttagtagaattcggaagcagtaatacaccataccttatatctattttttaaactctgttattagctgattcctctgaactctatacctcagtcagcaacacttgaactcaaattactatctttaggttcttgcatgtgttgatggaatcattggatggacgagtaacatttagagaggaccattttggttttaacagcgcccctagacaacacaatagttttcatttcacgcagcttcttgattgattcttgttctttgtattttactattatccttaggtagcacatgatgatcgtactacagatttctccaagagccgcactatgataatctgaatctatgcgtattcttgctacttcgagtttgcaaatgaactgagatttgtgatgacacattccctagcactgttctaatta

SEQ ID NO: 180721 - DNA, 580 bp, Zea Mays
agtgaccccctctactacaaatggcccttcccatagtggtgacaatttgtgtcgtccttccccgttagaattcggcgaaggaccaagtctcccactacaaaggatcgatgtcgtacagccttatcatgatagcgcctcagggtttactggtatctagctgaccgaatttgtattcaatcactcttcctccaatacgtcaatatcctctagtctggtagcctctgcctcagctatgttttcaaagaccatccttggtgccccaaacctgagatcggcaggtagcactgcctccgaaccatagaccatgaagaaaggagtatttccatgcagagctcgactaggttgagttcttaagctccaaaccacatacgacaactctctgatccattttcccgcgaacttttcattcttgtcaaagactttcttcctgagtgcttccagtatccttccattagccctttctacctgaccgttggcccttggatgtgctactgacgcatatttgatctggatgcttcattgttcgcagaaatcaaagaattcagagctggtgaaattggatcccaggtcggttatgatg

SEQ ID NO: 180722 - DNA, 508 bp, Zea Mays
gaaactgctcacgacgcttgaacacgaggtggttgcggtacatcgaccagggctaagcgtgagggggcgcgtctcctcgtgctctgaggagggggtagatctccgcgtgcatcagcgaggcagtaggtgtgagcgctggaatgctagacatttggatgctcgtgctttgtagtcggtgccggctcagcgaggcagcgggtgcgtggttgcgaggtctgggccggattgttgatgggtaggcggggtgcgagcatggtatttgatggggtaggtgagggtgaccatctcagaggccattgggcttcgatggaaggggatggcggggagcgtggcgaggatggcgtgggcggtctcatgcctagattgacggagagccaggcggatcccctcgggcgccgaaggaagggatggcggggagcatggcaaggatggtggggcatgagcacggcgcaaggggcgatgatggcggggagctccgacacagacgcacacacactattggctttgc

SEQ ID NO: 180723 - DNA, 348 bp, Zea Mays
ttgacttacaaattgtccacaacaacaactcactatcatttgcaatatagcaccatataattcactagttgaaacgtcgcaaaactcaccaaccaaataaccccacacccataacctacactaaatcaccagataaattgcacgcagacttaacacataataaaaaaacaacggttcatatcgctggataattccatctctcttactcactcaaatgcaatcaataaacaatactatttagatcattctcagactatctctcttccccataaccctagcctctctctacccctcacttgtgccatcattgccgctgtggcgtcaaccccttccctcgtgtcgttgtca

SEQ ID NO: 180724 - DNA, 497 bp, Zea Mays
ctcaggtaccctaaggcacttctttagctgagatacatggaacacatcatgcacatctgacagatgatcgggtaactccagttgatatgcaacttcccccactcgctttaagatcaagaaaggtccaatgaagcgaggggacaactttcctttaactttaaatctcctcatacctcgaagtggtgacaccttgaggtacacatgatcaccttcctccaactccagtggtcttctattatcagcgtagctcttttgcttggtctgagctaccctcaagttctccttgattatacagacttgttcttctgcctcttgaataagtttaggtccaaagaactgtactcctccagtctggtcctaatatagaggagtcctgcacttcctgccatatagagcctcgaatagtgacatcttcagattggcctggtaactattattataggagaactcaacataaggtagactcttgtcccaacttccaccatgtttaagagcac

SEQ ID NO: 180725 - DNA, 546 bp, Zea Mays
cgtttgtccattgatgaacacaggcagtgtttacaagtcgtccgaatcgcgattagtcgggctggtcgcctggaagagggcaattaggtggacaaagcgattaggatttcaagttgtcctagtcgtccgactagtcgtcgacttgggcgattagtcgtccagtcgaacacttgctggtcgtttttgtcgtcgcaattttggtactgagcttcactctattttttggcccatctatagtagcccgcccctctagaagtaaatcagccgccagaaaccctcccagccgccacaaacctgctagaaatcctcccagccgccagaaaccctcccaaccgtcagtaaaccctaatcctctcctctgtcctctctggtttctgccgacgctctgctccaagtgctccagccgtccaacatctgccaccggcgtccagtactccagtgctccggcgtctgtcacctagtcaagaattgaagatgagctcgtcatctgaaggtagcacctcttctctgattatctcccagtctccattccctctattaccactg

SEQ ID NO: 180726 - DNA, 573 bp, Zea Mays
ctgacgaccatcccgaccactccaccctaaaaggagatggagggagcacgaagcatcacaccaagctccttcccagacatcctcttcatccaaagaagagtgcaggacacacctgtttccgatgatgagcccatcatactgggggaggagaccccccagcgtgacgcacaccgacaccagaacaagtgccataacatatggcgtaaccatgaagctgatgatgggatccagcataacccgtctccaaggacgaagcctctgaagtaggggaaacccccgacgacaaagcgctccgggaacgctacaactcccgccgccacacctaggaacgtgaacgagagcaagctaagcaggacgtcaggctccaacacgagaacccgcttctccctcggaacctattccctgactttcctcaagcactgaatacgccgagtgaagtaggggagtcctggctcaaatcgccaacagcttgccatgcaccccagatgcagaaggctatcgacaggtcctcacacagaaagcgaaccatcttcttgccctcacccatccgtcgaatgatctacaccactgaag

SEQ ID NO: 180727 - DNA, 592 bp, Zea Mays
gagacgtagcggccgggaacgacgctggggaggaacgcgatgagatggcaaggaggagcagcaatgacgaagaagcaggccaagaggaagcacccgaaggtgagaatgaggatcatgaggatgagagtggggctgccaacaagtccagcgacgagtttgtaagcatggaggacgaggacgaggatgagggcgaagaggatggcgtaagaatgcctgctcgtgcagctttgtcgtcagagagtccgaagcccgggcactcagcattgggcaatggagaggagatggcgaacattcgatcaggccatcatcatcccgagcttgaccaggctgagggcggaggtgacgacagtgtgcaggctgatgacgagacacgggatggagaagggatgtgccatggtgccatacagcagcaggttgaagagcagagcagcagtagctgggaagacattgatggcgaaggaggcggtggtgggaggagcagcacgcggcgtcagtcaactcctcctgtgatggcggcagggaaggatgctcctaccgggagcagaaagaagagggaggcagtgagcagaagcagcaaacccagcaaacccag

SEQ ID NO: 180728 - DNA, 510 bp, Zea Mays
ccgctcgcaccaatgccacgtctcctcggggccgtcacggaagactgaaaagataagtttcagaactgtgcaacgactcgaggcagcctgcgcatggcccagcggtggcattaagtacgaaaatcacgggccagtcaaccgtgggaataggcgtggcagtcggcatgaccataggcgggccggcagtaattgcgtcaacaggcacgcaggagcagcaggccaaccgctaatcaagctttggccccacctgcaggctcgcatcctcccctgaggcgagcccgggggccactgtcggtaccctgaatcaggggtactctcttctacagtatgaaggtgtcgtacatctacaacgtctccaggtcacacggagaatggctcccgaccccaccgcatgggcaggtctaaaggcaccacgtggcaaggaaaggtaatacatcccaggatgtatcattgggtccgaacctccacagtaggacaccggacccctgtgcgtacaagcccggagctccc

SEQ ID NO: 180729 - DNA, 347 bp, Zea Mays
ggaggaatcactgtagcagatgaactcgaggcctttctcttgggcgccatctcaactctactggcgaacagagcgagagccgaattgcagagaggatctggaggcaggaaagcaaaaactagggcacggaaagcagaggcggctgaaagcgcagtatatgcgggatattctcgagtcagataccgtctccaaaagcgcctagtcagcacccggcggttacttctaaaacaccggcgtgccacgtcgtcacccggcggctacttctaaaaccccggtgtgccacatcgtcactcggctattatcctcaaagtggccgacacggcccattttaactcgactgttatttc

SEQ ID NO: 180730 - DNA, 593 bp, Zea Mays
gtgagccggtaggatcctggccaggtagcctcttcaacgatgaatggtccttcccatggtggtgataatttgtgtcatccttctcccgccaacactcggcggaggaccaaatctcccactgcgaaggatcgatgccgcactgctttgtcgtgatagcgccttagggtctgctggtatctgaccgactgaatgaccacattcagctgttcttcctctagtatgtcgatgtcctccagcctagttgcttctgcttcggctatgctttcgaatgttaatcttgacgctccaaagaccagatctaccaataacactgcctccgacctatacaccatgaagaatgaggtgtttccgtgtaaagctcgactcgactgggttcgtaggctctagaccacatatggtagttccctgatccattttcctgtgagcttctcgctcttgtcaaacacctttttcctgagtgcatcgagtatcatcccattggctctttccacctgcccattagctcttggttgtgccactgatgcatacttgatctggatgctcctctactcgcagaagtcaaagaactccgagctagtgaagttagatcccag

SEQ ID NO: 180731 - DNA, 308 bp, Zea Mays
atttcctatgaccaagtttgtagtgaactggacttagcgtccttaccattagaatcttgccttctcttcaacctcaagtgacactatcagactggcatactagtcctcttgtgtcttgagaagttttgatattcgtcgctgagggaggctactttgctattacgcaactggcgacaaggatctagtatgacacattctaggatctcaatggcttgacaatccactatatctcatcggctttccacaacaaagcgattgtccaccatcctattgtcatgcaaattttccatgacatgcagttgactact

SEQ ID NO: 180732 - DNA, 797 bp, Zea Mays
gcaccatgtgccccaagggatcgttcagctcaaggaagatgaattccgggaactaactcaagatggaagatcggtcagtgaatacgtgcacaaattcatagaattggcccgctacgcgccggatgacgtcagcaccgaagtcaagaagatggcccacattttgaaggggctcagaccagaactcaagaccatcctagctagccaagatttcctcagcttctcgcacctctcaaacaaagccatacaagtggaaagggcaagggaagaagaaaaaggtcacctcaagaggaaattccaagtcctccgagctcagcagcaagaccggcaccagagaactcgatcctttgggtttccacccaagggactaggcttcattagaccagttagacccaccccgtcacatttcagtcagcagagtcagagctcctttcatgccctctcagtttcaagcaaccaaccgccagcaaatgcctgttggcactgcggagaccctagtcacttcaaaaacaactacccccagttgaaggcattaggacctacttactccaactcggtgaatggccccaagaatacctcaacactcgcccccaaggcgccctcctccatcagccagcagaacaagacccagtatcaaggaagggcacgagtaaatcacgtcgatgctcaagaggctcagcaagctccgggagtagtgctcggtgagttccttgttgaatttactcccgctattgtactttttgatttaggagcatcccattcttttatagccactagttttgtggaaaagcatggcatcc

SEQ ID NO: 180733 - DNA, 410 bp, Zea Mays
ttcagttacagagagattgtaggcaagtaattgaaattcagcaggcaaaggctctacaagttcacaagtggttgaagggtaatgaagtgtgggcatttgtgttacttgagtaggtgtttgaggtagagttgacaacagataatgttccatggacataactaattatagaactccaataccttttttctcaacctacttcatttcctcccacaaggccttttgaccatcatataccattagtaccatgatctatacgagttaatgccataactcatcgatactcaccactacacaaaactgaaattgagaggcaattcttagaattattgcaggatggactcattgttcctagtgtgagtccttttgcatctctagttctcttggtgcaaaaaaaggatggatcatgaagg

SEQ ID NO: 180734 - DNA, 1954 bp, Zea Mays
gggggagtatccgaggaagacacaacgagtggagcggggggctagcttatgaggagcagtggaggcgagattagggtagcaagcgagtggagcgggggctagcttatgaggagcagtggaggcgagattagggtagcaagcgcacccgaaaacacgaagatggttataggaggggtgtatgccgaaaagagcgaagtaaagagtggggtgggcaactgccttggtggggagacggttgaggaggtaggtggcagtggcgagggcctcagcccagtagtgagcaggaagggaagcctgaaagaggagagagtgcacgacatcgttcgtcgtgcgaatcatacgttcagccctgccgttttgaggagacgtgtaggggcatgacatgcggaggtggatgccacgagagaggaagaagtcacgggacgcattgttatagaactcgtgcccgttgtcacactggaggctccggatggtgcgaccgaactgagtagagacccaggcgaagaagtgagacatggtgggaaaagtgtccaacttctgacgtaaaggaaaagtccacaaataatgcgagaagtcatcgagaatgagtaaataatacttatagccagaaatgctgattacaggggatgtccatacatcacagtgtatcagataaaaaatgcctgctgctctagaggaggaggtggggaatgggagcctaacatggcgacctaactgacaagcatgacagaggtgctcaaaagatcccctacaaccagaaacagaagtactactggagagcttggacatcacatcacgctcggggtggccgagacgacgatgccaagtcgcagaagaggcggccgctgcaaggacatgtggggcagaggttgaagtagtgggagcaggcaggcaaagcgtgtagagggggccagggctgtcacaccgagcgagaagggtcctggtcgcaagatccttcacagaaagaccaaacgggtcaaactccatggaacaagagttgtcagtagtgaactgacgaacggagagaagattttgaataatgtggggggcaacaaggacgttggttaagcggaaaggaccgggaaggaccgcgtcacctactgaggtgacgggaagggcggacccgttttcgacaatgatggaagagggaagagaggggtgggcgggggaggtggaagatagaatacctgcgtccggggtggtgtggtaggaggcgccagaatccaccacccagttagagactgaggtgggcggggccaacgtcatcgtggagaaggagctggcgagggactgcgcgtcccacccgttagtccagggcccccacatgggctgggccggagaccccgggagaggcaaaagaccttgctgaggctggggaggagccgagggtgctgccgggggtgcagcggcaaagaagacctgctgagaggcggtggggcgaggggccgaggcacccgcggacggcccgagccacatgtgaatggtgccagtccacgggttgtagaaggatggccactgagagccacccgatgagccaccacggcctcccgacgggccaccgccacttcgtccgcccttgcgaccgcggccgcgactgtggctgcgagcccccccgaagccagcagactgtcgtggagctccagagggcagcggggcctgagtgcggtgagcaggaccccccctagagtcggagggggcagctcgtggtgcgctgtagagggccgtggcgggagcggtggttgcagcggcggagaggtgaagctcctcgagaagcaggtcgttcttggcctccgcaaaggtgggaaacggcttcatgcgggtgaggatgggcgccacgcgatcgaagcgaggactcagaccacggaggaggttgagcacgaggctctcatcggtcatgggggccccgagggtgcggagagtgtccgccatcgtcttcatctgacggcagtactcg

SEQ ID NO: 180735 - DNA, 652 bp, Zea Mays
gcgctctgccgcggagccgcctataccgtgggcagaatattgcgcaacgtagaaatcggtaaggagcccctcatctagttcccctatgtcttatctacgtatagcataactcagattagaatttcgggcccgacatcggtgaatggtgcggtctagccatggcctccgtcgcgggggacgcgtgcgcgtcgccgtcttcgccccccgaggtgggtgataacctagatgccgtcggtttctggtgaacggtggagattaaaacgtgcgacggattgttatgggccgttgatctctacgtggacgggctggattggaaagggaataacgattcacgtgtgttgatcgtggctgtcgatctgtgattccatggtccctgtcccataccccttcgtgatctaatctgaactcttcgttttggatccagcgacgggatcacgaccgtgtgtaagccgcctcgccaatttgcaaatgagcccctgggattttggtaaatcaacccaccgtccgtactgagtatagaaacattacatataggtctgagttcttctgatttagtccctggattccttaaaagctcaaaccatggtccttaagctttaataattcatataaataaatctagaaaacggtttttagtagaagaataaatcca

SEQ ID NO: 180736 - DNA, 793 bp, Zea Mays
cccgcagtgttgggtttacacagaaggccctgacgatttgaaaaaccagtgaagagtcccccgcactagttgtttgagtcactaacaaatgcagataggccctcctcctttttcttcgcaacccgcggtccccccaacgacgaacggcgccaggctgagctccggcgagcctgtactggccaagacacgcaatggtcggtgctctaacttggttgatagctaattcaacatctaacaatcgtttccccttgattaattgcacggttcgagctcccaaccactctgctcacggtgaccgcacaatccggggacaattcaaagtgttcccggtgatctaatgggttctagcttaatcggtcgggtcaagaagcatcaaggacacataagggtactgaaataagagagcagaggacatgaacagacctgtagcacgctggccacggcgaggtgctcacgcggcggtatttagaccgatttgggggaaatgggcaattgggcggctttggtggacaattggaggcaagtgctggtgcattggatgcgtaattacctagtggagttccgtaaggcttcaatttatagcactcaacggcagtggcgctcaatttagaggagaagcgctggcgaccggggagaggggcgagtcaatgcggcgatcaaccgtggcgatcgcagggcaaggagctatggcggtcactgggcagtcactatggctcacgatgacgcgataaatctcctaaggcgtggcgcccccacggtgaatggcgaacacgccggtgatggccgctcggcc

SEQ ID NO: 180737 - DNA, 491 bp, Zea Mays
tgaaacccttagccagcagatcatccaattgccgcttcaattcaacctgctcctttggggccatttgatacggggccttatgaataggctgtgtacccggaattagcttaatctcaaaagctgcatcgcgctccggaggaatgcctggaagctctaccagaaacacgtcagcaaagtcacacaccacccagatgtcctgcacccgcaaggcagcctcaccctccaccaccatggagaaaaagatcctcgacttccttgaccggcgatccggaagcaattgcgccaacaaggataacgtgaactttggggaacttcccaagaataccacctatttagccgacggtacctgcaataacactgtcttccaaaaacaggatataactgtgcgatactgggataaccaatccatacccaagataacatcgaatgtccccaaggaaatcagaaccagattggccgaaaagacctcatcagcaagaatgacagaacac

SEQ ID NO: 180738 - DNA, 575 bp, Zea Mays
gccatcctccttctcttgggagttgtggcaggagcctttgtcatcttcggcaattctgcctctgccggtgggctcaaaatttttggcatcatcactgttttttccaattttggctctctggccgtatcatctttggcttcggctgcccgactgtaggcaccttcggcactacaatcgatccttcagcgctctgaatggcgggagcaacttgttttgctttggcagtggaagaggtcccttcaccaaattcaggcactacgaccgtttcaatatatcgaggctggtgggttaaaacctttattttcttgcccttcggcacgatagtggtggccaaagcggtagttttcctcttttttccttgccttctcaaggggtagcagtaatcaggatatatgaagccaattgcatcaaaaaccctgttcaatcttttcttgccccgacccccaaaggctgaggacaaggcatcatcttcggccctagtatatgtcccaagcaactcgtcgctagtagcctcaatgcatttcaaccagtcatcatttggttcatcaaacttctctctgtatctgaaggtgtat

SEQ ID NO: 180739 - DNA, 725 bp, Zea Mays
taacaacctacacgttcccgatgattcatgggatcttagcttaattgggcgagttggtgagcatcaccagcacacagagatgctaaaacaagaacaaggatggtatgattaaacctgtggaggactggccatggtgagctcgacccagcggtgtttaagaacagaattgggggaaacttgaaattggagctcacggttgaatgattgggagcgatactagaaggtgtggtgcatgatgaggttgcggagctaacggtgggctcaatttatagattccagggggcggtggcgcttgaattaaggatggcgcggtggcggccggagaggaaaagggctctggcgcatgacacagtggcctttcaccgtggcaggtgctccggtgatcaccggacatgcaccgcatgattcaccatgacgagagccagcgctaaggcacgtggtgcgcgacggtgacagcacgacgacggtgagggttatccgagcgaccgacggctggggggggagtacggcatgcttagccgcaaccgagctcgagtggatcagacgccgagatctttactgagttgtgcttatccatggccacgacgcacgaatcacggcaagcaatcgatcaacggcgacgggccaccggcgacaagatctttttttggcgctggcggtcagatcttcaacagagcactgtaccatggctaaaacttgattcagtcgcctgacagcccaacttg

SEQ ID NO: 180740 - DNA, 540 bp, Zea Mays
ggcgtcgggtgtgtgggaccgtgaattacatcgggaggtagattggagggcgttaggtggatggaggccgcgacatgtggaacgtggcgcggttagagtaagaggcgggaggaggtggaggatgccggatgcggacagttctgccaaagtggccttaggcgagtcgtgactgcgcctgctacccgggcttggcctcggatgagtcgtgactgcgtctgctacccgggcttggccttggatgagttgtgactgcctgtcccgcttgggcttggcctcagacgagtcgttattatgtctcccgctcgagggtgtcctcgggcgagtcgtggttgtgtctcccgtcgggcttggccttgggtgattcttgacagcctctctcgctcgagagtggtctcgagcgaatcatgactatgtatcccaccgtaccggaggatggcctcgggcaagtcgtgactgcatgtcttgccggaggttggcctcgggccagccatgactgtctatcctgtccgcgaatggccccgggcaagtcattactgcatg

SEQ ID NO: 180741 - DNA, 333 bp, Zea Mays
ctctagttgatctagttgtggcgtggttgctatgggaaagctagtgagctatgaggcgacgatgggatgtgacgagctgagagatatgagccgagatgagatcgtaggggcacctcctcgaccttatatagacgatcagagggttatcccttataagtcgtgatgactataactctacttgaatcctcattttaatgcggcatgcattcttacttatctagatttcagttgcccttcatctgagtcatctccgagtatctagcacttctggtatgctcaaccttcttgcccgaggcatcaacgcatgactcggtcgtccggtcttcacctccc

SEQ ID NO: 180742 - DNA, 301 bp, Zea Mays
ggtggtcagtggtgtcagggaggtcatggcggtcacatcggtgtgcgggtcagcgtcagaggtggtcggagctgtcctggccacgagcgcaggcggcggaggtcgtcggcggctcctgctccggccaaaccatggcggtagggttcaactaaagtgcacgaggagctccacggggtgatgtagaggccatgcgcgcaaggaattgagaaatggtgcagagggttacccggtccacgtcctccggcgggttcacgaactccggcgagcgcgattacactgttctgatggggctggtccttgg

SEQ ID NO: 180743 - DNA, 740 bp, Zea Mays
atcaataatgcggacggtacacccattaggatcagctgtggccagattacacccattgggttcagcatcatcaaggtcacacccattgggatcagcatcagtcgggtcacacccattgggatcagcttcagcaaaaaactggcaccggcacttcctcagcagcaggagcagaaggaccggcatcctgatccaagcatgacactcggtgaagacatctctttttctttttcttcccctcagcaggagaagtgggttgagtggctcggtgaggacgcttcgggcgaacactatcagatctctgaatatccaaagctttgctagcctctgagatgggtactacagccagtgttttagcaggggctgcatcagaggaatcttcagccaacatatccagcatggcgcttatctctgcatcacttggattcaaaggtacctcgaagtgaacctgcctctcgtcgtcagggatttcactaagtgaggcaaccaaagcactaacctcttcgggagaaggtcgcactctaaggcccaaaccgctatcaccagcaggaggatttgacacaaaactggtaaaagccttggaaggaggcagattccaggctaagtatgcgacaggggcaccgatgttcgacaccttgcctctgagtatcatctcgagtcggctgaccaaatccacagtaggaattcttctattggtaacccgggtcaaatcagcgaggccttgatacagataagccgggtat

SEQ ID NO: 180744 - DNA, 397 bp, Zea Mays
ttctttctcgttcttgcttgtgtctttgattcgcaggcaaggattagccctcgtggcgaggttaatcaagtagcgcacggttgataaccagaggagaagtggtgttgcgattgcgaggttctagtcttgttgattggaagccggatcgtctgtatgacatctccaccaaatcgatagttaccttcacctgacggaagatcgagcacccccattcctatcaagtggtattcaaagactcaggtattaccgtcaggcttaccctagtttagtttatgtttttcatcctataactctagaaaattgccatacaaaaaaatcccgctgtcctagaatccttgtttagcctttgcaatttcgttttcagtttggctttgttcagttcgtgtccgtggtcgag

SEQ ID NO: 180745 - DNA, 1233 bp, Zea Mays
gcagaggtcctcggggttttggctaatggaagttgggttcggttactatgcttatgagtcactgacagtttgcactaaggcccttaaacttctattccatcgcagaccaaggtccacgacgaggaacagccctcgccgcaccccggcgagccaattccggtcggccaacgccttggctggagctccaaagcgacagggaccaaattagatgcctaccgtacccttcccctcaaccaatttcacgaacgacgatctaccctgctctgtccacggtgacagcgggcaccacgggtaatcaatctcgttcccggcgattggtggcggtttagctcaattgggtggatggatgagcatcagggaagcctacttatgctgaaacaaggtaacagagggcatgaatgaacctggaagtggctggccacggcgagcttggttttgcggcgttcttcgaccgatttgggggtaatcccaaattagggagctgtggggaacgatcggagctgagagttggtttactggatgcataattacctagcggaacatgctgaggcttcaatttatagaactagtgggtggtggccgtgaatttgaaggaagacgcgcgacggccggaggggaaaaggggtttggagcatgacatagtggcctttcaccgtggcaggtgctccggtgatcaccggacatgcaccacatgattcaccgtgacgagagccagcgctaaggcacgtggtgcgcaacggcgatagcacgacggcggtgagggttattcgagtgaccgacgagctggggggaagtacggcatgcttaaccgcaaccgagctcgagtggatcagatgccgagacctttactgggttgtgcttatccatggccacagcgcacgaatcacggcaagcaatcgatcaacggcgatgggccaccggcgatgagatctttttggcgctggcggtctgatcctcccgatagcactgtaccatggaggagttcagttaaatgaacctgacagccaaatttgaagccaagttttctctcgatttctgatgataactcataccaagctctgcagcaaacttgtagagcaatatgccatctacaatattgccatatgatgttgccccaaaaagccactgcatctggtttgaaattgggcttgaagttcagggcatccacctgtcagtctgattttcagacctagtcagcctgacagcctgactttaggcttaattatctctgga

SEQ ID NO: 180746 - DNA, 398 bp, Zea Mays
cttggtgcatgggttagctcgttttccctgcggtcgtgggacatctcgggtataaagctatccgaagccgcaccccgtgacctagtgacgcgtagagcgtaaccaccgccgcgagagatcgggagtcgtggtgtttggggctgttgtcgtcgccttgccctggttagtgcctttggtcggccggtgggtcattgcggaagctctagggaagtaattggagaattggtttggtgcggccgcggcaatttctcgctgtagcactgccatccgccactcatcagtgatcggtactctgcgctacgaattgttctggtatgactgcccgatcctactcgttgtcatccctgcatcgcgtagaagcgaacgaattgctagctagggcattcgttcaccggttt

SEQ ID NO: 180747 - DNA, 763 bp, Zea Mays
tgctccccttccttctttcactctttacccgttcatttcttactgtcgccgtcgccttcacttttcctctctctcacactcacaccactctccaaatccctttcgagccatcaaatccttgggagtttgttagagatttgttcctctcggcctcctccatcaactccctaattttcattgggatttctgtggttgaatcatcagatcgaggtattgccttatttcctcatgtttttactcgatctcacatcgttcttgattatcttgtgtattgtttcaaggatactatgtagtttaggtgcttgcaacacttagattgtcttcttttgtcttgaacattgtttgagtttagtagtttggtattgttcgttgtagttgaaccgctcgcatgaacggttgaagtgcatgctcaatatcatacgcgtctttactcaaacgtgtttgttaaaatccttgaacatcgatctcctcgctcaccataggttctccttttttatcttaaggatggtgcatcggaggaacccgtcagtagttgaatctgactccgatgatgatcaagaaattcatgaagaaactcctccgcgttccagatccaagcgcgggagaggatccggaaatgtgatgcaaggtggtgaggccttagggtctcatggtgcttgcggtcgaacggcctggaatccctcgggtcggtctcgacccgcggccaatccacaggcatgggagccaactagcgatgatgacggaggcaaggatgatgaagttg

SEQ ID NO: 180748 - DNA, 570 bp, Zea Mays
aaaaaaaaattcatgcttatgttggcatttcctagcccttgagtgttttatccttgaagttacacctgcacagcttatagacccccacagcttgaccgctagaccaacccaagtctccttctgcacatgttatattaaaaaaatgttgtttggtgtctagttgcgcaacccctatcaaggccatgtttctttccatgaatccttgccccctaaaacttcatagcatttatgtcgatcatcctagctgatcctgtttgccttcctctcctttcgcctggatctgataatcctttttcttgtgaatcatgtttgctttatcatccgaatctctgatccttcattgattctgccccgttatctggttatctcctataacctgttctcaagtatcggatgttgatcttgcctaaatctctcatttctgtttattctcatacccccttctccgaggatcatgacgatgttttatctaattagtttatccctttggttcgatgaattatgctgttgtctttagttctctcatgtctctaaaagcttatcaatctcgatctcatggttggttcctcc

SEQ ID NO: 180749 - DNA, 508 bp, Zea Mays
tgctagagtgtgtcgcgagggagacgaggccgaagtaactgagacggcaccaatatcagaggtgatgaggcagtcgggtcttgttgtgccagaaaagtgttgccgaaggtactttgtctgctgaagctaagcaaatcacagttggagagggaagtggtaacgaagatgaagaggattacaccatcctgagcctagaaaaacctagtcaccttgactttggtagatccactgtggcgacaaatgatatggttataatgaagaaattgggttactttagtgaatccgaaagtaagcttgtccgttttgctggcgaggaagtggttccagagccgaaggatgatgaagttgttgtgtttaaaagcttcttcaaggcggggcttcggttccctctttatgatataataggagaggtcttgaagaattttgaaatataccttcatcaattgacacccaatgcaattgttagacttagtgtctacatctgggccctccgaagccaggggatgag

SEQ ID NO: 180750 - DNA, 411 bp, Zea Mays
agacgcttcataatttgtattccaccaccaccaccctgagagatagttgtagggttcatattgtttgttgcctttttgtctctgttttatgctaacaatgacaggaccaaagaatcaaatggacaaggacaaggggcctaagcttaacgacgatgagtgtgtctctcagctggaattgaaggagatgatgcgcgcgatgactgaagcttttaaaaaataccaagactctgcggcggcatcctatgagcagcttgatcgacgagttgatgaacttgttacacgcatggacgtattggaggctcgtcccccaccaccaactccagccccatctcactctcctgtggacgatgacgacgatgatgacgatgtttatgcaccgctgccacaacgcctcgcacgtaatcgacaagg

SEQ ID NO: 180751 - DNA, 1407 bp, Zea Mays
agcagcaccagcaccagcaccagcaccttcttcatctagctagagctccttgaaggactcgtccaactcattgtccaccacagcatgttgtgcccgttgttggtctagctcccaatctttgatgcacaccaacatctccactgtctctgcattcaagcgctgtcgccgatcctcaagaattctgccatacaaactaaaagtagactccgaagaagtagttgaggcaggaacagacataatgtctctagccataattgaaagaattggataggttagttttatgctcatgccaccaatttaagatatcaaaatcatcctcataggcagccacattgtcactgtcaaggtaaacagttagctcataaagacctacaccaggtccactactacctgaagaacctgatgcagttgaggatctagaagcacctgttcctccaaaaattttgccccatgcctattttctcttacctgtcatacctgattgatgtgtggttctagatagcctagcagcaccaaacttagtttcatacttggcatatagcttatacaactcagtcttaacatcagcaaaataagtactgtaattataattgttcattagagccaacagcatcactaaccgacccgacaggtgccccctcagggtcgatggcagtatgactgctaccgacaccaaaaagggcagcagcagcatctcccatgtcgtcgacgtcatcgggaagctgccctaactcaacgagctcgtcgttgatggttctagggtacccgccgttgtcgtcatcgtcatccatgtcccccttctcggcaccgtacctcaacggccctggcgacactagcacgaccacgacgtagtcggccagcgacctaccaaagcccacaagcaagcagcgaagaggagattagggttagggttagggattgctgactggggagggagagccagagagggacatacctgccaagccggagcccagagccagagacgagggtcaagtgcatgacgatgcgtgacgagccgaccaccgacaatgacgtgattagggttagggatttctggattggggagggaccgagggagagccgaagaggggcaagccgcacggaaggagagtaggagacccgctgatgttgccggtgtctggcggttgcgacgacgaggcggtgacgacgcgggggcggatcgtggatgagcgaatcgagtggtgagaggtcgagaggagcagagcaggagaagccgtgtgggagtgggacactggaagtctaggacgagatgggaggaggctgagccttatgccccgcaccccgacaccggtccagccccgtgcctgccgttttctggcgggccaggccgggacgcctggcggcgctgccggcagcccatgcatgacctggtttattgggccagcc

SEQ ID NO: 180752 - DNA, 682 bp, Zea Mays
ctcattttcggcccattccccctctaaccccgcgcggcccaactcccaattctccacgcgcgcgccacgtcacgtgccatgaccgacggcctggccccacctgacagcctccccgtccgttctccctgttgcgcatattgcctcggtggtcaccagccgatgggccctcgcggtcagatccttccccaactcgtcgcagatcccgctcggtctcgaacagaagcagcagtcacccacctccgttcatagcgcaggttccagcggagtcgtttacgaaaaatccaggcaggattcatctgtatcctccccttccatggttcatcccaacgtagcatcgggctcctccttcactgtagcaaatgcaacaaaattccacgtgattcacgggcaccgcgccgccaggtcgggttctcaaggtataagtatgggcaccagcgatctcccctcatccatccgctgccatgccatgatggttatgctcggggcagaccaccgccgctagggaaggggaggcgagaagtagagaaatcaccgccgcgccatgtgatggacatattgaggtgtgtggaggtccgccgccagcgggtttcgtgcgtgtgctgccgttgggtctacgccgtggaccttggtgttcgccttagcattgggaccatgtccaaggtggcggactagcacattatga

SEQ ID NO: 180753 - DNA, 752 bp, Zea Mays
atctatctaattgggtaaccagcttaagtgtagttaacgttaagcaacacttggatatttttgtagtcacatctacatagcgcattcgttcgacaacatgcgtgcctggaattgttacgtatacgtagaaacatggactgttggtacatgtataaataaacaatgaatatatataagcgtcgacgtgccaaattgacaaatgacaagcgtatccgtacgtactgcaataaacaaacacaacgtgcagtgcacagtttgatctattgacaggctatggctctaacggtacgctagctacttacgtactgaaaagacgcgattgaacaggtaacacgggcccccatttttttttgtaatttagcttttccttaaaaaaacactgtcacctactgatgaaactacacccagttttaaattcttatagttggtttacacatagcctatgacaacaacgttacatatatcaacgccatgatcaatgacatcgaagtatcgcgcaaaatactgtcgatcatagttatgacttgatatcaactcagtctcaatgacttatggtgccaaggtcgacactatgggtcttacatctaggggtggacattttaaaaccgaaaaccgaatccgaatccgaaccgaacccgaatagaccgaattgtcggtctattcgagttttcgggttcgggttcggttcctatatgtgctatattttggggtatgggttcgggttcggttcctaacctttaaaacccgaatag

SEQ ID NO: 180754 - DNA, 604 bp, Zea Mays
tttctagatcatgaatgcccttggaaaaccactttcactctccactaaagtttcaccttggttcacctcagttttctcaaaacttgttcttcagtttcaaaaaccggttcaactggacctaaaaccggttcaaccggcttctgcactgttccttctgtcaccttctgacctgccagtctgccaatcagttctatcagaaaaagttgtgtgtagagttttttgaaaaccggttgaaccagatttgagtcccggctcaaccgaatttgaggccggtcgagtctccggctaagtacctcagtgaaccgagaactccctggtggaaaccggttcaatcggtttaagaaccggttcaaccggtttttggtccacttctcccaacggctgccagcttttgggggatcctttaaataccccccacactctctctcttcattcacttctgcctcttccacgatttcttggctgaccaacctccaaacaagggcattcatttcacctctcacacccgaaatcgcatctccttcaatcgtttgaaggatccttggtgtgaggtgaagtcgatctaacacgctgttgatttcatcttgattctctcattctcttc

SEQ ID NO: 180755 - DNA, 654 bp, Zea Mays
ctcctccaagtcgtaagctatgggttgccaagccatgtggaaatagagagagatcggaggctgagatcggtctagcctgcgtggtaatttggtccgcgtgtggtggtcagagatcatcgccggagtgtatcgtgcatagtggtggcagttcctggcataggaggaggttgggacggggaattgctcgccgaaagccgtcatcgccgtggagccagcgggcggcgcgacaagcgtaatctgagcatcgtttgtaggtatgtcgttgttcatcttgtttgccatgtcctcctctctcttcctcgagtagtcgtgtgtaccttggtactctggggcgcgagatggtattgctccggcggacctccgtcgtggctctaggggtggcggtgcctctgctcggctcctggtgggagagaacgcatgtggccattgatccgtgcatgtgcggccgtgattagatcgtagggttgtcggtttgggtaggtatatgtgccgtcggttgtgaaatggtcggcacagatcaaatatctcttcatagaatcctggatggcgattattgatccgatggttgttatgggttacccgttcggtagcctggggatctaattgaaagtcgcctagaggggggtgaataggaaaatctgaaatttatgaagt

SEQ ID NO: 180756 - DNA, 1620 bp, Zea Mays
agaatcttgaaagatttttcttctcatcgcaatcaaaccgaagcccgaacacttcggatctaagcttcattatttctttttggatggcttcgccctcaacatttctcttgttcctcaaggccttgctcaggaacagaccctgtaagatataaaaagagaaaattaataaagcattccatcaaaccaacccaaagctaaaaagcaaaaatcaatagaagttaccttaagatgtgtgtaagccaagcaatcagaaaagtcttgggaagacgtggtcgagagcatggcctccaacttcgggaaaccaatattatttgccatgtagcggcatactttagtttccatattatctgggcaacagtacaagtaatcatctagcccgcccccaaagatagtagacttcgaagtgtatccaagttgttcagcaaaaccgataccttcggctagctgctttgccgccatgactttccctgcagcacgatggaccctataccttcgaccacccaagtcttggtcaaaaggtccttcgccaagtggtgtgtcatcttcgattgccttcttggcctcttcaaatttagtaggccccttccccttgtcctcgccagagcaggattggaggaacccttgtcttcggctgccatgattgccgaaggtgtcacccgttgcaataatctgttcaaaccctggactacttgaactagtcacatctacagtaggtggtgcagtgcccttcggtgctagtgttgtaccaacaatatctttttccttagtttcatcttcgtcaacatcgaagaatgagctcatcaccggagctattcgctcctgttcttcgctctatgggagcaactccaaaggtgcaactctttgcgctatcaaggtaatagcttctccaatctttgctttttcggctcccataggaaggagttcctcaatctcaacaagcaccttagcttcgggtgcagcctaaaaatatttaaaacgagaaattaatatagcaaattcatgaccaacataccaaaaatcaaaaaagcatgtttaccagaatttcctctcaggattgaggagtagattcatcttgcacctgaactttgctccacctagtagtcaccttcttcctcctcttcttcgagtcctgaaccatgttgggatagctaggatagaagaagccaatagcatcgaagacacgattcaatcgatgcctttttcgagctgcaaaagcccgttgtaaagcttcggcttcaggcttgctataattaccaagtatttcgttgcattttacttcaatataatctaaccacccatcactaggttctccacattcatcttcatatttatacttgtaacgaagcctgaccagcccaggctcggcgtctaaagcatctttttcagacatcttcgacatttcccactcagccgctagcggccatgtattaaaagctaaaattcttgaacgagatccctcgttacaatatttgtgcaaacaacattgaaagcaactatgatagcctaggcttcgaagttgatgtagcacgttggctttttataaaccaatcttgtagaaatagaagtctgaataatgcctttatatcagactgcacattcaagtcattcttcatataaaac

SEQ ID NO: 180757 - DNA, 568 bp, Zea Mays
tctaagtcgctaacacaagtactccacctaccatccctaatctagtgccccctctctactcccaggtgcacgatccccgctatcgatcctgtcgttcctcgcatgagcaccgacactaaccccatcacccgacaatagatgtgatggatattcaaggcagcaatttctcccctctttcctcccctaacactgtgcaattcaaggacgtggactcaccagtcattcaaccgaagcaccgtccgcgctgcacatgctgaagcccctgtcctcaattaaatggtgcatgggtataaatggagaccactgacaccctctgctccctcaactcaaaccccagccacccaagcaccctctcctcgccaccagtgctgccattgtcgcttagaagcctcagtgcccgtgttcaggtcacactagagtctccctaaccttcccaccgatgtcaccagacctgccagagctagaggagtctacaacacaacttcttcagagctctaccaacctcgatgatgagcaccatgatgacctgacccccgcagtgccccaccgccatcgacccaaaccccta

SEQ ID NO: 180758 - DNA, 830 bp, Zea Mays
caccgttctgccgcgtgtgtgcttcctcgttgccggttcgtcacggttcgccatgtctggcggaggagcttttcccagtatcggcgggggtgtgcgcaccagattagtgaagggtgggtgtagtccacgcgggggaattcctcacaggaagtccgcacctccgcgggagataagtggcgtcatggtcagcacggtgtttaccaccaccctcggtgagttctctttcccatgtttcgcttgaatctctaccacctctagggtagcacggatttggcttaggtgcgttagttcgcgagaccatgccgatggcaatggtgccgtcacggcatgccaggggccgggttctgcgctcgatttcggctagaaattgatggagtaaagagttcagtgagtcgttaactttgtgcggaccgaacgaattggggtatggcgctcgggagggccggattcgctatttccgacgaacccgctgccgtgaggtgacctgcgcgccgtgaatcaacgacggaggatggcgacggtcttctgatcgtagattgaagaggggatgacgcagattaggtattaggatagcgtttcgcccgagtagtggggtctgttcgattccgatctcgcgtccatgggtcgatcacgatcgcttaatggtctaggccattgatctggcatcctacgcctgcgggtgagtgcgggaggtattgatggaccaatctaatctgggccggtcatcgttgatctagcggccaagatcaaatcgtaccccttcgccgagagattttcacttaagcccctggactatttagatttaaacctgccatgcacgcttggatctg

SEQ ID NO: 180759 - DNA, 1502 bp, Zea Mays
cacaggctgtaggttgtccaccaacaagacatgacatcattagcgatccaaagaaaacaaacctgaaatcagacatccaggagggatcattgttgccataaggttgattttggtcgaggtcgaatatgagtttgtgggcgtgaagcagctccaacagacattgaacctccacaatcttggcgaatcacatctatagtgacgtttcatgaagtcttacacctctttacctgtgcctacatcgatccatccccaggaatgccgctggaacatatggcgcgcgggtcaggatgcggagcgcgacaagccatcgattagggagtgcgaaaagccgtcgggtcaagacgtcggtgggtcggggagagggaggtggtcgggctagtgctgggtgggtgcagagggaggtgtttcggcgagaagctattttttacagtcaatcctatacctagaaaaaaactgcgagaggcttcgtccaaaaaaaaacctatgaggaggcagatgcaatgtttcagcggcgccggcgcatggggcggagggtctgtctgaacggcgaccggtgtcctccttcctgtccagacgcgaatcggatcatggcgcccccctgccagtctgccacctcaggcacactcagctgtcggtgtggtggcatgcctcggtatgctgacttcggctcttctcaacccttctgcctcgaggcctgcatctcctcgactcgtcgccgatctcctgtgatcctgtctcgacctcggccctccactgaatattcaagacatggaggattacccagccataggtgaacaaagttgcaaactctagcttgctgtgctctacaaataataaagaatgtgctaggagattttgtgatgaataaacagtgtcgtgcacttatgtacaagtttttctaggaaatttacaataacttgtatagatctatatatctgcttttcatgttctccaaagggaacctttccttatctgcataaatgtagacacgtcatttattgagttttgccatactgttgatttagttggtaagctgataatgatctatttcaaattcaagcgcagtatagcatattttggaagaagcaggactcgtgaagattaatttcaaaacatctcttcaaaaggaaaagcactgcaaagtagcatagggtcatgtgatgcaacgattctgctacactgaactgcagagcaattttgtttggagaactgtatgttgccacttgtgtagtatagtggcactatattgtggtccaagctcaacaggtcttacaatatttgttaaacatttgtataactcagattcagttgtctgatcaagagtttttgtctgtttaggtttcacttatctgggggagtttgatgatggcaagataagctgcagaaagcttctagatgggcataatcgatatcgctagtgcaggaagccacaaccagataccatggcttttgcaagatttatcatctgccgacatggtcttcttctttttaccattttccat

SEQ ID NO: 180760 - DNA, 470 bp, Zea Mays
ggcaggctatacgtggtgcgttagggctaataatagctagatttggtttgtattatgttccgtatggtgttgggtgctcacttattactcatgtttcttctaatggtacggtggtggcgtagcgagcgactatagatagcctatcttatactttgcacagaagcgagagggctgttcgctgtggccggattaaaatttaaaatcgttcagactactgcagctcaatctatagagataaggtggaataaaaccgtagcgaacagccttatgaacattcatcggttttaagaattacacaatgcaatctgcactccatgtctccatcctagtcgggaagaaaattaaatacaaacaagagggcattataagagcgtgacgtccactcccacgggaacgcactgcaacggaagcttccaaaaccttcgctgcagaacgcacaccgtcttgtccccctgactgttggaccacgc

SEQ ID NO: 180761 - DNA, 863 bp, Zea Mays
caaccacagagactttgggcatgaattcaggcatgaacaagcaagaatttgcttaggattgttatgacaatattgtagctggtgtgtagctctacaactttgctgcagagatttgggcaagttgctatagaaatctgagagaaatttagccctaaactatgactgtcaggcgactgaagaacaaatgccatggtacagtgctctgagtggatcagaacgccagctcagctcgccatcgatgatcgtcgtcccggttcgtgcatggtataggatggataacgcgagggagggataactcgtacgtggcgccatctcccgagctcaaccggagttattcaccggcggccaccgaaccagtcgtttctgccgcggtgtcctctgcaccgtgatcctacctcattgtaccactcctctacgtgctaggcatgcactaaagaagttatctgtggctgcgaagtgatcactggaccactgcggctataaatagcttgtgatccatggtgaggtatgaacatcacacacacagtgggttgaatcgaagccaaattcgcgctgcctctgccccctcctctcaaattgattgttcacggtaaaactagagtcccttgcagctgtatagccccaagcaccaccctcaatttcacccgagcacgccacgacgccgttttctcccaaatcggtcagccgcgccgccgagaacagcgcgtccgaggccagcccgctctggtaagattctgtccaatccaagcgttgttttagtagctctgcgtgcttgtgaagcttgtcgtggcaaccgttagctcaattcggccatggttatgtgggaacgcgagctcgtggtcacggtgtccgccatgcacgtg

SEQ ID NO: 180762 - DNA, 558 bp, Zea Mays
agcatggtagtagttggacaagagtctaccttatgctgagttctcatataataatagttatcaggctagtctgaagacgtcaccttttgaagctttatatgggaggaagtgcaggactcctctatattgggatcagactggggagagacagttctttgggcctgaactgattcaagaagcagaagaacaagtctgtataattcgagagaatttgagggtagctcaaaccagacaaaagagctatgctgataatagaaggagaccactggaatttgaagaaggagattatgtgtatctcaaggtgtcaccgcttcgtggattgagaagatttaaagttaagggcaaattgtcccctcgctatattggatcattctaagttttaggcaagttggagagatggcctatcaactcgagctaactgataatctatctgaggtgcataatattaatgtattccatgcgtctcaacttaagaagtgtctccgtgttcctgaggaacagttaccaatggaagagctcagtgtttagggtgatttgacttacacggagtatcctgtc

SEQ ID NO: 180763 - DNA, 885 bp, Zea Mays
ggtggcagcaacttttgggtccgctacaaaggaggaatgacccttagcctcacgatcaaacccaaacgtaagctgccaaaaaacagcgagaggagcaaactgagagcgctgaccccggcgaccttgaccgccgctaggtgttggaaggacaccgacagtgtagacgtcccgctgtctccacatagggtagacaccaactttctcttcttggaaatgactttcctcgcgcacggcgtgagggtggagaagcgaggagcactacgatgagtcgatgacacaaaaagtggtatcaggtgtcatgatgagagaaaggtgggggagcagaagcttgcagagttcaccgctaggcacacacgtagtgtcaaaccttcgtttcctaattggtgcctcgcccgagttgcttcctggctgaggctggccgcagcggatagcgctgagcagccccctccccttcgtagtggctacaactcccttccctgaccctgcagcgttgccccctacacgccactctaaagctatccgcagcggtctcgcctaaatttctccccctatatcacttttttgcgtcacatcgttaacatttcatcctctacatttcttcctcccgcaacggtttcccctaaattcttcccctatactccacttcaacataaaatattattttctatacatatccatcatcatttatctatttttctctcaactaacaatactagcgagcatgaaaatcaatggaagagggctggcacagtgatccccttgatgtggcgtgcgcgcttgtgcagcaagggggtagaggagagagtagcgttaagcgctgcggccttaggggtacactaaacatctacagggataggggagaggacggcgctgcagccagtctaa

SEQ ID NO: 180764 - DNA, 291 bp, Zea Mays
cccccagtacctccaacattagctgaggccatcgctgccttagttaatgccacagctgacaacacccgcttcctgcgagaaatggcgaggcaacagatgcagcaacaaggcgggcgagcgtatccgcaaggaccccgtgaaacatcatatctggatttctgagagacacgtcccccattgtttgtcaaggcagaagatcctctggaagcggatgagtggatccacgttattgaacagaagttcgggcttctccgatgttaggagactcaaaagcccttgtttgcggcacaa

SEQ ID NO: 180765 - DNA, 1099 bp, Zea Mays
cacgatgtcaatccccaaccaaacactagacacagtcacacacttatacatggcacccgctacagaaattactcagaccgccaagcgaagtagatagtctaagatgaatcggggaagaataacagacacatgatttcgggtgaagaaacctgcacctttagagtggccaatgaaccacatgctagtggcggcccagtcctcctcaatcccaagagacaacccccctccaccacgcaataactagacgtcaaatcagggacacccatcaatcaatcgcagatataccccaaggccaatccagggcaaaagcgacggcggtcggatctcccgcgggccattataccgagcgtcgatctatccagcttcctctctgccatcatggcctcgcgggatccaaaggagcgagcgagggagtgagctagggtttccggtggagggtagggagagaggcaaggcatcagtttccacgttgcgatcccagagaacgggcaagacggtggagggggagggaaactagagctagggttctatgagaaggagaggggaaccagagatagggttccgtgaaagagtgaggcggagccatggaggcagcgttgttgggatggagggacttgaaccgtggtttgattacaaagaaatatatgggtgtttttaagaatgttaggcacaacgacgatagaagccagtttccccacgttaaaatctaacagcaacaacattaattaatcgtgttcttgacgtcccttattaacgaaagcttctagtaccttgcatggcggtcatggcagcaggacgacgacgggttagcgtcagtcatgatgactactcgagttgattgctactgctagctagatagatagagtagtatatcaccgattcttgctctcttcctcccctgcggcgccgtggcaaatccaccacgacagggacggccactccatttgcacattcccccattccgatccactgcaggtacgtacggtcgccatccagcagctaatctagcgtcgtaaacaccacatgcacgccgccaccacccccattcacccatcatgcatctgacgatgctggatacagatagctatgcatactcgcg

SEQ ID NO: 180766 - DNA, 343 bp, Zea Mays
gcttgatagagtcgtcggcctcctcgcctctcgctcctaatctctactgaggatagcaccactcggctcctcgtctcctcgatggttgtgacgtctaagcttctgcgacggttgttttccccctccccactatctcaccgtttctgccctcgctatcaatggcggctgctcgtgctggttcccttcccagcaattactctttccttggcctataaatctccgtgctgctctcagaccatctgccgcccttgctcttcctcctcttccatttgatgtgtatgtttccatctgtttcttctccactgtgtcgagcgtttcctgcttctccattaatggagtttga

SEQ ID NO: 180767 - DNA, 577 bp, Zea Mays
gcgagttgcgctggagcattggtcgagccagtcgcgccacgccggccgcgggccgtttgtcgcaccgcgccatggccagacttcggttaaggagaaaagggaggaacagagggggatggaaaggaggcaggggtagctcaccacggaggacaaacgacggcatggacgggcggtcggggcgattccgaggcgcgggaatggcggttctagtgtgaacgagggcgaggtggggagagagagtgtgttgggcaacgtgggagggagaagggagcaggggacacggggataagaaggggaggcacgcgtgggccccaccaggtagcggcggtggcagcaaaaccgtctacgcgcctgcgctggcggccgaggcggccaggccacacgagagagggagctgggccgcacgaggcgctcatgggttgcggcggagggccatgccgaggagggagaaaggacgcgatgggccacggtcgagctgggctggccaagagggtgtgggagctgggccgtgggaggggcgagctgggctggctgagagggtgggtgtccagttaggctttctccctttatttctttg

SEQ ID NO: 180768 - DNA, 2708 bp, Zea Mays
accgggtatcacactctacctctaaaaagaattcgtcctcgaattctgacgcttctatcggaacgacaaaatggaaaaaattaattaatcaacaacacttactcacaacaaaaagttccggatatttctgccgcatcagctcctcaagttcccacgtagcctcgcgctcagactgattagtccataagaccttgacatacttaattgatctcttcctcaaaacacgctccgagaattccaagatacgcaccggacgacactccaaggtcagattctgctgcaccgcaattggttccatctcaatctgatggtccagatcccacaagaacttcctcagcatagagacatgaaatactgggtgtacccctgccatggaatctagcaattgcaagcgataagccaagctgcacacctgggccaagatagtgaacggtccaatatatctcaggctaagctttccggagacaccgaaccgaacaactcctttagtgggtgataccctgagaaggacttggtcacccactgcaaattccaaatcccgcctcctcacatcagcataactcttctgacggctctgagcggccaaaatattctgacgaatttcccaaaccttttcagaagtatgctgtacccaatcaggaccaactagggatctctctcccaaggtctcccagcaaagaggggagacacaccgcctgccatacaaagcctcaaatggtgccatcttgatgctagcctggtagctgttgttataagcaaactctgccaatgcaagatgatcttcccagctacccttccaagacagaacacaagcgcacaacatatcttccaaggtttggatcgttcgctctgactgaccatcagtctgaggatgaaaagcgacactaagagaaagcttggtgcccaatgcactatgaagactctcccagaatttggatacaaatttggagtctcgatcagaaacaatggacttaggtaccccgtgaagcctgattacttccttcatatacaaggggaccaaatctgaagctgaatttgtggtcttcttgggaataaaatgcgcagacttagtcaagcgatccactaccacccatatagcatctctgccccgaggagaacgaggtaaacccaccacaaaatccatggtgatatgctcccatttccactccggaatttccaatggcttcagtaaacctgcaggccgcttatgctcggccttcacgcgctgacatacttcacatgtggccacatacttagaaacgtcaaccttcattcgcttccaccagaagttttgcttcagatctcggtacatcttggtttcgccagggtgaacggtgtaaggcgttttatgagcttctctcaatatattcatcttctcctctgatttctgaggcacacaaaggcgacccctgaaatgaaccaaatcattctcatcgatgcagaactcccagggtttaccatcgccaaccctctttcgagcttcctgcaataaacgatcctgctactgagccacacgcactctctccatgagggaagattgaataagcatacgagtctcctcactagcggtgccgacatagcacaaggcgatcccaaaacggtccagatcagcaatcaactgcaaggccacttttggaaccctggacctgctaagggcatcagacaccacatttgccttccccggttgataatgaatagacaaatcataatctttaatcaattcgagccaccgacgctgcctcaaattcagctccttctgagtaaaaaatatacttgagacttttatgatcggtgtaaatgtcacaagcctcgccataaagataatgcctccacgactttagagcaaaaaccatcgcggccaattcaagatcatgagttaggtaattcccctcatgcttcctcaactgccttgagccataagcaatcactctaccttccggcatcaacacacaaccaagaccaatacgcgaagcatccgtataaactatgaaacgcttacctctctcaggcaaagctaggataggggcgtccaccaacttgttctttaatgtctgataactgacctcgcaatcgctgaaccagatgaagagaacacccttctccaagagtatagtcaagggcttagtaatgctggaaaaatttggtacgaaacaccgataatatccagcgagccccaagaaacttcgaatttcagagacactagagggtctcttccactccaccacagccgcaacattcttgggatcaaccgcaatgccttgctgattaatcacatgccccaggaaagcgacttcggacagccaaaatgcacacttcttcaacttgccatagaactgattctcccttagggcacccagaacgagacggagatgctgctcatgctcagcctcgatcatagaataaatcagaatgtcatccaggaacacgaccacaaagtcgtccaagaactcatgcaacatcctattcattgcttccataaaagcagtaggggcattagttaagcgaaaagacatgactatgaactcataatgccaatacctggtgcaaaaagcggtcttctcaatatcctcctcacgaatcctcagttgatgataaccagagttcaaatcaattttggagaacacctgggcacccctcaactattcaaagagaacctcaatacgggggagtggatatttattcttgatagtcacttgattcaaagcgtg

SEQ ID NO: 180769 - DNA, 832 bp, Zea Mays
aagtagggatttcgtggtttacatagatacttcattcttatctctcatttcttttgcactgattgtagtttagttccttccattaaatcttctgacggtttgttggtcgcttagagcgcatctcttgaagaaaaaataaaacaggacactaacacaagagcgggagctgcagcaacgtgttggtcaatttatagttactggttacattcccaattgcagcaatgaagtagcacttgatttacctatgtttcagttccaaagctggataatattattgaacttcaagtgttgccaccttaattaacttgattagctcttctgacatgttgtgcaatagaatgtgatgtcgcttcatgttgaacccctctatttgttttaccagtttttattgttgattggaatagtggcacaaacaacttgcagttcgtaccaaacaatttatgtgatatccacattgtaaaacattcttgcatatatatgacatctattttgtactattgttacacattcagcatcattatgtatggaagttttttgacatattttttcatagtgcatatatttaccatcggccgacacctccaagcactttcgtaaaagatatttcaagatcctcaaatttgtcgcttcaccattccacttcccgccaacttgtacaactaaaataatatattgttatttaccatcggccgatacctccaagcactttcgtaaaagatatttcaagatcctcaaatttttcacttcaccattccacttcccgccaacttgtacaactaaaataatatattgttgtcacctactttttaatttcacggcatatttagcctcc

SEQ ID NO: 180770 - DNA, 1077 bp, Zea Mays
acaaggatgtggtgtgtaggaggaattccaatgggaagctcagatgggagccagtgacttcctcctcttctctgggcactgtcaacatgatgtcaagcgttgagcagcaattttcagttccacctcctccacagcagttttatgtgcctgggacttctcagttcatgccggtgcagggttttcctcagtatctggctgcgcctactcctgcaccaactacccctatgccatctcagtttggagctccgcgtctgcctcacccggcggctcagtggggttcttctgttaatttcactccgggagcttcctcttctgcgggtatttccggagcttatgtactaccctctgcggatggcagagagcaaggagacgtggtgacaggtacgatttcagttgatttgtttgtggcccatgctctttttgactctggcactagctattcgtttgtttcggaggactttgtgtcgcgggctgttctttcggtgcagaggttgggtcacccaattttggttagttctgctaatggctccattagtagctgttcagtttgtcaggggtgttccgtcattcttgctgatgaggtcttttcggccaatctggtggtgatttccttgggggcattcgatgttatcttgggtatggattggttatcccagtatcgcgcagttatatcctgtttttggaagatagtgttattgcaggcgccgtcgggtagggaggtggtattcttgggatgttcccctaagttcacgttatccttgttggcgcaattgctttcggatcgccggtcaaggaagtcgggaatctttttctccatggtggtggagggtgaggctgccttttgggtgcaggacatctgggtggtgtgtgactttgctgacgtgttttcggcagagcttccaggcattcctccggagcgcgatgcagcttttgagattaagctgattccgggtacgcagcccattcataaggccccatatcgaatggccccaaaggagcaggttgaattgaagcggcaattgaatgatctgctagctaagggtttcattaggcctagcaggtctccatgggcttccc

SEQ ID NO: 180771 - DNA, 951 bp, Zea Mays
ggcggctgttcttcgccggggaaattggtaccacgacaccgtcgccaaccagccgcgagccgagaagagagaatcaccgtcgccggtggtctagggcacctcctaccagccagagccgggccgcgggcgacaccaagcatccggtaaacaccacacttcgcactcgcctttcgtcccttcatcatcgatgcgtgcatggaccgaagtagaaattaatgctagctcggtgagaccgggcgcggcaccaccgtagtatcgtctctagccacgacgcggtggctggggcaagcaggggtgagggtcagctggtggcgcttcctgccgtcgtcgggacctgcgcgagttctaggggcgtgatgtcgatgttcagtgcgttggggaagaaggcctttgcgccattgattttgatatgtgcggctgtgatgtaggggctgccctggccattggattcgtggtggagggcttagatgagggcgcggttggcacttgttataccaaatctgggcccttcgactacgatccaatggtctccatagctcactagtttatattagggcgaatttaatcgtggccctcggttgtgatccgacggctggaaatccaccataccccttcgttggaccttttacgtatgagccctcggagaaaatggaattcaacccgcggtccgggcagctaaagctctgtgtctggggatttattgcacctgggcccctggactttcttgtaatggtgcgctcggtccagataattagaaaatcggataaattcattaggaaaatacattttagtgtaaaaataaatgctagaacttgtttaatttatataaaatgcatacttggtccaaattgacccatttcagtctctataattttgtaacaatgttgtttgttatctattgcctctgtttttacatgaaaataataataaaattgatctcttaatcaatcc

SEQ ID NO: 180772 - DNA, 897 bp, Zea Mays
gttgatagcttcggcaactctgttacagttggagggctcagcagttttggctattttgctgttttctttgtttccggctcttctaccagatctacactagcttcggctggcatgacaggagctgattccgtagctaaggggacaacctcagcactctcaataagctttggcactacagtcgtcccaataggctttggcctacgggtcaggaccttgactctcttcgtctttgttgcactcgaagaggctgaggtggcaatttgtcttttccctccttgctttcgagcaggaaaacaatagtcaggataaacaaacccaatcacatcaaaaactctatttaatctcctttttcctcgagcaccgaaggcaacggtcatggcttcgtcctctaccttcgtataggctcccagcagctcatcactggttgcctcaacaacctctagccaatcgtcattcggctcgtcaaactggcttctataccgaaaggtgtatcttagataaaccaaaccacctttgctggagccagcagcagtttcttttggcatctcccaatcattcacaagaggccatactttgtaagcaatatgttcctgtaccaaatccctagtaccgatgtaagtgcacactgtgttgaaagccattaaacatgcctgcacttcgttcccaattgcaatggatggccttctaatgccgaagcttgaccatatgggacgctgaataatgcccctcacatcctccctctcactcagatcattcttcacatagagccattgcttcatccaagagcccggccatttctttcgaaatgttagcacatgatatctagcgtcagagcggggcataaagctgtagcacccaaagttgttatggtattgctctttaccagttgccttcgtc

SEQ ID NO: 180773 - DNA, 645 bp, Zea Mays
gtcggggcagagaagtctgcgcggctacgtggacaggacggaggcctccacccgcgctgaggtcgaccgagtgcacgtgttgctcgtggacgcataccgtcagcttggtgcgtgaaccgccccctttgacaaatccagcgaagaggtgggttccgcttcctagggtggctgcaggaggagttggatttgctcccgtccatcgtgaccggtctcatgtccatcgtgaggagactgcgaatgccttgtcccgtgagggatgtaggcatttcgaagtctttgatcgggtaaccgaggacttcgaccgcagaatcttccaggtcggagacgaggtgctaaaatggtccgctggagcgctttacgataggatgtggggccatcacggtcgcgacactgtccaggagagggtcgaccgagcgctagagcaggtttttttggtaacgtttttgctatttctatagatgatgaacgaggaagaagtcgaggactttggtggcctggaaagctcggtgacccgggcagaagatgcgaggacatgggctgaagagcaaccggcaccacaagccgaccctctcggagaccctgcagcggcggctatgccggctggcaaagaccctgcagcggtggctgctccttcgcaggtggcgg

SEQ ID NO: 180774 - DNA, 510 bp, Zea Mays
cacattaatacataataggtcagggaataactcgcaaaaaccccacatacccaatggtgctcccgagtggatggcaggttgatttatgtaaagtgcaggggttcatttgtaatacgcgcaagccgaagaggtatcggttacctagagccgcgagatcgccaaccaacagtgcagattaaatggactcgtcatgaaactacggccataggattcctaatgaatggtcatgattttaaaatacccagatcaacctatgcatgttggatctttatcaaacggtgctggctaacccacctaaccagtatccctatgttctaatcgcgaccgcacacgagcatatcaacggcccgcggctctccctaatgacgccggtggcgtcaggacagcgacgccctgccccacggcggcgccaggctggagttcgccaatagcacgcctagggcaccaacacgtgatccaaatgaccctatgtgtatccctatcgactacgaacccgataacgcccctttc

SEQ ID NO: 180775 - DNA, 791 bp, Zea Mays
attcagttttcctgcctcgacgaagttccaaactggcacctccaaccagctgatgctgcccccagccattccaggccgataatggtgaaggtatttccacaggccaaagtgtggaaaaaatccgaggaaggcttcacagaggtgaacgaacacaacaatttgaagcacggagatgggatttagatgcgtaagattgagagaataaaaatcaaggaggccacagaagaagggggaaactagcagagccaatactctgatgaggaaaggcacggaaataactgcctcatgagtatcctctgtcgggacggtaattccctgcttgatccgcaaggagcataactccttggaggacagaacaatgacctcaacaaggtggagaaggtcagttttagagaaaacggaagtgtagttaccacagaaaggaagttgacaattgggatcaatcggagggatatttggcatggcagcaccctattttctcttcctgggcgccatcgcgatcccgtaggccaaaaagcacaagaacagcgcgagaaagagtgagagttcaggaggctagaatgcggcggaggagttacaaagttagggttcatgcaccaagaaaccattgacaaagatataagtgagcgcattaagtcgggcgcaacgggacaggctggtagctaggaccagttttcggcataacagagcagaatgtgtcgggcagtgtttctggtcgggtacacttgagcgttttcaaaagctaaagtcgtcgatcgagttcactggaatgaattcatcaagcaaagaca

SEQ ID NO: 180776 - DNA, 360 bp, Zea Mays
gtcaagctcaaggcaagatgtgtgccatccttgttacggcttaaccattcactcgatcaaatagtggattcaattgatgactaaaatttagtcattgtgattaactctttaatcattgtggcatggccatgcacttttcaatccaactatctcgagggcacagatatatctatcatgttatctaagaggggcaaatcccattttgatcccctcatatcccattccatgctttatggtacacccgaagactccttttatgactacccagttacgacgtagcgactaggagtcccaaaatgcacaactacacataatgagaaacaatggcgatctcaagtctaaggatctagtaggtgtacc

SEQ ID NO: 180777 - DNA, 1033 bp, Zea Mays
cttacctgggccaaaaccacacttggcggcccaagttttcccagctgagcgacccaaccaaacctgtgggcgccgacatgtggggtcaccccgtttgttggctgctcctcacccgcgctcgctgttgatgcgggcccgtttggcagacgatgccgcgtgcacatacaagccggggcgccgtgaccgcgtacccctccacccactggcacgtggacccaactggtcaagccgggtcctccttcttcccagggttgttacgctggggccgaattcctcaccgcggatggtgcctgggagctcgccgtggccgttcttttctcggctagactcgttcctcgctccctaggtggggccatgaatacctagatagtaccacccctttgttagccaatacaagtcacacagagtgccaccatcacgtaggagccatggccaccggagagcatagcaaaactaggatgggatatcgtggtgcgtccacgtcttggcgaagcattagaggaagtctcatggcacgccagaatgcatggttggtgtcttcatcctcttcggacgggagcagtgggtgaactggcgcatcgcgggtgtgaagcttgccgccaccgttgacccatgatatcatcaccgttggagccttgctgtcgggggggcttcaccaggcttcgttgatcatgagcgttgctccgcctagggagattacgctccggccgccgggaattgttcaccggagcaactcccccaccgtgaaaagaccctgccgcaaaccaccttttgtgcgtcgccatatctggtaaggcccttctcatctagttcgtgaagccatccttttcgcgtatcaccaagcagggttcgtagtagggcttcgggtgagtgttgggatttctccggcgaggccccactgtaatggctggcggtgccgctgcctggcagcagcgtggggaggagaaggcgtcggggcattgatgttgtgattgatggctccagatggatgttagtgtggtgtgtgcttgaccatttgatctcgcatgggcgg

SEQ ID NO: 180778 - DNA, 360 bp, Zea Mays
agctagctttgtcatgatagcacaaggagatgatgtaaggagaaggtgtcgttcagaatgacaaaagcaaaagacaatgtcgcccttgcattatttgcaaatcctatgtacaattatggtgggcataaatataattttgtacgaagctgtacgactccctatctctactactctatatgttaccagtgtaggcgtgcacagtacctttgttctgcctctccgcgcatcggctgctgccgcgcgcaaatccgccgcacccccggtcccgcaaatccgtcgcgccagctccgcccgctcgattcccctcccagcgcccgcattccccgccgccgtcctcgcggccgcagcgcccccggaccc

SEQ ID NO: 180779 - DNA, 865 bp, Zea Mays
acatatctagaaaagccaaaaacgacctacaatttagaacagagctaataccttgtaagctaaaaactgaatatagaagaccatgtcctttaatttggatcaaggcatcaaaacaagttgtcagattataacttaggatatagagcaacacattgaattaatcagaggcaacactatttttgtggtagtactgtaccacaaatatttcacagaattctgcattctatttgacaacgcttaatggtaaattacactaaatttttgtgctctaccttagaacaccaaaagcatttcaagttactcaattctttacaactagagtaaatagtctctcttagcttataaaaatgtgtcggacatgcacttgatcacatttgattctgcaacgaatgactggtaaagtgctactcccttccattccaaattaaaagaacgctttgacaacttttgctatgcacttagatgtacactaggtctagacacatagatagaaaagccaaaacgaataataatttagaacgaagggagtactaaatagtcttgtgcacctgtaggatacctgcaccttatgataggcttccctagctagttctagcattcatcattctagccttctagggacttctaatatcgaataagcatatttaaagtggctactcgccaagcttctgatcatgaatacaactttgccacaggtatagatgcaagattgattattgatcaaattgaaaatggaatatacaccaggacacaatatttatgtagaccacatttcaataccaatactatccatatgaagacaggggcatgtcagcagagaataacatcatccatccacactaggaaggtacaaaatattcagatc

SEQ ID NO: 180780 - DNA, 522 bp, Zea Mays
acaatgttgaggactaaagtccgatcagaaacaggttcgccgagatcacgcagatcttcggcgagtttcttgtagcggcgacaatattcggcgaccgggagatcgccttgggagaaggagcggaattcttggtcggcataaagagcacgtgtggtgcggtttcccaggaactgggactctatagagagccagagggtgcgggcagaggcgctgcgctgagagatgatgtcagcgagggcatcggaaagggtgccaagaagccaagtgcggacgacggcattcatgcgaatccaatcaggtgactcgggaaaaacagaatcagagaggacgtggcattccagggaaaatttggtgagggtgagaaggaaagattcggaccagcgggcgtaaaagttggagttggtgtcaaggagtagagggacaagagcccggatgttggttactgcaacagcctgggcgtgaaggtttagcagcgtggctgcctcgtggtggagaagagcagcatgcagagttgcaggtggg

SEQ ID NO: 180781 - DNA, 752 bp, Zea Mays
cttcaacaatgactactatcgcgtcgtcgtcgttgtcacgccaacgtaaggaatgaaggaccatgagataacgccacaaggaggactcccttgtttaaaaatcttcgatctcttctctaaaatcttaacttgtagtagattagttaatgttaagaaatgaaagctttatgttgctgctcgataatgattaatttacatgagagactcggggtgttatactataacctgccaacgctgcacaatcaatttttgttgtgattaattggccgatttcattgtctccaagtcggtttaatttagaatattagttgttggaattgtccaaaaaaaaagtactccatataacagttgttggtcaggtgcagctgaggtgcgggactcggatctctagatgagtcaacagttgcttggcctctagcgctgggtgtaataaccatacactagtgatgcatttaattcactcgatatatatccgattaaacaaataaaccaatccaaagaccttgttaagtcaaaggcacgccaccgaacaatgtggatttgaccctcaaaccccgttgacctcgtttttcgaaaactatcaatatcccaattcccaccaacagcagtgtcacagtcactgtcactgcccgtccttttgttcactacggctgccagctgcggcggccaggttgcagcgctgagctgctgcgaggagacgacgactgggaagagcatgaagagctgggcgccgatcaacctcaacgtcggcc

SEQ ID NO: 180782 - DNA, 720 bp, Zea Mays
tccataggagttggatgactcggatcagcgttttttacatggaagactgccctccaaggtcgacgatgcacgagacaccacccgggttacctcttgccaggcagaatcatgcagcgaaagtccaccatctaggacctctgaacagatggttggaatgtcagccttaggaggctctgataaaatgtcttcggtaatgacctcttctagtgcctgatggaagtatgatattgaaagcccctgaaggctgacgagtgcagacagggcttgggagggaatatcgctgcccccgtcgctgcctctatagtgacggctgttcttgcggatcagcagaatttcttcttcttcctcttcatcctcgtcaaacacactgccagcagcctgcgcatcatcacaactccaacattgacctcaggaatggcgtccaccaggccatcaccaaggatcgacgcagaaggaccagcatcttggtccaggcacgacagtcgccgaagtcgcctcttcttcttctcctcgacaggtgcagccgggtgactcacacgacgtgagcgctttgggcgggcacctttgggtttctggatctccacatcctcgccaaactcttgtccagtcgtgatggccataggctcggtacgggtagagtaagacgactccccagccagcagagtaagcacggtgtccatctcagcatcgtcggtgatagctgacatctcaaagtgagtt

SEQ ID NO: 180783 - DNA, 1055 bp, Zea Mays
caggggctctctgcagcgaccagcgagccaccaatggccagccgcccgcctatggccaaccgcccgccagcggctagcccaccaacacagagcggtagagcctcgattgctcccgatgaggctctggatcctgcaacgatgaatgcatctggtggcggtgcacaacctcaggtccgcgacatcaacggatccggctcttaggcttctacggcagcagtcgtggcctcctcttcctccgataaacatcttaggggcaatggttaacctctgtttgtttgttgttggcttgttgcttataagagtcctctaattatttgtagcagcggcagcaagtcagagtcagtgtattatatccacatcgtctgcaacaccatcaagtgtagtgccaattggtggtgcaaatcgtgatgacacaattaatgtagatgtggacatggacagtgacgacgatgatgatgagccttctggcaaaagggcaaagaagagcacatctgaagtctggcaatatttcaccaagtattgggtgatagtggaggtggatggcaagcaagagagatagaggtgggcaaagtgcaatttcaaagggtgtgagaccaagaatagcaagcatagagctgagggaaaatttggaacaactggtttttggacacatctgaataattaccaccatgtaaagaaaggacaacagcagctcacagccggtaaggatagtgagacaggaattgctatagttaaaccttacaagtatgatcaagaagctagcttgaaaaagttctatgaagctatgattgttcatgagtatcctttcaatatggttgagcatgaagtatttgtagaatgggtcaaatcgatgcgcccacattttcctttaaagtctcgtgtcacagttagaaaggatataatggactactctgagaaggataagttgtatgcatacttcaaaaccatccgaagccgctttagtgcaactatggatatgtggacatccaaccagaacaagggttacatgtgtgtcactcttcattggattgatgatgaatggaaaattcagaaaa

SEQ ID NO: 180784 - DNA, 720 bp, Zea Mays
tattatctttgctccaaaatgcatcttctggcacaacaaatgtgaagtcctcgagtttgtatttgttgctagccaccatgtaccactcatgcattctaatctccggagtcgacaacttagaaagttgcaccgtcgtcaagaacgaccttccattcacaaaatttaggaggaacatcctccttcttgtatatcgagatattggttttaagacgtaatgattctcgagtatgaatcattccatcttcttcccatacttcgaaattgtctatttgggaccgtgtgcgtactccatgagatgctgattccgcttttgattgatttgtcataacactccgcaatttatgcaggtagcgcgccactgattctgacggtttcttgacatcgtcagtggcgattcgctaatgaattttctttgaaatagttggcccttcaacattggtgtcaacctttgcttcctttttgatgtttgtgtcgacattctgaggaacaattttgtctacgtccccctcgtcgagttccttcgcaagaggtgatatgaaagtttcaacgatttttgtggaggtcagtgtcatattttcctgcaccatggggtatggaatgatcgaactatctttctgttgcattggtgttgaattcggcgttggtgacttatgacgcgttacacggcttaagatcggctcatcacccaacttgatgtcgcgttgatgccaaaggaccaac

SEQ ID NO: 180785 - DNA, 711 bp, Zea Mays
gaaccgggtacctgaatctgaccggctagatgcaatgtgatatgatcttctccggatttttatgtctgcgcatatatacatataactatgcgttgttaacgatatactattacagttgcagccatatcgtcgtcgtaataatcttgacaagatgacaggcaataatcaagtccggcgcgcgttcagaataatggagtatacgtaaaatgatcaggtctgcaagaacaagggcctattttgtacatatttttttttctaaagagcatttctaagaatccagattcctagataatctagttgtcacgagaatctggacatcatgaggcttacatgtagaggcagataaggaggtccgtatggtttagagtttaggaggtggtggactcctctcgtcgcgaagactcgttggattctatatttacgtcgatttaggtgttattcacgttctcacatgggcgtactgagaatcgaaacgttttgctaccagaagtcgattctcacggccagaatctcagaatctggctagaagccgaaacaaataggcccaatatcatgcgaaccaaaaactagtgccaatgaatcacatttaacaacatatatatattaacgatcatcctatcaacatgtatacaaaggctaaatcgagcatccttcctctttgcaatggaacttaaaatcaacaaggtacctgtaaaatcatcatgagaagaa

SEQ ID NO: 180786 - DNA, 646 bp, Zea Mays
gagtttgttgctcgtatagcatcgtatgttaggtcatagttctttgcttctacttgtgtttcttctgctatcccacatccaccaaccgaaacatcaatttgatcctttgtgctattcggtttgcccttgctagttgtctttatgtaaactcttgttgtcgcgaaacctagctagatcataaaccctttgagcctttcatccttcactaaagctattttcacaaatgcaggcaaaaaaggtaagtgtttagcagtccgtagtagcctctagcggctagaagctagaaaaaaactaaaacaaataggcccattatataccctcttaggctcgtccgcacggtcctgttacaaatgctcctgtgggccttggctcggtaggctaaggtggattgtgaggcgtcatgaccaaggattacaaaactgcttaaaaactagtccagtttccggttatcggactagactaacaattttctagtcgtgtttaaaattcaaaaactttggtaaaatttataaaaaatgaaatcggtaaaaacagtgaaactcgataaaaatagtggtttcccgcatagaaatccgataaaatgttttatttgaatttggaatgcaaatcggtcgaaaatttgaggatcagtttctctgtcaggaaa

SEQ ID NO: 180787 - DNA, 411 bp, Zea Mays
agacgaaggaagcgggggttccggggttcctagggtggtctagggaggttggggatagtccgaagaatctagtggcaagggccaaaccatggtgggggtaccggaggtcaaagatccacggtgaggaagcaaggcagtgacactagaatctccgatgagcaattgcccacaacagagagcaagggagggaaatggagggtgcaaggaaaattccttacctcaaggcgagactcaggatcccctcggaggcggcaacgacatggtggcagcttggaacgatggtggcggccccagaacatggcaaaggcgacgacagggtcttagtgacgacggaggaacgacttttgcgatggcggtggcactgctgtgtactgggtagggaaaacaggcaggaagagtgcaaatgagaag

SEQ ID NO: 180788 - DNA, 554 bp, Zea Mays
ggcgatgtagggtagtctagcttaattgaatgggtcaaggagcatcagtggtatgcaggagtgccgaaacaagagagtagagggcaagaccggacctgaattgaactggccacggtgagagcttgttcacggtggcggaaacatatttgggggaactgagaaattcgtgggctttggttagtaattggaggcacgagctggtggattggatgctggaatacctaacggagccgagggtgtgctcaatttatagggctcttgagtggtggacggtgaatttgaaggaaacgcgcgacagccggagaggaggggcactagcgcagtgatttgtggcaattacgggataagaagccacgacggtcactggttaatgatcacaactcacggcgatgtggttaatggctagaggcgtggcacaatcgcggtgaagggcgcaaactctggtgacggccgcaaggccacgtcgccggtgcaagtggtcgaggaacagcgaggccacagtagcccgaactcatccgcgacttgatctttttcacgaccgatcgcaatctact

SEQ ID NO: 180789 - DNA, 738 bp, Zea Mays
attttctaccagcagggcaaaaactgactgaaattagtatttttttgtcgtcggtgtgtggttcgaggcaccaaaaattaagaatttttatggggcttctctccctatccaacaaaaaaatagtttttttacccaacagtacgtccctcacacatgcttttatgcctcttgccactctctctttgcacctcctcctccaccaccaccaccacctgtcctgcccgcgttttaccacctccactcacccacacttgcctcaattccactgtatgtgctaacctggtatgcgcccacctcgaccacttgtcctaggtcatctaatattatacaaacaaaataaaatcataatcgaataatggtatgtcctatggatgatcagatgtcgtggatgtgtagagctcgatgagacgattacgatcgaatattaacttgtcctgattggattctcaataagctgtttttggtgttgggaaatcaaagttattggatgttagacttgagcgagtattaacttgtccagattggatgttggtttctcgataagttgtttatgttgttgggaaattgaagttgttggatgttagacttgagtttttttcatctttcctcctagcagttatcgttttcttcccctacttatgcctcttcccacgcgcgcgtctctcttccaccgtgtgtccgtctatgttcctcacacacttctttctttctagtcatgccctctctccctcctacgcc

SEQ ID NO: 180790 - DNA, 474 bp, Zea Mays
gtcgcactaaagtaaaaggcttggtcaaaggcgaggcggcagttctcgccggagctcggagctatcgtgtacggcagcacgagcactcagcttcaggtcacctcattcattcttgctcacctcgctggtgacttcttcttccctgccgtgttcgtgctcgtccccccctgcaagtgatgcccggtaccgcaatggaggcaccaaagcgtagctgctccccgtcggggcctcgtgggtgcgcgacgcccaccttcctcttctccatcgtcctgctgctggcactggcagtcgctgcttcggtgacggacaccatcctcccgggcgcgggcatctccgggaaccagacgctggtgtccaagaacggcgacttcgagctgggcttcttcttgccgggcgccggcatccaccgcttcctcggcgtccgcttcaagaagatgccgggcaccagccccacgttctgggtcggggacaggg

SEQ ID NO: 180791 - DNA, 654 bp, Zea Mays
gtagtttgtttgctactggtgaaacagtattgtcctgcggttttatcattgtatcatgtgaatagtagagatggaaagcaagtcatattttcatgtcaactgatggatgaatctaatatactaagtggttcaagttcttgatcagaaattatatgttcaagtatgaaactcttagctcattttggtgattgttgttctgcggtctgccgcatcacattctgtgtttgaaatgatattttgtcaacctttcatctgcacttctaatgaaaaactagctcagtagtgctaaatcatcaacacaagatacaattctaggcatctttctgttttgcatgtagagctatgcatgtttttcattatcatcgtgtttgtgcatcactcgtttcttgtttatttcatagatgctattttctgggacaattgctgaaaacattgcttatagagaccctgtgggagatattgacatgaatagggttgagtacgctgctaagattgccaatgctgaggagttcattaagatgttgccagaagggtacaattcaaatgtgggacagagaggttctagtttgagcggtggacagaagcaaaggtaaaatgctcactttccagtttccagactaccttgtatcacaaggtaaacatgttgaccataca

SEQ ID NO: 180792 - DNA, 747 bp, Zea Mays
tcaaattccctgatgaactcaactaattaaatcccctaataagctccctcaatcaaatcccttgatttatggtggctgcatggacgtgagggatgttgttgggagtgagtcaacatatacactatatttgacattatttacgctcaaatatgggtatatttacgctcaaatctgagttgtgcccacacagtgtcccgcatgcattgcaattttcggatctgccataatttttggacctaccataattttcagatttgacaccgcacctccaataaaaatcaaaaaccgcatgcacatctggtgggtgatgactgtaccttccataaaaacgggaccgtgcatgtgaggtgacgaaaacaagattttatgctatgttgtgagttttggtggtttgcatattttaaaattgctcgtgtctctgttgtttctctccatgatagttggtaatcctagatgttttttaaatcatggagccattttagtgtttcatctgtatagtggtaatccttcaattggtaaccttggtagtttgttacaattgatgtcttttggtgatcactagaatagaggtttcccttgtgccatttatgatgtaacttgttccaagtctggtgtcttagtaacaaaaaaggatcaagataaaggatcagacataagtgtggaggatctccctggagataaacctggcaaggtggaaatctttaattgatgacattggggaacgctaccaacttagatgaaaatgac

SEQ ID NO: 180793 - DNA, 323 bp, Zea Mays
aaaaaacaataaaaaaaatctcacttgcagttgcgtggggcaagctagcattctgctagctagtggaaggagaaggacggcctggacttggactttcagggcaacagtagcatctgatgttacggtcgtcgctgcggccaacaagacttgccaaatcagacgtattctcctcctgttttttcttcgatgcatggaaacaacgagtggagagtggagactggagaatttatatcacggggaggctggagagaccaccgccatgcatgctcaaaactagtggagcttgaccggtgttaagtcttctcacgagttaccatccgaga

SEQ ID NO: 180794 - DNA, 442 bp, Zea Mays
gagcacatagccttcagagtgtggccgcttgtagagcaatgggaaatgccaaaggaaactatcagcaaatctgacgaaggtgggctggttaggttgaaatacaccttccgatacgagggtaagtttattgagccagatgatgattggctgaagtgcatcgaggctacaagcaacgaactgcttggaccatattcaaaggcagaagataacgcgctatctgtgaccttcggaggccagaaaaagaagaggctaaatagagttttcgacgctattgggtttatgtaccctgattaccgctacccgctaaaagggcaaaagataaaaagcacaacttctggaaaaggtgatgcttcagttgctctaagtgaggccgcgccaaaaaggaagagggtgaaggtccttactcaccgaccgcgcttcatcgaacaggccttagtgcccg

SEQ ID NO: 180795 - DNA, 324 bp, Zea Mays
aagtcctgatggattgacttcacttgttgaccccattctcacagttactgatggccgttatcttggtgctactctggatcgtaatggcttgcggcctggccgtttttatgtgacatacagtggccgcgtgatcatggctagcgaagttggtgtggttgatgtccctaatgacgatgtgatgagaaagggcaggctaaaccctggtatgatgcttttagttgattttgagaagcattgtattgtggatgatgatgcattgaagaaacaatactctggagctcgcccgtatggggagtggcttgagagacaaaagatacaacttgc

SEQ ID NO: 180796 - DNA, 460 bp, Zea Mays
cagtatctgacgatcattgagcttttgttgtctcttgctttcctgcgacccgtgtccgccgaagatgacgttgacttctctgtcaacgcgcgggaaagctccacctcctccctcctcctgttgctggggttgtcgtggttctcctggtcctccttgcggcgggggaggaggtagaggttggaaaggtcggtcgttccccacggagtgcttgaagtctctgcagttccggagggtgtggcgcatgtccttatggtacgggcactgggcgttgaggatgtcgtccagcgtgtgttcgcctccgcgaggtcctcctcgggcacgcgaggcgggcggttcgacggcgtggacctcttcacgaggcctcttctcccagcgtttgtcgggttgctggttcgtgtcgtgtcgcggtgctgtcggtgcaggctttgctcctccgatgaggtctagagctcgttcatca

SEQ ID NO: 180797 - DNA, 627 bp, Zea Mays
acaaacagttgtcattaattaccaaaacattaccaaaggggcctagatgattcacatcgggtctctcgcggttctctcactctccgccatggttagcggtggggtgcatatggcgcgatgcaccggctatggaatgagggaggagagaggtcacgatcgtcctatatagccccgcaaggaaccaaagcgccatgggtcacggcagcggatccccccaatcctggaatccacgaggtttgttgagctcgcatcaggaggaaattgagcgtgcatcaggacccatctgcagacccatggtcgcgcctggaataaggaggtggagcgaggttggtcaggctccatgtggcaggagcgaggcacgcgatttttccggtcctcacgcggctagattcggggacccgattcaacggatgagaggaagacagaactgactatttgtccccacatggaggtgagtcgttcgagtccgagcgtgcggggtgggcacatggattccgcgtggcgtgggggctgacgagcggggttcttttgtcggtggagcgtgggtgcgagcgacgtgggccgatgtggagtagagaaggggagaaatgggccaggagcatggaattcggcccaggcagcacataa

SEQ ID NO: 180798 - DNA, 438 bp, Zea Mays
cagtattgtggcaaaaagtcgtcgcagcaccgatggcatctggaaaagaacatgttcagtgagacactcatccagtgtgttgtctgactcaagtagtccccttctctctgctgcctcacgaaaagtcagtagggtgacaccatcaactgtccttagatccacatatgaggtggcgccagtcacgtggtttaggagaacacgaagataatagcgctccccctcggccagatgagcagagactatcctaccgacttgtccacctgtatctcgtttcctccgttgccatactttgcccttaccactctgccaagtgtaccactcagggaagtcacgatataggatgccatgagcctcctcgtgtagcctattcgcctcaaaatatgctgtgagcatcgacctatcaccacctggacggttgacgactcgctcgaccatttg

SEQ ID NO: 180799 - DNA, 514 bp, Zea Mays
atccgggacggagaaatgttgctgaagatgaattgacgtttgaaagcctctcaaaatccgtagcttgatgaatgaaaaatctaacctctccaaaataacagtgcagcaaccaagtctactaagtccaaaagcaagtgcatagctccacaagttcattttgggtcattgtcaacagcacactcagcgctatagaccaaaagaaaggaacaccacgcaaaggatgcagttcaaaatagatcacctagcaagctatctagttagactcacggcaagcaagcatactaaacgaacaggtgctactgaagatatgccaactacacctatttaggatattttttattatgagaaatgatgttttctttttaaatgtttcgcatgtatgtagcgtggagttactatttattgaaataaatgcagtatctggggcatttggtaatgcacactgttgcaccggcacttcctctgcccgtgctccctcctccatctagaaggcataaaaaacccaacacatcgc

SEQ ID NO: 180800 - DNA, 422 bp, Zea Mays
gtaggatcctctatttgcttattcctcaaataattgcatagtgtttttgcatcattggattctaagtactttgtgcgctcacgcccaatctcattattgcaatccatctttgtaaatggcactttgtcggctcctccataaaactccttcatgaattcatacacctgggcaggcctcattccagcctcccgtatgtgcccaattagctttctatctgcttctataacacgtcgttgggaccttaggtttttcttcttatttggactagcaagataatgattgtgctccaatacaaccttttgcaccgaccaaatcccttctttactaacactgaactgaatacgagcaccgcatcctgtccttgtaacgcccttcgagggctcgacttttgcatatccttcacaactgcaaacgagatgttt

SEQ ID NO: 180801 - DNA, 751 bp, Zea Mays
tctgggagagtcttcaccgtgcattgggtaccaagctctctcttagtgtcgcttttcaccctcagacttatggtcagtcggagcgaactattcaaaccttggaagatatgttgtgtgcttgtgttatgtcttggaagggtagctgggaggatcatctcgccttggccgagttcgcttataacaacagctacgaggctagcatcaagatggcaccatatgaggccttatatggtaggcggtgtatctcccctttgtgctgagagactttgggagagagatctctagttggtcctgattgggttcagcagacatctgagaaggttcgggaaattcatcagaatattttggccgctcagagccgtcagaagagttatgctgatgtcaggaggcgagactaggaatttgcagtgggtggtcaagtccttctcagggtatcacctactaaaggagttgttcggttcagtgtctccggaaagcttagcccgagatacattggaccgttcactatcttggcctaggttggcagtttggtttatcgcttgcaattgccggattccatggaaggggtacacccagtatttcatgtctctatgttgaggaagttttttgcaggattcaaaccatcaaattgagttggaaccaattgctgtggagcaggatctgactctggagtgtcgtccggtgcgtatcttggagtcctcggagcgtgtcatgagaaggagatcaattaagcatgttaaggtcttgtgga

SEQ ID NO: 180802 - DNA, 681 bp, Zea Mays
tccccccattttccaccattttttcacctatattatgaagctgggaagggtacaatccatcttattatttattaaggtacaacatggataaaaggtggatgaatgaacctaggtatatttctgacaatccactataaaccattattttttggtaatcaccttgtaccaacatatcgtatttgtacctaatcttcataggcacacgaaggtctacatagatggggtggctggatttattgagtttgcgtttagcaattctataggtggaaacaaaattctatgtccttgtagaaaatgtgttaattctctatggaaagatgaaaatgaagttcgtgcacacttgatatgtgatggctttcaagagggatacaaaaggtggacttatcatggagaaatagactctatgcctattaatagtcatgactacactgatgcagaggctgtaaacaattcagatgaagatgacatagccaatttggttcaagacttagctggtggtctagatgataaaggagattttgaagtatctgatggtttagatgaaacagatgtagatttagaagccatcaatcagttagcgatagataatacccaagagctatacccagggtgtaagaagttctccaagttgcatttcttaataagaattcttcacttgaaattgcttggagggtggacaga

SEQ ID NO: 180803 - DNA, 921 bp, Zea Mays
ttcttgcggatcagtgggactgcttcttcttcttccccttcgtcttcgttaaacatgcagctagtagcctgtgcaggatcacaacccttagcaccaacctcaggaatggcctctgccgggacatcatcgggaaccggtacagaagggcctgcatcctgatccaagcacgacagtcgctgcagtcgcctcttcttccttttctccttgacaagtgcagtcgggcggttcactcggcgtggacgctttgggcgggcaccttcgggtttccgaatttccacctcttcatcaaatgcttgcccagttgtgatggccattggctcggtgcgggtagagtcggatgattccccagccagcaggctaagaacaacatctatctcagcgtcatcagtgcaagctggcatctcaaagtgagtctgtctttcatcctcgggaagactccgaagtggagcaatcaaagcctcaatgtcctcagaagagggtcgcactctaagacccaggctaccgtcacaagaaggagggttggacacaaacttagataatggcctaagtggtggcaggttccatgcagaataggccacacgagcaccagcatttgaaaccctgcccctcaagatcatttccagtcgactcagcagatctttagtgggaattattctgttcgtgacccaggtagaatcgttgacaccgctatacaagtaaggagggtaggccctatcctttaagggttgaatgttcttgaatacaaagtcagcaactacagcttcagcagttagacccccatccttcagtgagcagatctcggcaagcagcactttggcttctgttattactgaaggggtcagagattctatctagctaggtgtgcgaacatctggctgcctccctggctgagggggagagatttgcagtggttctccacaa

SEQ ID NO: 180804 - DNA, 668 bp, Zea Mays
aagtagaaaagaataaaaggaaaaccatgtgctgggccgaaactgtggcctctcgacctaggaccgcacatcgccaacccaaggcaagcacccacgccatgctcagcactccctcagtggcatgtgggctccacctatcaggacatctctgccgcaccgaaggcactgatgcgggggacccaccggtcagctcgccgcgtgcatacaatcgttgtgtgctctacctttcgctcacttacaggtaggttcggggcgtcggattcatatcctccctgtgtctacctgcatccaacatgtgcatgccgtctcaacctcgcccttataaccttttggccaagattcccgagatccaatagcttgcacgtagactcccctgctcactatatatgtcgccaatgttgtcgccatctcctccaccacctcagctatatttgttccatattgaagggactgtagcgtgttaggagagagagggccgccaccttcaaatccaccatatgtcatcactaaaactgaggaggtttctctaggatcgtcttcgaagcacgcgtaatcactagcaatcgatccatgtgcgaggcatttcagagatgctagaattgctcgctggagatggtgacttattcgtttaactctgattttagtgattctcgaacccacgaattagt

SEQ ID NO: 180805 - DNA, 547 bp, Zea Mays
gcgtatacgccgcgtgcatgcttcactactctctccctctcttcttacttatttgattgattctgggcttatggcgaagttcttgaaacctgtagtaacagcgtacgtgtagtattaattaaccgctcgaagttatgctaatcaagtcagtaactgtaaacatgcatctagtcacgaacatgtagctagcagagagatgctcagatgcatgtactgtgagggatgaactagcatgcgagttttttttagaatagctatgccggccggcgagtaggtagatgcatggtggagggagcatgcagacccagtgtaaagcgcgcggttgattcgagcacatccatcttggagttttcctacctaatcggacccggcagcctggcatgatcacgttaattaattatgcgcatgtaataataacaaaatccggcatccatgttcgtagtggttgcgtgcgtgtgtgtccaaaataatataaacaaatgaaatcctttttgggtgaattatgaaggattaaccatgaacagtcacccaccgttatgtatagcta

SEQ ID NO: 180806 - DNA, 1143 bp, Zea Mays
atcaaaggagaacaactttgcttaagaaggtaagcatagtggtgttgaagaatttggagataatctagcccaaagatgggctgtcagactaaaacaatctaaagattatatgatcggtggcattggatcacctttggagacaaattgtggctaatccagtaagaatttgtcttgggatactataacaaagatgaagatggtatattggactacaactttgctgcagggcattggttatgttgccatatgaatctgggagaaaatcgagctcaaagatgagctgtcgggccaactgaatgaagggcgccagggtacagtaactgaagtggatcagaccgccagcacggcaatctcaccgccggcgacctctccacacgtagattcatgccgccgctgtcgtgattcgtgcgcggtagggagtggataacaccagggagggataacccgtacgtggcgccatctcccaagcccagccggagtcttcaccggcggccaccgtgaccagtaaattttgccgcggtgtcacccatgcctcaatctccctcactgtatctctttctgacgtggtaggcatgcacttgcgatgctatccgtggccggaggtcgtctgtcgggtcgccgtggctataaatagcacggtggtccacggcgaggtgtttacctcttcaccagtgagctgatcgcaatccaaaattcgcgttgtctctgcccccttctcccaaattgagtctgcatggtgaagctatagtttcttacggccgtgtagcctcaatctccacccccaatttcacctagagccgccgcaacaccagttttcccctttcctctgtcaccggcaagcctaagtcctcctcgctccgtggccagccccctctggtaagactctgtccaattcaagcgttgttttagcagctctatatgcttgtaaagctcatcgtagtagccgtttgaccaatttgggcgtaagtgactgggaacacgggatcgacatcacggtttccgccatacacgtgggcagtacattctctaagtgttcaagccacagtaaagctcgttcctaggtcgctttaggacggttatacttcccctgtcgctcgaccgagcatccatcgccggccatggccggtacaggccgcgtcagag

SEQ ID NO: 180807 - DNA, 643 bp, Zea Mays
ggaagacgagatatgtttagttagaaaagtgtgttatcaaacgtggtgttggttggatgtgataagtaaattagaagtgtgggttgtctgagcactgtgctgtcgaatgtgtgtatcaaaatgcgttgtagtagtgagtgcgttaacttgaacaaagagtctcaagtgcatgtcgtgctatggttgtatttgagatagtaaaatataagagttgcgcaatatgaggttcgatcgatgtagttaatattgattggactgtagaggtggtgacacgccttagtagtcatcatgtcgtctgttggtgacctagctgaaggtcgtggagaaaggtcgattacctgtgtgttattactgtcacgccgtggttctgtatgaattgcaatgtgaagtagtaggctctctatgtgatgctagatgtctaggtagactttcgtgaattatggtgctcgaaccgttgagataaaggttaagtcggtcgatgctgggtaagtagttaaaatgattaatggaataattatagggttagaactagaaactagtgttctcgcacccgtttgggatgttgtggtcgcttgatggcaagtcaatgggaatgtgttgcgctataaaatttggaagtgacttactgaaattacacaaatag

SEQ ID NO: 180808 - DNA, 465 bp, Zea Mays
caagaaaatgcaagccacatgcacaattaggcaggtggcaagctgaaggccataacatatctgtagcacataactggaggaaagataggcccagcaggagctctgaaaggagttataacagagctaacgggatgccactggcacaggactgccgactgtgtactgcgacttagcttcaacagtttagagtaaaacaagttttaaactgtagcaaagtatgagtcatcgaattgttaaagactgttttaatttcccagccatgttgagttaaagagaaaaccgcccctctctggctgggaactcttgagaaatagccagagaattccactagcaccttacaagataaagaataagctgcgcatataactaaagctaacttctcaactcaaggcattcagtaactcacactcagatttgatgttggtttccttttgtgtgacagtggtcgggttgttttagtttctc

SEQ ID NO: 180809 - DNA, 639 bp, Zea Mays
cctagatttccaaaactggcccaacactcccccgcgtagcccaaattcgctcagcccacgccttgacacggcgccgacatgtggggccagcgtgtcagccgccctgtgccgttgcgagtcgtgtccgctgcccggtctcccatcgcgcgcaggggtagtccttttccctggcatgtgggccccaccggcagggtcttctcccagctctagttccgtccgcaaacgctggatccgcgcgcgaagatctcgcttcttaaccatgctcggacttcactaccgggtataaattgggcgtcgcggtagcctcgtcctcccgaacccgatgtgccgagacctgccctagaacccaagttagtctatcaccagtgtgggtttgcgccaagaatcctcaacgccgctgccagtatgcgtgtgctgggcatgtgtgccgccgcaggggcaatccccgtgcgccgctgctgggggtgatttgggtggtctggccaaattgccgcttcgtcccgcgtgtaagcatgcgctttccgtgtgagggaagccacccgcagtgcccaatgtgctcgccggggccatgacgttcgccgcggccgcatctcaccgtgggcatccgtctgtgtcgctgtttgtggcacaggaaaagct

SEQ ID NO: 180810 - DNA, 366 bp, Zea Mays
gcactaatttcggattctccccaaatccgctcaagaacaccgtaacagcaacctcttcgtggccagcgctcctcaggttaaaacatacccaattgcttaatgttctagcctctgttaagtcccttgttgctcgtaaatctgtccaattgcgctaaaccaccttgggtagtcatgaacgcgagtgaatgtccttgcggctcgcggtcaccgtgggcagagaactgtagggctccaatccagaaattagtagaggggaaacactcctcagagctggaatttggtgtagaccgctcggaagcacctgcccttgccccgtttggccggtccaggagctcgccggagctcggcctcgctcgacgccgtcgg

SEQ ID NO: 180811 - DNA, 419 bp, Zea Mays
aaaggcttcatgcgggtaaggatgggcgttatgcgatcgaagcgagggctcaagccgcggaggatgttgaacacgaggcactcgtcggtgatgggggccccgagggtgcggagagtgttcgccatcgtcttgatctgacgacagtactcatccacagagagatcgccctgagcaagctgacggaaggcggtctcgaggtacaggatccgagtctggcggtggtcgaggaactaagcctcaagggcaccctagatccggtgagcagtatcatccggcacgcgaacgatgtcctgaagttcggccgtgagggtgccatcgatccaggaaagcaccacctcgtccatcagaagccaatcctttgacgggtcagggaccgctgagaggacgtggtcggcgagggcgtagcggcggagggtctg

SEQ ID NO: 180812 - DNA, 709 bp, Zea Mays
ccggcgagcaattggcggacttccccggccccaatctcaaccctccgaagacccgagctgcttacccagcttctggtagacccacgcggacacccgcagagatccgagcgacgaaaaccgcgatgaatcgcataggtggcggcgagaccgtcgtgactcgacctcccctcggttcaacggcaatgaggctgggctacgagggataggaggaaccggtcctaggtctactactttagagtcacggagaaacggtccaaggcgcccgcaacgaactccacgattggcgcagatgctccgagctccgcggaagccgcggtcgccaatccgtcgtccggtggaggacgcagctcctgacaagggtgtcccgcgagtcagtgggagagcaaggcacgggcgcaagggagcgacagccaagtgggtcccccctgtcaggtacgtgagcgcgcagcggaggcggaggcatgggccgcgcagaggtaaagtgttggtgggccgaaaatggggtctagagcccagttgagctttccttccctttttcttttgtttttattttctgttttcttttatttataattcttttgaattccaaattttgaattccaattcactgtggatttattatttaaaactaacacataatctgaatatactagtatcacttttatgatatttattttatatattttctctatagtacctctcttctccc

SEQ ID NO: 180813 - DNA, 624 bp, Zea Mays
tggtttttctttgaaatgaggtgggaaaggaagaatagctggatcttgctcaaatgacggatgatcaattaagaaacatattttttagttaatagttaatgcatatttgatcgtcaataagagaacagctctgcaactgcagctttcaatcagcctagtcttcgaatccattatccatgtctggtgtagtgttatcatgttgtagacttgtacaaggagctacccagacaatttacaagtgtggaataatgtagaaaaggtcgttcactccaatatatatatatatatatatattcagaatatgaacagaagaagctagtgatagatcacttggtagaccgcgctaaggagacatccaccacccacccattctcaaaccattcaacccagacactttcaaatttgggtacctccctgagatttattagttcttactagtgtctaccttcaggatcgccctaccctaggagcaactacaagggggcgtatctccctgcggtcagtgctcatctgtgttttagactacaatagtaaaagcctctatctataaactcctcaacacagcttattttgtcgcatatataaggaaaactaaaccaaactaggagttactaagtggcattg

SEQ ID NO: 180814 - DNA, 486 bp, Zea Mays
gtcggtgatgatgtaaaggtccgcttcccggaacaactactcggtggtggttgacgccttttttcagtatggctcagatgaaggccaagtcgttagacccccgatagaagtcctcgatcactgctgcctcagcgacctcgaggatgcgattcctcctggtctgaaacctcttgaggtacgaccgaagcatttcgtccccccggcgtctgatggatttgaagtcccatggctgcaccggcttgtcggagagggattggtaagttggcaataaagcaccgactgaagtcgctccaatcatcgatgcagtgtcacagtaggtgtcgtagccattgcaatgcatcttgcctaagggcgatgggaaagtacgcggtcattacatcttcagttgcgccagcggcctgggcagcggtcgtatagatggccaaccagcctccaggatcctggttgggcttgtatttgtcgatgttggagactttgaagtttggg

SEQ ID NO: 180815 - DNA, 824 bp, Zea Mays
gcagaggactcacagatgcgaagggtggttgtgtcgaagtagagcactggtgagtcgtcacgaagtggaagacgtcgccgaatgggtatggaacggtctcgtttttgattggatcggggtggtcagcgtgaactactttcctcgacatcggggacgtgcattggagaaggggatttgtgggacctgtttgagggggaagagttgaggatgatgttgttcaatactcgggatgtaggtcttataccgaaggaggagcctatgtgacattgttgtcgccctcgctgctttgttgtgatattgagtgaaaacactgccctccccctcttcacaaaggagttgtgagggtaaaagccgtgttttgtattatttcgcgatggtgccgttgagcccttcgtttgttgtttatttgtgattgtgcgttgtatgttgtgcctaatgcgagttggcttcgatttgtaatcatgttcttgccgtaggggactcctctttcgacaggtgacaatgcaacatttcacttatccggttgcgcccttaggcgatatctgtttagtaggttgtttgtgtagtgaggatcgcgtaccgtgagtgttgttggttttttggctgcacgcttgggcgacttctgcttggaagttgtctttgtagaagacttcgccccctgttggtggtgacgcgcgcttatgcttttgtccggctgcacccttaggcggctttttgctcggatgtgttgtgtctcgcacttattgtgcttctgtccggctgcacccttaggtgacttttgctcggacgtgttgtgtctcgcacttattgtgcttctgtccggc

SEQ ID NO: 180816 - DNA, 383 bp, Zea Mays
gcatgatagccggatcttcagccttctgtgtaggaggaatgggctcctttggttcagcagctgaagaagtctccccgccaaactcaggcaccacgaccggttcaatataacgtggccggtgggtaaggactttcaactttttgctcttcggcgcaggctcatctggagtggccgaagcagcagtcttggcggaagcagcagttttcctcttctttccccgcccccgcagtgggtagcagtagtcggggtaaacaaaaccaatggcatcaaaaactatattcaacctcttttttccccggcccccgaaggatgtggataatgcattatcttctgctttggaatacggcccaagcagttcatcacttgtagcttcgatacatttc

SEQ ID NO: 180817 - DNA, 371 bp, Zea Mays
gttctacagctagagctgagcgcgaaggagacgaaaccgaagctgcagaaactgttcctatctcggaagcaatgaggcgatctggtttggtgacatcgaaagacaccgctgctaccgaagcagaacaaacagatattgaagagactgattctgaaggtgatcacagtatcgcagtaccaagcaagcccagccacttggatttcggaaagtcaaccatctctaaggctgattttcctaagatggtgaagtcgggctactttagtgaagatgagaaaaaactgattcgttttggcggagaagagactaccccgaagccacagaaagatgaaatagtgattttcaagagtttcctcaaagctggtttgagattt

SEQ ID NO: 180818 - DNA, 570 bp, Zea Mays
gatgcaaaatccatatatgaccgcatgccgaggacgcgcgggccattaacgtgtcacggtctggatggctcgtaggtcataagtgctatgcgatctgatgggtttgtaggtcatgagtggggaagcggaccggccctcgcgttgtggcttggtgctaggcatggttaaatgcggtccttgctcgggtgaggtcagagaaagaaaggatgttggaaaagaggaaaaaggagaaattctaaggtatgtctcatatagttgggcaaagatcacaatatgcttgctctcaggttttgtgaccgttggcgcacaaaccagggtatgtttgcactggaccacttgggtctaacgtctacttcgacttcaacattcgactctagcggctaggcgtgctccaatgtttatcggactgatgccatcccaaaatggaaggtgtctatcaagatcttgatgatagcaggaccgttgaaggtccggtgacagcttgggaaggcagaatctgcccaacggctagattgtccataggggctataaatacgcccttccacacctccaataacaacaaggaaagcc

SEQ ID NO: 180819 - DNA, 674 bp, Zea Mays
ccttctcaaattgtctttagggtagagacataaaagctagagaaatttaaattacattgagtgtgtatgaaagttttttattgagcccctctattgcttcagtaaatgtgtctcgattctagtatagtgctattgactgtccgagcttcagactcttcacatgcgtcacgttgttgttaaacttggcggtgcccttttggttgttgattgtgataggaagttggagccatgagtggtggtggtggcagggcccatgcagctggggagtggcttgccagatctactgatactatcggctgttgattgcccacatacttaggaatgtatggggactagcacaaagcagtatgcaggacctgcttcagctgattctgccgtgcttaggcctcagctatttccttttgcttctgtatcatgacttggcatgccctagttgtatgctccttatcttcttcgcagaacaagcaaaacaactttcttggttgcaagctgaatctacctccgaagcttctacctcctctgcctcttgaggttggtcgcctaaaggagctttgttgtgttccttatgattgggagctgtgttgatgcccttgagtatgatttcccctgtcttcacttgagctaggattatgtatcgtcctgacatccatcgagtggaatcttcctccgaagcc

SEQ ID NO: 180820 - DNA, 520 bp, Zea Mays
tgtaggtacaaatctcttgtggccgcttcatcatagttaccttctgcatcaaacaccgcatcatcgggaacacgtggatgaggaggtggtggtagcggtgcttgttgttgtgtctccaacacaacaagtctctcgatgatctcggacaatcatcgatccagcctctcgtaagtcttgccaaggtccatgtcaatgaaggcatcatgcactgacttgtggaccgtctcctccatttgctccttcaggagcttgttgtttgcctcaagatcttggcggctaacacattcatcgaagtatgtagggatccttgcttcttcttcatcgcctgccatcgaaacacaaaaactggaaacaaacggtgaaggttatccctaataatttcactacacgctcctctcaggtggaccacatgaacacgctctattgtatcttaccaagctcttacaagtgtctgacgaaatacaaagcaaaggatggtacaatcggaggctggttcgtgatacttaccaagaggtagtga

SEQ ID NO: 180821 - DNA, 435 bp, Zea Mays
accatattgcaggtagtgttatttgtcttacatcttatctaatcttacaaagatgttcaccaagttatcattctccacgagcaggatatagggattatcagtatgtgtgatggtgtgtcgactagatgcaatgggttaccaatggcttctgatatgatgcttgtgcagcgatactggttggtggtggtttaatagcctagaattggttgttggactacacgtgttgtgatctcaatcgaactggtcattgccttttgttaatttaattgttttatttgttcttgttgcctctgttgcttgatccttttacggggtttattgcctagttgcaattgcaaggtggtcacacttatcttttttatgaagactttaggacctcttattattgtcacgatgaaatagaactcctctttatctaaaaaaggaaggttatat

SEQ ID NO: 180822 - DNA, 979 bp, Zea Mays
tgtgacttgccaattgattagacaatgaccaccactcgaattttttgggccatcacccatccaaagaaaacttcgccggatacgatcaatcctctgaatgacccatttttgcggtgggaacactgttaagtggtagataggttgagatgatagaaccgtctttactagggtttctctaccaacttttgataggagcttgcccttccaaccggctagtctagcaccaatcttatcaattagaggctgcacctcaatccgtcgaagttttctagtgtgtaaaggtagacccaagtattttccagggaaggtcgagatcctcccgggaaaaagatgaatgagtgagctgaccgtatctgattgacaacgaattggaaagatttccgtttttgctaggttaaacttgaggcctgagcaattagtgaaaattgtcaagagttgtcgtaaattttgcagctccgtatggtctggattggcaaaaattccagcatcatcagcataaagcgagcaacgcaaacgagctaatctgggtagcaccggctctaaaaaacctattcttgctgcttgctcaatcattttttggaggggatcaatggctaagatgaataacataggcgaaagtggatcgccttgccccagcccccgagcatgtttaaacttattgcttgtacgaccgttgactagaactctagacgatgatgtagccaagatggtcgcaacccaatccctccacttttggccaaaacccagggccttcaagacatctagaaggtaaggccagctcaaagagtcaaaagcttttgatatatccaatttaataaaaagagttgccttattgttcttgtgtagactacgaataacattctgcacgtaaaggaaattgtcatgaatgcagcgtttctttatgaaagcattttgtgaggtggatacgagcttatcaagcattggggccagacggtcagccaacaccttagtaataatt

SEQ ID NO: 180823 - DNA, 392 bp, Zea Mays
gattacttgatttagtttttgggaacttgcaaagtagttggatacaaacttttggaacaccaatttatgtcaccaggaggcatgctttagaatactaaataaattaactgaatactattatgaactgtcttggctaaaggaagaaacttggagatttgccaaggtgggctttggactgagcaattttgcatgtcatcgtagaatattgagtatgattcataagacaagtggcagtaatttggaaaggaatagctcatttataggttatctagcaaagtttgtcccagatcattttattgaatgactccatttctccccatcgtttcttaggctagcgatttctaaatgtttcctccaacaatttctcgacaccatatttgagggaaagtgag

SEQ ID NO: 180824 - DNA, 815 bp, Zea Mays
cttggggtatgggcagggatgaccggtccagcccagagctaggagagcaggcgaccgacgagcgaggcccaggggcgggggcaccaacacaaatcggtatctagagatccaggccgttggatcagaggcaggcggcggagatcgggcccctatgggttttaatgctttgggtggtgcagctctcgcccatggcggtgaggtcatcggagacgaggtgggctcaggttctagggggtctggggtcacccaagcggtccagggccgatgaaggggacccgacgaacacggtggtggggttttggccatgagaaggagactgggaatgggtgaacggtgaagggagtgctctgggcaggtcggtggtgctccggcgagcgattccggtcatggggaggggcgattgagcacaccaaggctgacatgggcttcggtagagagtttgggacatctagggccaaaacatgggcacggcgcggagctgcatcagtcgaacgctatggaggcaagacgtaaaattgaagccaatggagcgcggagtgtggttccttatcttgggatgacgctcataggggcttggcacgacgttgggagctctgatcggttcggcacgcgagcgtgcgacactggcgagcttaggcggcggtggttgtgtgcgaggagggctacgggcgagagaaatgagacaggagagagagggcaggtgtgtgcgaggctcaaaaggagctggggtcgtggggcacgacgtgggccggctctctcggcgtttgtgcgcgccgggcgggtggcggttgcagggaagaaggggctgacaagcg

SEQ ID NO: 180825 - DNA, 986 bp, Zea Mays
tcctcctctcgctgccggacctgcagaacctgtgcgagcccgtggagaaggtccgggccagcgtgaccgcgccgatggccaggccctcccacgccttggtctccttcgtgttggtcagctccatcgacggcctcgccgccctgggagcgccgctcgccgtcggagtcggagtcggagtcggaggggacaaggccaggttgctgtagccatccatctctcagcgcgctctctcctccacctctgttgctcggtcggttctggttaatggctatggaaggcctgcggctgggctggtatggctaatctggggagttgctcgctatgtgtagtaggttcgcaaatggagccggtgcgagcgaaactctcgagtgctctccgctccgcatgcacacagacacagccacagccatggacaatggagtaggtgaacgctgttggaagcatccaagatttggccagggaaatttgtttaactctctctgctcgtgtcgtctgatagacgatggccgtcagtttgttattggtggggtgggaagcaggcagagatgtctgttggacggtggaagcgattagctagctctattttatggcgacagcagagtgctcgccgttctgtagtcgccgagcacatggtgctggaggatttcattagttttctgctcatcgtgtctttgactccgggcagcggtgcagtcagtactcatcacatgcatgcgatggtgcgaagtgggaggtgacatggactactgctcgtgtcagagagcaggtgcgatgaacaaagccatgtggaatcacttgaaggcaaattatccatggatagatgagagaattccgaatgccaacactacagccttcaggttcagggcacgggagaattcaaataattactgatacgtacggttaaatacttgttaccggcgaattcttagtgcgtggaagctagctagccaccaatcctcgttccagcgtctcatctttgatttgtg

SEQ ID NO: 180826 - DNA, 321 bp, Zea Mays
tggggtagtgtaaagtttatatgcatacttcctgtatatagaggttgatgctatttatctaatgatagtggtaaggcttagctaatagtatgatttgtgtacggtgagttgcatccgttcacaattctctttctcacatgcttctcttcctttgattttggatatgccattaagtacaagaacaaacaccatttactgctcaaatagaaaacatcatctaactatcaaatttctgcttcaataaaattcacctacaacgtatatgtgttcactcgactgattatccagaagtcatgatgtttcggcgattttgaatttttg

SEQ ID NO: 180827 - DNA, 609 bp, Zea Mays
tggtgatggtggacatggggacgaacacggataccctcgtcccggcgtcgatgtagaggcgtgtgtggagataagagagtgtatttaaaaatatatcgggggaggttgaagggtcgttttgaaagctaatacacgacggaaagttgtttgaaaatttatcttgcttgcacggttgcttcaagtggttggtttatatatacttcacatcgaattacagacatgcatcaagttaattcttccctgtaaattataaagttagattcctagagacgatatgagttgtgacttttattccgagcagtcattttctatctactgcgtgataagagaggggcgtcgttgtagacgggtacgggtacggtactcatatgacagcacctacatttgtcggtgatgactgatgaagatctgactgagcaatgaactagttgtagtggtaatactcacatgacagtagtaatcagctgggtgattagcacacagctagctgtgcagttaatggccagccgagctatagcagcatcagatgatatagtatatgtataaaatattaccaactaccacgactgcgtatggaataaccggtggatccgacgacgaatcggctag

SEQ ID NO: 180828 - DNA, 458 bp, Zea Mays
gaattcacagaatcatcaaggtggcgccagtaacacgcaggctagaagcaaaaacgcaccagtccaacccaatggctatttcaagtgcggtgagctaggccactatgctaataactgcccaaagcgcaaccagtaggcacctcagaaaagcaataaccagagaaatgaccagaacacccccgctcgtggatctgcacagaaaaagactccgcagaaccagagtagaggaagggtcaatcacgtcaccgcagaatcaatgcatgaagatgctgacatagtgtatggtatgttccttattaactccatacctgcgtcagttttatttgactctggagcatcgcattcatttataactgagtcatttgtggaaaagcacaacatacctaagtacccccttaagaagatgttacatattagttcaccaggaggtaacatgaaggccacacactcatgccccc

SEQ ID NO: 180829 - DNA, 337 bp, Zea Mays
tcggatgccacctaaagctaggactagaggcgtccttctccaatccatgaactgtcaattggtctgcactgcaccaatgatgaggtcgaagcaaatcatgcatggtagttgctaagataagcggagcagagttggtgctgatggcgaacatctgggcccttttctcatcattagcggagtggggggaatctttcatcagttggatcgcacttgcattcttcacaagttcgtcaggtatttgacatgatatggaaagatcaacttaatatttagacgtatataattcagggaaccttttaggcaacttcacactcaactggctgttagctagttgttt

SEQ ID NO: 180830 - DNA, 487 bp, Zea Mays
cgaatacctaccccatgtgacgccatagtcaaatagagcgatgggaccatccactttcatcaactatgatgacgcatgctcgagaataacgaccgctgctcctccatgccgactactatgattcggacaactctggatgggacgtgcacatgtctaagcatggtctcaccctcgggagggaactccgtctcgcctgaagtcagccacatcctcaaagaaaactctgcctcgcccgagctcggcttcgaccaactgccccagcaacaactccccgtgaatcccacagggggccacttcgacaactatgctacctcctcctagtatgactgtacgccccaggcaggttcgacaaaggcctcagaagtaacctccgtctcgcccgagcctggcctcggcctagataacatcgaccaaaggacttcaccaactccttcgtgaaggttgccggcaacaggatggtacagaacccacgtcaagtctgctttgt

SEQ ID NO: 180831 - DNA, 461 bp, Zea Mays
atgatattgatgtatcaattaagcttcaaaattggctatttgcacttgaaggaactgaagtaggagattatttttctcatggatgtgatcatattagtagagaagaaaaatgttggcattcaaccttcaggagtctacatgtctctggcaagagcagtggccgacttaagttgggggcggatgacaggtgtcgccaagaaggcatttccagtggaacgctttatggtacaacatacatgattgtcatattgctgcatttcagcctggcattctctccttttgttgttccattttttgcagcgcacatctgtcacgttttctatggagccagctcctctaaattctagggtgcccggtgccgctggaaactgagtgaagccggcagccgtcgccaaggagtgtgccactgccactgcgtcatagtctctggtaagatcctcgtgtcctgatcgtcccggtgt

SEQ ID NO: 180832 - DNA, 669 bp, Zea Mays
ctccagtttcccagcaggatatgcagtttacagacacaggtacatgaattactgttaaggcaacaacatattcgtgtactattagaaagttgccccgatgaagctgatattgatccactggttcatacaaatataacgaaacagaacaaaacacctacaaccacagtggtaatgtttttcttattaattgtatttttcattctagggttgtattcatcgttttctttaaatagcatataatcattacaattttttcagggtaaacatggtgacggtggcaagaacatgccgaccaacacaaacgtcactcctaaagcaacaccacatatggaacctgacgcgccgatatttgatgcgactccgcaaatcaaggtatgagtacaccccctcgtggtttttatatattattagtagtagtttactaaatttctaatccatttataccatgattgttagtctactggcggcgtccaacaagcggcagaaacagacatgcccgacagtggtccatgctttgatcagactccatctgaacatgtcagctcagtaattttcattttcattgtagttgtcaaaactgttaacagattttgtacagtcatgcttcacagtctaactagtttatgcatcataaaatcagtgttatgcatatttacacatacatgtatg

SEQ ID NO: 180833 - DNA, 710 bp, Zea Mays
tggagagggtgctccatgcgagttgggatgattccggcgagtaatcccggccgcggggagaggcaatcggccgtgataaagcttgggctagctccggcagagaaagaggaaagctatgggccacaaccggggctcggggcgaggctaatttggctagacaccgcgtgggtgcggcaagcttgcacggccgagctccagcgagggcgaattggccatgatacaacagaattaaaggaaaccaagaacaacagtgagttcctcacctcgggacggtgctcggtaaggccgggcgtggctcctggcggcttggatggccgatatggtgggtgtgggtctccagcgggctctagcggtggcggcagagcgcgagagagagtgggcgttggcgaaatgaggcaggggagagagagcggttgcaggcggtgctcaaaagggagctgggcgcgtgggcaggcgacgtggccggagttctctgcatgcttgcacgctggtccatggtggtttgcggggaaggcgaagctgacaggggcccccacggcacatcgagagagagcgattgcgcgaagggaacgattcgcagcgttgacgggccaggcccgtggggcaaagagagagcacgggcgcgcgggagaaggaaactggcgtcgacagaccggctccaccgggcagggggagagggggagtgagagcgcgcgggagcgagctggcgc

SEQ ID NO: 180834 - DNA, 929 bp, Zea Mays
ggaaattctagaatttagaaaagagaagaaagaaaatactatgtggataaaaataagtatataaaaatatactattcctacactagaaatgagattgtacatttaactcaaagtgaaactcataacaagattcaaattcaaattagagattcaaatgaaaaggaaaataaaatcaaaaagaaaaaagaaaatataaaagaaaagatgaaggaaacctaattgggctagactatacaaattcggcccaagcgccatctccttctgcgcagcccatcccacaactcggcgccaacaactgggtcccgcgcgttagccactcccggtctttacgatctctgacacgcaggaccgccgcgacagcttctccacgcgcgcctctttcctcccctcttccattctcctgctcggggtcgagaacgggaccaattcacctccgccgcgcaccattaccaaggaagggatagatccgccgctgtctaattcgcgttagcgccgcgccaggggctttgcgctaggagggaaagcatcgtcgggtttttgggaaactgccaatttctttcgcagaggtggtgaaccgcggggtggcccgtaatttcacgtcgaaactcgacgtctgccgccgctcgtggtcggcttccattactccacggtagccggtaagaaaccctgcaaaccactcgtctagcatgtcccttcaattatccacgtccggttattagtttgggcactgggaaggagtttggttggtgctcaccggcgagagctaccatgggggctgggtttttctccatgtcgcgactcggaggaagacgatggccttttggtcgttggatccgacgttggcaatcgcgatcagatgataggatacccttcgcgtgattagatcgtggtcgtaggattcatgacgggcggccgtgattagatcacgg

SEQ ID NO: 180835 - DNA, 418 bp, Zea Mays
ccgtatatggcccagtgcaactgggccgacggaaccaggccaccaatatcagtaggcctccaattatgaattctccatatacacgtggtccatgtatgctggtccaggatatacttggcctccaaatttgtgcattacgattggaattctaggctttgtttcttccttccgtagttccgccaatctcgctagctgaaatgacgccgatctgggagtgcgccgccaccacaaacgctccatcgccagtcatcacgccatcgatgccgagctactatggggccgtgatctcgccgttgccgacgctttgaccgtttgccgcacctggacgttgcaaggtcgacgcaacaagccaatcgagactgcaggtatgtgatcaggaaacactccattgtttttttcctttgcttgcaaattgcaa

SEQ ID NO: 180836 - DNA, 688 bp, Zea Mays
gtgaagttgatgggcggggtattatttggggtggcgggggagttgtagtctttcttggtggggtagttgtgggtggtagtttggggaaaaataaggctagggttgttggatattttgatagttgggagcatagtggttgttatgtgtgttattgccttcgctagttggtttggaactaaccttgtcatactttccttagccttttttgtgattgggaaatccttggttcagtgcctaacatcctctccatggaagacacaatatgtgtccttcgctcctgactggatcccctaatgcagttgtggcctctaccagcatttcctcccttgctaggtgctagatatgatcttgggttcgagggggctttttgttgtggtgtcactgattggttatgctattgacatcgggttgccagcggtcatgttgatggcttttggtctatagccggttgctagtatgtggagtgtcatttggcttccattgtgtttcgagctttttgattgtgcaattttttgaagatttgatagagctcttggagcttgttgcgagggtccctggtgtaatgattgtagaggtgtcctactcaatgactattgatagcgtcatgaattgcaatacattcttcaactaatggtagttaggacttgagcagtaggaacttgttgtagtaatcgcaaagcctttcctt

SEQ ID NO: 180837 - DNA, 713 bp, Zea Mays
gacatgttgcatctgagtttttgtttttgcgggggcttttgctggtatattacatggctccgcctcgttaaaaacctcacccccgggaggaaaagagtgcgggccggaataacattgtttgctgaattacaagggtgtgtgggccctgatggttaaacaaaaaatttctggagattgtcaatgttcgaggtgtgctctaagtcttcatcggaaggcgttactagcctgtacgcgctgggggatgccttcgacttgacgatgaatggaccctcccatttcggctccagcttgccccgtgattctgtccgggtggtccggacgagtacaaggtctcctttgttgaactctcttgggacaaccacgttgtcacgccaggccttggtttaggcctgatatttgttgagggcctgtagggcgaggacgcggtctccgtcgatgagatctttggatgttggttcgtcgacatcgggaactcctgatgtgcttgttcggggcgacccatgctttatctcttgcggcgtcatggcctcggatccatacaatagacgaaatggtgtgaatccggttgctcggcattctatcgtgtttagggcccagaccactttaggtagttggtcggcccatttgtcctttttgtcgccgagaagttgtttcttgatggtagtgaaaatcttgccgttggcgcgctcgatgacgtcgttggattgcgggtg

SEQ ID NO: 180838 - DNA, 542 bp, Zea Mays
ctgttgctcaaaagttcattaacaaacaacagactgcctttatgaaagggagaagtatcatgtgcggggtgatgacccttcatgaaatcttgcatgagacaaaaaacaaaaagaggttgggatcattcttaagcttgatactgaaaaagcttatgacaaagtttgctgggaatttctattctactaactttataaaagagggttttgtgccaaatggattaattggatgaacagtgtgattgaaggagggattgttagagtaaaagttaataaccatttgggcaaatatatcagaagctataagggggtcagacaaggtgacccctgtctcctatcctctttaacttcgtagcagattgcctagctagaatgattcataaagctcaggagaatgatttgaatactagtctgtgtgatcacataatcccctctagtgtggctattttagccgatgataccattgtgtgcatcaaggacaacctggagaaagccagacatcttaagctgatgctttatctttatgagcttatgttaggcctgaa

SEQ ID NO: 180839 - DNA, 504 bp, Zea Mays
agatcctctcggagtatataaacagccacgccctcggcattgcagcagataagagaagaactgtgctccaagtcttgttggtgaccgcagagtgatggtgaagatgctggagttcggcgcctggtcgcgacctgcgctcggcgtcggtcggccctacctccatcggcggtgagaagtccccctccctctcccatgcagccggtgccagtgcgctgcctcctagggccggcgttgggtgtgttgagggatgtaggcagcaacgtaaggaaggtgatgatcttgtgaccattgatttcccaatcgacggccaagactagaagctggataaccttttgccggttaaatccatgtcgcagaaattatatcggacgatccataggcaatcaaacttcattgaatctgtgacgtagatcttggaatgaacggctctaggtgcgtaccgattcaaacccttcgcgatttaatctggtgtgtccggtgttgatcggacggccctgggatccc

SEQ ID NO: 180840 - DNA, 399 bp, Zea Mays
ctttgttcgctgacaggtgtcacatcgggccacatactgtgctatttccttcttcatccctctccaccaatacctggttttgaggtccaggtacatcttggtggttcctgggtggatagagtaagctgagttgtgggcttcatcaagcagggtctcccgtgcctttccaataggcacgcacagacggttcttgaaccagaggactccttgctcgtctgttcttaggtccagaagttgctctttgtgtgctctttccttaagcttggttgtttctgcgtcgaggcattgggccttgtatatgagatcttctaggtttggcttgacttccaggccaccgtcgtctcccagacatgcatttagctgagctgattctttcttccaatcttctaggacgtttgt

SEQ ID NO: 180841 - DNA, 654 bp, Zea Mays
acaaagtggtggaagcttagaggggaagcggtacaaacgtttaaggatagtatgctaggcaaggggccttgggaaggagaagatgcagacgacatgtggttaaagatggcaacatgtgttcggaaggtggcttcagaagtgtttggtgtgagtagaggcaaacaggaagcgaaagacacctggtggtggaacgacgaggtgcaaagggttattaaggaaaatgagtgtttcaagtgcctccaccttgacaagagtgcaaccaacatcgagggctataaaatagcaaagagggttgcaagtgagctgtgagtgtagcaaatggacagacgtatgatgacctttatcaggtgctagacacgaaggagggagagaaggacatgtttaggatggctaggacccaggagaggaagacaatggacatcaaccaaatcaaatgcatcaaggatgagacaaatcaacttctggtgaaggataatgagatcaaggacatatggcgagagtatttcgacaagttgtttaatggggagaatgaaggttctatccttgagttggacgactcatttgatgatagcaactgacactgtgtgaggagaattcaggaggtggagatcgtgaatgctttgaagaggataaagggagataaaggaatgggtc

SEQ ID NO: 180842 - DNA, 616 bp, Zea Mays
caaccatacctgcttcatccgccgctcgttgacgcatggaccgagggaaaaatgggcgcccgcaatcgccgcgtgtgcacagggtcgctgcaggtgggcccagatcgtccgtgaccgactcaaccacgttgccgccaatggtggaggtgcagcgagatctcggacgtcgtggcacccataagactcgggctgcgtggcatttcgttgtgcactaactcaagctcgtagacctccacaaccccgtagcgccattgtactccctgtccacatcaaaccggtcgaaggtgaggaccgccgctcgcaccaccgcagatccacgcttttgttgtcaatccgtgccttggtgcgtgtcgtcgtcctgcgatgtgaggcggtgaagccatccaaggcgctaccgggcaggatcgccgaccatcccgcctccaatttctcgccgacgaccacgaaccgcagctcaccgaggccagtccagacgaccccacggttcacggtaaatcatcctccaacggttttactacagtggtggcaagcgatttaacctagtatcatcgaaatagatcacgggagaccccgattgagcaattctcccgcgttgcgccaccatggcagcccagtc

SEQ ID NO: 180843 - DNA, 943 bp, Zea Mays
ggagacttgagccttaggaactctcccattctgttttgaggtcttcctccaatcgggcgctggttttcgaggcttctagtgaggacctcaatgagtcgggtttggttggctagaacttgggctaggtctaatggaagcttcggaggtgcggggaggtgagtctcactcccttctccgctgatttctccttcggcacctaggggaggcccttgctccaatccctgaggtggtaggcatggttttatccgaggccatctgccagaggggagaaaggattactactatgcatatgccatattttttttctcaaacatgttattttattcagcactccagttcattacaagcatacagtcaccacagatcacactacgcatgagcgttttctaaggtgtccccaaactctctgagaagatcatcaaggctagccagggacacttcctcaacatcagaaaagttctctatccctaggggaggtagtgttggcggggcttcctccttcgggtcagtctagcatcttggttcttggaacgctttcggatcttcttgattaggggcaagcttctttaacctcttagcatagttcatcttcagggtttggtttgcctcacgagtgttggcttctttgccttctgccatctcgagactgtcttgaagagccgccttttcttccttcaattccttgatttgttgctctaggctttccacccaggaatttaggtgggtgcagtgggagaaaaggtcgtcatagtggttgtcaagggtgtggagatattcggccatgtagactatggtagggtcatcttcattaggatctctccctaacaaggcctggagtcttttcctcaaaggaggagtatttttgttgctaggtggaaagtagtgaaggggtgtctcagagacttctctgctgtagttttggcatagctggcggagggctttc

SEQ ID NO: 180844 - DNA, 742 bp, Zea Mays
gtagttcttgtgcaggagatccaaatgctttagcaccacccattcaataagaatagaagttattaaggcctttccgctccatctgaaggatagccctagtactggaatttcggaagatccactgtctttgatctctactagcgtatcaattggacaattcagttgtatacagagcagttttagcagaaacaacagactgtgaacaatagataaccaaggaggtttctgttgggtgccatgcaactcaaactcaaaccagaggttcagttgaaatgcactccaaggaggtttctgttgggtgccatgcagctcaaactcaaaccaaaggttcagttgaaatgcactttctgccaactcaaactgatgcttccagcatttagagatttgatccctatgaaaacaatccaccatgcatctacttctctgaatgtacatttgcccagcaactacaggagtatgtgcacattttagactcattgccatcgccagcatgatttttgatagtttagcatacatgtatttgaaattttgttttaatgggggtggccatggagacttcaagagacagatgtaatactggcaatctctaatataggtcgattcatcaaatccaaaagcaactatagactgatggcaatatagggatggccatgaccttggccgaagctcaccacttgcatgaacaatcttaactggcgtaggccacgatagccacagaataaatgtcctctctaggccactt

SEQ ID NO: 180845 - DNA, 638 bp, Zea Mays
cagttgttactatccttgttgcctttaccttaatttcttcaattcaatgcgcgaaaatggcaacttgatataaatgcgtggtgggaaagacaagtttgaggggcggtgccccagcgatctgaggagccgcatgccatcgattttgactaatcaatccgtgttcgcgttcgctttataacatttattttttatgtgtggaccaaaaaaatcccccgacatggttggggattgcggccatccatatatcggatggcctacattggtatcttgctgctattctcgattttttgttatgagatggtttgctcaaagtctcctgttgcatctggaattttttgtttgtgtaatgaaaaatgatgtctgatgtattgaacaactaggatgtcttttgtcagcgaaagtattgatttgttctgcttgctggcttgctttgtgaggttattgcaaattggaaagtgtattttggcttcaaactttagtgttgttttcattcaaatgtatggccataccaattagatagacctggggcaaagaaaggtcgtttgcttgtagcctattctttgtttttcgtctgttctgtcacagaactatgtatggaaatccatcttctgtgtccctaattcctaacgtcaattgga

SEQ ID NO: 180846 - DNA, 579 bp, Zea Mays
gaattatccatctcatgatcttgaattagctgctgtggtctttgctctaaaatcgtggaggcattatctttatggcgagtcttgtgacatttacaccgatcataaaagtctcaaatatattttcactcagaaggagctgaatttgaggcagcgacggtggcttgaattgattaaggattatgatttgaccattcattatcacccagggaagacaaatgtggtggctgatgcccttagcaggtccggggttccaaaagtggccttgcctttgatcgctgatctggaccgtttggggatagctttgtgctatgtcggcaccgctagtgaggagactcggatgtttattcaatcctccctcatggagagagtgtgtgcagctcagcagcaggatcgattattgtaggaagctcgaaagagggttggcaatggtaaacctcgggagtttaccattgatgagaatggtttggttcgtttcaggggtcgtctttgtgtgcctcagaaatcagaggtgaagatggatatcttgagagaagctcataaaacgccttacaccgttcaccctggcgaaaccaaaatgta

SEQ ID NO: 180847 - DNA, 824 bp, Zea Mays
atattctcattatttgaatatgcacaacgaaaaggaaactatatagtctcacaaggtttcataaattctcaaacactaaaaataattatatttttttttctgatacaaaatttgggctttacaaaaccccttttcggcccctgccgagcaagtcttcgaggcagagcatacgaccaagtcccctgtcgagcaagcctgcaaggcggagcagggcagacaaccaagtcccctgcccagcaagcctgcaaggcggagcagggcagacaaccaagtcccctgccgagcaagcctgcaaggcggagcagggcagacaaccaagtcccccaccgagcaagcctgcaagacgcatcgaacgaccaagtcccctgcaaaacaagcctacgaggcagagcggacgaccaagtcccccgccgagcaagtcaacataagcatacatagcaaggcacgtcgccaggggccacacctacacaccccatccttacaataatcataccgcactatctgatgggacggagcagccctgatcataggcaacctcggcaccggggcctccacagtagctggtatatcagaagctacgagacgaggcgccataccaattgggcgaattcacgcgctgataggtgacgaagggctcatgacgactgaagaagccacgccacgtacgaccgcatcgtgagactgatccgtgggatccaccgcgcaccactacaaagacgtcagtaaaggacttgctacaagagccagagtaggagacgatgccataccaggagtacgaccacgcacgaccttatggaggatcggccacgacaacatggggaacc

SEQ ID NO: 180848 - DNA, 981 bp, Zea Mays
acaaaccagggacctatgcgctaaaacagaggacggcaggttgatttcctaaaaccagggggtttcttaagcaaaacagccacgcgaaggggtatcgggctcctcaaccgttggatcagaaaacgacggctgagattagatcgcgcgagagggagagggcaccacagcgaactcaatggcggggaaaaggccatgattccacgggcagagaagggagaacggcggtgagaaggtctcaggcgggccggaggaactccggtgagccattccggccatagggaggggtcctaaggcgcgctaaggtctgcgctagcttcagcagaggcaggggtgacacagggacctactccggtgaactagatcgggctaaatcggccaaccaccgcgcgagcacggcggaccgccacggccgagcaccggcgaaggtgcaattggtcgagcacatggcgctataagggaaattgggcacggggacgggtgtctcacctcggggcggatctcggggaggcttggagcggtctccggcgagctggatggctgggaacacgggcgcaggtcttcggcggcggctggcagcgtgggtagagcgcgagagagggtgaagctgagcgaaatgaggtgaggggtgtgcgcggggcactggcggggctctaagaagggagctgggcgcgtgggcggcgtcgtggccgagaaacccggcgacgtgcgcgagtgcgcacccgccggtccacggcgagagcggggaaggcggaactcacaaggcaggcccacggcgcagagagagaaaaggggacgcgcggggcaacggctcggcgactggcgatccgggcccgcgagacagagagagagagcacgcgggtgaaggaaacttgcgccgacagatcggccccactgggcagcgagcgagagagggagggcgcgcgcgagggagaactgccgctgacaggtggggtccgcctgttaggcggcgcgggcgcgcgg

SEQ ID NO: 180849 - DNA, 518 bp, Zea Mays
attggggtgtgtggttggccaatgatcttcgtagtgccctagggagtgagattggcgccgctgcagaaccaatcgggtcgcaaatccagtggatttcctcactggtgtgggcagaacgtggcaaactcgcccattgccgtgggtggagcgctcttctgtcgaatccccaatgatgtacctcttgagccttctgtaatcgctttctcattattttggaaccatcgtatgcgtgctgttgtgcctcactggtattccggctgtggaccgaccatggcgccgccgctagggaccggttcaccgtcgtgggcgcggtcggagggggagatggacctcgtccgctggatcctagccaacggtcgcgattagatagtaggtataccgcttcgagcgggggaaatcgtggccgttgatctctgcatcaacggattagattagatcttcaaataactcttcgaccttttaaatccgcttcgtcggtctgttatcctgcggtcctggtgccataccggctcatcacc

SEQ ID NO: 180850 - DNA, 332 bp, Zea Mays
tgtgaagtttcagatagattgttcaagtcaccggagcacggcatggacttcagccctcaaagaaagagcggcgaacgcgatcccgtcagcttcgtcgaacacgatgacagtgatgacgacttcggagctgaatccaccgcctctaataagccgtctgcgcattcgcacgacaggaccaaatccaagcccaagacgagccatggcagttcaacccacgcgacgacggcgacgccgttgcctccccaaagtagctccgagccaacagcggcgactgcgacggcgacggcgggcaacaatgccgacgccaacagcgtggacagcggcggcccgag

SEQ ID NO: 180851 - DNA, 374 bp, Zea Mays
gaagaatagcttgggccgttggattgtattcaacggtcacgattagatctcagagtaattatgtttgcgccgttggatctacatctaacggttatagagggatcaagggaatagccttcacgtgtttaatactgtccgtaagatcttgatcgggcgactcacgataggaataggatggcgctaaatctagaccgcaggatcggaatcggatggatccggcttcataccgattcataaccacgttgctctaatcctagccgctgatgtttgatcgtgtggtccatggtggatgataccccttcaccgttgtaaattcacaaaagagaccctgtagttttaaggaatcaacccgctgtccatcctgctgtcagcct

SEQ ID NO: 180852 - DNA, 500 bp, Zea Mays
aggagctgtaccggacgcagacggcgtggaaggtggcggacgcccagctccgtgaggagctgcgcatcgcggtgtcggagcggctgatcccggcgtaccgggcgttcctcgggcagggcacccggcacccggcgagacacgtcaagtggagcctcgacgacctcgagtgctacatgctggacttcttcgaaggcgtgcagaagtttgtcaggtggtgatcaccggagcagaggatcatcaattcaccaatcagcatccatggcgagtttgggacgtgcgtgcatcgtgaactcgtggcgtatgcgctccaatctcatggcacttacgatgccgtagaatctcgtttctcctctcttctaggaaatccttttttttacactgagatagatgtagatatgcatcaaattcaggagtgtgtatataccatactctgtttttttggcttgttcatgatttagatgtggttgttatttagcttattaaacaatgaatcatcttca

SEQ ID NO: 180853 - DNA, 438 bp, Zea Mays
aatcaactttagaaaacacgatagcaccactcaattcatcaagcatatcatctaaacatggaatagggtgtcgataccgtatggtgatattattaatagctctacaatcaacacacatacgccatgttccatcttttttaggcaataaaataaccggaacaacacacggactaagagactcacgcacgtaacctttgtcgagtagttcttgcacttgtcactgaatttcttttgtttcctccggatttgtcctatatggcgcacgatttggcaaagatgcaccaggaataagatcaatttggtgctcaatccctcgtataggtggcagcccctctggtatctcacttggaaatacatcagaatactccagcaaaattttagcaacaacaggaggcaaagaatgttgcatatcttgaattgaaatcaaagcatccttgc

SEQ ID NO: 180854 - DNA, 1687 bp, Zea Mays
attttacaagtttctagaattgtttttgtattaaaaatgaaattctgtaattatttctctgtttttaaacatctctggactggggctcaattcctgataaattcaagggtctctgcgcaagataacctagactcagggaatagttcctctggacggcgggttggtttcaaagtttggcggggtttcttttgtaaaacgtacccgcgaaggggtatcggtggagatgagccattggatcccaaaccaccgggcgagattaaatcgtgcaccagatgatacggtaagttatatatgcctttggattactatcctacgacccacgggacaccatactacgatcagatctgatccgtccatcggtcaatcaacgatctggatgtaatataacgaatcggtatttaactgcatcccccaccatccgatccaaaacacacgactcctggcgcatcattccaacatctaatctggaccaaccctatgcgatccaacggtggacccgattcttcctccccgatgcgcccaggcggcggcggagcggccacagagacggtgatctcaccggagatacccgatttggcgccaccatgcatgtttcccccaaccaaatttgtgcaaaagcagtcctgaatcacggcgaggatcgtggaaggttactcaccggcctagctgctgcgaaggcgcacgcccacgggagatggcggcacagccccaaatcttgatttccgatgaggaattcggcttcgccttgccccccaatcgcgcccggaatgaccctatgcaccatcagtgtgtctccccgaggcgcgacagcccagattcgaggcctcaactgtgacgcaacctcgggttgacggcaatggctcccatgacccgcggcggtgcccttctcccccgatttcggtggcaacccaggcgttgttgcgatggcggcgcacggaacggtgaggaggtcatcacggaatctgccagacccaaggttgtagtcctgacggcggcaaattagagattcccccgcggcggcgtttgcgtggatcgatggcggctgtaggaagagtggatgcgaaaacagagggtgagaggagaagtgagctatgctttttgaagccagcggcgagtcagacgcgagcggcgaaattccagggcgaccgtgcgtgcggtgcgagaatcgcccagtggcgtgcccgccatgctcgccgtggatcttgcgtcccccctgttgacggaccgcaccaagtaatgacagacgggccccatgcgcagtgagggagagcaatcaccagcgcgcccccagctcattttcagcgaagtattgaggagacgcgcggcgagtgaccgaccggtggggtcccagatgacggcaccgcgagctaggatgggccgccctaacgacttgggcccgccggtcagtataagagaggaatctcccagtgcgactgcgcagtgggaccacggtgtcggcgccattttcctggacttgggccgaattgcgcgaaggaggtaaggtggggtgggccgaaattgtagctgaagcccaggtaagtgatctttccctttttcttttgttttttttattttctgtttttcttattcataattatttttaataaattttgaatttgaatatgagttttaccttgagtcaagtatacaaattcaaacttctagtggaggaataatatatttttac

SEQ ID NO: 180855 - DNA, 673 bp, Zea Mays
ggttagcgggcactcgggcatccgtggggcgttctagagctgcgtcgagatccctgaaaacctcggcggccactaatttcactgtgggtgtcgctgcgccagagcaattgctcgtcggagctctgctcccccgtagatccgtgtcggtgcatgggcgcacattatcttcacttcgactccggtaagaatcctacttacgcgttcgtaatgatctctgccttgttttcgggtcgaaggggggtctcattagtgtgccagggtacgaaattggctcatcccgtcaatagcgccgccgggggagcttcattccaccgccggagtctgacgggctggggcaaacagatcgcgggcgtcgatttgtagatggacggttgtcatcattaaggcgtgtaccgattcatggtaaggttttgtgtccgatggatgtcaatcggatggtctagattggatcaggcatattttaaatcataacccttggtcattgatccgatagaccggatcgcgtaccgcttcgtgatatgatagatctaatcgtgtccgttggatttagatctgacggccagaatggcgctataccccttcgcgggacagattttcacatgagaccttctgtttttaggaaatgaacctgcagtccgtagttactgtggattgagtctaggaaatattgcgc

SEQ ID NO: 180856 - DNA, 465 bp, Zea Mays
caagcaccaaactagccacaagcacaaccaactttgaacctgggctggttatatgggcaaggcaagcagataagcttgcatttattaataggtatgcaacagtccagctgatatttcctacaacaaaaacttgacctctagaacccttgttgcccattttattccctcaaataaccagcaaacaaactttaatgcccccaacacacaaatatcacttggtccaaatctataagtagtagacaaaatcacaaaatagatatgatctcttctgttcacagctcccaaacagtacaaaactagatattttggagcagagttgaggtcaccaaatccctggttttgtaccccatccatatcccaactcgagcacaccagtggagtacatcaaagggagaaaaaccttcttcagtttcctatcccaaacactgaatcaacttccctggcatcagtgtcccattgcacagc

SEQ ID NO: 180857 - DNA, 766 bp, Zea Mays
tatcggggtggaagtggagctaaaggttacagagtgaagtcctagctaagttttggcttagcggcggggctccgacctctggtcctcgtcgatgcgtcctcctcctattcatcggttcatttgggtgtcttctcatctggggtccgtcagtgtgtgtgcatacgttcgtttaagggccaaccccttccttttataggcagaggaagggggtcggctagcagtggcttcctcaggaaggagccaccgggtagaggtaaaaccaaacattctacctcgggtgaagcaacgcgtgctcatgggcccaaggtcacctggttgtcccgtattctttatgacaaacgcgagtaatgtggggatcgagcgtcatcattttgggctataccgacccctgacattttgtagcctggggctcggtgcttttgtcatgttgcgcccttccagcggtatgtgcactctggcctagtccgataaatcatgagtgcgccgcaggccgtaggtgtgtggtccgtaaatgtgacgtagttctagggattagtaggtcataagtgggaggtggaccagtgccaccaccgtggctcgttgccatacgtagttaatacggccggtcacttatgatagatcggtttcgagccatgcgcgggatcactcgagtggtttcccttcggtgtgccctacccctgtcaggttctgccatgcccgaccccgggctcggtgccgtggggtttgtccgggggtggatgcctcaaggttagatgttacctatctc

SEQ ID NO: 180858 - DNA, 834 bp, Zea Mays
attttctctgattttcgagttgtctggactgggcctcattttctggaaagtacaggggctaagacataaaactctcccagacacagctctatgccacagtggaccgcgggttgattcgctaaaaagtgaggggctcttttacaatttcggctcgacgaaggggtatggtgcgatctaagtcgttggatcgtaagccaagcgcccagattagattcatgagtcaatgaaccggtataacacgccatacgttggattggagatctacggtcagtatcataaggacacgtgttctaatccaagacgctagatctcaatcgaacgctccaccgcccttcctcccaatcggtatgccattttctaatctgaaccgttgtccacggatccgacggccacagacccatcttcccaaaccgagcacggtcgaagacacgcatcacgatggcagcggcgccgctgaccgcgaatctcgagcatcgccggggagccctaaacctaacccgatcttgtgtgaaatgaagagtaagaggtgatgaatatggaagtggtagttataccgctgattaggctcccagatgatccgtccacgacgtatgacggaaatccaaaatttgttgacgacggcgataaattgtggcgaagctggccgtcgatcgcgatcggcacggcctcaacccttcccctccgagtctggtggaggtcccggataccaccgacggcgaaagcaatggccaaattgaagctccctcctgcggtggcactttcccctcactaccctctcggtcgtactcacgttgctaggttgccggaaaggaggaggagaggtggagatgtggc

SEQ ID NO: 180859 - DNA, 542 bp, Zea Mays
gcgatggcgccgccgtgcctgccgtcgggctggcaccggtgggggagagagagaaataagggaagaagagaggcctcgggccattggatagttaacggacggttgagattaggcgtctagagaccccttcaccagttcggatccggtccgttggatcgtgatctggcggccacccgcgaataccagttcgcttataagtttgaactaatcatggccgctgttggttgatcggatggctgcagtcgcttgatacccctttggctggggaaatatgcataagggcccctgtggttttattcaatcaacctgcggtcctacctggtcttaagaaccatcacagctaggtcctgaaaacttgcttgcgaccccttgagcttcgctggaattgtggcagcggcccagaaattaaatagaatagataaaattgatgaagaaaatgattttaggataaaaataattccctcaacttcggaaaatcatatctcctttgttttaactccaatttgatccattcgaattgtgttggcttcgtaaaaatattt

SEQ ID NO: 180860 - DNA, 571 bp, Zea Mays
tagcagaagtcactcggccggggtcatatcgtctaactcagatggacggcacagaaattgggaactcctggaatatagaacacctcaggaagttttacccctagctgaatttcaaaagctatcgggatgacaatgtactctgtaaaacgggagatatgtcatcaataaagaaggcttcaaagatactcaatttgttcatgattgattagcactcttacttaactcggggtgaccactatgccctgctaacggagcaatcggcttaagtcggcaaagacttaagacggtgcaacatgctcacacttgcttaactcggggtgaccactatgccctgctaacggagcaatcggcttaaatcggcaaagacttaagacggcgcaacatgttcacgcttacttaactcggggtgaccactatgccctgctaacggagcaatcggcttaagtcggcaaagacttaagacggtgcaacatgctcacgcttacttaactcggggtgaccactatgccctgctaacagagcaatcggcttaagtcggcaaagacttaagacggtgcaacatgctcacgct

SEQ ID NO: 180861 - DNA, 727 bp, Zea Mays
agcttggtagagtaaattgagatttgtgcttattattcctggtgattggcatgacctagatggttcaatggaaatcaagagtgtggtgatcatcgatagagtttaggtgacctagcttgggacgtgtacatgattgtgagcagttcaccatgctagagagacaaagaaccatctcatatagagcatttgatccttgcatagattaagggggagcgacactcttgcatggatgctccaatgaggattagtttgtggtattgactcttttagaacttagcaaaacactaaggcgccttctaatccttgctttactatacacatttacatttgagaaatttacttcaaatatttactttattagaaaatgttgtgctactatagggttggacattaggatgcaaaactctgacacacattaggcactgtggtaaacttgggcctacaattaggacttgatttcaggaagatttttagagaagtccaaatcaaccttccacacatgggcgtcatagttctttcaattggtttcaaagacttgtgcttagtagtttagcttaaactctttgagttacaatgtttgactaggatggacctcatcctatcatttaggtctcgacggctattattaaggatatatattaggggtacccaagacactccaacaatgaatgcattgactattgggactgagtaatttggacttggtcaagggtctcagactcggact

SEQ ID NO: 180862 - DNA, 738 bp, Zea Mays
cttttccgggttcagcttcgtgcgtgttgctcgcagcttgtcgaagaccagggttaagtcttccactagggttgaccctctctttgtcttgaccacgatgtcatcaacgtatacctctaccttgtccctaatcaggtcaccaaaggtcttactcattgcccgtacgaatgttggcaaggcatttttcagaccgtaaggcattacaacataacagtaaagaccatccaccgttacaaaagcggtatgcttcctatcttgcctagacatctgaatctgatggaaaccagagtaagcatctaggaaggtcagcaggtcgcacccggaggtagaatccacgatttgatctattcgcggaagtggatatggatccttgggacaggctttgttgaggttggtgtagtcgatgcacatccgaagcttcccgttagccttgggaacgatgactggattggccagccacactgggtgatggacctcttcaatgaagccagcgtgcagcagtttccggacctcctcacggatgaagttctgccgctcgatggactgctttcgaggcttctgactcaccggtttggcgtcagggtggatcttcagatggtgctcaatcacctccctggggatcccaggcatctgcgacggttcccaagcgaacacgtcaacatttgcctggaggaaggtgacgagcgcaatttcctatttctcctccagatcacccgcgatgcgagtggtctgggacga

SEQ ID NO: 180863 - DNA, 767 bp, Zea Mays
gtcaaggctgcgcctgatgcttcgagtcgtccttcttcttccattgctcctgcgaaagacattgctggcaaagacgtttcgatgcagtgatgtcatgtaaaacacttgatgtaatatgaatctatgtgcgtgtgatggttgtcttcaaacattttgtggacagggcactagaacatgcccctggtgctgacaagtaaaacgttctttttcctggagtgctaattgtcttgctgttagggtataacggtcaccctgaacaattgtgaaagtaaatgtgccatgctggttttaaggcgttttacaacttaagccgatcgcctggctggtagggcatagtggtcgccataagataagtagacgtgatcataacgcaccgacttaagtcattgccgatttgagctgattgctccgttagtagggtatagtggtcaccctaaaccgagttagcgtgagcatgttgcaccgtcttaagttgtcaccgacttaactcgattgctccgttagtagggtatagtggtcaccctaagccgagttagcgtgagcatgttgcaccatcttaagtcgtcaccgacttaagccgattgcttcgttagtagggtatagtggtcaccctaagccgagttagcgtgagcatgttgcatcgtcttaagtcgtcaccgacttaagccgattgctccattagtagggtatagtggtcaccctaagccgagttagcgtgagcatgttgcaccgtcttaagtcgtcaccgacttaagccgattgctccg

SEQ ID NO: 180864 - DNA, 810 bp, Zea Mays
cggaaatacttaagtggtcaaatttaatatagttttcatgctaaaacagagtcattaagtgctaaacaatattaatacaaaattatagaaattggaacgggtcaaaaacgagttaaaatgaattttctatgatttacacaagttctagtattttatttttgcattaaaaataaattcctatttcatttttcctgattttctaatttcctggactgggcgtcaattataggaaagcgcaggggcctcagtgaaaaagagtacaaggctcaggctatcactggactggaccgcgggttaatttataacaataacagggactcttaagcaaaacgtccacggcgaaggggtatggtggcatcttgaccatgggatttgatatggagggctcggattaaatctgcataagcgctgaaccggtacacgatcgtggtcgtcggattcgcgatcaatggctatgcttttaagatgatgcgatatactctggatcaccggatccaaatctaacggcctgagttcaatccaggtgaaggggtacacggttctaatcttgatcgttcaatctaaatctggcggctgcaacatcatcaaccctagatcaaatcttggcccttggtttgcgatgaacggttaggagtgcttctcccacctcgcaaccacggctgagcagaggcgccccgcgcggcagcggcattctcgccgccgacctcccgcccggcgcacggtccatcaattgactaaagcaaagagtgctacacctagaggatgacctagagaacaggaatacgggtgcctcaccggcgattgaagagg

SEQ ID NO: 180865 - DNA, 774 bp, Zea Mays
atcgatagtagaaataagatggcatgttaagatggaatatatgtgaatgcttctatttatctgcttttaccacacactgcactagatccgggcataaaacctgagtccaaagctctaaacccaaaatacccgaactcatttagcctgaagcccgttactcgaacagaaccagcaagataacgaactgaatacccgatctaagttcggtctaatcgggtattaacccacggtacccgaagtacctattctacccaaaatacctagcatcgtccaggcaccaggccgagcgctaggccacagcgacacagcccacgagccacggcccagttagccaactacgaaacttggcaaccctagctctggatagctgtggctctctccttgtccttgtccagcggcggctgtggctctctccctatctccactctccagcagcggctgcggctctctccctgtctccactatcccgcgcaaggagcaagccaggcagtcacggagggcgccgtccgcagagccggagccggagacggcggcagcggcagccccatcgtcatcaccaaaagctagtctggcttcggttttgcagaaaggactgcctacctactatttgtgttgctatctgctactctacacgtatggaactatggactatgaagaacgaaattgtttcactatcactgtttcactgcatctggtgtctggtcgagtgttttgaatataactatcactgtttcattgcctgctactctctgttatgtgttatgtgtgagagtg

SEQ ID NO: 180866 - DNA, 428 bp, Zea Mays
gtgaggccgatgactacatgcacaaagaaaaagaaaagtttaagaccttgaaggaattgtataaaaacctccaagtgtattttgaggagctcaagacctctcacaacaatctaaaatagaattgtgagaagcttgtggaagctcaaaactcatctatcgtgcatgaagttgtggtggtcaccgaggatgttggagtcacttttgacttacttgatagtcctacaagtggaccacaacctactaactctatttgtaataattgcaaaatttctcttgtgaatgataatattgctcgtgatgaatcacaaatcattgttgagaatgaagtattagtagagagagtgaatgctctaacccatgatctagagaaggcatatggtggaaaggctaaattggatttcatattgggaagtcaacggtgctcactt

SEQ ID NO: 180867 - DNA, 456 bp, Zea Mays
taggtttaccaatgattgatcaggctcataatccactaattaatagttttaaatttaaaaatgcccaactgagtgtaccaacagatattttaaaaatcactggcataaatatttaattcagataacaaatatgaagcatattatagacataatcaacacccgaagagattaaaaacagcatgtcatgtttctgaagttgcaagcattggaaaatcatgttgattttccaaggagatatctcaaatatgtcgaattttctcatccccactgtcattttcctaacatcaatacaacccgaaggggcgaggatggctgacggcagcaaatgaatctaatgttacttgaacccttcatacatcaatgcatctggtgcggaaggggcgaggatggctgacggcagcaaatgcgaacgcggggatccgaaagcaagggtagaatgatcactccggaagcaaa

SEQ ID NO: 180868 - DNA, 669 bp, Zea Mays
acgcatgctaatcgagctcggcgaggccacgagcaccatcccggtgacgagctggagctcctagacccgacaccagaaccctgcagatggtgtacgcacgagtccatagtggcggctttcccctaattttctctctccaactcacagctccgaaggggaagagaagaggcaagaaggttgctggttcgcccagccagttcatgggagaggtgcggtgtttggagaaaataaatgggcacgagaaaagggcacagggcgcaacggccaccggatttgggcgctgcggagatcctcccccaggttgagtccgcaatgcccgtggcgaaacggcaaccgcgctagtccccaatcttcggctcatccagcggcgagcacaagtaggaaggggttgactggtttcccccgggtccgacggcttgagggacggatccgtcaacgtggtgggagcgacaaacgtagaagcgagcatcacggcatcgagttgttacagggaggaagaaagatctggttccttggggccatctgccagcgccagcggagcaaataccaagcgcgtgcggctgagacagacacgtggggcccgtaggtcagcactactctcaccaactgggctggtctagcgcctgggatagatgggccaggtaggttttggcccattccgggtctagc

SEQ ID NO: 180869 - DNA, 804 bp, Zea Mays
gccggagaaatgtaatcagtttttagacataaagggacatgatcagaaaaggatctactcagaccagtaacaatcaaattattataatgcagatcccaatcaggactagcaagaaacctgtctaacttctcaaagtaggaggattacgattattcaaccaggtaaaatgacgaccactaagatccaactcaatcaaatcatgaacatcaataatagaattaaaaagagagctccacttgttagtccccccgggtttgttcttatccgattcctttctgagaatattaaaatcaccgccaatcaataaagggtgagaacaattagaacaaaaagctgataactcactcaagaatttctgtttttgatcattttgagcagcaccataaacattaataaaattccaaataaaacctgaaactttatgaatcaccaataaccgaatcataaattcccccaactctttttctctaacatcaaacatgtccgaatcaaaaccaaccaacaaaccacctgacctaccattaggaggagaccaaacccaaacaaaatttctattaccactaataaaattcagccaagactcttcaaaatctttcttattggtttcttgaagaccaatgaagttaaccttctctttcatgataatatcacgaaggaactcacttttcacatttttaccgagcccctgacaattccaaatcacaccaatcattctgaacaaataagggcctggccatctgactggcctttcctcttaatagggattttcctattattaggagttttaccagccaagttactatt

SEQ ID NO: 180870 - DNA, 654 bp, Zea Mays
atttgaagaacacagtgtctatctttatggtcaatgatgtgcttgtgccagtcgctgacatcgcagatgcggtcgctcaaaaacttgaagtaaattatgattcgctaatcctgaggcaattggctcatggacatttcctgctcatgcttcccaccctccagtcagttgaccagctaacagtgagatggaacactattcgtgcatgcgccttctccctgcactgtaaaagatggtccaggttctttgggtcttcaggtgcaagtttgactatccctgtggaattcgagctaaatggcattccaagtcatgcctgggaactgtccactgtccgacacattttgaacccttttgcctgggtgcagaaggtacatgaggagactcttgagctcaagaatttggaggtctttcactgttatggttggtgttatgacctggcctcaatccctcagtctagagacctctggattactgattcgctgggaaatggaccaggcgttggaaggctatctcttgcctatcatgttcagattaaagtgttggaaggacaacgtgttgtcctagatcccatccaggtcccaacagatatggatggttctgcacggcaggggcggcgtttccgttcgcgttcgccaccaggggaccgtgatggtagaa

SEQ ID NO: 180871 - DNA, 424 bp, Zea Mays
gtaaaatttttggaggaacaggtgcttctagatcctcaagtgcatcaggttcttcaggtagtagtggacctggtgtgggtatttgtgagctaactgtttaccttgacagtggcaatgtggctgtctatgaggatgattttgatatcttaaattggtggcatgagcataaactaccctatccaattctttctattatggctagagacattatgtttgttcctgcctctactacttcttcggagtctacttttagtttgtctggcaggattcttgaggatcgacgacggcgcttgaactcagagacaatggagatgttggtgtgcatcaaagattggaagctaggccaacagcgggcacaacatgttgtggtggacaatgaattagaggagtccttcaaggacctctggctagatgaagctgctgg

SEQ ID NO: 180872 - DNA, 555 bp, Zea Mays
attattatgccatcgaagcccagccatctggattttgggaaatcaactgtgtctgaagctgatatgactatgatgacgaagctaggctacttcaaggaagccgataaggggttggttcgctttggcggggaagagactatcccgaaaccggaaaatgatgaagtttttttaagagcttcaaagcagggttgagatttcctctgcacggaatgattgcagaagtcttggaaaaattcgggatttatcttcatcagctgacccccaacgccattgttaggctcatcgtgtacatctaggctctccgaagtcaaggggtagagccgctcgccgatgcattctgccgagtacatgaacttcattatcagacgaaggctatagaagacggattgcatgagaactttggctgctacaattttgccgaaggatatgaagacaccagtggtcagctatcgtactaaatggccgactggttggaaatctgaatggttttatgttaaaattgatgaagaaaaggagaagctagttcagagcccgatgaagctaatcttcgggctg

SEQ ID NO: 180873 - DNA, 347 bp, Zea Mays
aattaattggggctaacaacttcaacaaattatgccattcaactagttttaccgactaaggacggacaagttgaggatggctccacgtaatacatctgcaactaaagccattttatttaacttggaaagagcgaaggaagttgaggacaattgcgttgccatacgagttaggtgtggcgaagggaagagtggtggtatgccggagcgcctttactttgagctacgcataccagtaaggcagcctgcacgctgaagaatggcaaaaggaaaaagacggaaagctataaggtgaaagagagcaaggtgaattatagcctaaaaatgcacgctcgtcttgctcccctcct

SEQ ID NO: 180874 - DNA, 334 bp, Zea Mays
ctaaggatgtgcatggttgcctatatatggttgtgtgtattgtggttgattcttgagatataggcctgtgaatgacttgtgttgggttggtaggaataggatctgttggtgctgcacatcggacggacacagacctgcattactctgtcttgatgtaaagttgtaggtgtatgttaattcaatcagctgaaatcttaagtgcctctttttttgtctgcatttcgtacaccaatttacaggttgctatagtcagcttgctggaaatgtgtttcttctggccatgcgccatttaatatggttgtacatcagtacatgtctacttctcttttccaca

SEQ ID NO: 180875 - DNA, 624 bp, Zea Mays
gcggcttttgcgcggatagtcttttgaggaagacttcgattttgcgcacttgttgtgctaatccggctgcacccttaggcggcttttgcgcggagtgtcgcacgcgagggtagctagcgctgcccctcgcagtgactttgtattggtcgaatgtcgaagaccgttgatgcggtcttttttcgatgtagatttttgcgggggatatttcgcttgtatattacatggctccgcctcgttaaaaacctcaccccccgggagaaaaagagtgcgggccagaataaaatcgttttgcaaattacaagggcgagctggccctgaggagtcaaacaaaaaatttgcggagattatcaatgttccaagaatgctccaagtcctcgccggatggcgttgtgagcctgtacgcgctgggggacgcctttgtcttgacgatgaaagggccctcccacttgggctccagcttgccccgggctctgtccgagctgtccggacgagtacgaggtctccttcgctgaattccctcgggatgaccgtgtggtcgcgccatgcttttgtttgggcttggtatttgtttagagcctgtagagcgaagacgcggtctccgtcgatgaggtccttcgaagtggg

SEQ ID NO: 180876 - DNA, 864 bp, Zea Mays
gcactatatccctggtgctgacatgttcagccaccactctgaattctgctatagccagctgacatggtaaccctggcttcatgttgcacaagggtctggtcatcctgaaacttaaactcagtgggctcatgaacagtgtcttcagcttctctctctcttctttttatcggccttgatataaaaccactcactttttcagccagttggccacttggtgtgataactaaggaccggagccttcgtatccttgtgatacacgaagttataacaaccaaaattttcatgcagaccgtcttctctggcctttgtttggtaatgtagctcatgcactcggcaaaaagcttcagcatttgggtccattccttggcttcgaagggcccagataaagatgttgagcctaacgatagtgttaggggtcagctgatgaagatagatttttttcataattatccaaaacttctccaatcatctcgttcagtgggaaccataatcctgccctaaaaaagcttttaaaaactactacttcgtcatccttcggtgttggagaggtttcttccccggcaaagcgaataagcttcttctcagcttctctgaagtagcctagttttatcatcataggcatatcagctttagacacagtagatttttcaaaatccaagtggctgggttttgatgggatcataatgctataatcttcttcttcatcaacattttcttcctcaacgtctgcttgttcagcttcgatagcaggtgcaccttcttcaatggctctttccgtcataactaaacccgattgtctcaactttggagatcggggcagtgtcggtggcttcggcctcctctccgtcacgggtcaccctcgcg

SEQ ID NO: 180877 - DNA, 761 bp, Zea Mays
gggagtgtttccatgcaaagctcggctaggttgagttcttaagctccaaaccacatacgacaactctctgatccacttccctgcgaacttttcattcttgttgaagactttcatcctgattgcttccaatatcattccattagccctttctacctgaccgttggctcttgggtgtgctactgatgcatatttgatctagatgcttctttgttcgcataaatcaaagaattccgagctagtgaaattggatcccaggtcagttataatgctattcggtattccgaacctgaatattatatcttgtatgaattccactgccttagctgaagtcagagaagcgatgggtttgtactctatccatttagtgaatttgtcaatggcaaccaacacgtgagtgtatcctccttgagctttcttgaatggtccaatcatgtccagcccccagcacgcaaatggccatgttacgggtatggtttgcagttgctgtgctggtaaatgctgttgttttgataagtattggcaagcttcacacctctagactaactcggctacatcactctttgctgttggctagtagaaaccagacctgaagaccttcccaaccagagtcctggacgctgcgtgtatcccgcattgcccggcgtggatctcatctagtagttgcttcccagtagctgaaagaatgcacttcatgaggactcctgttgtgccccttctgtacagtgcttccccaatgagagtgtagtgggctgactgccttg

SEQ ID NO: 180878 - DNA, 629 bp, Zea Mays
gaatgtagtacctttatagttgcgtgctttatttataacatgaaatattggatctcctttttttctttggtcgcttggtatgtattgatatctcttttgatttactgaagacttcccagtgtccctattaggcaagtcttgaactgacgatgatattgtttttggttttgagatcttatcaactggatcaaaatagaatttggcatcagcatagaaagtctctgccattgtgaatggctttttgtccgcaaaaattcgcactatgtcccccaaggtatctttgtatttaatacattgatggagagtagatggaacaaccttattttcatgcaaccatggacgactgatcaatgcattgtacgaggtagccgcatcaatcacatggaaattcacaaatgtcacaagcttttctaactttagcactagggaaattgttcccaatgcttcctggccagactggtgaaaaccatgaataaacgttagactggcttagatcaccggcggagtaccctattcttttaagagtacgtagaggtaacaaattaatagctgaaccaccatcaatcatgatacggttaatgactaagtcatcaatctcaccaagcatgagaaggggtctattatgtttc

SEQ ID NO: 180879 - DNA, 573 bp, Zea Mays
cggcccactacaccctcatagggggcgcactgtacagaaggggtgcgactggagtcctcatgaagtgcatttcctcaactactgggaagcagctattggatgaaatccacgccggacagtgcagagtacacgcagcatccagaactctggttgggaaagttttcatatctggtttctattggccaacagtgaagagtgatgccgccgagttagtccagaggtgtgaagcttgtcaattcttgtcaaagcaacaacatttaccggcacagcagctgcagaccatccctataacatggccatttgcatgctgggggttggacatgatcggacccttcaagaaagcttagggaggctatactcacgtgctggttgccattgacaagttcaccaaatggatagagtacaagcctattgcttctttaacctcaaccaaggcagtggagttcatacaagacataatattcaggtttggggtaccaaatagcatcataactgaccagggatccaacttcaccagctctgaattcttcgatttctgcgaacaacggagcatccagatcaagtatgaatcag

SEQ ID NO: 180880 - DNA, 631 bp, Zea Mays
gtaaacgtcatcgccgtgatcatgccacgaccatgaccctttaacgacatcgctactagccgcaacagctcgctaatgaccgccgtagcccctcagctagtgagtgccacggtaaacagcgtcggtgactcatcccttctttccgacctccagcgcaatctcttcgaattggacactaccgctcacggactcaataaattgagcatgccatgagctccgtagggtaattacccatccaaagcaccagcacttgccttcaattgttcaccagatccccccgaattgctcacttccccaaatcggttttccgccgccgtgaaaatgctctcaccgtggccagtgcgcttcaggtccattcatgtcctctgctctcttgtttcagtacccttatgtgcccttgacgcttctcgacccgactgattaagctagaacccattgaatcgtcgggaacactttgtgttatccgttgatcgtgcggtcaccatgagcagagaggttgggagctcgaaccgtgcaattgatcgaggggaaacgtttgttagatgttgaattaggcctcagccaagttagagcactagccattacgtgtcttggccagtacaggctcaccggagctcggcctggcgccgtt

SEQ ID NO: 180881 - DNA, 606 bp, Zea Mays
agctctaactcgctctgtccacggtggcagcgggtaccacggacaatcgaacgcgttcccggcgatctaaggggtcctagtccaattggcggggtcggggagcatcagggacacaccagaacactgaaacaaaagagcagagggtacgagcggacctgagacgaggtagccacagcgaggtctctttcacgggggcgcaaagcagatttgggggaaatttggaattggcgagctctggtgaacaattggaggcatggcttggtggcttggtgcttgacgaccctacggacccgtcgttgtgctcaatttatagtgtgcttgagcggtggcctccaattttagattggcgcgctggcggtcggagaggaagaagggtaatggcgcatacgattggtggccgcaacagtggcaacctcaccggcgatctgtggataggtcagtatgagtcacggcggcgtggttaaagtgctgaggcacgtggcacaagaccatgaggtgtctaactccggcgagggttgattcaaggcgatcggggtagagcggacacggcggccggataaacagtgccttaagctcatccggggggagaagatcttttcaccgcgg

SEQ ID NO: 180882 - DNA, 646 bp, Zea Mays
ctggataaaaggtgaaccatgaagtttgagcagaaaaaggatataaacttatagtccagtagtgtcgggcatgagagcggcaatgtcacgcagtaaaaacttcatagaatctcctcaaaatttgcacacagtttgcgttgggtaaaagtgtttattggtgaagtatgaacccgagcaaaacaaaaatcgaagcgcagatcagaaatctcgagagtgatggggttttgttagggttttctcaaaacaaactcaaagagaactcaactcggatcacgaccaagaactgcatcatgagggcttatgcagtgatccaaatagtttatctccacacaaatcaaaccccaatagcacccatatcagagaactcgatggttctccacaaaaccacaagagaaggaaaagggagaagtcaagaacaaaagacttcagaaattccagcaagggtgcaaaactgaaattgagaagtgatcaaaaccagtgggtcgtaccggcgacccttccccacataaacttgaaaaacaaacatagtcaaagtacaaaatcgttgtggatccttggctaaaactagagccatctagagatgggaaatatgagtgctaaaaccctaagccaaaacaaatggtagccaagtgatactgaactaaac

SEQ ID NO: 180883 - DNA, 861 bp, Zea Mays
agaaattgcagacccaattgtttcagcagcttgaaccagaactcccttgagaaaacacaagatactaaaagatggtccaaggtttcagcttcttggtcgcataaaaggtatttggatgggtggtcaagacctcttttagcaagcctgtcagcagttcatcacctcttgtgagttgcaagacagaggaaaaatttgcacttttgtggggcccagttttttcacaccctacggtagtggccaaaagaagttgatcctgcaaaaagaccctcatatgcagatttagctgaataaataccatctaaggctatgctaaacacatgtttgttttctatttcttgcttcagcactacttcagataggagatcccacaactgaatatattccactaatactccaacaaataaggctcccttgatgtctgagatccatcttctattcagtaaggcctcttggactgttctccatttagcaatcctccttgttatggtttggaataatctaggagcaatatcgttgttttcccccgaaagccatttatctgtccaaaacaaggtatttgccctatttcacacttccgagatcagaactgtggggaagaaagccttagctttatatggaacttggatcggcatgttagcctaagggaatcttggatcggttttatgcagccagagccatctcatatgaagcgcccaactcatctcatgtaatatgtaaatacccaaatctcccagcttaaggggtcgacacactcttccccaggacagaaggcaatgcccccctttgcttctttgcgtccatgccacaggaaactctttatgattttatcaatgtcatccaaggcccaagcagggagatcaa

SEQ ID NO: 180884 - DNA, 404 bp, Zea Mays
aaaaaagttggccatgacaaatgaaggatgctacaggaccactgtagcgagaacaagttcgagcacgataatgaccggggaaccgagacggtcgttcaggtatgccatggccacttgaagatgaaacccaccacaaatgtcacccaccggccggaaagagtggagggaaaccgctgcgggtccgcgaaactttccacggtgcattgacgctgctctcgtgctcggctgcgaggccaactacaatctgtgcggctgctgcgactgcgagaacttagcttggcagggaggagaaagacgacaggaacagagacgaatagccatgctgatcgagcggcaagcttcgtcccccctcggcggcgaggcgacacgtacgatgcatccaggcacaaatggatggacctaga

SEQ ID NO: 180885 - DNA, 347 bp, Zea Mays
gggtggggtaattctgctcatgcggcttgagtaagcgggatgcataggcaataactttctcattttgcattaagacacaccctaagccttgccttgaagcatcacagaagatgacgaaatcctagtgtatatctggtagtgtcaaaacgggcgtggttgtaagcttctccttgatgatctggaaactttcctcacattttggagtccacacaaacttattatcctttttgagaagttcggtcataggtcttgctatgctagagaatcccttgataaagcggcggtaataccctgccattcccagaaagcttcgtacttcactgacgttggatggctgtttccatttt

SEQ ID NO: 180886 - DNA, 333 bp, Zea Mays
cttctgggatgaatagaatagcgactaagatgtgcttcatccaaaatttgctggcggatctcatcattcttaggcacaactatgcggtggttaaaccatacaacaccttgatcatctcttctgaagcagttggctttaccggcctctattttctcatgaatgtgttgcattccctcatcacttctttgtgcgtcaattattccttgcaggatgactgactcaagcttcaagtgatttgaagttccatgctgaatcattcccaggtttagcttttccatttcttggcataacgtaatgtcagaagtcttcatggtaagacaatgacagaaagtc

SEQ ID NO: 180887 - DNA, 806 bp, Zea Mays
caattgtatcaactgagcttcgaaattggctatttgcacttgaaggaactgacgaagtaggatattatttttctcatggaggtgatcgtattagtagagaagaaaaatgttggcattcaaccttcaggagtctacatatgtctctggcaacagcagtggccgacttaagttgggggtggaggacaggtgtcgcaaagaaggcattttcagtgaaacgctttatggtacaacataaatgactgtcataatgttgcatttcaacctggccctctctccttttgatgttccattatttcagtttgtttgaaacttaaaaattttaatgtcaattgcggaattgcctgatatccattctcattttgtttctccctaacttgatcttagcgtgaagattggagactgcctcctatgactccagaaatgatcgagtatgcacgcactgatgctcactatctgttatacattgcaaattgtttggcatcagagctccatgcaaaagcctgtggtatgttctaagtgttgtatcaacttttcctttcctattgtttgctttttttgttcattggttcagtaccctcagcccctcacagatatctaatatatttgaatttgcttcttgagtttacaagtcgtagttctattaagttttaaaactaaattcacatggtctggagagcaaaatttcttagattgttgattcttgaatagaatgatgtttctgtttgtcattcttttttgcatgtggaggacactagcagctctgatacatttcttgttagtactggggttcagaaatatgaaatgca

SEQ ID NO: 180888 - DNA, 271 bp, Zea Mays
ttgaacaagatgagggttcttttgtgaaaaacgcacggggaaagggtattttcacgccacagccgctggatcatccatcaatggaccagattagacttaggcttttatgagttcttacctgacaacagccgttagatcttcaaatttgcggtcctgattcaatacgatccctggaatgcctacattcattcctggccctcgatctgagatgcacggccaggagcgcttcttcctcccaggggccgaacgaagatgcaccgagtgcctagcg

SEQ ID NO: 180889 - DNA, 429 bp, Zea Mays
gtcgccgtcgagctggaagccaccccggtcagccgcggtaccccttccctttgctcaccgccgtagaaaaagccgctcgccgtcgtcgtgccatctctatgcccgccgcgtgtccgagcctttccatggcaccgccgtgattccctactgccgtcccatcatcgccgatgaggttgccacgcctctggacacgtattcaccgcgcccagggttcttccctacctccggccgccgcgcgtcttgctcaaaattcgcggccaccgcccgctagcactataaattgacctcgcccgtagctgcgccatgtcgtcgtgaagctgtagcacccgctcccaccctcgatcatccaccagcacgcgcgaatttccaattccccccaaatccactcactacaacacatgtagccttttatgacgaataccccatgac

SEQ ID NO: 180890 - DNA, 412 bp, Zea Mays
gagttgctctatttaaattacgaaagtcaatgcatactctaagcttacctgactccttctccaccgacacaatattggagacccactctgcgtatctgcaaggtctaataaaattagcttctagcagcaggtgaatttcgtccttgattcttgggagaaggtccggacgaaatgttctagctttctgtttgaaaggtatgaaaccagacttaatgggcagccgatgctctacgatctcacggcttaatcccggcatcccagtgtaattccaagcaaagcaatctaaatattctttcaatagaccgatcatttcatttctaggatcggtctccagggtcttgtttacaaaagtcggccttggagttttaccatctcctatgtcgatctcctccaaaggatcggccgatgtaaa

SEQ ID NO: 180891 - DNA, 896 bp, Zea Mays
tacaagcgtggtcgacgggctacataaatatggccgcgcttctcctttgggccatggctcagctgggagaacgcggcaccaagagagatcagtagagagggggatctagtgcaaggttggtcaccactggcgtccctcggtcgttggggacttacagcgcggtctgtgatcatcacttggtggtgggggagctccgcctagtctccaggaataagttcttggccacatcggcgcgattgggtggcgtcaacgctagaatccctcatcagagtatgggcgcggctgcaaatccgccctgcgccatggctgaccctgctcctgccttcttcatcggtgaggatctactccgttgactcagctcatcctctatacgtgtagcgccggtctacgaccgatttggggtgccataacctcgggtcaccggttcacaggaatgcatcgccggcttcaccgccatggttctcgcgcgctgccatctggggactatcgcggggaagaaaaccccctggccgtccgattgactatgggtggctggttggagaagatggcgtgggatggaaacggtgaccgttagatcggtaaggtacgatcaagattagaacaacagataacccttcggcactttgaatccgcgtcattgatcgtcgatccggtggtccggggtgatctcatttgtatgcacgtgtgtgtggtggtggggatcttgtgcggatcggatcccgtgcgcctcaccatgtgcaccggggtgtggcacgatctcagccagtcgtaggacgccacgtgtccttgtgcaggaatccgagattggttttgcagagaggcccctgtctttaaaggaaagtaactcggtgtgcgtgtatgtgcaaagtaattacatcaaagtccctagacttttt

SEQ ID NO: 180892 - DNA, 460 bp, Zea Mays
ctttacagccccttcccataccatcttggaaatgggaagatatttgcatggattttatcgtgggattgcccaatacctcccggcaccatgattctatttgggtcattgtggataggttgaccaaaacagcgcatttcttgccagtgcataccacccacaagacggagaagtatgcataaatctatattgatcaaatagtgcgtttgcatggaattccgaagaccattgtgtctgacaggggagcactgttttgtggtacgcttttgggagcagctccaagaatcacttgggacccgtgcaataagaagctcagcataccatccacagacagatggtcagacagaaagagtgaaccaaatcctcgaagacatgttgcgagcctgtgtgctacactatggtaaaaattgggacaagtgcctttccttggcagaattttcttataataacagctaccagtcca

SEQ ID NO: 180893 - DNA, 378 bp, Zea Mays
ctggccgaaggggtatgggccgcacgtggccgtccgattagacatcaacgcatcagattagctcgaagcgagctactctctcgcactctcccctggccgtcagatccaagatctacgccccggattctattttgccacaacgccattcaagccgccagatccgaaatcgagggtccgaatcgcatcccacacggtaagcaatcccacacgctagatcatgatcccacggctccgaggtcgtcacccatctccagcacaaccacggcggcgcacaactgaaccccggcagtggtccccgtcggagaccccagtccggtcaactggcaccaggctccccccggtctacaattagcccacaagagatgaccgcaaccatac

SEQ ID NO: 180894 - DNA, 281 bp, Zea Mays
aaaaggttagaacctgtccaccgaaaagtacgagggcgagactggaaaacaacgaccgtttctaacacacggcagcgaggaggtacaccgtacacgtacacgtacgcgcatatgcaccagtcaagggcccaagtgcgacgaggctcacgccccctgcaccaaacccttcacctatatataagcacggcaccgcggcatgcaacaaacgcatccaacaactcttccaaggccaagctccaacaagaacctgaacgaacaacgaggcatccagcatccgtcgc

SEQ ID NO: 180895 - DNA, 498 bp, Zea Mays
tccggtgagcaattccatccacgggacacatgattccccggtccaatagtcctgagcacgatccacgcaccctgtcgaatccgccagaccaccaagggatggttgaactacggtgctcgtgcgaagtggatgcggtggcttgagttcccctgatgagaaatcccgaccgatgctgaccgagtcggaaatagtggtggccggagatgggaactgggacgacggagcccaaagcgcggataggaaggcggagtggcgatacggcgccgaactcgccgcagcgcggatcaatacggcggcggcggcaccgtcctccatctactaccgccaatggcgactagccaggcttgcgacttgggacgagaggggcaaggagcggcacgatttataccctgggctgagtccgagttcaacggattcaggttgactgcgcgagcgcggagattttgctggaaaattcactgcgagctccgcctggttcgtgatccgttggggacgaac

SEQ ID NO: 180896 - DNA, 756 bp, Zea Mays
tcgagtcatgctgaagctcaattttaggggactcatcaccatactcataagcttttccctcttcttctcgtcggccttcacataaaactgttcattcatccacccggtcggccacttagtgcggtaaccaatcacatgagccttagtgtcttttcagtatgcaaagttgtagcacccgaagttcttgtgcagaccatcggacctagcttttgtctgataatagagttcatgcacccgacaaaacccttcagcattgacattctttccttggcttcgaagagcccaaatgtacacactaagtctaactatggcattgggggtcagctgatgtaagtaaatttcaaacttcttcagaacctcatcaatcatctcgtaaagggggaaccgaagtcctgccctgaagaagcttttaaagactatgccttcatcatcttttggctctgaaatcacctcttccctagcaaaacgaaccagtccgtcattattatctccaaagtatcctagttttttcattaaaattagatcatctgccttaactgtagatttcccaaattcgatatggctgggtttgcttgggcttaagatgttgtcatcatcctcactctcattttcactatcagctttagcgatagtcggttcagcttcggcatcaacaacaccttcggcgatggtctcttcttgcacaaccaacccaggacgcttcatcacctccaaaatggggctgtctcagaagttccagcttcatctccttcacgc

SEQ ID NO: 180897 - DNA, 646 bp, Zea Mays
attggctaagcctctagttattagccatgaaagatgcatgtgccttgaattgccatgacgacgcagcaactaaaaggtctgggcaagctaggagggtggtgcagctaggggaaaacacgacaactagggaagggcggtgcagcaatgaaggactacaggggcagcccttgctgtgcgacggaagtagcggtccttgctgggcgacgcaagcaagatctatgtatgaaaaatttgtcacttaccaccaccaaggtctgtgcgtgttgtttctccaaccatccttctagggggcatcttgatctcggcccggcagcgaagaacggatcgacgacgatggtggatggggcgacgacgaggaggtggacggatggggcaatgctgacgaggatggggcagtgaatacagcagcgagttggatgatggggctgtggcgacgaggatggggcggtggatgcggcggcgaggtggatggatggtgcggtggatgcagttggctgcaaaatttcttttaggtttagagttataggcgatggtgtatatagaatacgctagaatttggtggtaggatggctgatttggtgtgattatttggcgggaataaaaatttagaggctatttaacaattattaaattgtagactcatatt

SEQ ID NO: 180898 - DNA, 397 bp, Zea Mays
cccgcggcacctacattatgtatttcctggtggatgtgggaatcgagcttcagggctggggattcgtgcacgccggcgatgccgccgccgtgtataaacaaggcgttgccgcagcttagtgtcctggtgacgacgcttccagtgccctaggatcgatcacggacgggcgtgatggaatggatcgcttcccccttcgtgtcgggtcatcgtggccctcggatccgttgggtacgacacagattagtgaatggctggggcaaacctcgactgcatatctaaaatccaacggtagtgagcccgtactggtccacttattgggcaatttaatcagggcagtcggtgattgatcccacggccgagatcggcccgtaccccttcgtcgagcctgttttgtaaa

SEQ ID NO: 180899 - DNA, 826 bp, Zea Mays
atgtatatgcatgactttgtcataagaaaacatcctatctaaggatattcaacaatcaagaaaaatgtaggaaaagatacccttacatgacattaaatagagttatgtacatcagacttaaaaagttcattacatggtcaaactattacatctatatcctccactatctctgatgtcgctgccttgctatcatcaaatagttcatagaacttctcattagagcagtcagtagcaactccttcattgacccgggatatatccatggtaggatagtgggacctagtcaaggctaggcttagggtgctagcccactccatacctacccgagcaaatcaagatattcttttagcaaacccactagcttttggggaatggaccaactcaatgcttgggaatcagacttgtaaagacaagttaagcatgtctaactgacatgccttcaccagttgtaggctatgtttcatctctataaaaaagaagagcgagttacaccctagtatgaaaagatcccaacaaagaagtatgggcacacttcccaactcctatgccatctccttgcctttaagagcataattcaactttcatggaggacggagttggtggccttctccctttcaagttctttgttgaactcgaccaagctcttcttcaattcaccattactactcatggctttgttcttctcggtaaatgctaagtccatagctgtaacaccctaggtgttactgtacgcttaacgacgaatatgaacgactgcccaaaatatttcgcgaagctcggactttagtgaccttcaaaaaatgccgagtccagtgctgtttagatt

SEQ ID NO: 180900 - DNA, 466 bp, Zea Mays
ttagaatttttagggtgttacattatccaagtgagatccgaccacccttcggtagggttaggtctcggtgagtggtcccactgggggctcgacccattggaggaatctcattgagtccttccttattcgatcctgtatcggccctttgttcggtatggccgaccaaagaggggccccatggccaccccgtccgacgggttaccataggagaatgtgaggtacgaccttggacgtgggcacaagcaaatgaccgatgggctggtgacctagcttgcggctcactgggagcttactcggtccacccctcgctctacgtgagaagttggggtgagtttcggtttttgatctggtcgatatgaggtagttattgtggcgcgtggtaaatgaggtgtccatcatgacgttgttcggcgcgggtggcttgatgggacatgaaacaacttattcactgtatcatgtgcaggtg

SEQ ID NO: 180901 - DNA, 578 bp, Zea Mays
gtcgtcacaaagctccaggcgaagctgagtgccttcaacaaaatcctagagcagcggttctagcagaccgcggctgtggagaggctgcaaaagctgcagcgagagctcgagggcaaggcccgcgacgccgccctcgccgaggagaagcttaaagcgaaaagagagtccttggacaggcgggagacggacctcgccaggcgggagacggaccttgccaggcgggagacggacctcgccaggcgggagaaggatctcaccttcaaggaggaaatgcttgaaaggcggaagaagttgttggccgagcatgagattgaggcggaggagaaggagcgggtccgccggttccaggcggcgcaggtggcaccagggccccaggtggtggaggcgacgaagaaggcacttgaagatctccaggtatagcatcgcgccggggtccagcgcattgctgcatgggccgacgaggcgagcacgacactggtgccgctcaggatgagtcccatcccggtgtcggagctgccgatgtctatctccaacgcgctcccggtgctggactccaccgccgaccgcctccgacgcct

SEQ ID NO: 180902 - DNA, 438 bp, Zea Mays
gggtggaccttatttgaaataatcactatcattagggggactgtctgctttcaagatgacgtgttcgttttggtggagagatgtgctcaaattgctacctacgtacaaatctgacttcagggtcaacgtattcgatggctgatcgatttctctacggttcgacatctaggggcgagaacaccttgctgctgtttacgctggatttctttcttttgctgttaatgctagagccacaattcaaatggcaatgaacctagaacacctctattcaagccttttaataattcctcatgctccagtatgactttcaatatctgatcgaggatacccttagcaatgacacttggatttacttctacggtcctcctcttcttagaagctttatgcgtgtctctttggtcaatcagtctctcaccgcaccattacttgtacatggac

SEQ ID NO: 180903 - DNA, 1289 bp, Zea Mays
ggatgtcatgatgataggtgctgcaaacaattaatatatgaagtaacaattgcataatgttcaaagcatataggcacatggattgatgaagtacactaatttgtaaaaaaacattgttggcagggacatataatattgatggaagcaggactcatattgtagcgaacactatgagcattgtatgtcatcagtgtaaaacaaaattatttgacaagatcaaaacacagaaaactctgtacaagggcatgaagatgtcatgtgctaaacatcatgtactgatgaagtatatgtaagaggctaattatgacaataccatcagaagaccataatataaaaaccaatcaaagttccctaacctccttcgtataatagaacatgatgcataataataaaacatgtatgcatgaagtgatatgtactgcaaaaaaatttgatgaactatacagatacttggcagacattttcaaatcgaatgtccacatgtaaacgtttgttttagcacatgtatatgtaataaccaaatcaaaggttctatgcatgtgcagtacatgtgcaaacaaagcggacatatatctgttcgatgccaatgtttaaggtccgcaaaatctgcttcttaaattagatccaagtttagggaactacttctgcaagttatccaaatggatccttaaataaaccctaaaccctgaactatgaatctaagaacagaggtaatcctaaagcaaacgaacatgaattaagctaggagtcgggtagagatgtgtgtcgtacctgagaaaggcaagatctgtggtccaagactgagcagcgaaggggggaaatccggatctgatgatgttgtcgatgatcggagtggagggagatggatgcggtgatgaagaacaccctcgactaagttcaatttgtcggtggttgcgacgcctccgcacacaggactgcttcgacaccgcctcgtcctcgtgcacttgcgcctgctctccggcaaggtccaccggatccgaatcggccttcttccattgagtcggcggcgctcgcgcaacctccacaaacgcgcccaatagcagcgaagacgaccaggaaatggcgagacgcgacagagggggatgaatagtgacctaccgcatctggcgtgagagagaaggggatcactgcagagaggagtgtgtagcacgctgcgatgcgggagaaagggggagactgtagcacctacccgatgaacttaggggaggggttggagagaggagggcgctgcggacagtctgagctgcagccgaggaaccccttcctcg

SEQ ID NO: 180904 - DNA, 366 bp, Zea Mays
tcatataacaacaactaccaggccagtatcaagatgtcaccttttgaagccttgtatggaaggaagtgccagacccctctgatgtggtccaacataggggaaaggacactggaggggcctgctttcattaaggaggcagaagagaaagttgccctaatccgcaaaagactactcgaagctcagagtcggcaaaagagttacgcagacaacagaaggagagaactcagtttcgaggaaagagattttgtctacctaaaggtctccccgatgcgtggggtcaaaagattccaagtaaaagggaagctagctcctcgattcgttggcccctatcctatcatcggcagaatagggcccgcagcctaccgc

SEQ ID NO: 180905 - DNA, 679 bp, Zea Mays
gacatatcagaacaaggaaacaaactttagcgagccataaataaaggaatgctatgtttcattagataaaaggggccaagttgtaacagacagcaacacgtttactactatatcagataaacaagcatcaactgtattcataattaatctgtagacaacaagaaagacttagaatagatagaacgggcggctgagatcgtccaacggcagaacacaagggaggcagactacccttgtgttcttaataagtagtatagatatagaattgtagcatgcaacaacgccaacagacgggacgggagacccaaacatgatatgtgaaatctgagatagtcttgtgaaatctgaagtgggccttttaggcgctgcagctttctttttaggattaattttgatgccatggagtgacatctagttcattttgatgccatggagtgacatgaaaatgaaatagtttccaatttttgaaaaatttcagtggcatgtttccaattaacccttctttttaacagtagtcaagagaaattttctttctgtccttttggcacaaactgacaaagctctactcttcaattctttgtcttctgggaacgctctcagatattccattctatacttctctatgatgcagtcaacttcttgcaaatctcaatgcataatttatttagtttaacatttt

SEQ ID NO: 180906 - DNA, 450 bp, Zea Mays
aataagattcagcatttccctagactgacaactcgacttggagcagaattttctctccatttgaagtaaaaacaggagaatccatattaacaaaaatcactctccaaccttccttctaacaacttgctatagcaacacagggttaaaaacacactgatagaaagttataatgccccaaagttgtcccaaaccaattgaactttcttgtttcagttagctgaaatccaaaacctgacagtgaatgttttgggacagtttactccaagctctgtgcaggaccataccaacctcataataagtaacctactcactgatcaaagatcttcaacattgctacagtagtcatgctcatacccacatgaattagtcacaacaaggatccaaaactgagtgaacacactgaacttggacttttagttggctgaaacctgaattcgaacattaaaatcc

SEQ ID NO: 180907 - DNA, 666 bp, Zea Mays
ggtgagcttcttccattgttctttgttccaacttgttgtgctacgcctcggatacatctcttagccagcaattgtgacttgtgctttggatatttattgaacttcgctcatctgcactcgattttgttccacattcacatacatattgtgcctgtcctacagctccacatactatatcttctgatcaatacaaatttgaccttgcaatcgcggtttcactacctcttgtaagtatcacgaaccagcctccgattgtaccgtcctttgcattgtgttttcattagatactagtaagaacttggtaagacacggtagtgtgtgttccattcacctagagagcgcgtagttgcttattagggataacctttattgtttgttcctattttggtgtttccaatggcaggatccgatgacgagattgaggtagtcattcccacacaattttctgattgtgtcagccgcgaagacttcgatgttatttgcaagcgtatggagaaaaatatggaggaaacggtccacaagtctgtccatgatgcgcttattgcaatggatcttggcaaagtgctagatagggtggagagacggataaccgagcttgtcgattgggttgccatgttggagacacgtccactacatcagcaacctcctccaccaccacaaccccag

SEQ ID NO: 180908 - DNA, 486 bp, Zea Mays
ttacttgagtggacataaacaccatctaggtatgccttgaatagaggggattataggaaacctggtatcacaaaaggtcattagctagcccaataacatcttcatccactagttgtacactaataccttctcgtccgaatacaatgcccttgacattagggaaacgtaatttttagtttaaaaggtgatatatttctttgaattcttttcatttctactttttggcaactgtatggtggaaaaaggtgccttaaagccttaacttatgtttggacagttctcacacgcaatttggctaaatttcctagggtctttattttatttttagaaacaatgtggaataatgacatgtgatgttttacttgagtggacttaaacaccatctaggtatgccttgaatagaggggattatagggaacctggtatcacaaaaggtcattagctagtccattaacgtcttcatccactagttgttctctaataccc

SEQ ID NO: 180909 - DNA, 630 bp, Zea Mays
ctttactgttgcactgtgtcgctgacagattgcaaagaagcccctgcagttctaattcttcgcagagggaggtccacgacaacggccgcgcggaggatgaactccggtgaggttgtgccggcggatttaagcaacggccggtgctcccgagcggcgcacaccggattagaccctccccgaacgattcccctaacttaatttcacgattgactaactaataagctctggccacggcggtcgtgatcatggcggctatacggtcgtgttcccggcgaccagagaactcctagttcaattcagtggctcggcaagcatcgtaggcttaagggaaaacttgaacgaggaagaggaagaggtgaactgaccgggagaggggctagccgcggtgaggcgagttcacggtggcggaaagtggatttggggagaatcagaaattctcgagctctggtgaacgattgtggctgattagtggtggctggttagctgacgaccttgcggagctagtcacaggctcaatttatagggaggacgggcggtggtgaacaattcggccgagccgtgctggcggccggagctagagaggaacgtgggtgcggtgaattcgtgtccaccgccgtggcaacctccccg

SEQ ID NO: 180910 - DNA, 655 bp, Zea Mays
ttgtctaatccagtgtgcaattcatcatgtttcttatatcttgatgattctgattttgattttaagtctaccctgcgagaataagtaagaatcataaccttaatttcattttgttcctgcatgcagacccatcacccatgatgttgtattgtctaatccattgtgcaattcatcatatttcttatatctctattctactactttaatgctatgtttagcatgtgtaatatttcccaatcatggttcagctagaatctgttgcagtcgaatatgagggcaacagttattgtatattagaatatgaccttccatctatgcataaagcatggctgccagctggttgagttgataagtctgattatatctgataattggtaatttatcaggcgataaatttaaatttatggatgaaatttgactgaaaatggggaaaacatgagtttgaccatttttttcaaatcaagtatgatatattggtatgtttatagtttataggacctcatcgatatcaccaacactttgcaacgtactgctgagattctggtagaactaacaccacataatctaagctgaatataaagatatgtagctctcttgtgtgtccgataaaagtatgtatttcttcaatttgaattgtcaaactttcatgttatac

SEQ ID NO: 180911 - DNA, 381 bp, Zea Mays
cggatctctcggtacgtaacgcccactaactcctcgctcgacatccatctgaacatggagtgatggagaagatgtaagatgatcatgtgtgtgtcgctgcaaaggagacttggtacgtcggtggggagatcatggttggccgcagccccagcaatgagcatcgacaagacctcgccgagactcccagctacctcggtatgtgacgccaaccacctcctcgctcgacacctgaacaatgagatgattatgtgcatcggtgcaaagacttgtgtagatggccgcaaccctaggtttgctgccaacaacgatgacgagtttctaggtctcctccccgccgagagtcaccgcgtgcgctccgcctacatcgccaccaataatgac

SEQ ID NO: 180912 - DNA, 660 bp, Zea Mays
tcatgatgtcgagaggtgttgggcaaacccacaataaaatccatgttgatgtcatcccatttccatgaagttattgataggggttgcaagggaccaactgaatttaagtggcttggctttatcctctgacatgtgtcacattccgacacatacttggtgcaccaatacaggggtttcagatcatggtacatcttggtgcttcttgggtgcatggagaatttggagaggtgagcctcatccaaaattttcttcttgaggtccctatttttaggaaccactagtctgtcttcgaaccatagtatccccttgctgtcttggccaaagcacgtgtacttctccactttctggttaagattctccttgatgatttgcactcccttgtcacctagttggtccataataatctggtctaacaaggttggtttgatggagatgtaagtcaaggtaccagaaggaattacttcaatcctcatcttactcaactcatcacataaggtattgatgcgagaatccgtcaccatacagttgcattgcgactttcggcttagggcatctgctaccacattagcctttccagggtggtaatgcacttctaggtcgtagtccatgatcaattctagtcatcttctctgcctcatgttgagatcatcttgagtaaag

SEQ ID NO: 180913 - DNA, 961 bp, Zea Mays
ctcaggtggaatagacgctgacaaacggacccacctgtcatcccggtcatcgcgcgctaacgaacagaccgcgtcgcgcggcggatctcgcccaccttccgcgatagctgggctccgattccgcgacccgggtgataaaggccaatccaccttccacgaccccgtctcctcttcattcgcatcgcgccgccaccacaagtccacccacggaccgctcgtaagcttcggaggagggctggccgcgggcgacgaacggcgcgccaccgcggattgggggctctgcttcaaccgggacaacaaggtttgcaccgagcccttctctggtgttgataggaagcaatagatgcagcgccgcgtagaaatcacggcgagcgcttccggaatttctcaccggagcaatgccgaccgcctagattgtgggtcaccgtgggcggggacctgtgctgtgtcgcggctggaattgaggggcgacatgggttcgggccaccgtgaatcttgcgatggctgagtgaattagaaggatctagagatcgtcaattgggggctcggggtggtcggaatccgtgagctccggtgagccaccgtcgtgctcagcgtcggtgttcgcgggttgagccgtgttgagaaccatggcgcgctggccattgatatgtgaatgggcggtcacgattagaacataggggtaccggttgggtggattagccagcgccgtttgatcaagatccaacgggcgcagattgatctaggtattttaaatcggagccgtatgctatagatcgaagggctgtaaatggaagtcagatcacaagagtccgatctaatccagatcgtccatgttcgatctggcggaccaaatgtgtggataccccttcggctcggtaatcttgctaaagagtccctgaggatttgtgttatgaacccgccgtcctcagggcagtgcggtgtgtcttgggaattcttt

SEQ ID NO: 180914 - DNA, 592 bp, Zea Mays
gcattgccaatgagtcttccatcttcttttataggcatgaactcacaaatggcaaccctcctttacacattgaaactcatattctttcttccagactttagcactttgaattccttcatcatagatataggtcactgcttcacaacctccttgatagcatcaataacacactgtgcaagaacattggcaccaatgtaccactcgtgacacctactatcttgaatgaaacgattactgaatccacaatccctccaatcagccgacactacgtagccctcatcatctgatgagtcgaccagatcttctatctactctgcctcgaggtcttcatttaacatctattgtactaaatatgaggtatagtctcacattcatcagcaagtccccgtggttcaggttgactaacataacagtctacatcgtcaacatcatctccctcttattgtccttgtgattctgcttcaccactggttggagaaccttgaactacatcatgtgccttctcattaatctggacaaacattgcaaggtaccagtcacccctcaaagacgcctccatatacatcttctaatctaaagtgttgtatatgtg

SEQ ID NO: 180915 - DNA, 353 bp, Zea Mays
gagagggtctccttgcttaacaccccttttttgctgtaagttcttccccgggactccattgagcagcactgcagatgttgctgtagaatatatctccgtgacccaattaatccaataattagggaacccaagttgcctcataatcatcttgattgtattgtgttctatggtgtcgaaggctttcataaagtcaatcttcaagataatgtattcatgctttgatttctgacattgataaatgtattcaaaggcccacgccaaacaatcttgaattgctctagatttaatgaacccatattggttagtgtggaccaagggtataataatcttttggagactgtttcccataagct

SEQ ID NO: 180916 - DNA, 641 bp, Zea Mays
ccgcaattcatcgtgcaattcaattcatcatgcaattttgttgtgtaagtcccctaaaagaagatataatgtcaagcacataaatttattttcaaattaaatctatgtttctcctcgatagttgatcaaacattttctaaaaaagatgataaaaaccagtaaaaaggtattgattaaaaatccgtaatttacatgatggtcattcaaggaagaaatatacccagtcatggcaagcaacaaagaaatgattacctccttttgttcaattccaatatgggtacttggccgagataatgtcaatgtagtttttaacgtagacagtggctcaactgtatttgagccagaaacataaaggttatgctccagttgacgagagctatatggaagatagaataaatgggctctatctggatctctcacaataaaattctggtttgtctccatcaatttcataaacgatccctcagacacatagaacctttcaactctggggaatggaaaataggtttgttctccatcatgatatatgaaaacattaacaagtctctccatcagttcataactgctggaagcatgagtcaaacaaatttaataaaccaaccactgaaatgaaacaaccaattcacaatcgagtccagcac

SEQ ID NO: 180917 - DNA, 603 bp, Zea Mays
gcattgtgacgattggattagcggctcctggttttatagaggtaagggcggagtccgccatggagttcggtcgaggggccccgcacttcgcgcggccgagaaacatggcgacaccggtggagaggttgtcagctggccagggtctgcgcggagtccgttccttcaaccaccagcgcacaaagcggagaggagattgggagggggatagagcaagcacagggtctgtcgtcagccatgagcgcgcccgatgtgggatccgtgattcccggcgaggagaagggctctgacaagccgggcccaccgggcggtgagacaagccgtgacaacaggaagcgcaggcgcgggcgtcaaattcctaggaatcgcgcggcgcggggagcggctggaggtagctgctgaccaaacgggcccgccgtgcagggatgcaagagcatgtgagccgtgcggcaaggcgctggccagtggggccatgcgtcattgacccaggtgcctgcgagcgtagttaggtgggctgcaggagcgctggcgcgaatttggaactgggctgaaaaggatctgttcggcccaacggtattctgtccctttttccttttctttcttttt

SEQ ID NO: 180918 - DNA, 1904 bp, Zea Mays
ctgcgggcttgttaaggggccatatgatggtgagccggtgtactctgtccggatgtgaatggcacgcaataatctcttcttggggtccttcagcattataacatcacagccatgccttctctgtctaactgcattggaaagcgacttggataggtcctggggtgacagtgatcagaaacacctttttagcgatgtggtcagaaacttaataagaactttacaactatgaacagctatagtgatgtgatgtccggtatcgatgtaaaattagtcaaagaaggccagttatggaatctgcacaactcgcaagccatttctgagtagtatcaggaatgcacagttggaagttgatctctggtggagaatgatgatcctgctccggaatttcgtccttcgtaggtagtaaagactatgggacctcacagttactagacattctgccttcctgtttggtggaacggtgttctgcatgggtcacaatccaacagactaattagaaacacactatccgatcagaaaccactctttagttttatattcaaagaaaacatgttatccgccttttaattttacagtcaaacaaaacaagttaaaataagctcgcctgactcgttggtaggtacaacaatgttgcaaattttgctgcctacaccgctcctcgctagctccacttgatccattttggtttcaaattgaacagtagttcctaccaaacagagattcgataatatgctataaacaacaattatatccacatacggtcaaattgtatacattctagttgtgtagaggacggaagacttcttagtgtaattgtatcactcgatgtaattggctaagattaataaagcttctttttaaagagtaaagggtgaaatgaactgtccctcatacacacacggaaaattaaaaaaaaactaaaacacaacgctcggcgaacttggcggcgaaccagattcagttaattcctaattgaagtccttttgagtaataggctgcttcacactagctttatctatcaagtttcaagtagtgatgtgcctgcctactgcgagctgcgaggtagtctgctcgcgtgtcactcaaggaaagagacggtcctagtcctgcgccgtcgcggctttaaaacaacctcacctcggtgctccctgtccgaatccacaccactcgcacaagcgcgcccactagagtgtgtgtgcatcgtagaaagagagagagagggcagcatgagctcgccatctccgctcgccaggggcctcatgggctaccactaatattgatatgcatgtgtactaccactaatattgatattgcatgtgtactaccactaatattgatattgcataagaaacaaagtaaaagctggacaaagaagggctacgcagtgtacccatacagaacgtccaagtggcaaaacaaaattgtcattacaaaaacaagatgaccaagaatatgaaatatgagataacaagatatcaatatgagataacaagatatcaaatataaactaagatatctactataaagaccgttatgcacttgcgtatttgtaatattgctaaaaacaatatgagataacaagatatcaaatatgcacgttgattcactgtttaagctagtgacacaagaagaccaagaatcacatcaaaacgtccaaaatattcagagaaatatcttctgtaatttgtaaactaagctttcatgttggagctagtctaaggctttcgcccgcccctccatgaccctctccatgaccgactcgttgcagctctgatttctgaccttttcctttgcggcaggaccagaaagtttgcagacactaaaaccaggaagcatgcatggcactggcagtggcacggatgatgacctgcctgaccaagcagacgcggaaccaggggaagcta

SEQ ID NO: 180919 - DNA, 358 bp, Zea Mays
aatgttgtcatccaatcggctaggtactagcaaactctaagaagctaccatgacaaggcagtgcggcaccgatcctttgcaataggggacctagtgctccgccgggtgctgaagcgagaagggcgacacagattgtcacctccatgggaaggaccattcatcattgcagaggtcactcggccaggatcctaccgacttacccagatggatggaaccgacgtgggaaactcgtggaataatgagcacctcaggaaattctacccgtagcattacatcaaaaccccagccggcaagccgcactttgtaaacaaaaggtttcattatcaataaagcttctgtgttcgtccgcatacaaact

SEQ ID NO: 180920 - DNA, 478 bp, Zea Mays
caaacacaaaccaaccagcacgactcctgaaagcctgatcgcactccactgaccgcctcacctcctctggaggagaccaaaaggccgagcacaccagcaccaacccagaacagagagagagagagagagagagagattactaaaaggctcgcgagcaggttagtcaaaacgtacttgtagctcgcgccggcagcccggcaccaatcaccggaggacagcgcttccctctccctgcgtggctatatcttcttcgacagtgggagagacagagagagacaacacccacacgctcgggatcggagaacgcgcacaggcactttccatcccccgatcaaatcgtcatcatgtgcaacgccgccgggacagattccttgccggcgccggcgcccccgctcggctctctcaaggcctccgcgcaccagctcctccaccccgtcgacggcgaccaagccaacgcccatgcactgcagctctccaa

SEQ ID NO: 180921 - DNA, 315 bp, Zea Mays
cagactggggaataaactgcaatctatggtctcccaaaggcagagtgctttcatcaaaggccggttcatccaagacaattttatgattgtgcaacaaactgccagactcctccatcagcaaagacaagcaagaatccttttgaaactagacattactaaagcttttgactcagtttcctggcctttcctcctcgaagttcttcagaaactggggtttgggcagatttggatgaatgttctgtgtggactgctatctacctcgtccacacaagtactgcttaatggtgttgctggcgaaaaaattcagctcaaaaa

SEQ ID NO: 180922 - DNA, 866 bp, Zea Mays
atggcctctgaaggtccagccttgtctaaatccgaaggttcactggctttatccttggaaactctcgacggcgcaggtgtcgccatctttgaaggtcttaaaacagcccgaatcacattagccattctccttcctctcttaggagttcccgctggagcagttgtaatttgtggttgcgctgatgccttcgacaactcttgaaccttcggctaatctggcagttccaaatggatagaatctggggcattcactatagttgccgggaggaccccttcggttttatcggcagtctctatttctgaagtccctgtggcaggcagttgagcagcccaaccaaagaagtacgacttcggtcggtgggttaaaaccttcaccctcttttgctttggtgcaatagaagaagctcctagcacactcttcctttttaaccccctttttcgggcagggaagcggtaatcaggataaacaaaaccaatagcatcaaagaccctgttcagtcttcgtttcccacgagcaccgaaggcagtatacatagcttcgtcttcagcctttgaatagccccctagcaattcatcacttgttgcttcaatggcatctaaccaatcgtcatctggctcaccaaattgattcctgaatcgataagtgtattttaggcgaaccagactgctctttccggcttctgaatcagcttcagcatccttagacatttcccattcggcagccagaggccacaccttgaaagttatatgctcctacactaagtccctggtactaatgtagttgcacacatcaacaaataccgtcaagcagccttgcgatttttctgtattcacaatagcaagcctcctaagtccaaagctggatcg

SEQ ID NO: 180923 - DNA, 722 bp, Zea Mays
acaatactgaagatatgcatatatattacatacaaaaagaatatatgtgttacttgggttgtataagagtactctctgctaactcatcagtaaatacctaatccacagcctttgtctaaatctatgaatgtcgggcgatagtgggaatatagaataaatacacatgccctaatatcggggaccctgtaaacaaaaaggagatgcaatgcgcgatgcaatgacccgattacagtgatgtctaagcggatacaaatcacacatttagctggagaataagggttacaatcaaatccacttcaatcgaccgataggcttcaagaaatcgacggcaaactcggggtatttcaatgttggattacctggaacttcttgaatcgggctccaatgctgggagattgaaggatgtaaggtggaatggaagggcgctggattggagcggcggtggattggcgctgcgctggtttggaggcgcggaaatcgcatggggagtcgcctccgacgaaaggaaaatctgtgcggctggggttttcttcaaatgggcgctggtttgtctccgttgaatgcgcgactacggttttagaaacaggaaacgtgggagaggtggctggctgacgggggtaacggcgccgtgactaggactgttgactcggtgtggttcaaccaaaatgcccatgttgactagcctgggcttcctctattattggaagcccagggctcttaat

SEQ ID NO: 180924 - DNA, 488 bp, Zea Mays
tcctccagcaggcgtgctcacgcgtgttagcagtcaccgacgcgcgggacccacaaaacagcctccagccgctcgcttcactcaccgcgcctggggacccactgtcaggcccgtcttcaacaaccctgccgaacgcgacaggcggaccgcgcggactccgtggatctcggccgtgaaggtactcggctccgccctgcgaccgtgggcacgtaccgggtataaagctcaccgggctcgcctccgctctcctctcaaccaccaacgacccgagcctccattactgccatcgttgagaaccgagcgaacgaaatccgccgctggcccagtttcgtgtccaccgccgtcgcgcccacgaattcgggtccgtaagcctcgccgtgcgtctgggtttgatccggtgtcatcccggccgtggattggtggccagagctcccggaattcgccgccggggctgggacatccgccgtggccgtgccgcccgcgtcgac

SEQ ID NO: 180925 - DNA, 544 bp, Zea Mays
gccagatgttcacacacctagctagatagaatctccgatctcttcggagataacagaggccaaagtgctgcttgccgaggtctgctcgctgaaggatgggggtctaactgctgaagctgcagttgctgacttcatattcaagaatattcaacccttaaaggacagggtttaccccgcttacttatatagcggtgtcaacgattttacccaggtcatgaacagaaggattcccactgaagatttgctgagtcaactggacatgatcctgaggggcagggtttcaaatgttggtgctcttgtggcctattctgcattgaacctgccgccacttaggccattctctgagtttgtatccaaccctcctgcttatgacgttagcctgggtcatagagtgtgaccctctcctgaggatattgaggctttgattgctccactttggagtcttcccgaggatgagaggcggactcactttgagatgccaaccagcactgatgacgctgagatagatgatgtgcctagcctgctagctggggaatcatccaac

SEQ ID NO: 180926 - DNA, 681 bp, Zea Mays
gcagtacaggaaatcatattcgtctgtaccgttaaatactaaggctcccttcggatacttcagttctcgggcatagtgtttggcttaaaaaatttcttctttggatagtctttttcctgaagcatgtcgaatgatataatcaagatcttcggagagtgcttcgggagtaagggatttggcttctttggccacacttttctcaaaaactatgccagtatctggagattttccctcggtcttttgctcggtcgcggcgagcttcgtctcagcaggcactgaaggcccagcatcggtttcagcctcaattactgcagcttcgacttctgcttgcttagcatcagcttcgttcgtgccttggaagcttcgacaactttccctgtaggagtggaactcaaggtttcgattgtttctagcacatccaatacatttaccattctcctcctcttaggagttacgacagaacccatttgtaccttcggtactgttaccttttctagagagctcaaaacctctggcatcttcattatttcttcaatttctggcttttcagccttatcaaccttcgtttcaaccaccttgactgaaggtaacttcggcattatagccggctcttcagtcctcttcgcaggaggagcggtctcttttgtcttagcggctgaagaggtcccttcatcaaattta

SEQ ID NO: 180927 - DNA, 418 bp, Zea Mays
ggacatgggggttgttagttggtatatatctaacactattttatgctcaaaactgaggattttacgatcaacgcatcagagttatcaacgtttctcacattggctagctatttactctcaaaatgaaggtttttacgctcaaacctgaaggacgaccattagcgtcccacgggcgcaataaaagggaatttcgtgatttatgatatccataactatcataaaaatcatcttgtttaccattgtaacatcatttacgtcatatacgacattatttacgctcgaacttgagaattttacgcaaaaacctaggatgcgcacacacaacatcctgcatgcatattttttggatctaaaaccgcacgtgccataaaaatcgaaaaccgcatgcgcacctgctggataacgacataaccttcca

SEQ ID NO: 180928 - DNA, 618 bp, Zea Mays
ctttatttcccttgctgcgcatgacgtaagcatgacatcaagctagcaaccaaatcagccattgttctgtttatcgtatggaggaaatgacgggtgggctctcctgtacgcgcattatctctggcaagtgggacaacatctgcatcagggacttctcgaagccgggcttgcaacaaaattgtaacggacgccagataaatcggaggggggttacgatactagcttaagccccttggcgtatataaactacatcgtctgatcgagttctccgcatgtcgtccgccgcggccgcttggctgggtatctgcactgacgcgtggacccaccttgaccgcggcaccgtctccgtgaacttgttgcaacagagcgcgcaatcgccggagtctggtgggattcgtcctcattgcatccggatcgcgaacccgttcattaaccaccccctgtccctatataaccatcgggtcgcgattcctttgcctcccagctcagtctccatcatcttctaggcagagcgaccgagagaagagagagaacggttggtgatccgccgtcatgggcttgcgatggcgttggggctgtggctcgtggttgcgatcggcgcgcgtggagggttgacgg

SEQ ID NO: 180929 - DNA, 643 bp, Zea Mays
cgtggcctaactcacgcgaagcaaggaagtaagctgcgtatggcgctcgggttgttgacgtggatgcgaaacagacacagcgaagaagggggaagagatagagatgacaggcaggtcccacctgtaagccatgcggggaaaggaagagtgaggtgccctggctgacgtacgggcccagcttgacagtgatacagatgagcgcgcgcgggtgagtacgtagttgcccgggaaaccgacatgtgggtcccacgcgccagtgagtccgggcgcggtggcgatgggctggcggggagagcatgggtagtgggccgaattggttaggaaccggcccaaacaacatgttgacctttttctttttattttcccaccttcttttcttcattttcaatttcaaactcatttaaaatttaaattccattcttgtggccattttatacttaggtttatattgtgccattaaaatactgactttgaagatacatattatatatatatatatatatatatttctatattctttctctttcttctccttctctatgttatgttccaaattcctaaatgtaacttaggtcaacttcaaattttggataataatacatttttattaatattgctggtattaaatgcacagacaaatgaa

SEQ ID NO: 180930 - DNA, 496 bp, Zea Mays
cagaaaccattgacatcataccgaccataacgtctggcagttactgctcctagggacaattgtcgaaggtccgggtgtatattgtcatttatatctacataatctcgaaaccaacacaagaaattaggtcccccatcttttccctctcgacgaatttggtcacgttcacagccagacatccaattttgagaatcaaattcactgttagtacaaggaaacaaaccttttagtataagaaaacaattgtagcgacaatgactacaaattaagtttacacttacaggagaaactgactcatctcttccatgttatacatgtagagtaaagcagtcttccattcgtcattggtgaaacaatatgctgtgctgggtcctacaattttgcccctccattaaaaaaattcaaggtcactgatagggggctcatcgacatgataccacaacgcaggggcattgacattgtgttcctctacaaagtacaggcccgtgaacgatgc

SEQ ID NO: 180931 - DNA, 477 bp, Zea Mays
tcgggggcgggaatcgctcgccgtcgccagggaaccgccgcgggccgcgtgatcgcctggtcagtgccgccaccgttccaaaccaaggtattaagtccacccttcagtccgtctttcctgtctctacttgtagctcggtccaatttgtatttagcgctcggaaacggccgattgcaaacctcgccggcgtgctccgccgagcgtgcggggcggcgccgccgtcgctagctgaggattgggggaaaacaccctgatcgtccgatcctcgttgaacggtgcagattagatagagggataccccttcgacggattggatctgggccatcaatccagatcggacggctctgagcgctcgcgggtttataatatcgtgatccgatcctggcccttggatcggatctgaacggtccggatttagcccacgtattgataggcgtagctttgatctgcattgttggatcttgggcgtacgagtcg

SEQ ID NO: 180932 - DNA, 1193 bp, Zea Mays
ggaccccccggtctcgaaacgccgacagttatatattctgagattgattttgtgtccttcgcttcctctcatagacccttaccacatactggtgctgccttagtttaacttcctttgcttacctacggttgggaatatttgcttttgatgccgatgtcacctgaatgcaggcttttggtgctgtatagttgtgctttgtctatttttgccctccttttgttggttctatccgtgttttctttttttacatctatgtgttcttattgtttatgtatttacttgttcttattatttacaattgttgcttcaggaatttgcagcgtgcttcgtcttctgcccacgtgctcgctccaccgaatacgctgctacgtatcaggtatgtcgcaggttttgcgtgctccatgttatttcctgtgctttggttaattgttatggtttacttgttacgtttgcacttgcttcatacatccatactctgatttatcctatatgcttctcctttttggcatcttggctttacctccctacttgttgttacctctggtggtattcagaactgattccaatgtgatacctgtgctcttgtcccatacctagagcctccatttgcgattctagaaactgctgaccaatggaccatggaccatgtcagagtactggtccctctcttggaaatgagaggaagaggagacctaccacttctagtttgttcctttggccacattttcctttctatttaatgacttgcgctgtgcttgagtcccctgctcgttgctcgatctgtttgcaagatgatgaccttgtttcttaaccaatggtttccacagacatacttgtattgactccatcgaacatgaccgctcagacatccttgcttaaccaacagtgcatccctgtttggtcgacatttccactaagacctcgtacgtatcatgtacatatattgggattatgatgcatcacacgctcattcttatgctctcctccttgttgtgacctggtaaaacatagatcctagatcgttgttgcatttccctagagaggcttccacctccaatagacaccgtcgaattgaagcgaggaggcgggcacgagcttgtagaacacaggctccatgctcaactctacctgctcatgttgttcctctaaaggactcctacattgctcgcttgaaaggtgcccactaggcgcta

SEQ ID NO: 180933 - DNA, 646 bp, Zea Mays
ccggcgtgccgtcctggtcctcgccgccccaccacgagctcggcggcgccatggatgcacgtagttcgcgcccggcagttagaggtatagcgccgtagcggccgatctcccgatcagtgtgtgggctctcgatcggaggcgcaaccgtttattggtgctgctcccgacaacaacacagcctgccctggctggcctttcgaagttcttaggctgtgctagtgaagtgacggtgcctggctgcttgctgctactagctgcaccagctgctgatgtctagatcttcagtttcttacctcaggttaattagcctgcaaacatcatcgtagcaattatgaactcgatctccgataagctaagtgagtgaagggtggtatcagatcatgcagtacataccttgtaacctgatgagagaaccctagcttcttctgagcttcagatccaagaaaggtacggtatgaccagtactgcctcggtcgaagcaatgcacacacagccacacacggactttctagcacgcatccactgcgtcacaatagcacacactgtggtacgtgtctagaaatgagctcacacacagtggctagctggttgagcttgatgatagtagagcttccgtggagagtagcttggctggttgctacttctg

SEQ ID NO: 180934 - DNA, 519 bp, Zea Mays
catgtttgtgcaggtaaatactatcttgtcgattcaggttatccaaatagaaagggctaccttgcaccttataagggtcagaagtaccacatttccgaatggcaaaatgtgaggcaaccaattggtagcaaagaagtttttaattatgcacactcttcgctacgcaatgttatagaacgatcgtttggggtgcttaaaatgaagtggagagttctattaagtctcccttctttttcgcttaccaaacaatcgaagataattattgcttgtatgactttgcataacttcattagagagagtgctctacacgatagagactttgataaagtaggacctagtagcagcagtcatgatgtacctttaggtgagagtagtagtaccacatctgatgagttagacatgagtgcttttcgagatgcaattgctaatgctttagtggcgtagttaagtatgacaatgtaactggacttatgatgtaatcaactgctctaattattctctaatgaccttttcatcgtt

SEQ ID NO: 180935 - DNA, 490 bp, Zea Mays
caatcttccgccaccgtgggtaacagaatccgcgcgcgactgtggtcaccgccatgtggggccgcgtcgtcaggaccttccctgtcccttcggatttggacgcgacgatctcgcaacaagctccgctcggccgtagttctcgggtagttgtaaccatgttgccagttgttgatccctatccccgagtataaagctaggctcgcccctcggccaactccatcaagcttcgggttggaagaacgtcgtctctcgcgaggataccgaagactggggtaatggaaaatcgtcgtcaaggttcgaactcgcgaagtgccatcgcctggggctcgaggagttgtgcagtcgcgtcgcgggggcgtgttcaagctgatggggggaattggaaggcagtactaaacctctagatgaccttaatttctcgacggtgtgcgcagatcacggagaacccgcctcgcctcgcaaaccagccacaccaccatctccaaccacc

SEQ ID NO: 180936 - DNA, 1542 bp, Zea Mays
caaaaacagacataaaacatagaagtagcatgatgattatctagatttggttttgactgaccgtgttggtttccttgtggtatgctccttctccaatgctttaggaccaagttacccacgtgcccctgccagccctatttccctacgtcgtttctcacctatggtctctgtagattcggcagctgcaggttcgctggtgaacgaacatctgcaatgcacatctgcgacacgcgcgcacgacaggttccaacaccgtgacctacaaacacaaaatgtttttagagaggttccaatttcagtttgtgcatgacttttgatggtacccattcactgtgcggcgatactctataactttattatagataccactattataccacgatagatcaaggtagtggtcccttctcttttgtgttagtaaaaaaatttgaagctgatacaaagtaatgtcatgtgttagatgctaatgttcagtgaaatttttttgggatgctaatagaatctgtgtgatctcatgaatgggttttcttttataaatgatggagtatacgatgtaaactcataacacttaaggtcaatttgttagtcaatttggcacagctccacgagtgaaaaagtaaacctagataccagattaacatagatccaaggaacacatgatgctaatgttcagtgaattttttttgggatgctgacagaatctgtgtgatctatgaatgggttttcttttataaatgatggagtatacgatgtaaactcataacacttaaggtcaatttgttagtcaatttggcacagctccacgagtgaaaaagtaaacctagataccagattaacatagatccaagggtggaggcccagaatcatgtgtttaatgcaggaaggaggcgtaccgtgaactgcttgggggaggacaggaagaaagcgatgccgccactgccgggcacgacgtgctgcctcaccccgagctgtctcgctatggtttagccgtcgtcgccgccatgcatacctcgccgcagtgcaggtcccctctggcgcctcctgatggtggcggcggagaggaggaacggtggtggtgccctgagtggaggaggcagcgatgccgatgcggccatggcttggctgcatccatcagtaatgcagcggagaaaatccagagagggtaggggaagccatggatgtggcagggggctgcctcggcggccatcgcggggaggaggcatgtgcgcgcggtgaaggcattggtaggcattgcgagggaagaggcagacaagggtgtgggtgatgtccccgatggaaggcgattgtgggcttactttgaaggcgcgggcgcgacgatggcgatgagaatggcgggagacatggtctcgacggtcgcgaggggaggggtctcgtacaagggtggaggcgcgacaatggcggaggagtcgcagacggggtcgggggcgcgaggatagcggcgagaatggtagaggcgcgtgctaggtttgtgggagtcggaagtgcgggctcgacgatcgtggggtcggcgtcgtgggggcg

SEQ ID NO: 180937 - DNA, 457 bp, Zea Mays
gttcgaaagaattgataagagcttcaggggaaaggatggagttactaaatcatacagacagaaaatgttgctaacgaaaacaatgaaagttgttcgctaggcgtgtatgtcaaaagcagggtacgataaggcaatagatgtgttggatgagcttgatggcgttctatgccgattggagccagacattggatgtaatgagtcatgtgatgttagtgatgatgaggaaaaacaggtaataaaattcaatttttttaatgttaaactatttggaacatatgagtatgtatggtcatatattttttgtaacaggaaggagaaaataataataataataaggctagggagggaatggatgaagatgacaattcaattacatgccacaaaatagtatgtaaaagataaatatataatcttgcatgaagtagtgtatgtaatgaatatatgaaatcaatgtact

SEQ ID NO: 180938 - DNA, 475 bp, Zea Mays
ccgacagcgacggacgccgacgctcggacaagagcgagagcaacaacgacgactgggtggagaactagatggtggcacgtggcggtgccgtaccagaactccagaagagaagaaggaggctggcggtggcttgctagaagatatagatcagcagcagcagtagcatcaatgcatcaccatcgtctttcgatccaactccatgcatatatatcatatgatcgaatcttctccaattctagttactcggatttaaatgacatggcacaaatctaatggctgaaatttaaccagacggagagccacatagaaagcaaccatagaagatccgaatagtgagtcagtaaaagaaagccaagttcgtacatgtggggaagaggcggcagtttcccttacttctccacgataactgcagcaacacaaatgtcgaatctcttttcgttgagaattgagacagcgaatgagggggagaagggag

SEQ ID NO: 180939 - DNA, 748 bp, Zea Mays
ctgtcgatttgttgccttagccggagcactctggaaacctctttcctttccccgtgattccatagcaatctcttccctccccgacacatatttctttcctgtctacatcaccatcaaaggaaagtcagctaaatcttcgatctctcggatccgcgccgattcagagtccaatttgtccttgtttctcccctataagaatcgccctgagctccgccattgattcgacgcaatcatgccttaaaccactctcttctgctccctacccatgctcgtcgtcgcacccgcacctttgtcgctcatggccaggcacctccagctcttccccatcgatgcagaggccacctacatgatcatcatagcacactgccacttccctgagccttccctaccttagtctagccccaacatgatgtcccgaccttgccggagctcaacaagccaatgtcgcccatggctagagtgtttgcgtgatccacgtcgccagcaaaagcgcttttgagaacctacatcgttcccacttcctctccctccgctcaaatttgcctatgtgccactgtacctcactctccgacattgccgaagttcaatgttgtcactggccaaaggtagatgatgacctcttttcaacatagcccgtgcgtttacctttttcatgagtgcactacacgtagttcaaagatcattacaaccagggcctgaattttatggtttagcccctgcacttttagcaaatgtaacccacattcac

SEQ ID NO: 180940 - DNA, 706 bp, Zea Mays
aatttggagctagaatgaattttctatgcaataaacaagttttaggaattctttttatattaaaaatcaatttctgtatctatttacctattttatatattctctggactgggcctcacttttcagagaaggcaggggtctctgcgcaaattacttaagacacagagaacagttccactggacggggggttctaaatcctaaaaacataaggtttcttttgtaaagtgtacccgcgaaggggtaccttctaatctgagccctccgatcaggaatctagggttcaaaatagatcaagtgttatgaaccggtattgaacccgagccgcaggatcttgatccaaccgtccagattcaatgatgcttgacctaacctaaaccgtaggatccccgatctacgcttctaattcaatatcgcgtataggtttgtttccatctattcacagccgcgcgatgccaatcggacggccccgacgacgactccctaacacaaccacgccccgacgacggagcagagctccccacggtggcgccactccggcgagcgcgcttcaagccccccagcgcacgattcccaaatcaaactgatgctacacggtgtaagtgcatgggcgaatcggtatggggagtacttaccgacgacggcgaagcagggacacccagtcacggcgcgaagccgtcccacggtggagatcgaactgcggcgagc

SEQ ID NO: 180941 - DNA, 839 bp, Zea Mays
gcacgatttcatatccacgaccattcgatctcgcgaaggggtaagccatggccaaatccgcaccgttaatcatccgatcaacagcgcccagcctttcttcttcgccctgacccactaacacgcccgcgcgcgcgacagacggtggcgcattgtcggagcagcgcgatggtcattccggcggcccagaccccaatccaaggcatgctaaacaaagcgcatactaatacgaacagcaggggagggttattaccggtgttgatgacgcgacaatggctggtcacggcggagtgctagtgcacggcagagcctatcctccgacgaccaattcacgccacaccgaccacaaaacttgcgtggcgagactacgggtatcctcagggtgttgaggcgaagctccctcactgactcgggtcagcccgacgacggcagtcgcgtgttacagtcacgacggaatcagcggctgcggcgactctcagctttcgctttctcggttcacggaaacgaccgagagatggagtaatgcgcggaaaccgagaccttgggagatatttatcctccacgcggacgagtcgtgggaaggggctgcggactccccaggcgagattcacgcgcgagatgtggcggcggcgcccaccatgcgcgcggttccgttataggagaagctgacaagcgagctccacctgtaagtcgctcagaaggagaaaggggaaaaggagagaagaggctggcaaccgggtcccagtagtcggcgtgacgggtggctggcgtcttgggccgcgcagggaagacagtggagtgggttgagcggagtctgggcccatgcgacagtttaatctttt

SEQ ID NO: 180942 - DNA, 1292 bp, Zea Mays
gggcggcgctgctcctctccgcggcggtgaggtcgccggaattgaggcaggcgtgagctagggggtcccgaggtcgccggagttgggcagagaggaagagggcgccacggcaaactcaatggcagagaaggggccatgaatccacgggtagagaggggagaacggtggtaagaaggcctcgggcgggccagagtaactctggtgagccattccggccacggggaggggacttaaggcgcgctaaggccttggctaacttcagcagaggcaggggtgacacagggacctactccggtgaactagaccaggctaaatcggccggtcaccgcacgagcacggaggaccgccgcggccgagcaccgacgtaggcgaaattggccaaacacagggcgcaataggggaaattgggcacggggacggatgtctcaactcggggcggagctcggtgaggcttggggtggtctccggcgagctggatggccgggaacatgggcgcgggtctccggcggcggctggcaacgtgagcagagcgcgagagagggtgaagctgagcgaaatgaggcgaggggtgtgcgcggggcactagcggggctctaagaaaggagctgggcgcgtgggcaggcgtcgtggccaagaaatccggcgacgtgcgcgagtgcgcacgcaccggcccacggcgggcgcggaggggcggaactgacagggcaggcccacggcacagagagagaagaaaagggcgcacggtgcaacggctcagcgactggcgatccgggcccgcgagacagagagagagggagcgcgctggtgagcgggaattggcgtcgacaggttggccccattgggcagcgagccagagagggagggcacgcgcgagggagaactgcgctgataggcggggtccgcctgtcaggcggcgcgggcgcgtggcttggctgggctgacttgggtcggctgggctgcttccccttttcctttttctctagattttctaattccttttccatttctttttctatagagttttcaaatccaaattcaaactaagtttcaaattcaaataaattcaaacttgtgcaagacttcaaagaatattttaagctcagcatgatgcaacatgtcatgactcataaggttttggtaaaaaaaataaataattaacctccactagtttaagctatttctaaccaaaaggaaaaagagaaaaagaatctagagagagaaagcctagagtgagaaaaggaagagtaacacatgattttgggtgataattagaaagaaattttataccccaa

SEQ ID NO: 180943 - DNA, 554 bp, Zea Mays
ccaagctaagtgatttttaattcttagtcttgttgatttaactttattttgctctatatataactgagttaaatgcataaatggtctctgaacttgtgaatggatgttacttagatccaagaattttgaaaatgcattttttgtctttaaacttgttaagtgatgtaccacattcttaagagcatcttcaacaatgtttcattggtgcccaatattaaaatatagggcgtatgctagaaaaaactactatagcagtgctttattttataaaatttcatcaaaaaatagggtagagggcgaagtgccctagatatgttataccttctcggccagccctacccctttgtcgtgtctgtggaacattcacgatactcttcctggtgactcccgccgtcgaaatgagctacacgctgatctccttgcacgtcctcacgcccctatcctcctattacaccctccccgcacaacaccaccctcctattgtgctctcccagcacaatgccaccctcatcctcctgtcgcgtgctcccctcagtaccagtggcgtatccatc

SEQ ID NO: 180944 - DNA, 559 bp, Zea Mays
agaacagacaaggccaagaattcatttttatctgggaaaaatcaccatataactagcttttcatgaaacaaatgatgataactgcttggcaagaacgaaacaagactggtatccgcctaggatccgtcttcaacaacagatagtactgctctcatacgaagaaatcatcaggagtagagaggatacaataggtctctacaaaatcttcatatttctatcacaaattatcatcactgatagtctagtggtcaagacatatgactcttctggctccgaggaccaaggacatgttaatgtctaatttagcttcaagctctgtggtgatgtgggatttcatagttatttgtctactcttctcacttctggtagatcggaggtagataatagtaagcatgccaaagggtggaattcagtgtagttcggctacataaaccccaggtatgtgtccattcatgaccgacctttaccatttagcttatagtgtataccaaacttgtcaaaggactacccgagtcaattcagtgactataagtatttacaattccgagagatgtatgtg

SEQ ID NO: 180945 - DNA, 806 bp, Zea Mays
tagactcatgcgctggggtcgggagctgtcgtgtgagcgagttggactgtgaaactcgatccggcccactagcccccctaaccctagccaccctccctctaatcccctcccccttgtgcagccgcccctctctctagcctttgtgcagccgccctccgtctctcatctcctcctccctcaaactcttgcagccaccatcccacaaaccctagccagcccccatctcctcctctcctaggtgcagccctcccgcttgatctacgtcgcgtgggtgcaaatctccaattggaatttggtggaaggaagaaggagggaagaaagggggagaagtcaaggtgattttgtgattaactcttgtttatttgtgctgcaattcaatcgattagatgtttacgtatgcgaattggtagaggtgttgtccagaaattttgtcggtgggagaacagcagtagttctagcagtttctagatttttcgtcggtaattagtgggaatcagtgggagaatcatgtagagctttgtcataccttttcaacgagtacttatgtgctcgatttggagttatattttaggagatatcgctgtttgaatctgggtatgttgctgtccaaaaaaaacagatttgcaggtgggcgaacaacagtagtattaacagtttctggggatttttcgtgggtaattagtgataatcagtatgataatcatgtagagctttgccatacctttccaacgagtacttatgtgctcgattcagagttatatttttggggatatcgctgtttgaatccgggtatgctgctgtccaaa

SEQ ID NO: 180946 - DNA, 1273 bp, Zea Mays
gcgggttggtttcttaataacagaggggctcttatgcaaatagtcctcggtgaacgggtaagtgtgaatctcggccacccgatctggtttcaagagcccagattcaaaccccatttataatcgagccggtgtacaagcggccgtcggatcgagatccgaaggtcacgagttgtccatgcccagatgcaaccggggcccttagatgcacatctaacgatcacggttctattcaacgaaacgttatgcgccctctaatgctagccacccatcttgagatcgacggccactgacccgtcttccatccccgatacgcgaccacggcggcgccactgttgccctcaacggagactcgccggagtcacgcaatcaggcgctgctatgcgtagtttctatgcctaaaccccaaaatcgagtgcggggcaaacaatgaactcaatagatgtatgtataccgggtattagggtgtccagctacttcgaccacgaccaatggcggcaccacggcgcggttagatccgacgagcaattaccggccgaccgccgacccaactaccgccccaccggtgtaacatgatgctacgattgtaagtatcaggtctgtgcacttaccagaggtcaggacaaggatggtgagcttggcctcggcacggggcggaaacggtggtgctcggtgagaaattgccggggcccaggcgagcaatcccgagcagcgccaccaaatgaagctttcccccactccaagggagcccccggacaagacttcaagggcgcggtcgacggcagtctgaggttcacacacggcggccccgattccttccgcggcggcaagaaatccttgcgcttgcggtagggaaagcgagaggaaaaaggggacgagtggattgagtcgaaggtcgaggcttttaagcacccctggggctcgcagcgtgatcctaggtggtcgttcggctgatccgtacgaagcggaactccacggtggccatggagtttgttgcggggaggtggccctggcgtgtggcccccacatggcagcgtaagaacagaaccagtgagcgcgcgcgagagcacgggaggctggcccgtgggccccggttgtcggcgcgcatggagtgcccagttgggccgcgcggatcaaaagcgggtattgggccgaaaacagggttaccggcctgattagcttccttctcttttctttttctaatttctgttttcttttacctttaattcatttccaatttctagttcaaattggttttgaattttaaacttgggat

SEQ ID NO: 180947 - DNA, 751 bp, Zea Mays
cagcaggattgctacaacctcacaaggtaccggaatggaaatgggaggaaaatggtatggatgtcatagttggactaccccgtactcgagatggctatgattcaatatgggtcatagtagacaggttgactaaagtggcacactttatacctgtgaagacaacttactcgggagcccagttagcagagttatacatgtcaaggattgtttgtctacatggagtgccgaagaagatcgtatcagatcgaggaacccagtttacctcgcgcttttggaaacgactacatgagtccatggataccaagctaaactttagttcagcttctcatccgcaaacggatgggcaaacagaaaggacaaacaaagtgttggaagatatgctaagagcttgcgctctaaagcatggtagaagctgggataaaagtttgccttatgcagaattctcgtataacaatagttatcaagcaaatctaaaaatggtcccatttgaagcactttatggacgaaagtgtagaacaccgctttattggaatcagaccggagaaagtcaagtatttggtccagaaattctccaagaagcagaaaagcaagtgcagattatgagagagaatttgaagacaacacactcaagacagaaaagctatgctgaaaataggagaagagaattgatattcaaagtaggagacttcgtataccttaaagtttcaccgatgagaggaatgaaaagatttaaggttaaaggaaaattatc

SEQ ID NO: 180948 - DNA, 693 bp, Zea Mays
tggtgatgctgctgtggcactcatatccgaggtctacccagatttgttagagaaatatatggaccctacatacttagctacacacgccattgtatgtcctaataaccttacaaccgataaaataaacgactacattgtctcaatgctccctggacatggtgtccaatgccttagctgcgacacgatctcaaaggcgtctgaacgcatacctgattttgacatgctatatcctactgaattcctaaactctattaatgcagcgaatttcccttgccacaaactcgtgctaaaaagaggcgtcacagtcatgctgttacgtaacttgaaccagaccgcggggctttgtaatggaacaaggatgcttgtaactgaggtcggacatcgtgttcttaaatgcatagtactaacgccctccggagtcgacgaagaggttttcataccgaggattgcgcttaacactaccgatgtcaaatggcccttcacattgcaaagaagacaattttcgatacgaatatgctatgccatgacgattaataagagccagggtcagaccctctcaaaggttggcctctaccttgacaggcctgtgtttacgcatggccagctttacgtcgctgtttcaagggttacatctagaagtggtcttagaattttgattgaaaatcctgatggttcctgcggatcacagactcg

SEQ ID NO: 180949 - DNA, 508 bp, Zea Mays
attaaattatgacaaggggggagatgatgggggcataattgcgatgctacggttctctccaccagtgattagcagcagctggttcctcccagcttacaccgttagagttgaattggtgatccgggatcccgagagaattggggggattgaggggaaactggctaggccattccgtcatctagattgcaatttgacgacccatgctagtccgcggtgaaaacagagctataattgccgtcattacagcggaatccacggaattaaattatgacacggtgggagatgatgggtgcataattgcgatgctacggttctctccaccaatgattagcagcagctggttcgtcccagcatacaccgttagagctgaattggtgatccaggatcccggtagaattggaggagattgagggggaaactggtcaggccattccgtcatccaggttgcaatttgacgacccatgctggtccgctgtgaaaacagagctataatggccatcattagagc

SEQ ID NO: 180950 - DNA, 411 bp, Zea Mays
ggcacggacaccaaccctctgatgctcaacaaggtattccctgaccacatccctaaccgcagggaacaagacctcgtgctccggtaaaggatggatatttataatcgcccagtcctcatgaaatggcggcaaacgctgcgaaactgacctgaccataatcccacgatgttggaccaccgcggcgctgaatcctggaggcaggaacggccccgggtccacgcgtcggtacgccattgacagattctcagacgatcgccggagagcaaagggtggagaagcaggttggggttttgttgaagtgacacccaacgcgagctccaaggacgtttctggcgcctgttcggatttttttaataatgaaaccgcttcggcgaattcaccgaaggaggcaaatgaaggtggagtcccacc

SEQ ID NO: 180951 - DNA, 585 bp, Zea Mays
gcaagactcgcaaagtgacgaagtggagaaaacaatcaaggacaagataagtaaggttccatcaggatgatcgaagtaaagaagttcattaccgagggatgttataaggaacaacgagattagtaggaatgtgtgaaataaaatgaccgctcacgaatcattaagaaacaagggtggtcaaggatatgttaactgaaatgtcctaaacagtcattggggtatgaaaataagcatacataagaatataagagtatgcaagattccaaggatacggacataccaaggtaagggaatagaaagagtcaaaggataacgacttagcaaaggaataggaagggatctcagaagacaaggaggtcatggacatataaactagaatgtttaaataggcaacaaagtttttagaggtaggtatttgaaacaagagtattaaagaatctaggggtaaaagcatggcaatactaagggaatagggatggtcaaatggtagcaatttaataatggaagagaaaagaatcctaaaagacaagaaggttatgatcagggggcatctacgaagatgtcgcaagcacaacattgagatca

SEQ ID NO: 180952 - DNA, 653 bp, Zea Mays
gaaaaggtgtaagcctatttccctttgaccacccttgtttcttaatgatccatgagcggtcattttattttgcacacccatggtgatctcgttgtttccttgtaacttccttcggtaataaatttttacttcaactcttctgtccgaacctcacttatcttatccttgattgttttctccacttcgtcacattgcgagtcttgccttaactttgtccatggattatgcttttcatcattatcacatttatcattatcacccctatatcttaccttgatgtttatcttataccagcctttaaaatatcctcttttccatctcaatctgagcattgtactttacctactttcccttggtcgtatcctcttctttgtcacctatgagtttttaactctatcctttgttgtgtttttgtttgttatttcctttaccattctcatcactctatcctaccttgtgattacattatgtttgttatctaaaatctcgagtctccaatctcaatttgagagcggtgttttacttcctcacccttggctatatcctctactttactgcgtgtaagcttggacataactccattctttgttgtactcataccactggctctcccatgccttcatcttttctcccatacccttgtctgttatcgc

SEQ ID NO: 180953 - DNA, 522 bp, Zea Mays
tcggttgtcttgcatcaaaacacaacctagttcagtgcccgaagcatcacaatacacatcaaacgatttggcgttgtcaggctgcgctagtacgagtgcggtggttagatgctgcctcaaggtgtgaaaggcatcttcacatttctgaccccaatcaaacttcactcctttcttcaacaactcggtcaatggcttagcaattctggagaagtccggaatgaatcgtcgatagtatcctgccaaacctagaaaactccaaatctgtcgaacggtggtaggaggcttccaatccatcccctcttgcactttcccaggatcaaatgctattccttcctaagaaatggtatgacccaagaacttgatctcccttagccagaaatcacatttggagagtttggcataaatgtgatgatcccgcagtcactggagtactatgtgcaagtgctttgtatgctcgtctttatttttcgaatataccagaatatcatcaatgaagaccacgactaatttgtccaattttgg

SEQ ID NO: 180954 - DNA, 432 bp, Zea Mays
ggcggaggcgagcgaggttcgtctttatgcatggacgtgccgggtgaagacgaaagcaggcaagggaggtacgcggttgttgcacgtgtggttgggtatagcggcagccagcagcgcgtagtgagagctagctaggggacatgatccgcgaggacaggttgttggacggaaaggagcagcgactaccgttggagtcaaaccaaggccagagcaagccagcgagtggaagtgtgggactgggagatggacagatcgtgcatgcatgcacatgcctagctaggtgtgctgttggcgccatcggcagacccgcaattgttattaaactctactactactgaatactataatgtagatgttcacggtgcacggttctacccctcccggcctctccccacaccccatgccaagggcaagagcgccgatttggcaaag

SEQ ID NO: 180955 - DNA, 508 bp, Zea Mays
gcttgcttgaccaaatatgcttcgaagcaccaaactagtgaccagtaaccttaaatccagattatgcaccgtagttggtatggctggagctgattttactctgtttagatgacaggggcaaaaccagatggcattacatttgttggagtcattttggcctgtactcatggaggcttggtggatgaaggcaagctgcttttcaactcgatgagaggggagttcggtcttaagccaagaatcgagcactatggttgcatggttgacctgctggggcgtgttggtctgttaaaagaagctaacagtctgatcgcgagcatgccaatggagcctgacgccgtaatctggggagccctgcttggagcctgcacttccatggcaacttagaactagcgaaaacagcggtgggaaaaactaatgcacctggagccacacaatacagctaaccctagtgatccctttcgaatatatacgcgtcatgtggcaaaatggggacgggtgttgccccggg

SEQ ID NO: 180956 - DNA, 693 bp, Zea Mays
gcccaatcatgatggtgcagatcgtagagcaccgtgccgagacttcggtagatttcgcggtggagggagaagctgcttcctccacaccgcaggctcccagtcgcccagcaccagtcactcctgccgtgcacgccgcacggcagcacacggtggtgcaaacatcccggactccatcaaaggcgtctccgggggcattgtcagcagccagggagttattgtgacaccctccaagctccacggcgtcaccaggagccatgaagcagtggcgggacgacgtcgaccggctgctcagtatggcacattctacctcgacccggtcgaaggcgcggtcatcacggcgccaacacgaggcatcagcatcggtgcgctcgccctcagtgaggggcacgcaggccaatgatctccgggcagagctcaaccgcaggcgtgcgggagaggatgcccgggtatctttggaaagggcgcgcgagcgccgccaaaacatcaacgggcgcgacctcgatcaagacttcgtcgcggttgcgccatagacgccaatgggcacccgatcccaaacgggtgtccccttggccggagtaggctgagccgctctggcggatcacctccgcgcgacatcctggccacccaagttctggccacacctgccggaaaaatacgacggaacatcaaacccgtcggagttcctgcaggtgt

SEQ ID NO: 180957 - DNA, 1193 bp, Zea Mays
tggtagaggttggaacggtcggccgtgcccgacagagtgcttgaaatccctataagtagggtgtggcgcatgtccttatggtatgagcattgggtgtcgaggatttcatctagtgtccatacacctccttggggcgcaccacgggctcgagcgacgggtggtccggcggcgtgtacctcctcatgaggcctcttctcccagcacctgtcaggttgctggttcgtgtcgctccgtggtgagggtggtgcaggtttcgtacctccgatgaggtcctaggccctctcatctatggtgatgtagaggtctgcctctcgaaacagttattctgaggtggtgggcgctttctgtagtatggcacggacaaaggccaagtcattggatccccggtagaaatcttcaatcaccgctgcctcggcgacctcggggatgcggttcctcatggtctgaaacctcttgaggtatcaccagagtgtttcatcgccctggtgcctgatggatttgaggtctcatggctacgccggtttgttagagagggactagaagttggcgatgaaacgctgactaaagtcactccaatcgtcgatgcagtgtcatggcagatgtcatagccactgcagtgcgtcttgtcctagaacgatgtgcaaatacgctatcattacgtcttccatcaccccggcggcccgagcaccggtcgtgtagacgaccaaccagccccccgggtcctgcttgggctcgtacttgtcgacgttggagactttgaagttgggggccactggatggcccgaagacgcggagtaagcgcggagaccccgcatgtgtcttcctgtcagcgtttgtgaggtcagtcccggggaggggagctggtgacgtgtcgtctcgaccgtccccgggtcgggccactgtcaaggccgcagccgactcaactcaggtggcgcaacttcgagccgggacgccgtggtcttggtcatactcctctcagcgccttgtctcacttttgtgtcgtcggtcgcatgaaacgttgatggagctccacgcatctcgtcggctgttgatggtgtggcgtaggtcgctcgggggatgagcgatgggcagaaggtgattagctgctcgagtaagcagccaccggtagccttctgtgtctggagttcgtgagaggccatcagctatctgggccagcacccctccaacttcac

SEQ ID NO: 180958 - DNA, 663 bp, Zea Mays
gaccttgaagatggtataatttggtctttgttggattatgaaagttttagtaatttcatgatctttccaaagagtattggtttgtaattttcattgtatataattggagttaggctgctctgaagttgttgcaccgttgtgtctgaactttaggtgtcgttataaccaccaataaatcgaccgtgttttgatagtttcatagcccaaatttgggaattctctttaataaaaactttagttcttctcagtaccttttaaatgggtatttacttgtaattgtctgttaaatagattgggagaggtggttatccggttataagtcgaatctccaatgtgcagtatctcgggctgagtttagctgtaggtcatgcagagttgagggctataaagataaatttgggtgcaactttattgcaaaaggcgtggacgattttcaaacttttccaacgcgtgttcgttgtagttttaagttgagtataggaggagttataggtttttgaattttagttgtccattgtttccatcctatcagttttgcaacaaaagagttgcattattttatcggtttgaaaaccaatttcgagacactcattataataaaagttttacagaatgttataatcttttcaatgggcttatatttgcaaaattttgttaagctgc

SEQ ID NO: 180959 - DNA, 300 bp, Zea Mays
gccgtcttgccgatgatggcattgaacgggaggttaacctctgcaacgtcgaactggacgttctctgtgcggaagttttcctctatcccgaatgtaaccaggagcgtgatgctcctaaggggatacaccggttgcgcgcccactctggagaatggacgagagggtcccagtcgggaccctaggatctgcaggtgcctgaacgcagtgtggctgatgacgttgagcccagccccaccgtcgatcagaacatgatgcagcttgatgttggcaatgacaggggcggtgatgagcggcagtatg

SEQ ID NO: 180960 - DNA, 555 bp, Zea Mays
gccgcaagggactccatcgtggtcagcgcgcttcgggtcagtgtttatcaaattgcttcttgttctagttttcctttgatctcctattgctctccatgccaatcaattgaaattcggccgaagcccatcaccggaatgcacccttgctctgtaaaacgccgccgtgacccaccctcaccgacgacctgctcttcggctcgtattctgcccaaaccaaagtgtgtgcataactcctggtgaacccgtgaacccttcctcagcctcaattcggtcgtcctcgccgtcgtttgatcggaacgcgttcgcccctgtaaccatccgctcggtcgccgtggactgctcgattcaatgcccccttgatgaaattgatttaggggaagtgtttgatagaagtttaattatgtccctgtcgcacgggagctccagccatggcgtcagccggccggaattggctcgccggggtgcggcgagggctgttcctcgtcgtggaccttagtctgcaaagggatggaaggtggaggtcctctttgtaaaccgtcagtgactcatctcaat

SEQ ID NO: 180961 - DNA, 655 bp, Zea Mays
aaacatgttacatataaagtaatctttcaaaatgtcgatgccttcaaaatttggcatgatcaacttggtcatcctggcatagggatgatgagaaagattataagcaattcaatcggtcatgatttaaacgaagcaaaatttccccaatcttagaattatgtatgtactgcctccgctactaggaaattaattttgagaccatcaaatcttaaaatcagaaccgaaccacttcaattccttacaagaattcaagatgatatttgtggaccaatcgaacctagttcgagaccattcagatactttatggtttttaatgacgtatctacaagatggtgacatatgtgcttattatccacacgaaaccacacatttgctaaaataatgtctcaaatcattaggctcaaagaaaatcaccctaaacataggattaaatcaattcgattggataatgcagttgaactttcctcccatgctttcaatgattattgcatggctttgggaattgaagtacatcattccattccatatgtccatactcaaaatggtttggctgaatcattgattaagagaatcaaacttattcttattgccacgtcgccgtgatgcattttctgagagcgacgagttcgccacggacgactcactggacagtccg

SEQ ID NO: 180962 - DNA, 478 bp, Zea Mays
agttgttgtagcgtttttgaggccgaatgacatggaggtatagcagaaagccccaaaaggtgtgatgaatgcagtcttttcttcgtcttcctttgccagactgatttggtgatatctggagtagcaatacaggaaagagagcatagagaagacagcggtggaattgactacctgatctatcctagggagtccgaaaggatctttcgggcagtgtttgttgagatcggtatagtcgacgcacatgcggcaatcaactttatctttttgagcataagaataggatttgctaaccattcaagatgtagtgcttctctaataaacatgccgatactaggcgagctaattctgcccgaatggcctctcttttgtcaggcgtgaaacgacgtagcttgtggcggatcggtctcgcttgaggcaacactttgagtttgtgctcagccaactctcttgggactctcggcatgtccgtagattgcca

SEQ ID NO: 180963 - DNA, 459 bp, Zea Mays
ctcaccgtgcacggtgcacctcgcctgcgacatgacctacatgctcaccacctcgtcggcttggttccgtttgttgtcccggtgatcccgataggtcgttttaccctgccttgggttcccggcgccgattatcatggccacacccatgtccctattttggtcatgctcccgcacctacaagtttgtcgtgtcagctttcttctcgaccctaccgtggacttgtttgcgacggtcaccgcctttgacttccacaacatcatcatcagccatgctcgaacctcgccattgaacttcaccgacatgctattctgcacaatacaggctcgtgtcatcgtcatttttgctgaagtttacagacgtcactcgcctcgacagcaaccacgtccacgactccgccattccaataatttcgtcacgccacccttcaagttcgtgtcctcatccgcaggatcaacgtcg

SEQ ID NO: 180964 - DNA, 501 bp, Zea Mays
gtttagtcttctatagtccacacaaaacctccaattaccatcctttttcttcacaagtaaaactggagatgcaaagggactcacactcctagcaataattccagagtgcaacatctcttgtacctgcctttcaatctcatccttttgtagtggagaatatctgtaaggcctcaggttcacaggagatgcaccagacaataaagtgatagtgtgatcatattcccttgcaggaggtagggagtctggagtcttgaacacaccttcaaattgatccaaaattttctggatacatggaggaatcagatcggtctcctctttctcttggttagaaaccctttgcaacatagcaacagcccacacttcattacctttgtgccacttgatgacttgttcacaagaggtttcctgtaattccttcacctttccaggaatcaacccctgtaacttcaccatttctccatgatatctgaattcgacccacttcttatcccaatcacaaag

SEQ ID NO: 180965 - DNA, 573 bp, Zea Mays
gggtgctaagtgatcttagtagccgacataagagaagagaagcgcacagatgaagccggggcggctttaaattttgtgaccacacatctggacagagtacaccggctcaccatcgtctggccccttaacaagctcgcagacgtccccagcccgaaggtcgtttgatgtcaccaaatgtttccagccctctgtgaagcccacaaataacggacagtggtggatgacagggcataatctcttcttggggtccttcagcattataacatcacaaccatgccttctctgtctaactgcattggaaagtgcacttctatctgctccgtgcttcccggcccgatcctgccccggaggcgggtttgggctttctgtttgggagtaaaggagggacacgaaggcaggtttgggctcgatttcttttgaatcaccttttctccaagttcccttattgatggaaccagtatatcagactaacagtatatccctttatcgatggaaccagcttgaatggcagacaacaagcagcctaggatggatgtggtctgcaccggtgcgtctaacaaggttgatgaagac

SEQ ID NO: 180966 - DNA, 422 bp, Zea Mays
gctgaagccattggaaatttcggagtgcaagtgggagcatatcaccatggattttgtggtgggcttacctcgttctccttggggcagggatgccatttgggtggtagtggatcgcttgactaagtctgcgcactttattcccatgaagaccaccaattcagctttagagttggtccccctgtatatgaaggaagtagtcaggctccacggggtacctaagtccattgtttctgattgagactccaaatttgtatccaaattctgggagagtcttcatagtgcattgtgcaccaagctttctcttagtgtcgcttttcatcctcagactgatggtcagtcggagcgaacgatccaaaccttggaagatatgttgtgtgcttgtgttctgtcttggaagggtagctgggaagatcatcttgcat

SEQ ID NO: 180967 - DNA, 528 bp, Zea Mays
ggataatgctatttaactatagggagatgggaatcattccgaaggttgaaccaatgtaaggtgtgatgccctcgctgtacgtgtgtaactatagtttgtatgatgaggctgtgtgccttcgcgcatccggctaggtccataggggcgttgcacacttggtctagcacgtttattatgtcggtccggctgcgcctatagtcggtctttgcgcggacagtttctcgatgtagacttttgcacggatgtaatgtgccttcgattttgcgcactcgttgtgctagtccgactgcacccttaggcgacttttgcacggatagtcttttgaagaagacttcgattttgcgcacttgttgtgctagtccggttgcacccttaggcgacttattgcacggagtgtcgcacgcgagggtagctagcgctgcccctcgcggtgactttgtattggtcgaaatgccgaagaccgttgatgcggtcttttttcgacgtagatttttgcgggggatttttcgcgtgtatattacatggctc

SEQ ID NO: 180968 - DNA, 451 bp, Zea Mays
ggagtggagagctggaggtagtctgaaactctaaagaagaaaggtgacgactgaatgagggagagtgggccgttttgggctattttgtgttggcgtatttgttgggccaagttcagctatatagagatgactccgaaaggatgtaaaggaacagaatagaaaatactagaaggattacctctctcgcgtgcgtgcgtcttcttcgttggaggcggcgtctatcgagctcacgtcctggcgatcacgccggtggccaggggcatgacaagtggtatcaaagcttccgatcctcggcgtctcggggagcgggtcgtgtcttcctcatcagcgtctttgctgcggtgactagggtcttcgacgcgggttcccaactccatcgacgcgggttcccaactccatcgacgactctcggcatcggcatcgcgtcatcgacgctcgtcgatctccggca

SEQ ID NO: 180969 - DNA, 688 bp, Zea Mays
aactctaaaccacaagcatttcatctccattcagacaaatttaatctgaaaagctgcttcgacattctgttcctgcaccgtctttgctttcccttccatcttcgcagagaaacaagctcgctagctgctggagatggagccagcagagaggtccaagaagagggtgcatccatggatcaatgccaccgtgcacttcttgctctgcttcgcagttggcgccctcctcgcagtcgcgccgcttgccgccaccggagcctcgtcggcctccagcatccgctccgcgtttctcggtccgacgcgtcctgggctagcagctgttgcaaggacgaggaagacggctgctgcattccagagaaaagaactacgactgctaggagagaggtaacggatgtagacgacgtgagtatccattattttaatcaaagaggttaccaagtaatggagtgttcttgttcgttttagcgagtggcctattccctgcttttccatatcagctaatccctcgcctacgcctccaaaacgtcgaagccgcacgtgaagatctccataatagcaaatttctcgtgtttcctttgttggcgaaactgacggcggtatggcattgccacgaagatctgattcgtttcttattacttgtgcttctcgtctcggctgaagatcatgttattgtgttcgtcaccgagcatta

SEQ ID NO: 180970 - DNA, 1316 bp, Zea Mays
aaacgattgcccagaaagcatgcatgcattcttcaacagttttacattccaccgtaaagtttgacaatgacgtgatgatataattgatagaacatgagcctcgttaagatctaaggtgtatgatatgtgtcggcttgagaacgttaaacgtatctatccaacagagattgattacaaacctctggtgctgatcatctctctacccagatttggctaatgatggaccagtacaggtgaagaaaaagtccaggctcgagagggggctcagggggagagagagagagacgaaggcaaacggaaattgtgcacagctcttggtaccagactatcagttgacagccaaacaactttatagaggtgagaggaaaacaaagaccaccatagtacaaaaagatctgacatataaagtaccatttatcattgtcttgttcttttcttgcatctcccatcctcttacgtctctgctaatctcacttctggtactccacaagcatttctgttgcttcatacccccgctgctacaaagctgtccatattcccatatgctgccaacaccttgacaacatgcatactgctaaatagtgaagacttcacaacaaataacaaaagacacactagagatggaacagggattggtcctaaataagtgtcaagagatctctctggacgcaactaccgcctgaccaatggaaattatcgcctaccatctgaccctgttaatgccatgaccagtcctcagtgcagacgcaacagaaaactctttcattggaaacagagtaggtgcagcgcggcatggatttgaggtagcggaggcaggagtacagactcccaaaaccccaagatccaagcaactacataaacatcgaatcacatatgtgaaataggtttagttggccatatacaaacaaaagttgccgaactgccagcacggtccccacataattaggctcttggattggaccacataattggtttgttaggccacaaaactacttcgtgcttcttatgcatggtatcagttacgctgtcactgtctcttcgtaacagctgatattgattgtcacacagcttcacttttggttcacctaaagacacaagtcctacagaaaatattacttgggatatcttgcatcccttgcataaaaataataaacaaaaataccaggcacatgtcctgcagaaaccaggctacaacaaagatcatctggaatgcctagctcccaagcagagagttgatccaagccaagagtgtgcaagaatcaatgagcatttatcattcaacaaatcaagatttggtcgaaagacctcaaagtaac

SEQ ID NO: 180971 - DNA, 361 bp, Zea Mays
gcggggtggagggcagtagtcgggttctggccaccgatgtgcttgcgaacggctaagattagcgacgggttaccgtttcgggggcatagaatcgtgaccgttgagatcgaatcagtgggttcgggtgagatgttggtgtggtcggatcttggccgtggatctcggatctagtggttgttagcgcataccgcttcagttatgtgtcgatctaatctgggtcgcacattttcgatcggatggccgagacctatttatacccgttcgctgggcgcattttgcataagacaccccctgtttttagtgaatgaacccgccgtccatagtcagtgtaaatgaatttcacgcagaccctagattctta

SEQ ID NO: 180972 - DNA, 425 bp, Zea Mays
gcctacacgaaagcagaggatgaaccatgatcattgcctttggtgctcgagggaaaaagagactgaatagagtttttgatgtaatcaggtttgtttatcttggctattgcttccctgcctgaaaacaagggttcaagagaaaaatggcaactctgacctcttttggtgagcagaagccgaagagagccaaggtcttgactcataggccgaggctacattccgtagaaaagactgctgaggtgcctgcgacagagaaggtgaagtttattgaaaatgccgaagttgtccccttggctacggaaacagttcctgctatgccagtcgaagctagtgtcgatccggtaaaagagtcaggaccaaagaaaacaacagaagtatagccaaaactgctgagtctcccaactgtgatagagttgtcgaagcta

SEQ ID NO: 180973 - DNA, 696 bp, Zea Mays
tcatccgcttgccattgcctctgaccgagaagaagaagagagagaagtgggaggcgtgacgacgattgggggttcgcttccgccgccgattaacccgaaatttggaccagggggtaggaggagttggatgtgtggagggtgaacatcgtgatccatcggctcggagggactcaggtcaccggaaaaccctcgtcgttcgtgcgtaccgcggcggagccgtttcgctctgtggtctgccccatcatcaactcaatcgcgagtaagtactcccttccagaatttgtcgaggcctcagcttcggttagcatctagcgcggcgggtaatcatgcactgtaggctagcgggggaaattccggccatggcgcgccgccgtgcggggcgccgtcgtcgccagcaagggtcagggtcgggcggatctgcgtgcatcattggattaggcaggaacgactacgattagaacttgtatactgattcgggtttgggggttgtgagccgtctgatttagatcggacagatgacaagtgacgctagagtattgaatctggagcgtagagatttgatcgtgcggtggttgacgcgtaccgtttcgatccactccagatctaatctggaacacccatgtccgatctgacggccgagatccacccgcacctttggactgcgcaagttttgcatataaacccctctgtttaagc

SEQ ID NO: 180974 - DNA, 548 bp, Zea Mays
tgccgagtttcgtattttagcaccagttatgtttctttagagaatttacgccattgtaaaagtacggactatttttactggatatatgcccctgtttcgcccatcagatggatttctcactccaccagctgccccacgccgtgtagtgaaaaattgtaaaaattgctacaatccagagtcgatttagttttgtttcctggtgtttagattcacaatataaagactaaaagatatgtaacacagagagcagaacttgtacaaagggcctcgggagctatggctgctttatttcaacagtgcttgatgtgtggtgctgctgcaggcctgcaccaagtactactgatcatagcgaaaactcacggtcacacccagctcttagaaatataaaaaaacagctagtgttattatcgggtcaaaagaaaacaatcattaacacataaacagatccatggaccattgtagctgcagtcgggtcaaaacagaacaaacaaacgggtctgatatcaactgggttacaaaacgcggtgacgcctgacgcgtctaacttg

SEQ ID NO: 180975 - DNA, 313 bp, Zea Mays
tgctgtccggttgagctagcactggggctgttgtcaaatgctgcctcaaggtatgaaaggcatcttcacacttctggctccaaacatacttgactcctttctttaacagtttagtcattggtttggcaattctggaaaaatccgggataaatcgtcgataataccctgccaatcccagaaaactccgaatctgccttactgtagtcgggggtttccaatccattacctcttgtaccttctcaggatcaactgatatcccatcctgagaaattgtgtgacctaagagtttaatctccttcagccagaactcaca

SEQ ID NO: 180976 - DNA, 835 bp, Zea Mays
gcttaaacgagggagagggagggttggactgaccgagaagggagctggccgcgttgaggtcggttttgggtggcggaaaattgatttgggggaagttggaaattgggactcactggcgatcaactgaggacgattcttggtggctgcgtgctggatgacttagcggagctggtggagggctcaatttatagggagagcgagcggtggccgggaattttaacggcgacgtgcggcggtcggagataaggaagaactgtggcgcagtggattcgtgtccacagtcgtggcgagctcactggcggtgatttgacggctgtaaggagccacggcgacacgatggaaaggtaaagccacgcggcgcaaggccgggaggcggcggtcaccggcgaagctatccgcgccagccgcaaagcagaaggggaagatgacggtgagtcaccggagtgacgtccagcgcacgggctgtgaagatcttttaccccgcaaggttatctattagccacgagcgcgaatccggacggcggcatcacgaatcttcgcgcgggggggggggggggtcgccggcggcgagcaagctacgctggcagtctgatccacaccggctactgtaccatcgcgtctcatttcagttaacctgacagagcaacttgaagcatgatttactctcaatttccaatgacaactcccccaagctctacagcaaaattgtagagctataaaccagcaataattcgactataaggcttgaactcatttgagcactagatcaaggttgaattcatactcaaagttggctctgttacactgaacatctgaatttcagagtggaaccagc

SEQ ID NO: 180977 - DNA, 511 bp, Zea Mays
gaagctctttgttcactcagtgtcatgaagaattttgtattcccttttcttatgctaaaggattgtaagatcaatgctgatgtatgaatgtcttccacagatgtctgacaacaggcgccgatgcaacaggcgtgctcagcaagagcagcgtgcccagcaggaggaacatcagaggcagcctcccccaccacccccgatgaccgtggagcagatgttcctgatgcagactcaggcagtgcaggctattgggcagactctggcagccatgcagcaggctcaacagcaacctcaaccccagatgcaagtgcagatgccccagatgccacgggataagcgtggcgagttcatgagagggcaccctcctaccttcgcccattctgctgatcccatggatgcagaagactggctacgcgcagtggaaagggaactgcgcaccgcccaatgtgacgacagggagaaggttctgtacggtccccgtcagctaaggggagcagcccagtcctggtgggag

SEQ ID NO: 180978 - DNA, 772 bp, Zea Mays
cgctgggaagtcaccgcgagaaaaggagaggataagaggtccacttcgtccgccaccgaagtgcgccgtctatgcggtcgctcgacgttcaaggggggaggtataggagatggaccctgggtgcacggcgaaggtatctagggccacatcggaagctgcatcgactcagagccgcttgaattcgtcgacgggattcttgctcgccacggtaacacctcgcgccgtgggcgggactcgtcgccacttcaatcactggtgagttctcaacttctatgacatgcgctatcatctccgtgtcgcctaactctcagccgtccatgattttcgggcacccaagtccgtaggcatgcacgccagcagggagcgtcgtcgtggtatgctcgtgccgccagcctgggtgctggaaggtaaccgaaaacccggggtccattagacccatatcggacagtctagattaaactagcattgctttggctcaggccgtcgatttccggatgggtggcctcgatttaatctaaaataccctttcaccacattgaatatgtgtcgttgatcaactatccaggggcagagaattgaggacggcatgggcgactttgaacaattggatagagatctgatgaactgtgacacataccggctgataaacgtccataccccttcgccgaagctaacttgcaaaaagagtccctattcttattcataattaacccgacatccatgctggtgtaaagagtccttcagaccagtcctaaaatttacacaaaaaccc

SEQ ID NO: 180979 - DNA, 833 bp, Zea Mays
gttctaacccaatttgcactctagaattgagaaaggaaggaaagaaatactatataatacaaaagaagggtataaatacaaactttattcataggggtaagatcaaaatctgcctttaagtgagtacaaaattcacatgtatatttggagtttaaattggaaatttaaaataaaaggggaaagttaaaccagaaaatggataaaggaaaacttcatccgcgggccaactttcatcaattcggcccatcaggaaaacaactgcgctcggcccaactccctttactgcgcgccccgactcactgaccgcgggccccagacttcaggctcccgttcttctccgcgtcgtgcgccgtctctgcctgaggactcgggcgcactgagctgcctcgccctcaactgccgcgcgcaacgaactccgcaggattcgggcgccactttccccctgttgtcgatcccaggtgggtataagaccggacgccgaaccctaaacctcaccctcctctcgttacacggaaaatccagctgcttcggggagtttagtgtcgtgttcgccgccggcgttgacctcacccacggctggcgtccgagagtccgtggcttgacggggtgcttcggaggcttgccggtggatcacccgttgacgaattaggggagggaatcaatccagtggcggccggaatccgacatcgcgtccggtggtccgccgtaggaagtctagcaccaattagaccgcggcgttcggtgagctcccaattctttaccctttccgtattcttttacctatctaatgccgcgccgtcatcaatcgtgggcgaattgggcacgaatttggc

SEQ ID NO: 180980 - DNA, 421 bp, Zea Mays
ttggaacccaagcactgctgcgggttcttggatcagccggcgtctgcaagcggcgagacgtgcgattaccacgccggcgcctgagctccggtacacacagacacacacacctggatgaatatcacacgagagaatttttggcctgcagactaatggctgcagcttttctgggtttattctctactcaataatgaacaagatacatccggcttatagccgtttccccgtcgcacgaaggctccacgtctcctgtaatttcggatcagagagagacgtgcacaacgcaaacacgacgtcgcgacggggtaacccacatggcggtcatggcatggtctgtgcgcgttccaggcacccatgaaactacgccaaacaaaaactgaaagcgtaaatactgtttccaacaagattacatggtgctcag

SEQ ID NO: 180981 - DNA, 805 bp, Zea Mays
ctgcaggaagcacggtggagacgtcgagcttgtcgagctcgccgcccggcggttcttccggctgcagcctggaaacgccgggaagtacctggtcgtggcgaacacgtacgccgcccgcgagatgtgggagagcgtggctggcgcgcacgaggcgatgagggcgctgggcttacagaaagatcgtgcctggagctccgtcgaagtgcagagcaggaagcacattttccttgccggagacacgtaccatgacgaatactcggcaatatatgaggtctgcaatgcattggcctccaccgtcgccgagcaatccgtgcgaccagtggatggtgtcagtcgttgttgatggctatgcagtggtttgcgtggtgactgctgcaattcagaatggaagtgcgccgcttctctggagaaaacatcgtgcacagaaatttatctagtatgatctgaatgcctcattctcgtccgagcagttttaccagtataaaggcaagtgagcaagactttgttcgctacactgtaccagagcctgatgaaagctgaaagagcagaggccagagataaccttgggataagttagcagagcaaaggacaggatgttacgtggtacatgtccatctttatttggaacctttaccttgctttcggaaggagcatctaccacaagatcgcatcaactgttcagatatctcccaatcatggtggtttagaatagcacatcgagctgtgaattggatccttgaagatctgtgataatgtcaggatttggagagacactactgatatgttttcttcagcaacatgtagg

SEQ ID NO: 180982 - DNA, 666 bp, Zea Mays
cgcgagacgaccattatgatgcagggtacaagtgcgtgccaaatctgttgctgagttacggggtgacatgtgtgtggcacctactgatgtaagagtacgattggtacgtggtggtgacaataccattggtagggacaccatacttttgtaagagtacgacgccagctcgtgctctgtctgcgcgtacgtacgtggtggtgtttggttggtgcttgtataaggagcagccggcctacctaatataatctcgccagcaaatacagcatataatataacacggcatacattttggcacgtagcacaacgacgaacctcatgatcgagcgtacatgaaatcaaattcacaaaccaaagatcaaaacaatatgcaagcacatgctcgatatcgcgaggcaacaacctccccacttgtattatgggacgacatcatcaaggggacttgatcattcatcaagctagcacagagcccaaatctagacaaggaaaaaattgcgtctctgatcatacatatttcaacgttcccaatgcaagaacatcaacggaacccgtttcccgtgcagttatattaaggtctgatcagatcgacacacctctgttaattactcatcttcggcttccctggacgaccgaccgccctgggacctgcagcggcggcggcggcggcga

SEQ ID NO: 180983 - DNA, 625 bp, Zea Mays
aaaagaattcgtcctcgaattcgaccactccaagcaaagcatccaaggtaccccatatagcaccaccattcaaaacatgggtccattattggtcttaattaacacaagaacttctacctcgcactaattgtctaaggaaactacacaacttgatatccagcatgaaacaacatgcaatgaagctcaaagtaagtcatagatgcaatcaacactacgatttcacaccatcgaatttggatgcagctatacatcaacatcaatgtcctaaaacaacactcttttatgaaggggtaatatgcactaagcacaacccttaccagcttcaacaattcattttaattcaatggggaaacatccacaccagatgaatgtataagaagatcaaacacatcacctcaaagcaccacaaaacaagtagttctattgaaacaaaactcctaatcttcctaaaccttgttcttgccatcatgaaaaggtaatcatgtaatctcacattctttgcaccccacaaaaagggagaaagcctatagaactaatgcagcaataaagccgacaagaagccaataacattctgtgcggcacagttcatcgaagaaatgccaaaaactccacaaagagcactgac

SEQ ID NO: 180984 - DNA, 380 bp, Zea Mays
cgaggagttaccgggcatgtcacctgagagaaaagttgaatttgacatatagcttatcccaggcaccaccccaatttctaaaagagcctatagagtgtccgaactagaattggtggaactcaagaagtagatagacgagttgttggagaagggttacatcagacccaacacctcgccttgggccgccccagtgttgtttgtggagaagaaggatggtacgaagaggatgtgcatagattaccgagctctgaatgaagtcaccatcaaaacaagtatccctgcccagaatagaagatatgttcgaccagctaagaggagccagtgcgttctcaaaaatagatctgaggtcaggttatcatcagctcaggatccggccttcg

SEQ ID NO: 180985 - DNA, 521 bp, Zea Mays
atttttctttcattctgattcccatcagtgtttgcaaatcatctgtactgtccatccatgattgaatcaatgcatgcacttctccaatttcatgaaaaaatgtatgtgcagtgacatggagagttgtagagacacgaacagtcagatcataaaagtgctctaaaaattctgccatcttccttgcgttttcccaatctatctcatcaggatgaccaaaaccaccccttccttcagataggtccataacataactcatgtcttcatctgctagttttgtgaacaccttctcatacacaattgcagatttaagcataatatatgtggagttcccatctagttgggacatcagccttaagatatggattgttggttagcttctcttcctctataatttccttaaatttgagcattcttgaaccaccatttctaatgtacttcacagctgccctaacacgcttcactgataggtctacttcttttaggccatcgtgcacaattagattaacgatgtgagctgcaca

SEQ ID NO: 180986 - DNA, 653 bp, Zea Mays
gcgagactcccctcctacctggtttttctcttgagagacatgccgaggtagcaaatatttcctatttctatacttatctactgctttgctgctcttgcttatcttttctaattctcgtgcagcgtttcagttgccagtgcaggatggtgcggacaaataatgtcaccccatcaggaggaggagatgaccatgaccctcttcgccccttcagacatgacaagggcaaggatgtgtaccttgagcagcatggaggcaagaagaagcagaagttggatagagctactcaagtagtagtagcagcagcagcagctgatccggcagagtaaggaggttagccgaggatagcttctgatcatattgccttctaggtctgtcgcctcttgtctcggactcgctccactcctgctcagttcgacccctcagcaccagtcaccactaccagtccaccttcctccactatgccagcttctgccactcttgagcctaccaccacacctcctacaacctccaccacacctgcttccgctgctccctcttccactccaccagttctgcaccccgcttctgagagtgtgacaagactgaggtgtgacctcttgctgtgaaccctcagctgtttgacctttagagagccattgctgccagagtctgtc

SEQ ID NO: 180987 - DNA, 338 bp, Zea Mays
ggccggagttatccacgacggtgaagatcttttaccccgctgcgctatccatccaccctaggcacgaatcgcgacatcggcagcacgaatcacggcggagggagtcgtcggcggtgaggacagttgcgctggcgatctcatccgtttcagttactgtaccatcgagaactgattcagagcgcctgatagagcattttggagctccattttctcccagattcatatggcaacatgatcaacactctgcagcaaaattgtagagcaatataccatctacaacattattgtgctgtcacaaaaagccaatggatcttgcttgaaattaaacttgaagtttg

SEQ ID NO: 180988 - DNA, 383 bp, Zea Mays
tgttttgggccagcagctaacaaacccggcccactccctgtttctggcgacatctatgaccatacgcatgcagtgccgcctctatgaatgactgtcgggccccaccttgtcatgtggcaccgtcccaccgtcacacgcgcttggtcactggccgtttggccgtgaatgtcagttccacctcttccaccgaatccccaacagaatgctccgatatcctctcaatgccgtccgcaaatccgggctcggctctgtgcccacgccgctctgttataagctgagcacccgtgatctcccatcctcctcatgactttgttaggcgctttagccaagttcggggttggagacaccttgctgtcgtacggatccatggcggtaaacgttgc

SEQ ID NO: 180989 - DNA, 478 bp, Zea Mays
ttcgtctttcgtgtttacacttcgaaggtgtcctaaacccaagacaaaggtcttcattttaacttaagttgcccttgaattttagtatctctagggaattgatatcaagtatccaatattggcgtccacctctggtgattccacgaccaaatcaacatacaccatgacgccaaagaaagcagcggcaactggctccatccttgcatcgatcgatcccaatcaagggaacgaagctctcatcagagaagcaaggaaacagaagaaggccatcagctcacccccctgagaagaacttaatgaggagtcagcaaccttaaactcatccaccaacaagttgagaagcgcaaggagaaaatgcttcgtctttcagagctccaaagcaagattaacgaagcaactgaagagatgcgcaatatcgaagcacacgaaaacttgaacaacttcagggatcaagattatgttggacgcgatcatgaca

SEQ ID NO: 180990 - DNA, 464 bp, Zea Mays
gccaagtgccaaatgcatagtgaccatggtgtcgagagtgactcaattgatgaggatgaagataatgacaatgcgagtgtgggctctgagctttgggccattcctgatgcctccctcgatgcctcaacaactgactctgtctcgacttttcctggcgaggtgccgagtgcctttcccatcgttgagaagactaagttcccaacactccctgccctttttctagaccaattgcctcggtagcacttgcccctctgcccatcgtgccctcatccgaccggccaccgagggtagcttgtgggggaaattcttctgcctctggtgtgtcggatatctcggctaacacaccattggggccacccacactctcctccaaggtgggtggcaggactgatgcttcgtttgggtgccacgggggtgaggcgccttttggggggcaaaggttcgtcagggcacgactaatcagg

SEQ ID NO: 180991 - DNA, 284 bp, Zea Mays
aacgtgcaggggttgctcctgccacaaaactaggtcatgatgtgctagtcaaggctagtacaaactcggccaaagagccaaaattacagaagacagcagaccgattgaaggtgttgagtccaccaggtgcgataggattaccgaagccatcaagcattcccgcagtgactccaaggaaaaggagaatagttagcatgctagacgctgttctggagtccgtaaagacatcagatcctgcctctgccaaagctcatagcgcgcagactaaagatgcaaggaaaatt

SEQ ID NO: 180992 - DNA, 794 bp, Zea Mays
gggaaacacgggtccaccaccgtcgaccacgtgaaccacgggcgctaggcaatccgtggagcatttcagtgttgcgtcgcgaccccttgatgcttcggcagccgctaacttctccattggtgtcacggctctagcgcatttgctcgtcagacaaggcactcgctgctcacgccgtggaccgcccgcctgcgcgcatcatcttcggtatggctccctcaaccgcattcgctttcgtgcctgcatcgtgtaaagccgtttgggttaggttggggcgctgggaccttgggctcgcctcgccggtgaagtcctctgcctgggttgttgttcggcaccgccgtcgggctggaggaagaagaaggtgcccgtgtccgtcaattggcacgcgcacggttaggatcaggcgactgcatacccccttcatgtagggtgatcgtggccctttagtgtcgatcgtgcgatcgagagttgtgctcggagtcgtgcgctgtgggccccggatcttggatccaacggtccgggacagatgcgggaaaatagtctagtcggggtctaatctggcacgcaagattgggatccaatggtccgaatcttcccataccccttcgcccgagaacacttgcaaaataaaccccctgttattttaaaagcatcatgcagtccatccggtatgtccctgtgtctcggtttcttttacactagaacccctgcgctttctggaatttggtgcgcagtccagggggaaataaaaatagagaattaaatatggaaattgatttttaatgctaaagaaattc

SEQ ID NO: 180993 - DNA, 611 bp, Zea Mays
atgcattgtgatatactcatatttaacagagcaaacagagcttcatcaatcagcaagcagccgtttccatccctcagttttaatcgtgaaatttattaaatcaaaatcatgtaaccaggcaatcaaacatgtatatcaaaatgatccatagaaaatattaggtctgaattaggccagattttcttcaagtaaacatgatcagtattccagaaaaacacgaaagtgggctacgacaacgtccacaaattcagcatgcattagtttagtgtgacacagggcactccatgcactcatcagattctacagacacaaaattgagctgcaagggctagtatctatactgcacatcactgaagcaaatcaatatacaacacagcacatcagacatccatgtggctaagattcctgtcgatccatttccatggacagctgccccgccgagtgggaagtggccgatctggcgcttcaatcggtggggatggaggaggtccggcaatggtggatgggcgcttcgtccgtggggatggagatggagcaggccctccgatgatgagcggacgcgcggggaagtgtgtcggcgccctatgtggaacaataaattcattgacttt

SEQ ID NO: 180994 - DNA, 713 bp, Zea Mays
ctgaagatgagctccagggacacccatggagcggctagcttggggggataactcccagaatgcttgtttgaccggtaggttggaagtgtcgacggagtcttcgtcctcaccagtggcagcaaagaactccattgggagcggaagatttgacagggagcgatggatttgagcagggagcggtttgggggaagcgaagggagggaagcacaggaagggaagaggtcgggcgagctctcgtgaagtcggaaattggatttgaagaccggccggcgaggcgcgagaaccacctggatgtttggcggaggagacgagaaacatcgagatgtgctgcaaagttgaattttcagggttattgtcgttttttcaccgtttgtcggactgcagaatcctcttttaacccacccaaccctagattgtagattttggcccagattatacactgtagctctaaaaatctggtccgtttgaatgcgtatgagattttttgcattggattttcataatccaataggatccaaacagggcccaagaccaattatcgtcagacacgtcccaatctgagcgagagatgtgaaaaaaaacaacgcggagtcgcggacgctagggaactactccgccgcttcagcgcgggacaacaccacgccggcgcggacccaccagcattttcaggcccagaatttcacgcgctgacgcgcctgcgccttgcgaaacac

SEQ ID NO: 180995 - DNA, 477 bp, Zea Mays
ttttgaaaaaaacgtaagaatatgatcaaatcctgatagtcgaagtgcaaatagtatatagttaagataagaactataaggtggcttagtttagaatgctaaccactaacccacaactataatgcaattttctgcaggtacactaactaaaaccctaggaaagtgcgactagtgatcaatgacggagtaagtaggattgccaccgccatagaacgtgatagccactatgtgttggcaagaattgtgaggacgaataggacgagcatgcatcatgacatacaactttaagttaaaccccctatgtagtagcttagtacatgtttcatccatcccattcatgctacctatctttgcttttctatactaccttttcctattcgtgaagccttgaaactcagttcatttggtggacctgtagtttataaggtacagttaccaaagaatttttcaacagtgcacgacatgttctacgtgtcc

SEQ ID NO: 180996 - DNA, 313 bp, Zea Mays
gtgctagtccggctgcacccttaggcgacttttgcacggatagtcttttgaggaagacttcgattttgcgcacttgttgtgctagtccggctgcacccttaggcggcttttgcatggatagtcttttgaggaagacttcgattttgtgcacttgttgtgctagtccggctgcacccttaggcggcttttgcacagatagtctttttgagaagacttcgattttgtgcacttgttgtgctagtccggctgcacccttaggcggcttctgcacggatagtctttttgaggaagacttcgattttgcgcacttgtt

SEQ ID NO: 180997 - DNA, 1062 bp, Zea Mays
ttggacccatttgcaaaaaggaccccatttgggttctatgctaagtctgaaatcagtgttataagctcaactttggagctttataacttccaaattagtaagaatacaccttagggaaccacatcaactttttagctctatgaaaggagaacaattttgcttaagagtgtaagcaaggtttttatgaagaatttggagataatcacactcaaagtcaggctgtcaggctgttaagtctgaatttcagactaacagtgcaattgcagtgactttgggcatgaattcaagcttggttcaataggaatttggctattgctgctatggcaaaattgtagctggtttgtagctctccaattttgctgcagagcctcggattagttcccatatgagtttgagagaaaatcgagctcaaagattgactgtcatgttcatctgaatgaaatttgccatggtatagtgacctgatgaggatcagaccgccagcgcagaatgttcaccgccggtgaccacttcgccgggattcgtgccacgggcgtatggatttcgttcaccgggtaaagatctcatcgcggatgtgtatgagctactttggcctcgctgtcccctgccccttttcaccggcgacgtggcctcatggccgtcaccggagttgccgtgctttactgcggttgtgccacgctccaagccatccaccacgtcgtccctagccgcaccagctcaccggtaaccgccgtagctcctcaactggtgatcaccgaaggaagcgccacggtgaaagccacccatccccggctccagtatacctgtttccctccggccgccagcataaccttgcaaaattggacatcaccgtcgatgggatctataaattgagccccccctcggcttcgccatgtattccagcagctactgcacccacctgcatcccaaaccccccaccagagagcactaatttcggattttccccaaaacgcttaagaactcgctcggtttagcctcaccgcagccaactcgattcaggtcagtgcaaaccttctgctccctcgtttaagtgtgctcatg

SEQ ID NO: 180998 - DNA, 661 bp, Zea Mays
gcgtagaatccgtcggagacgtgggccgcaacacagggcggaagctcgttggtagagaagttcggcgagaaattccttggagtacagtgtataatcccgtgggattagggcacgcgcaccttcccaagttctcgatggacgcgtttggagccttctccgtggctagacgcgggtgaactgcgacaaccacgatggtggccccgctttcctttctctctgtgcatggtgacggagctcggcgatttgttgatgcgaggcggtgctagctcctactggaaggggaaggaggaatacagcccgccaatatatatccctagaggatgaccggaacgccataatcgcggcggatttcacgggcggaacacgccgatgcctacgcgcgccaagaaaatcggaacggagattggcaggattttggaggggataaatccgatagttgggtcccacctgtcatcaacacaggctttgggagaggcgcggcgtctgtgtctgcggaacggggcccaagcgacagcgtcatcacggacgattcacgcgcggaatggtctgaaacgcgggcccacccaggcagaggccacgatccaaaggggcgcggtcgtaggtgggccgagacaggtgaaatcggcccaaggtaaggtttctgtccttcttctttattctt

SEQ ID NO: 180999 - DNA, 672 bp, Zea Mays
ggtggtgtggtgcgtgatgatcttgcggagcttacggagggctcaatttatactaagcgagagcggtggccgagaattggaacgatgacgcgcggcggtcggaggagggggggtttcactggcgcagtggattggtgtcctataccgtggcattcactccagtgatcaacagagagctaaagcaggtcatggcgatgcggtggagatgcctagacacgcgacacaaggccggaaggcggcggtcaccggcgaactcatccgattacaccgtggcgagtgcggtacaatagacggaatagtttactggccggagttatccacgtcgacgacatttacgcgaccttgagcgctatctgatcaacccgagcacgaatcgaaacggcggcggcacgaatcgcggcggagagatcgtcgacggcgagaaactgagttggcggtctgatctacttcagatactgtaccatggccattcctcattcagtgcacctgatagtcaaagtttagggcgaattttctcttaattttatttagtaacatgatcgacactctttagcaaagttatagctctaggatccagctataatcttggtatagcaaccctaggaaaattcttgctcgatcatgcctgaattcgtgcccaaagttcttgcagttgcactgttagtctgaaat

SEQ ID NO: 181000 - DNA, 1476 bp, Zea Mays
cgtaacaggtaactaggggtataactgtacttagaggcccattatcctttttggttacctataaataccactaacctgtatacaaacgggtcacgcataataaagctctacagttccccgctcagtgtcttcctgtgcgcctgatcttacttatccactgagtgttgggcccacctgacatacagttccaacactgagacccaattcccatcagcaattgttgcagagtggaatactgcaaaaacttctctgagtgactggtgaccattatttttgggggcactttgtgaaggctggccaaaccttccgaaccatacaactccatgtcataacactgctagacacttctctagacactatacttttctatcttcaacaacatattcactacctccctcatggaaggcctagactggcaagccacctgcgtgcatgaaaccccaaggtccagcaagctcagagccttttcttgctcatcttgagaccaacacgtcatctcctcatccatgaggcttatgatgctgcggcgatctccatgctccaggttagttctcatccatgtcacaatgtcaataccatctccgaacgatgagtccacaggcgtcttcctgcataggagctcaagtagcactactccatagctgtagacatcactcttctcggttaatcttgtagcgtatccatgctctgggtacatacaatagagaatgtgtcaaccctgaagttcattcaagtcgccatggtgatgtgatcgaacaaattacagtatgaatctgagagaacctacctggagcaatgtagccaagggtgccaatgatggcagacactgttgcatcggcgttctcatcggcgacaatcttccccatgccaaagtctgtgagtttgggtacaaactctgcatccatcagtatgttgcttgacttaacatccctatgaacaatcataggcacagagtcatggtgcaagtaggacagggcttgtgcgacaccaagtgcaatctggcaccgcgccatgcagtcaagacgcactcgaggcttcctttcgtgcaacagttcgaagagcgttccctcgggcatgtactcgtacaggattaggccgacgctgccacggatgcagtagccgtccatcctgacgatgttccggtgcttcactgtgttcagaatcttcatttcgatggggaatttgcactgggacaggtcgaccgtcttgactgcccagtctttgccaagtttgcattctgtccggtagaccgtaccatgccggcctcttccaatgacgtatttctcactccagttgtctgtcgcccgaaggatgtcttcgtaggtcaggtcttcaggcaattcctctgttgtgtccaggctacggacagaggcacgacttgctgacaagtgatgtgacctcttcacaatgtagtaagcagcacacgcaccagcaaccatggcagcaagagtagacactagcaatgccacaacaact

SEQ ID NO: 181001 - DNA, 343 bp, Zea Mays
gtgggtccagctggtctattgaagcttggtcccttgggtggaagcccgaaggatcgagctctctggtgacggtcttgctgctgagctcgtagaacttggaatttcctcttgagatgccctttttcttcctctttttcccttccacttgtatggctttgttggagaggtgcgagaagctgaggaaatcttggctggcgaggatggtcttgagttttggtcttagccctttcagaaaacgggccatcttcttggtttcggtgctgacatcgtcaggcgcgtaacgagccaactctgtgaatttgtgcacgtactcactgacagatcttccaccttgagttagttc

SEQ ID NO: 181002 - DNA, 436 bp, Zea Mays
ttgcagttcaaaagctatatttggctttcctttgatctctatcgatatcttccttctgtctcaatacattcattgcatatactgtatggatgtgacttgttcagaaaatctattgcaaatttcaggccatcccctccaatgggtgtgaccaagttacgtcttggtacgcagagcatctagcacactgtcctagagtagtaacttgatgtgaccacggggcgtaatcatatcgcccgggcagttgaccttagtccaaatggtgtcgtgttacacgaagcggcgtctgctgcctaacttgctttcaagcggtttgaattgcttactgaatacttgtgactgttcggtgagcgtggtatgagatgaacagtttcctctggccccctataaatagcctgcttgcaccgttgttctcttcacacatcctccaatcgtctgt

SEQ ID NO: 181003 - DNA, 737 bp, Zea Mays
tccaaatcagaattttggatggatccattaaaaaacacagattacagcactgaccagacatacaattgcatccagcgaacaacaacacccttactaaagggggactaactcaggggctctccacccaaacagggcagatagagcctccacctcactacgagtgagggagcgcttgccgagcatattcttccaaggcttcctaactaatcccctcattctcggcaataatatgcagggatctcatgactttcttggtagttctccctcctaggtcatgtaaattaaattccactccaacacccgcaacacgacgatttcttcttggcatgggagcagcaggtggggaaggtggaggatctgcatgcaaatcagttcgcggaacaagaagaatcccagaagattgcttggtgattccattgaaaaactcatgttttctagcttcaaagcttgctgcttcatgaggttggacttcagcagcaattctatgggcaggggcatcagcagtgcacataggcatagagttacccaaggactccgaatgaggcaggcaaaccatctctgtaatgttggcctcctcgacctgtatcacctgtccctcctgaatctgggcatgtttgcttttgaatctgcttctcgagtatactctccggggggcctcagcagcagatggaccgtcaggttggggcgaattcgcgccagcctgttccagcggcccagcaacagacatgtgtcgctgg

SEQ ID NO: 181004 - DNA, 668 bp, Zea Mays
gccgacgacccctggaggagtcaccaccatcgtcctcatccctgccatcagacacgggaggactaggcgcagcaggagcgtgaacctccgagaaccgcaactcaactggataggataacacccgtttcacaggagggacttcaacgatggccgacggcggctcaactacccagagttccctggaagaaggaagcttggacagatcggaacaccaagccaagcatctgaaacttgacagatccaacaaccccagcgtatcaggatgcacttgcggaacaccaagccaagcatctgaaacttgacagatccaacaaccccagcgtatcaggatgcacttgctgtatccaggcataagggcacaataggcgatcaacagtagacgtctcccacacatgggcagggatgccacgaagctccacatcaatcaaggacgacaacacacgaccatgagctccggccaaacgattccaacgtttgcacagaagactgagaccgcctccagaagaactgaccggctgccgaaggccaatcaaccgctcaaccagaaccaggtccggaagaaccaacaagaagctcgacggagaggcccgacggagaaccagagagctggcggcaacatcgatcctggcagcaagcaccgccgccacctcgccagcagagaccagggg

SEQ ID NO: 181005 - DNA, 815 bp, Zea Mays
ccttcaagggaagactgaccacggggaggtggaggattcggtgggtgtggtcaccactgccagtgcctactcggtgttctggccttcttagtgaaatagaggggtggataaggtttgagggcttaccctagatgtatgtgaatggtgtggcacggtggagaaactatggaatcagctagggcatagtggatttcagtttgtgctttcatatgccataacaaggcatagctgctgcagcctggctgtagcttctttgggaccatatgcagaggataaaagagggccaacatgttccacttatctcctgcatggtcaccacgtagaggtgaaacacagtaaacccatgaacacatattcactgcatgttggacaacacaccaaatagtcaagcagctgaatcacttctagataggtcttcaagtcttcagctttttcttcaatatggtggagctataccaggtgaacccccctcagggtaactctatttctaccaaccttttgccaagaaacaactagaaactctagtggagagagatcttttcttcagatattttcaatgacctaatcttcttcagtcgactgcaccccagttttcacctccccttttctcccaattctgtagaagagcggaccatgctcaccactccaaacttgttcaccaagtattggtctatcactttgttataacattctagagctaataacacctagatcacaagctacattgccccaaagtcgagcacaaaatcactggactccaaattcagtgaactgaatttgatcccttccaccaagtctgatagagcaagttggag

SEQ ID NO: 181006 - DNA, 650 bp, Zea Mays
tataaagggattaaataccaaatgtaggggaacaaattcctttaggtcatattagcttggtgctagacaaaaaaatgagtaaagcactctccaacatgccttgtcagtctatgagttagacatctatttcagtcagtggaaagttgggacccagtgaagtgagctcgatttttgggctgtatactggttgatccatgcactttcagtcctagaatgtaatagcaaccttagagacctatgtatggtgagtaaatttgatgtggtaagatggacttgttctggtttaaaaatgggagaaccagggtcctgaacctgggactgcagcataactgaagcagttcagtatgattgcaagtatttgagaaacaaatatctctccccactactctctctaggtgttgctgctgtgttgtggataaaaaggagctgagacttagagaggtggagggggatcacgtagtatatttttactgtccaaagactcagctgcttgtgacttgctgtcaaaacgtgttaaaccaccacaccttgtccctctattcatgggtcctaggtggagtaaggtagtgcaaccacatgtccataactatgtctttgctggtactccagaggccagagccctctttaaccggcttccagtgaactcagca

SEQ ID NO: 181007 - DNA, 449 bp, Zea Mays
caaaaactctgtttagcctcctcttgccgcgagcgccgaaggcagtggtcatggctttgtcctctgccttcgtataagctcccaacaactcgtcactggtagcttcaacagcctcaagccactcatcattcggctcgtcaaattgacttctatatcgataggtgtatcttagataaaccagaccaccttcgctggagccagcaacagtctccttcggcatctaccagtcattaacaagcaaccacaccttataggcaatatgctcttcaactaaatctctggtgccaatgtaagtagacatcatgttgaactccatcaagcatgcttgcactttgttcccactcacgatagatggccttctgatgccgaagtgtgaccgtatagggctctggattacacccctcacatcttccctctcattcagatcattcttgacataaaaccattgc

SEQ ID NO: 181008 - DNA, 296 bp, Zea Mays
gggagagttacgacgacaaaagagaggtgatgcgcacaatagagtccaagtgactaatgggacagaagatgcgttgtggatctcagctcgtcgattcgtacattaacgatcacatacgcgacatgcgtaggtatgcgaaatctgcccattttgacagcccgaagcgtacagagaagaggaagttgaaggcggcaaatgagaagagagcacaggatgcaagggaatgggaggcggctagagccgagaaatagatgttggataatcttgctgatcatctcaagggaagtaagaaaaat

SEQ ID NO: 181009 - DNA, 724 bp, Zea Mays
tttccatacatatgatagtgtcatcggcatattgtaacaacatcacaccattagggatcaaatgcctacccaatccattcaaaaccccattagcacaagctttgtccataattctagcgaggctatccgcaacaaaattaaagaggataggcgagagaggatctccctgacgcacgcctttgtagctcttaatatatttaccaatttgattatttattttcacactaacagtgcccccctcgacaaccatatgcatccacatcatccatttatcgccaaagccccgatgttgaaggctaaggaataaaaaatcccaattgactttatcataagccttctcaaagtccaatttcaaaataataccagtttctttcctttttttagtctcatgcatgatttcatggagaatcataacaccagtcattatatttctccctttgataaatgcagtctgatgttcactaatcaacttctgagcatagggttcaattcttatggtcaagaccttggtaatcaacttatataagcagttaagaagacagataggtctatactgttgaattttagtagcttctttggtcttaggaagcagagtaatgatgccataattaagtctactgacatccaaatgcccagcatgaaagtcctgaaaaagactaacaatgtcacttttaacaatgtcccagcaactctgataaaactcagcaggaatgctgtcaggacc

SEQ ID NO: 181010 - DNA, 510 bp, Zea Mays
ggcttccccacgcacatctcatagataggctataaagagaattatgaggtacctgtgtttcactcctagtttggtttgtggtacatctctttgtctgttctgtctttgtgcggttactctgatgctgattttgcgggttgtcgtttggaacgcaagtctacttctgggacttgtcagtttttgtggacttcgttagttttcggtcttcatgcaagaagactagtgtggctcagtctaccacagtggctaagtatgtaggtgctgctagctgttgctcgcagttgttatggatgatgtcaactttacgggattttgtcttggattttcatcatgtgcctttgctttgcgataacatgagtgccataagtgttgccaagaattctatgctacatttgaggaccaagcacattgatgttcattttcactttatttttgaccattctaagaaaggcgacatcgatttgcgccacgttgatacccagcgacaactagctgacattttcaccaaac

SEQ ID NO: 181011 - DNA, 560 bp, Zea Mays
tgaaccagttgggacacctgttgaaggaaagactaacaaaaaagctagaggcacaagactgaaagcctcgctgatggatagaacattaggaggtagtgatgatgaagacactgatggttgtgtgacaatgaatggaaccatatgatgtgttctctttcatttgttatctgtgatgcttatgtgacaaggatcaactaaatgattaactaaaaccatatacacaaatttagacacaaacatctgaaattcagccttaaattcagataaacaaaggttctgaaatagtacataggttccacatacatttaaccacctggtacacattgtgcactaaaatgcaaacacacacacaagcaatgatcttcaataactcaattatttcctttcctaagctaactaaacagacatctccaaatcttgttcacccttcctgaatctgtaatccttctttgtttcatcctccaacccttcttgtttcttctgcatcttgctaatcatgtccaagtagtcctcctcccatctccaaaaagagcatctagaaccatttttctgtcacaacc

SEQ ID NO: 181012 - DNA, 844 bp, Zea Mays
atccactcttgcctttacgttatcctttgacttatcaggaatgtccataattgttgcccaaagtgcctcgacaacattcttttcagtgtgtgtcacgtcaatgttgtgtggaaggagcaggtcatcataataggggagccaagtcaagccccacttttgtgtccacttatgtttctcaccatatcccacaaaaccaccttctggatttgccacgagcccatctatctgttgacaaatttcggcaccagtcaatgttgcaggtgggcggtctgtcactacgacacattttgtaaagttcttgatgtctaggcggaatgggcggtcaggagagagaaattgtcattgtttatcgaacgacgaatattttccacccttttcaatcaaatgaacctaagagcttccttgcaaactgggcatgggaacttaccgtgaacacaccaggcacaaaatagcccatacgccgttaagtcatgcatggagtactggtaccaaacatgcattttgaagtttgtcttcgtagctcggtcatacgtccataccccttcctcccaagcacgtaccaattcatcaatcaaaggctccatgtacacgcccattttattccctaggtgtccgagaattatcaacgacacgaatatgttctgcctttaaaagcacacacccaggggggagattgattgggaaaataaactcaggccaacatgtgtaaggggcagcgctcattccatagggattgaacccatctgtggccagcacaacacatacattatgagcctcttcgagtttctcacggtgaatggcatcaaagtgtttccatgcttcaccatcttgtcaggattgtatc

SEQ ID NO: 181013 - DNA, 530 bp, Zea Mays
gcacttcactgcttacttgtggtactagctttctttgaagtgcaggatattcttaagacaggaacttcaattccgctgcaacctactcgaagggttcttcactccactgcgatcctgtcttcgagtagagtaagatttaagttttaaagtgataatttttattcgcctattcacccccctctaggcgacatccagatcctgttcccgggccaaagggaactttcagcctccccgccgttagtctcttctaaaagaactccgatgagtccactttttgagcgccaggatccaagtaaggtatttgtgagttttggtgttctattattcatgattcaaatgccaatacaaggttgagtatatacactaagtataaataaataccggcccactaatgagacccataattcttgactaatctccccttagggcttgttcggtaacccctccaatctctctcaatcaaccctaaccgaatgaggtcataccaggtgaaccctctgatccgaaccactaattcatactacctccag

SEQ ID NO: 181014 - DNA, 618 bp, Zea Mays
gtcatgaggagggcgaatttggacggggaagtgcgcgcggtgaaaagggggaggagtcaccggaggttgctaacgtggcgttcactggtttacgttctacggcggtcactgccgagtcttcatggcttgcgatgagtggggagatgacttaaggcgtgtcacaaccgagctagacggtggcacaacggcgatggtcggatagccccgtcgctggtgcaagtggttacggcgacagggcaaaacagtgccccaagttaatctcctgtgcgatatttttcaccctatgtagttatctgcactccaccaagcacgaatcgcagtggcaacgaggatcacgacgcaggatcaccggcagcggtgcactgaacctggcgatctttgttaggttactgtaccatcgcgaactcccatcagggcgtctgacagagcaagtttgagagtgttttactccaaaaattgttcagcgccaggtcaagcttggtataacaaagttgtttactaatgttagagcttcaactttaacacagtgaccctgaccttatctccattgaattaaccatgaactgcttccaaagttaaccaaatgtcactgaacttaggttttcagagctaaggttg

SEQ ID NO: 181015 - DNA, 411 bp, Zea Mays
ttcattacataaattaaaggtgctgccaagatgagaatccttctccccctttttggcaactagcaccaaaaaggagagagccaccagccataaatcaccactgaggaggatgatgcggaccaaagaattgatgcgccaggtgagttgcaaagtgtttttccccagactgagctgggggaggatagctgcccgaaggatcctagggcggaggatgagaagaggattgacccagatacccctggtggggaggcggggcaaactgctcacgatcatcaaagtattcttcatcttcttcttcatcttctggagacatgaaaggcaccccatatgcctgttggtgccactcattgatttctggtggaggaggatggagaggcacatcaggccaacggggagcaaatggcataccca

SEQ ID NO: 181016 - DNA, 413 bp, Zea Mays
cagtgggggtaaattcgactaggaactcaccaagcactactccaggggcttgctgagcttcttgggcgtcgacgtggttcactcgagccctgccgtgaaactaggtcttgcttagctggctgttggtggagggtgctttggaggcgggtgctgaaacattcttggggccattcaccaagttggagtaggcaggtacagatgtcttcaactgtggacaattattcttgaagtgactggggtctccacagtgccaacaagcattggttggaggttggctacttgcaacagattgggtgtggaaggaattttgaccaggctggttgagatgtgacggagcggatcctactggtttgctaaagttcgaccctttggaagggaacccaaaagatcgaaccctctggtgcctgtcctgc

SEQ ID NO: 181017 - DNA, 454 bp, Zea Mays
ttcatattctcatgaaagcttctccaaaatctagaggtaaactgtgatcctctatccaaaatgatcttcggtacacggtgtagagacacaatccgagccatatataactctgccaattgagacaccttataagtagtcttgacaggaatgaagtgagccactttgatcagtctatccacaataacccatatagaatcctatcctttcgaggtgcgaggcaatccagtaatgaagtccataccaatctcttcccacttccactcgggtatctttagtgggtgtaatagtccagctagtctttggtgttcggccttaactctttgacacacctcgcacatagccacatgtgtagccacatctctcttcagttcataccaccagcacttctgcttcaaatcctgatacatcttggtactcccaggatgaatagaataatccgagtcatgggcttcct

SEQ ID NO: 181018 - DNA, 464 bp, Zea Mays
atgagaatgagaatgtcgaccactcaagtgcaaaacttctaatttaattcatggcggtgcttaaactatcagtaaagcaagttaacagaacatactagtcctccaaaaaatataccaagaaggcaagaatcaagttagcaaccatttaatcctccaaaaggaagtacataatcagggatatatatgccatatccaggaatactgggtgcaaccgagaaaagcgaccattttgatagggaccacacagtatccgaaaagatgcagaataaattggtatccaggaagattcacgggtgtctcgcattagaaaaaattcagaaggaacgtaagatcacgttcaactcgacgacatccacccatctactcatgccacatgcaaacttcaatctcgcgcgggtttcccacctttttttgcaaattaatgtaacaaggaaagggaaatgcaaggtggacggggcaaaagg

SEQ ID NO: 181019 - DNA, 811 bp, Zea Mays
atcgtcggcgctttagagatagccgtcgagcgactgaagacatcgtcggcactttagagataaatgtcgagcgactggagacgtcgtcagcgctttagagatagtcgccgagcgactgaagacttcgtcggcgctttagggatagccgtcgagcgactgaagacatcgtcgacactttagagatatatgccgagtgactggagatatcaccggcactttagagataaatgccgagcgactggtgataacgtcggcgttttagaaataatagccgagttagaacgagccgtgtcggccattttgaggataatagccgagtgacgatgtggcataacgtggatttaggagtagctaccgagtgacgacgtggcacgccggtgttttagaagtaactgccgggtgctgactgggcgcttttggaaacggtatctgactcgggaatatcccgcatatactgctctttcagccgtctctgctttccgtgccctagttcttgctttcctgccttcagatctcctctgcaactcggctcccgctttgtttgccagtagagttgaaatggcgcccaagagaaaggcctcgagttcatccgctgcggtgattccccccagaaactgatgcgaccttggatattcagagatctgtcagtgctcgcccaaaacgcccttgccgagtcaatcaacttgatccttctactgctgagcagaaaaagaaaaagagacgtcttcgttgagtatctagtttggatcgggacgttggtccttcagcacctactgctgaggaagtgcctgttcctgaatttactgatgct

SEQ ID NO: 181020 - DNA, 474 bp, Zea Mays
cgtgtgttaaaggtagtgatagatctttagaccaacttaaatgtcccactctataagccaacacatagcatgtctgcatctaacatgacaatctatcataaaatgctatgttaacgactcagttgttactaactaattatttagtttcatctgtaaagacaacataagattaaatatccttatccaacacctgtgcaccataactacagcctcgtcctagtcctagcatgcgtcctaactctagtcatctagtgtccgagcctacaatgcgtcctaactctagtcatgtagcgtcctgtgtccgcgctaaccgctagtcatcggcccgctattgtctcaccagtgattgccctccattttctctatgccacacctacggttgacagccacccatcctaggctctagatcgacaatagctaactggccaagttgcccaggacaaggtactaactgcttgtcgtcagaccaacaac

SEQ ID NO: 181021 - DNA, 474 bp, Zea Mays
cagcctagtcgtagatgcaatggcgaggaagatgtcggagccactgcagcacatcctaaccaagaacaatgggcaagtacgctgttatgatgtcctctattgccccggcggcctgggcgatggatcgtatagatggccaaccagccgcctagatctttctgggctcgtacttgtcacattcaagaccttgaagtcaggcgggcattgaattgcctggagccgggggaaatggctgagactctgcacgtctcttggttctcatggcgatcttctcgggcgtggtcgcggtggcggtccctaggaggcgactgacgctgggcatcatgccgcctctcctaagccgatcggcctggtgctgggctgttcgtagaagctaccaccgactctgtcctggtcacgcggatgcgtgctagtgcaccatggtcttgatcgtactcttcccgctgcctcatctcactttcatgtcggcaatcg

SEQ ID NO: 181022 - DNA, 655 bp, Zea Mays
ccttagcatcccgtgaagctccctatgccatttgattgaaccctaccgccgtgagcaggctggagcacacgtcgtcgataagcccgaccgcctgcacacgcggtcagacctattccggccatcatcgtcgacgacccacagctcgatgtgaccgccaggacctcctggacatcacccaacccttcaccggacctccctcgtcgccggtaagccgcaccacccttttgcctctccgcggttgctattgcaaggggggaggagctcgggttgaaagaaagaaaagccagggggtttttgcgaagtcagtggctcagaggaatagttccggaggggtacggtctaaaggattagttgagggaaaccccaggggcctcggcgcaaactggttttcattaaacccttttaagtttattcttttaaatgcatacaaaacttgcaaaattcataactcaaatatgatccagccaaatttggtcaaactaattttgctaggttctaaataatatgaactacttaggaaaaataacaaacaccctaagtactgcaagatttttttagttttgatttaaataagtatactacctaaaactaaataaatagaagataaatagaaatacttttggactgagggtaagaaaaatcagaggcatgccca

SEQ ID NO: 181023 - DNA, 591 bp, Zea Mays
ggagtttgtttccttggacggaggagtcctcggatgaaggcttggattattttgttgcgttggatgtggctgcggcggtgacttcgccgtgtatggagggtgccggggatcttcctagtgtgggtgtcgggtgtaggcggcgaagggtggtgggaaaacatagtgtgggtgaattttcgcggagtggcaggtgccgtcgtatggggatggagcgtggccgtctccgtgtaaaccgggttgataaatgagaattgttgtccttgctggctggggcgagcataggcgagggggatcttcagaagctttttgagggtgaggaattgaggataatgctgtttaattacagggagatgggtatcattctgaaggttgagccgatgtaataggcgatgccctcgccgtgtgtatgtaataggcgatgccctcgccgtgtgtatgtaattgtaatttgtatggtgatgtggcatgttggccgtattcgtatgcttgtgttggtccatctgcatccgtgggcgactctgtgcggagtgtctttgtaatgacagacttcgattaacgttattccggctacacccttaggcgactgttgcg

SEQ ID NO: 181024 - DNA, 635 bp, Zea Mays
cgacaagtggtatgtgggcatagcagacaggacagaagtcataagcgtgagacgactagcccgattgagcatgcttcctttccatccggccacacggttccggattttctcgatcagaggttggacatgaattctctagagcgcccgggtgtaaagttggaggcccaggtaacgacacgggaaggtcccccgggtcccttggaacgactggagcacgtggtctaggtcaatgttatcacatcttatcgggtggatagagctcttctcaaggttggtgaccaagcccgaggcgcaaccaaaagcgtgcaggatgtctttgaccgccaggaggtgttctctagaggggttgataaagataacagcatcattggcatacagagaagtcctcagttttgctgtagttagcggaatgggggaaaggatcccatttctggctgcaaggttcaggatacgctgcagcggatcaatggcaaggatgaacaacataggggaaaggggtctccctgcctaacccctctcctgtgctggatgtttgctccttgtcggccattgaggagggctcgagacgaggtggacccaaaaaggatggaaatccactcacgccaacgagggccaaaacccatggtctagaggac

SEQ ID NO: 181025 - DNA, 612 bp, Zea Mays
gttttctccatttagtccctgtttttctcttctaatccccatttagggttaagtaccctacactagggtcttatttgcaaaatgctataacaatacaacttgtttgaaatttttacctagtgaatgcatcctaggtgtatcaaacatataaaatgctgattctcatgatgttatgctcaaattttagtaacagtaacaccaggggtgttacaccggcctttaaaatatcctcttttccatctcaatctgagcattgtattgtacctattttttccttggtcatatcctcttctatgtcacctgcaagtttttaactctatcgtttgttgtgttttgtttgtcatctcctttacccttctcatcacactatcctaccttgtgattacattatgtcttttatctaaaatctctaatctcccatctcagttcgagagtggtgttttacttattccgcccttaatcgtaacctcatctttgccatgttcaagtcttgtcgtgaccccattcttggttgtacttgtaccgctggctcttcaatgccttcatcttttctctcatacccttgtctgttatcgcctttgacccttgcaatattgatgtcttctacttgaa

SEQ ID NO: 181026 - DNA, 402 bp, Zea Mays
cccacgacaaatccgccaagagcagagttcttttggaggaagaactccaacatcaacaaggtggaggagatctgattccgagacaacagacatgtggttacctacgaacgacaactggctattgggatcgatgggaggaatgattgccgcagtagaactctgattcttccgcttaggcgccatcgcaatctcgctggcggatcgaacaagggcgaaatcttagggaaacagaggagtggttcgaggcggaaatgtgaagttagggctcagaactcaaaagcacacgtcgatatgagtataaatgaggttttcccgggttgggcaccatttctaaaaagtgccaagtcatcactcgagaaagcaagacttccgacataactcggttgttacctctaaaacgcc

SEQ ID NO: 181027 - DNA, 943 bp, Zea Mays
cggctgcccatgcgggaagagacggaatttattcatgtctctaatgagcgggagttctggacgaccgctaacatgcataggtactacaggtaccttaattctttgtccaggatgaccgttctcccgaagggcggaaatcaaatgaacgtccttggggagagtcgagtcttccttctcctccttgctccaaacagtctccccgcattaatgtgtttgacatgatctaggaagagatcatccgtgcttcctggtctcctctcaaagggtgtgttcatgcaccctttatcatgaagatgatcgaagtggtcacccagacccacttcgaaaaacccatcaaacactcccgctacgtaccctactgggttgattcctccaacccagctgctcgtacgaagcgggctccctcagggtctggaggccctgcctcctcctctgagccacctccccagcctccccatcatccatcttcctctcgccccgccgcctcctcgcgtccctctcctggtcgcggatctcccatgccacgtgctcatggacgtggtcgaggtcgtggccaagggatgggtgctcgcttggtccatgggtttgcggcgttcttctccatgtgccgcaacatttctgctgatgtccatgaggtggcacggcgtaagcgggagactgatgacaatcttcgtcgtcaagcttccaccatggggatgccatttgtccctcgctcgcctaacgtgcctctccatcctcctcccccggagatcaatgagtggcaccagcaggcctacggggtgccatttatgtctgcagacgatgaagaagaagaagcctatgttgatgatcgcgaggagtttgccccgcctccctatcatggggatccgggtcaatcatcctctcaccctccgcctccctacccgggtccgggacccattcctggtgaccctaggccatccgg

SEQ ID NO: 181028 - DNA, 722 bp, Zea Mays
tttaaagcttcggcatttcaacaaccatcgacttaatggatgatgagaagaagattgttgatccggcgctatccaggttttatgaagctatggaaaaaatcaacgcagagaagattgagaaggagatgctggataggatatctgagaactctagcgatagtgaaagtttcaatgtagaaagtgggaatgaagatgtcgtagatcagccctgaagaccaagccatgttgtattcgggaaatcaactaataagcaagggcagattgatgcaatgagggggaggtactttcgtgatatctcaattgtgagggctggaggggaaaataatgtccctctgcctgaagttgatgaagtgatagtttacagaagcttcatgaaggcagggcttcggttccctctggataaattgttggtcgaagtctagaaaacctttgaaatttaccttcatcaacttactcctgaagctatcatcaaggtggggatctttctatgagccatgaggagccagggactggaaccaaatgcaaaatgtttctgcaacatccatgagctgtcttatgagacgaagactaccgtaaaggagcaatatcacaacaacttcggttgttacagctttgtgcctcgctttgaggcgagctacccagttcccacatttcggaagagatggccgggggcctagatgcaggaatggttctacaagaagaatgacctaagtgaaagggag

SEQ ID NO: 181029 - DNA, 649 bp, Zea Mays
cattcggtctgaaggtttgggaagcttcactagcctcttggaagctaacggtgaagctagactgggcgaagaggggctagggtggtcgtaccgcggtggccgaggctcagcgagcttgcgggcggtgttgtgctcgatttcctggtgatcactgacgtttaggcttcgactaggttgtgagacgtgcgggagagcaaggccaaggggttgggccatcttataggcgaaggcacgggcacggtcgcggggttgggcgcacggtcgtgccgaccgaagcttgggacacgagtgagcatggacaggtcacgttcccgggtgttagccgaggtcgagcacatggtggcttgcttctgcccttgtcgaagtgcctgtttagctgccctaacatgcatatcttggcaaagatctcgtgtatggtctcttcaccgagccaagctctacctctgttgtgcaagttccaagtgtagatgtggtcagggttaaaagatcttggggttccaagtttgctatgttagtcgtgccgccgccgagacaaatcttaggctaaatcatgtcaaacgattttggtttgatctcaaactttgtcagggtgtgcctagggtattttgtcaccactttgtccattggactatttggttttgagttttgg

SEQ ID NO: 181030 - DNA, 622 bp, Zea Mays
gtgccgggaggtattgggcaatcccacaataaaatccatgcaaatatcctcccatttccaagatggtatgggaaggggctgtaaggtgcctgccaccttcaaatgactggccttgactctttggcaagtgtcgcattcagatatatacttagcaatttccctcttcattctagtccatcagtacaaggatctgagatcatgatacatcttgttaatgccggggtgcatggagaatttggaaaggtgagcttcatccaatattctctttctgagctcgggattcttaggaacaaccaattggtctccaaaccatagaattcctttgctgtcctgacggaagcatttgtatttgtccaccttttgttcgatcatttccttaatgacttgtacacccttgtcaccaatctatgccaagactatctgctcatgtaaagtgggctccactgaaatataactcaaggcacctgaggaaacaacttctatgttcagcttgcataactcatcgcacagagtggcaatcttggaatccatactcacacagttgcactgggccttccggcttaaggcatctgccacaacattggccttgccaggatggtaatgcacttccaaatcatagtcc

SEQ ID NO: 181031 - DNA, 457 bp, Zea Mays
gggcttcatcgagttggtccagcgcatcctctaagcttaactcgttttgtttggttgtgtattgttttaccctcagggcgtcgtagtcgagatcggtggggagcatcgcttcttccccatagatcataaagtagggcgtataccaagttgagcaattcggggttgttctaaagctccagaggaccgctgttagtgcctccggccatcgttgggcgagctgcttaagtagcgtgaaaattcgaggtttgaggccttgcatgatcattctgttggctcgtttgacctgcccgtttgtgcggggctgagccgcggcaactcaatctgcacggatgtggtattcgtcgcagaactctaggaacttgtttctagtgaactgcataccattgtccgttatgatcgagttggtaccctaaatggtgaatgatgttggtaacaaattttacggcttgttcggagg

SEQ ID NO: 181032 - DNA, 460 bp, Zea Mays
ccgacgccaacgatcgcctcgtcctgccgagcaacgggccaaccctcgaccacaagctctagaggacccagccgtcgctatcgccagagctcctgcccgtgctggacaggatcgagaccttggcgaccggtggcctgacctctatgcacgtggtcagagacttcttgaagtgccggatcgcgccgctgcaggagaggccacgcctgagctgctggttcaccggcccgaacgatatctaccggatccagcgcgggccgggaaccgatctgacctgggaggggctggaagtcctagtgaaggggattactggtgagtcctttatccccgaatccctgatacttccccaaggcatcccggcgctctgtgatgaccccacgctgcgaacggcgatgctagcctcgctgccgaccctcgatgagagcggcgtggcggttcgtcagaccagcggccaggaccccca

SEQ ID NO: 181033 - DNA, 592 bp, Zea Mays
atttatcccatgggcatggaatataatgatttataaagcgaagcatcacattgccatacaacaaaaatcatgacaacaccgatagatactatccactaaccgtttgaaaaactaaacttacttctcgcttgccactgcatcactcctcaatcacatgaccatcatgagcatcctccacaccattatataatagcgacctaagcgccgtgttacacaatacatacatcttttctcgtcgcgagtataaccatattacagcatatacccgcacacctcaatcaattatcttacgccaccaccactataatacaccacagcacacacacacatatgtgtccccacgttacgcacaagacatcaaccacaccagtgactccaataagatttatcatattccccattcacctcgactatcacaatcgtcgatcatatgcataaaacaaatacacctttcatgtagacacctatcgatgcattccccaacacataatccgcaatttaaaaatttatcctcacagcaaaccacacatcaaatacattattaccgaaaattaaaaaacatccagccctctttctaactcgtttcctttcg

SEQ ID NO: 181034 - DNA, 560 bp, Zea Mays
ccgcgtcgccgtgactccgtagggccgtcccatcgtcgccggggaggttgccacgccgttagccacggattcacgggcgccagtgctttcttccaccttcgactgccgcgcgtccttcgtaaaattcccggccaccgcttgctccttctataaatcgagcacccgggcagttgtgctaggtcattgtgaagccaacgcacccactcccacccgtaatcgttcatccgagctctggaatttccaacttcccccaatttcggtctccgccgccttgaaacacacctcgctgcggctagctcagctcaggttagttcataccgattgctccctcatttgagtgctcttgtgtacctgtgatgctcaccggccaacccaattgaactaagtctcccttaatcgccgggaacgcgatcaacccttagcaccacccgcggtcgtcgtggccagagctcattagttagccatagatgaaattaggttaggggaaaagctcgggataggtccaatttgatgtccgccgcttgggaaccctagtcgttgccccaatcggccggcctacg

SEQ ID NO: 181035 - DNA, 312 bp, Zea Mays
aatgtaagcatttctagcatttttgggccatttaggaggaagggaaatgactgtgatatccctcaatcaatcaccaagattacagagactcagttaatgccttgctttcgtatagatgccataaacgccaagtgctaattaaaactttaaacaccaagattgtattgatgctaaacatgcttgacaccaaaataaaactgcttccaaatattaatggtgagggagtgtcaggggttgattatgccagaaatgtttacgttcgtggacaattttgaatgctgaagttacatgtacctgtagaaggaagctgga

SEQ ID NO: 181036 - DNA, 663 bp, Zea Mays
ctaaatgtaattttttgtcggaaaaatgattagaaaacaaaaaatcggcatggacggtaggtcatttctaaacacgaactgctttcacaccaaacatctggtcccaaatctacctgcattgttacttgttaggcctcccaggatttccttcctgcggtcatctacgtccacagtgactgctacagattcccaggatttccttccggtggtcatctacttccacggtgtgcagagctagatccacgaggacccctggatccacaaaattcaagctggaagctcgtttctgcccccacccttatgcaaaattgctaagtagaaaggggttgcaaattgcaaccggcgtgggctgagaatgactttcgtgttttgcgaccagccaacccatcgtatgtccggctccccagaacaaacgaaccatcgcaactctagaaaccatacccttcttcaatgtaacatccaaacgccacagtaccgaaccacatcacaccctctgaaatcccattgtcccacgaattggtgcagaagcccgaaccccaacagtaagcataccgtgccacaccatgaccccgagctccctgcgcagaacaggccgccgagaaacctccccgggaatcgtgagacgcagctagcgaatccaaagctccgagcacggcgtttgac

SEQ ID NO: 181037 - DNA, 911 bp, Zea Mays
ctccgaaggccgaaggttgaaattgacgaagccgccaaagcatgtcagaaggcatttgatactgtctgcttctttattggtacaagagatttggttcaagagcacatagcatacagagtatggctgcttatagagagctgggaaatgccgaaggagaccatcaccgaatctagtgaaggtgaactggtccggctgaagtacacattcagatacggggataaattcgatgaaccaaacgacgactggctaaaatgcatcgaagttaccagtgatgaactgcttggatcatattccaaggcggaagacaatgcattatccacagcctttggaggccggggaaaaaagagattgaacagagtttttgacgctattggcttcgtttacccggactaccgttatccactacgaggtcagggaaagaagaggaaaactgctgcttcagccactccagacgagcctacgccaaagggcaaaaagttgaaggtccttacccaccggccacgctatattgaaccggccgtggtgcctgagtttgacgaggaggcttcttcagctgctgaatcaagaaaaactgctcctcctgcgcaaaggactgaagaaccaactacaatgctgaagctaccctcagctgagctagctgagatgaagactgataagggtaaggctgaagagtcaaatattggagaaacaaaagtgttagcaattttaagcccttcattagaagtaacagtgccgaaggcacaaaaatgttctgccgcaactcccaagaggagaaggatggcaaatgtactagatgtgcttgaaacagtgaagactttgaactcgactccttcaagaaaaattgccgaatattcaaaagcgcaaactgaagttgaaacagagcaggtcgaaattgaaactgcagtaattca

SEQ ID NO: 181038 - DNA, 758 bp, Zea Mays
gggggaactgctttggatacgtactcgggatctcttggtaatctgcctaagatgccatttcctgggtttgatggcgacagtcctaagttgtggcagtcgcgttgcgaggattactttgctatgtattcagtacaccctagtgtgtggatcaaagtgtctaagatgaattttactgggccagcatcacgatggcttcaatccattgagcatcagttgccatatctcacatggcctgatttctgtcacatgattggggaccgttttggcaaaaatcagcacgaacttcttattaggcagctatttcacattagacaaaattctactgtcactgagtatgttgagagattttttcagctgatagatcaattgcatgcatataatcctcatgatgatcctctttattatactactcgcttcattgatggtcttcgtgatgatattaaatcagtagtaattgtgcaacgacctaaagatttggatactgctgtcgttttggcgcaattgcaggaggaagtcagtgacaagaagaaagacggtcgcaggatggagatgtcatcttattctcagtccttctccaaaggtcctttgccttctcgtcagttgccgaatgccaaggttgctgactctcctgctactactgaaaagaccactcaagataagctggcttcgttgtttgcatatcggaaagctaaaggcctttgttataaatgcggcttgcaatatgccaagggacatcgttgtgctgatacagtccagtt

SEQ ID NO: 181039 - DNA, 779 bp, Zea Mays
tataaggaactaaagttgaaacaagacccgacccactctttgatatttaggtatgagatggtggcctagaatctaccaaaggaggaactaagctagaattatataatatatggtgtgactagaacattgtgaagaaatatatattggacgatcgttgctctacagaatgttgttgctgtggaacaccaaaaacaacaatacgtgttgaaataaaagtgaactgcacatctttaccagtcaatttaagctttcgggttaaactgttagaagcatgtaaatccttgatacaacaattaaataaaatacaactagtagccactcctattccatgtgaaggtcagtgtcaaagaattagtgatttggctagctttcttgtcagtttaagtttttggcttggacagatgggtacataaaacttaacatgatatatcaaggataaaggttttgactttaaatctttaaaggcatgttaaaaacaataaattgtagtagacttgttgtacaccaaatttcataatctatcagaatcgcaatgattagtggtgaaaaaatcagaaaaattgtaagaaccagtaatgacaattggttaaaaattcaaatcgtcactgataagtgtagaaaaactaaaatagtcgaaaccaacaatgataattggctaaaaaattgaatttctcatgacacaaacttgacaccttaatttaatgttctcttgagcttacgtattagatagattacacaacacatatgaatatatagatgctgctattttaactacaccg

SEQ ID NO: 181040 - DNA, 524 bp, Zea Mays
cctaattgtatctattaattcgttcaatactttgggtaccttagcgaactttatcctgtatagctatttgtcagagtccatactatggttaacttgggttagctactatctgtgaataagggagtggagaatatagagttttggatggttactccacctggcctgttatacaagctaaaccagccttttgtgttaagacatgtatgcagatttggtgccattctctcatttccccctcaattattttactcttcatagcatccatttatacatgaccacctacatgctctcatatatttcaaaagcacacaatagatggtgttcgtgtcatttttctgtcatggatttcacaggtttagaacttatcctttgcacttgatcaaaatacaccatagcctcattcaacagatgacatccatgtcattttctgtcatgcattcctcaagtttagaacttaccttttgtggttgatcaaatacaccatagccattggatcgaaatcctggtcatatggagtcgccacc

SEQ ID NO: 181041 - DNA, 462 bp, Zea Mays
atcataaatatggaattgcaaggttagcatttcacttgatatgttaagtgaaaattatagtctaaacactagtcagtgaaaggactggaccacatgtagcatacaggagcaaccagatagctagttcaaggaactttttaattttgacagcgatttgagaacattttgctaacccaataagtgcaatatacgaatatggatgtattagatggcttaccatggctaaaaccagaatgataagctccagggaatgtgataacaaattcaccagggttttgaaccaatctgctttggagaagtatctatcaatcattatacccaatactcaaaataatggccaacaaaaatgccacaaaaataatagttaagaaatgcagtaacacctgcagcaaggaactccagcagaaagaagcacttcaggagacaagacagttgtcttttcatttagtatttgaaaggcca

SEQ ID NO: 181042 - DNA, 634 bp, Zea Mays
gttttaataaattacaaactatactttaagccatctagtaccaacttgtttgtggataaaagaactgcttacagatctcaaaccaaggcgatggcatcatcaataaacaataatatatgatattatagttgtgacccgctctaggacctctgttgtattgacaaagcgatcatacctgcgaaggacctctgctgtattgacaaagcgatcatacctgcgaaagacatcgttggaaaaatcaccacccatattgtcgtccaaggaataaaaggtcgccaatcacaacatatatttaaagcctagagcaaaagaagaagggtaatccgagaagtcctgtatgaactaaactaaagaacaaaaaagaagatataaataacatttagaaaaataaatagtgaaaatttgggagaaggtggtagttgagtgcagcgccgagccgcagactgcgggcaaggtggatggcagttgatactggagttcacaggcagagagatgctacttttgcttatttttttaacattttaacttgatccattgggcaaaccaagcgagtactacagagtaagagacggaagggagacgatagccaagacatccaccttatttttgaggacctgcaacccaactgcttggg

SEQ ID NO: 181043 - DNA, 646 bp, Zea Mays
gttaagtaagagtgctagtcaatcatgaacaagttgagtatctttgaagtctcctttattgatgacatatctcccgttttacagagtacattgtcgtcctgatagcttttgaaagtcagctaggggtaaaactttctgaggtgttctatattccaggagttcccaacttctgtgccgtctatctgagttagatgatatgatcccggccgagtgatttctgctactatgaatggtccttcccataagggcgacaacttatgtcgtccctcccccgttagaattcggcggaggacgagatctccaactgagaaggatcgttgtcgcacagccttgtcatgatagcgtctcagagtctgctggtatcgtgctgattgaattactgcattcagccgttcttcttcgagtacattgatgtcctccagtctagtagcttcggcttctgctatgctttcgaagaccaaccttggcgccccgaacttgagatcggcgggtaatactgcctctgacccatagaccatgaagaaaggagtatttccatgtagagcttggcttggctgagttctcaagctccaaacgacgtagggcaattcccttatccacttccctgcgaacttctcattcttttcgaagacccttttcctgagtg

SEQ ID NO: 181044 - DNA, 1082 bp, Zea Mays
atcaaaaactacagtagcgggggtaaattcaactaggaactcaccgagcactactcccggggcttgttgagcctcttgagcgtcgacgtggtttactcgtgctctgccatgatactgggtcttgctctactggctattggtggagggtgccttggaggcgggtgctggggcattcttggggccattcactgagttggagtaagtaggcccggatgtcttcaacttggggcaattattcttgtagtgactggggtctccgcagtgccaacaggcattggctggaggttggttgcttacaacggagggggcctgaaaagagctttgaccctactgactgaaatgtgacggagtgggtccagctggcttgttgaagcttggtcccttgggtggaaacccaaaggatcgaattctttggtgcctgtcttgctgctgagctcggaggacttggaatttcctcttgaggtgacccttttcttattcccttgccctttccacttgtatggccttgtttgagaggtgcgagaagctgaggaaatcttggctcgcaaggatagtcttgagttctggtcttagccctttcaagaaacgggccatcttcttggcttctgtgctaacatcgtcagacgcgtagcgagccagttctatgaatttgtgcacgtactcactgacagatcttccaccttgagttagctcccgaaattcatcttccttgacctgaacgatcccttggggcacatgatgttctcggaaagcggcttcaaattctgcccaggcagtgctggtggggcttccttcttccgttcagtctggcatccttgactcttggtctacttccggatcttcttagtgggggcgagcttctttaacttcttatcgtaatccatcttcagggtttggaaggcttcacgagtgttggcctcttcaccttctgctatttcgagactttcttggagggacgtcttctactttttaagttccttgacctgttgctctaagctttccacccgggagtttaggtgggtgaagtgggagaaaagatcgtcgtagtggttatcaagtgtgtggacatatctggccatgta

SEQ ID NO: 181045 - DNA, 815 bp, Zea Mays
tgctccgtatctatggactcgccaccgccaccgggggagcgaggtaatgccgccaccatggtccggcatctctgcctccattcggtgtccatggtggggtctgggagaatcgccggtgcacgtgggttgtgaccgggcatgtgcttggccgcggtggcattcggtgtccagtgaatcgctcgctacagctccaaggccgccgcggggtcacgcatctccgtgggcgtggtgaactgcttcacaaatcacggtaataatctctcccctgtctcctccaaacccttgatttgggatagcacccattccgcgatgcgtagggccgcgtttgtaccgagattggggagctcgccggcgagctccgccgtgatggcgagttctgtcgcctaccggccgcgtgggtagggaagaacaaacatgggccgttgattgttttagggacggtcctgattagatcctaggttaccctttcgggatgagcggaccagatcaactcatagagtcatcaatcgcgtgaactgatcgtgaccgtagatccgtaggggaacgattgggatatggtgtgaacgtggcgctctgtggatcacaggatcgtgatccgagcgcatgcgtaacgtgtagcttgctataaaatccaggccgttgattgtaatctgaacggttgtgcgcatccgataccccttcggccttggaaacttgcttaagagtccctgtgcttttctagaatcaacctgcagtactacaaatagtattctgagtcttgaaacaacttgcgcagaggcccctgtagttccctggtttattgcgcccagtcaaga

SEQ ID NO: 181046 - DNA, 1337 bp, Zea Mays
agggaatgccatgcttctccacaaaactagtggctataaaagaatgggatgctcctgaatcgaaaagtacggtagcgggagtaaattcaacaaggaactcatcgagcactactcccggagcttgctgagcctgttgagcatcgacgtgattaactcgtgcccttccttgatactgggtcttgttctgctggctgatggaggagggctccttgggggcggatgctgaggtattcttggggccattcatcgagttggagtaggcaggtcctgatggcttcagccgggggcagttgttcttgaagtgtctgggatctccgcagtgccaacatgcattcgtcgggggttggttgcttgcaactgagggggcatgaaaggagctctgactctgctgactgaatcgtgacagggtgggtccagttggtctactgaagcttggtcccttgggtggaaatccaaaggatcgagttctctggtgccaatcttgctgctgagcccggaggacttggaatttcctcttgagatggcctttttcttcctcctttgccctttccacttgcatggctttattggagaggtgagagaaactaaggaagtcttggctggccaggatggtcttaagttctggcctgagtcccttcaggaagcgggccatcttcttgacttcggtactgatgtcatctggcgcgtagagagccaactccgtgaacttgtgcacatattcactgacacatcttctgtcttgagtcagttcccgtaattcgtcttccttgagctgaacgatcccttggggcacatggtgctcccggaaagttgtttcaaactccgcccaggtagcatttctaatggtaacattgaaggtatcccaccaagctaaggccatcccggaaagttgatgagcagccagttgaacacgctgattttctgggcatccgatggcttccagctttcttttaatcgtgcgcagccaatcgtcagcatcgaggggattgctagacctgacaaacgtgggaggcttgagcctcaggaaatcccctatcctgtcttgcggtcttccaccattcggacgttgatttcccagactttgagtgaggacctcgatgagtcgggtttggttggctagaacttgggctagatctaagggtagttctagaggtgcggggaggtgggtctcactttcctctctaccggcgtggttttatctaaagccatctgccagggggagagagtcactattatgcacatgccaattgttttcaaccatgttatttattcattacaccaatacattacaagcatatggctactacaagttgtactacacgcgagcgttctctgag

SEQ ID NO: 181047 - DNA, 1280 bp, Zea Mays
gaaagccaaaccctaagttttggaccaaaatgcaaaaatcacttcttaaagcactatagagcctaagtctgaaatcagtgtgttttcttcaactttgagcccttgtatctttcatgttctagggattttgccctagggaaccacatcaaagttaaagaccaaacataggagaacaactttgctcaagaaggaaagcatagttgttaagagaaattggaagataatcatgctcaaagcctggctgacaggctggtttcatttggaaattcagctactcagtgtaacagggtcagctttgagtgtgaattcaaccatgatatagtgatcaaatgagctcagtcactatagtcgaaatttaggtggtacatagctctccaactttgctgcagagcatggagtatgttcctattggaatttgtgagtaaatcatgcctgaatatcgactgtcagactaactgaatcccaatccaatggtacagtagcctgataaagatcaaactgccagcgctgctcgctcgccgccggtgacctgcctgcgctgggattcgtgctgttgtcgcctagattcacgctcgggtgggtggataacatcgcgtgaggaaagatatttgtcgtcggtgggctggaggtcactccggtgactcaccgtcaccatctcccttctgttttgcggctgagcagataagctcgccggggaaccaccctcgcacggccttgcgccacgtatccgagtacctccaccgcatcgccatgattcgttttagctttccgtcgatcgccggagcaattgccacggcattggacacgaagcacttgcgccagtgaacgtttagtcctccgaccgccgcgcgtccttctccaaattcccggccaccgttgatgccctctataaattgagtgcgccacagtctccgtagggcagtaaactatccagccaccacgaatcagccgcatccatttgctagaatccgcgaattttgaattcgccccaaatcaatttccgtcgccgtgaagaacagctcgttgcggccagctcgattccggttagctcgcgtccctctgttccttgttctagcgtcctcatgtgcccttgatgctcaccaaaccgtccaattacactagaagcccacccatcgtcaggaacatccccctccatccgcaaccttcacggtcaccgtggccagcacaaccctgttgatcattagtgaaattaagttgggggaaaggtgtgggatgggtccaattccgtgtccgtcgctcgggaaccctagccgttgccc

SEQ ID NO: 181048 - DNA, 1572 bp, Zea Mays
gcgataggtaactgggaaacccgaatgaccgcccattgcgctatcatgcagagaagagataacctgattgtgcaaggcagtattggaaccgagccaaatgtgacccttgtattttataagcccatcctgtaactggtaaggtccatcaggagtagcagtagctgccagttcagtgagtagtttcatagctttagggtcctgggtataaccggtcacaacatcagacaaccattggggtgtgctcattgatatcgccgcaagagtaagatgatggggacgtctggacagagcgtctgccgcaccattgtctacgcctttcttgtatacaatctggtattgtagccccaaaagtttagtaaaaactttttgttgccacggggtcttcagacgttgttcagtgaggtgggacaagctccgttggtctgagtaaattacaaaaggtcgatgctgaagataggggcgccaatgatcgacggccaacagtatcgctaggtactccttttcataagcggataatcccatgttcttaatgctgagaggtttgcttatataggccaatgggtggtgatcctgaatgagcacagctccaatgccaccaccagaggcatccgtctcaatggcgaaaggcttggagaagttgggtattgccaagacaggagccgtggataacgctgtcttcagcagagcaaatgctatttgttgctcatctgtccaaacaaacactgcacctttcttaagcaactgagtgagtggcctggcgataaccccaaaattcttaacaaattttcgataatagcccgccaatccgaggaacccacgcagatctttgatgttgtggggcgggggccaggaagagatagctgcaatttttgcggggtcagtagcgacccccgccttgctgatgacgtgacccaggtaagcgatctcttgctgagcaaaggaacatttagttagcttcacttgccattggtccttacgaagcaactgtagaacctgctccaaatgcagtaagtgattgtcccatgtatcactgtaaaccaagatgtcatcaaaaaagactaacacacatttacgcaataatggttgcaaggtccgattcattgcgccttgaaaggtggccagggcccccgtgagaccaaaggccatcactcgaaactcgaagtgcccatggtgggtctggaatgctgttttatgctgatccgagggatccatacgaatctgatgaaatccggcacgaagatccaaggtagagaaccatgctgccccagaaagttcatctaaaagctcatcaatgataggaacaggaaacttggactttgttgtcaatgcgtttaaatgtcggtaatccacacaaaagcgataattgttatccttcttcttgaccaggatcacggaggatgcaaaaggactcttactgtgttggatcaatcctgaagccaacatctcagccacttgagcctctatctctgtcttaagagcaggagcgtaccgatatggtcgcatttgcaccggtcgagcaccgggaagcaacggaatctggtggtcgcaatcacgaacaggaggtaaaccctt

SEQ ID NO: 181049 - DNA, 755 bp, Zea Mays
ggcacgaggaggtggttggagtgaggctgaaccatgacgtgggtggagcacgggttggaggcgtgcaggggccacaaggaaggtgggcttgcggggttgtggtgaggttggtggatttggagcatacagaggacgacatcttttgatggcgggaggggaggggagggaggaagaggaccgacaggcacaagtcaaagtctctagtattgggagttgccggcgtcaacgatgcggagcgcagagtaagaaactaatgccgacatgtggaagaagaccaacaaggtagacgtgatgagtgtttccacctttttaccattggctactttttttgcccagtcgtctacaatacaactagcaaacccgctttttcgtgtttgtaggaaatcaatctccatgacgaggctgatcatattcacattgatttggtgactaggaattttgagagattggagtggattgagtgggaattagtttatttcttctttcaatcctcttcaattttctggtcaccaaaccagcccatagtgtatttttgtccctccgtttagcattcacgtaggtcccggaggtaacagggttgaccatcacatcacaatcacaaatccacatataaaattataaaagaagctactttaggctatgtgtaaagtttaaatctaggaaagggctagcaaccagtagagactttagttgtgacttgtgacaagtttgtccgactatccatatgtgctttgcaatatataattatgctatat

SEQ ID NO: 181050 - DNA, 370 bp, Zea Mays
caatgccattgttagacttagtatgtacatatgggctctccgaagccagggaatggatgcgaatgctgaagctttctgccgggtgcacgaacttcactaccagacgaaggctagagcagatggccttcacaggaactttggctgctacaattttgcgtatcggaaggatacgaaggccccggttattggctatcgtaccaagtggccgactagatggactaatgaacggttctacataaaagcggatgagaaaaagagggagaagctaatgagcatggttatgagtctgttagagttaaacttcggcatgactcgacccttatgcaatatgcaattggggttaccctgccagctggctgaagtagaattt

SEQ ID NO: 181051 - DNA, 529 bp, Zea Mays
cccctctttcccctcggttttcctccctctctgttctggtgagcagaggctcccatttccaccctttgtgaaattctccaaatcctgtgaatcccagtgactccaaatggtggaatgtgttcctatgtgtgccttgaatactcctgcaggttattagctccttcgggaggggtttcacaccttaattggccatttctccgaaaccctaattcctcgccctccacgtgttcggtaaaatgcccaaaccagccaaaaatgctccaattaaacccaaatttttcaggcaccttcacaacacttccagtaacatacttgccaaatttcacgccaattcgagattccaggcttaaaatccaccaaattccccgtttcgagcgatcgtttccgagccgagtgcccaaatctctttttcttcgcctaaattcaaaccaagcacacacttccctcatatacacctatacaaacctattcgtgaagtatcggctcaattccatgtcgtttcgcgcctcaattcaaattccaaacctcc

SEQ ID NO: 181052 - DNA, 752 bp, Zea Mays
aacacgagatatcaaacggggcaagaagcactcgtggctaatccatctgtcatgccgatctaggttatatatatcattatcagtggaagttcgttcgatttgaagccacgaggacgaggcatttcttggtttctttcaactgaaaccaccctgctcctggtgccaccaccaccagcagatgggataccaggcaggggtctcttcatagaaagtgcctgaccagatcacacactccgatactctcccatccagtgaccggcagtccactaacgtcctgtgctaagacatgaccaatccttggggggcacaaaaacgatttgcagaatcatatcgaatgcttgagttgacgctacgctgctagatgctatgctagtgatgagcaacgggcaagaagctggggaaaagtctgcccacgcagatcaggtcttcttcttcctcctcccttttcctggggcagagatcatggcgctccttgccacataagcgcacacccgcttgcaactttgcgagaagctgctggcataaagccatctgtttgcacatggttttctgttcttctgttacattctcctttctgcaaaataaagtcgacacctgcaatcatacgccggcacgaacaatgatgccggcgcctccaggagagggattaaggtaggtgcaaagtggaagaatcgtttggtatttgccctccggaggaacgagtcatcatttgccaatggttggttggcccttattgctggcacagtaaagcc

SEQ ID NO: 181053 - DNA, 494 bp, Zea Mays
agcaaggaaggatggatgggagagacaacaggttggcaatatgagctcgaagtctggtgaagaatgcaggaggctctgacgtctggattgcagcctgtgtagtggtaccaccaatatgggcgtgtaataagaatagtatcgttactagtagttaagtagttaactgtgtttacgtttctggtgatgtgagccggttgggcctgaattgtctggtacagctgtgttggtgtggttgtggtgccggttgggtgaaccctctgcgttcatcccagtcccaactgggcaatttcctaggatggctcagttttattccacaaactcttgtaattccgttgctgatgagtaatgaaattcggttcacccgtggtggaaaaggaatgaaccattgattctgctaaaatatgttttatcagtcatctgctacaaaaagagttgcatcatatagcttgtatgagatcattttgtagcatcaattttatccctaagaaactaac

SEQ ID NO: 181054 - DNA, 592 bp, Zea Mays
tcaagaggcagatgatgcacactttcaacatgagtgaccttggtttgctgagttactacttgggcatggaggttacacagaaggagggtgagatattaatttgtcaaagttcatatgcagcaaagattgttgagctgtgtcacatggctggttgcaaccccactaatactcctatggaacaaagaataaaactcactgctgctaagaaagggactgaaaaggatgttactagatacaggagtgtgattagtagtctgagatacctagtgaacacaagacctgacttatcctttgctgttggacttgtgagcaggtttatggaaggtcctaacaaagagcactggacagcaattaaaagaattgtgaggtatatagcaggaacactgaattatgggaaaaaactcaagaaagggggaaattgtgaactatctctactaggatacacagacagtgattgctctggtgatctagtacataggaagagtacctcaggtattttgttcttcttggggtcaaacctagtgacctggtcatctcaaaaacagaaagtggttgccttgtcatcatgtgaagctgaatatattgcagcagc

SEQ ID NO: 181055 - DNA, 491 bp, Zea Mays
ccaccgtacacgagcatgccacggccgctgtggataagttcaccggagttagccgtctgccactcggatgacacgtgcctagacgcagtacttcgtcgtagtgactcgctctagcacgtccggtcctcgccggtgaggttgcaacggtaaatgccactgatcccgagcgccagtaaccccatccatctccggccgccagcgcgtcttcgtgaaattggacgccaccgctgttggagcctataaattgccgcccccgcctgctccgctatgtaattgtgcatccagtaaaccagctctcacctctgatcgtccgccagaactctccaatttgagatttcccccaaatcaaccaagaacaccgtgcattgagccctcaccgtggtcagcgaatcccaggtttgttcatgctccctgctatcttgtttcaacatccttgggttctcctgatgctcctcgaccctgccaattggactaggaccccttagatcacc

SEQ ID NO: 181056 - DNA, 617 bp, Zea Mays
gcgagaactatcgacgcagcaagggatcctgtcgagtggcacgacatcgagcggcgagaagagatagggaggagagtgcgtgagcaggggagggagaggagctcggcgcgggcgttttatagacgcaggaggagagtctgagggcaccgccattaatggtgaccaaagtgggaagagaaggtgaggagatggctgcgcagtgggagggataggaagcgagcgtgactctccactatagcaggcgaagaggcgaggcgccgggacgcggcatgccaactccacaccgaacgacgaacaaatttgatgctggacagagcagagagcaagatgctagatattgaagatggttatgacgggaaggtcccacgtggagatgacaatggcggccagattcctgatttctcacggaaaattccttcgttagagaatgagtatgagatgatttgtttcccgacgatgtaaacggggaactcccgacgagtaaacgggaacgggacgaggaacattttctatccccgtggtgacccgttagaattgcatgtgacaatgttttcgtgtagtagttaataatatgttttcgtgtagtagttaataataaaaataaataattaacttat

SEQ ID NO: 181057 - DNA, 627 bp, Zea Mays
tgactcataatgagtcggcttcgagtttgtgttaccccctctattatgaatcaaggatgtagttgctccaaataatcactgttgttttggttttcatttgcgcgcttgaaagtttgtccatgcgcttgacagtgctggcattttagaggtaatgtacgagcgacgactgaggctttttacttttctgagtggtgatctggcactttagaggtaatgcctgacccaaggaacccatttatacttgtgctgacgtgcctttttgatttccgagccataacttcactttttcctctaccgcttctctgcttttctgaattcctgagcccgctcgttccgccctagagattgcaatggctcccaagcggaagaggcagagcgccgttgctgcgatcatcccgcccatcaatcccaacagccagcttccgttcgctggtaatcatatgtccattatctctgaatctgacctttttcaccttgttgagactggggttttgccaccaaaagaactctgttcttggcagatctggcgtgggctcactgtcccgacggaggacacccatgaatctgttgtctatgtgccatttttcatccatggacttgctcttcccatctctccttttttccgcg

SEQ ID NO: 181058 - DNA, 885 bp, Zea Mays
ggccgaaggttagtattgaaagtgacgtcgaagcatgccagaaggcctttagcaatgtttgtgccttcattggcacaagagatataattcaagaacatataacctatagagtgtggccacttgtggagagctgggatatgccgaaggagcctactgctaaatccagtgaaggcggcctagttcgattgaaatataccttcagatttagagagaagtttgacgaaccaaatgatgattggttaaaatgtattgaagctaccagcgacgagctacttgggacatattccatggccgaagatgatgccttgtccgcagcttaagggggtcgggagaagaaaagattgaacagggtgtttgatgcaattggcttcgtataccctgattatcactacccactgcgaaggcaaggaaagaagagaaaaactactgcttcggccaccactattgtgctgaagggtaagaaaataaaggttctgacccaccagccacggtatattgaaccggtcgtagtgcctgaatttggcgaagggacctcttcaactgccgaagtaaaacaagtgacccccaccgtgcggagtgctaaagaatcaactgtagtgtcaaaggtgcctacattcgggccagccgaagccaaagatgatgcggccgaagaaccaaaattggaaaaaacagtggaaatggcagaaattctgagtccaccagcaaaggcagaattgccgaaagtgcaaaaggatctgccgcaactcccaagaggaggatggccagcgtgctagacgccgttatggagagcacaaaggctttgagacctgctcctacaaagaaaattgccgaagctgttagagtccaggccgaagccgaagctgggccttccgcgccccttgagac

SEQ ID NO: 181059 - DNA, 881 bp, Zea Mays
atcaccaagtacggatgcggcaggaggacgtccataaaacggcgttccgcacccacgacggcctctacaagttcctggtgatgccgttcgggctgtgcaacgccccagccacattccaggctttgatgaatgacgtcctgcgaacctacctccgacggtttgtgcttgtcttctttgacgacatcttgatatacagcacctcatgggcggaccacctccggcacctccgcgtcgtcctcaacaccttgcgccagcaccgactctttgtcaagaggtccatgtgctcatttggtgttgacttcgccgcctacatcggccacgtcatttcagtggctggcgtcgctatggaccccgcaaaggtccaggccatccacgactggccccaacctcgttcggcgcgagccgtgcgtggcttcctcggtttggcaggctactaccgcaagttcgtccacaactatggcgccattgcagcacccctaacgacactcctgaagaaagaggggttcgtgtggtccgacgaggcaaccgccgctttcagtgccctcaaaggggcagtgacgacagcactggcgttgacattaccggacttcaccaagcccttcgtcgtggagtgcgacgcgtccacctatggcttcggggcagtgctcatacaggaggctcatctgatcgccttcttcagccgaccggtggcgccccaccatcgctccctagcggcctatgagcgcgaactcgtcgggcttgtgcttgtcgtacggcattggaggccgtacctgtgggggcgacgcttcgtcgtcaagacagaccactacagcctcaagtacctcctcgatcagcgcctggcgaccattccgcagcaccattgggtgggcaagctcctcggg

SEQ ID NO: 181060 - DNA, 428 bp, Zea Mays
ccaagggcctgaaaagtgataaaggttggtgatccgaccttttaatcaaaatcgttcttcacctcgtccaccctcctacccctttaaacaacctgtattcatcctccctgccactgcccctacctcaacaacttagccgagtgcccctggtgctcgtttccctgcactcccgagttcatcaactggttgcttcaattgtgggaagtctggacatttcatcaaagactgcccatatccgaggcggaacaactccaataatcagtagaaccttgggagctctggccaaggcaagggaaacacgaccaataatgcaacgagcaagaatatgaagaaaactggccgaatctattatacacaagtggccactacgccggagggagagccgatcatgatgggtacgtttctcgtcgccaatcacccttcagtca

SEQ ID NO: 181061 - DNA, 520 bp, Zea Mays
tgctcgttggacagtcacatcggtcactgtttgccacctgtagtgctggtaagaacgttgtaagagtggggtaagacgcttcataatttgtattccaccaccaccaccctgagagatagttgtagggttcacattgtttgttgcctttttgtctctgttttgtgctaacaatgacaggaccaaagaaccaaatggacaaggacaaggggcctaagcttaacgacgatgagtgtatctctcagatggaattgaaggagatgatgcgcgcgatgactgaagcttttaaaaaataccaggactctgcggcgacatcctatgagcagcttgatcgaagagttgctgaacttgttacacgcatggacgtactggaggctcgtccctcaccaccaactccagccccagctcactctcctgtggacgacgacaacgacgacgatgatgtttatgcaccgctgcgacaacgcctcgcacgtaatcgacaaggtatgggaggtaatggtagacgtcgtcatcataatcc

SEQ ID NO: 181062 - DNA, 757 bp, Zea Mays
cggtccagttcaattagaggggtcgaggggcatcaccagcatgcaaagatgctagaacaggggcggggagggtatgaacagacctgtggagggctggccacggcgagcttggttctatggtggcagaaacttgatttgggggaaacaagaaattcgggcacactggtgatcgattgctagcaattcttggtggctgggtagttaatgaccttgcggaactggtggagggctcagtttatagggagagcgagcggtggtgatcaattcggtcgagccgtgctggctgccggagatgaagaagaaccttggcgcagtgaattcgtgtccaccgtcgtggcaacctccccggcgacgatgggacagctctagggagtcacggcgacgcggtggaaaggcagagccacgcggcacacggccgagaggcggcggtcaccggtgaagttatcggattccgctgcggtgaacctggtacggtggccggagttgtttaatggccggagtttatccacggcgaggatatctacgcgaccccaagtgctatccggttaccagtgagtgctaatcttaacggtggcgacgatcccggcgcgaagtcatcggcggtgaagggagcaattgatctgatctgtccaggcactgtaccatggcgatgcttattcagtgtgtctgacagccaagatttagggccagattcctcccaattttctatggaaacatccccaagtctctgcatcaaagttgtagtgctacataccag

SEQ ID NO: 181063 - DNA, 311 bp, Zea Mays
ttatcccactccgcgttcatctcttccgtgtaacaatagagggatcgaacaaaatgcaagtgacgggaaaccgagcaaaccagtgattctcctggagggaagcatgcaacggggccgccaggccggatgctgcgtttttgtttgtagctcgcagacttcgatctgcttgatttcactgacgtgctcatcgcagaggcattttcgactgtttccacgcggttggcgattagctttgactccactcagctgtaacagtccagcgaaatttccgtctcgtcatctttcctagatgcctaggcacgagacaggag

SEQ ID NO: 181064 - DNA, 1096 bp, Zea Mays
ggtttatttgtgaatgatctggctaccaggacccttctcgtccaatgtgatggctcagggttgttgtacactctttggctcccaacttccttaactgccatgtcctccccatatgccttggccgccaatacttcgtccaccacctagcatcgttgtctcagacatccgaggtctgatgtcatgttcaagctatctaggaacttcgtcatctcttgtagcaggggccattttggtagtctatgtcatgtttgtcaagtaggtcgccatgctcgtcctcctttctctagttcctccctcctatgttgcttgggcttttaattttgtacactgtgatgtatggacatcacctgtttctagcctctcagggtatcaatattatttgttgattttggatgatttctctcattttctttggactttcccattgcacatgaagtccgacatttttagcaccctctcgcatttctttgcttgggtctacgtgctctctactagtgcgacaaaggtcgtgagtttgaccactcctcccattcattttgtcgttctcacattgttcagttgaggctctcatgcccctacacctccccttagaatggctaggccaagcacatgattcgcgctaccaccaacatgatgtgttgcatccttttctaagaatctcttcccaccagctattgggtggaggcgatgaacactatcacctacattcttaattgtctcccctacaaggtggtcggccatcacactccattcttcatcctcttcggcaccaccccctcctttaagtatattcacgtctttaggtgcgcctactataccaacacctccaccactgatcctcacaaacttgtgcctcgctccactcgttgtatcttccttggatactcttcagactacaagtgtcataagtgcctcgatctcctcatgcaccacattatcatctctcgacgtgtggtctttgatgaggaagtctttccccttattggctcctccccacctcccgatcttgacaccctcctggatgttgaccctatcatcgtccctcctctttctttaccctatgtcccgtcgacactgtccttgccacatgtggcct

SEQ ID NO: 181065 - DNA, 719 bp, Zea Mays
agatggcataaatatcgtaagggtcaaaggcagtaacagacaagggtataagaggagaagtaaaggtgcagaagaaccaagggtaggagtacaacaaagaatggagttaagacaagacttgcacatggcaaagatgaggttacgaccaagggtgggataagtaaaacaccactctcgaactaagatggaagattggggttttagacaacagacataatgtaatcaccaaggtaagatcaagagacgagaaaggtaaaagcaacaacaaccaaaagcatcgcaaaggatagagttaaaactcgcaagcaacatagaagaggatacgaccaagggaaagtaggtaagttacaactcccagtttgagatggaagagaggagattttaaagggtaggtataagataaacatcaagtaagatatagaggtgataagaataaaggtgctaatgatggaaagcataatccatggacaaagttaaggcaagactgacgaagtggagaaaacaagcaagggcaaaataggtaaggttccaacaaaatggttgaagtaacaaaaattattaccgaggggagttataaggaaacgatgagatcatcaaggatgtgcgaaatagaatggtcgctcatggatcatcaagaaataagggtggtcgaaagcatgttaaccggaatgtcttaaataggcattgggatataaaggtaagcatatataaaaataaga

SEQ ID NO: 181066 - DNA, 535 bp, Zea Mays
ccgaagcacccttgccgagccaatcaacttgattctcatgctgatgagcagaaaaagaaaaagagatgccttcggcgagtatctagcttggatcgggatgctggtccttcggtttctgctgttgaggaagtgcctgtgcctgaatttaccgacgctgaccccaatggttgtgatccatctgtcgctgatcccagtgggggtgctccatctgtcgctgaacccaatgttcgtgctgcctgtgctgctgatgaaaacgagggggaggaagaagatgaggtccctttgactcggaagaacagtcggcaatatgtagccagtggggaaagtagtggagttccttctcctgctctgtcttcccttattggtctacaagaattgtctctggcgaactttgatcagactcttgaagatatggttccagaggatctattatcagagccagcggatggtgacgcgatggatgtttgtgctgatgtgttcgacgccgggttgggatcatcccgggcagcgtcccgcgcctcatcgaccttggagc

SEQ ID NO: 181067 - DNA, 629 bp, Zea Mays
tcctcggcggtgatctttcgtgaagcgtcgcctgcgcccagcctctacctcgtctcggcggggtgagttcttgttctgctatccttgctgttgtgattttcgcccgaggtatcatcagggtatagattgtagtgggtcgctcgagtatcacgcagaccaccgggatatcgggcggtgggtggcctactgcagggcgccaccgctagggtgttttgctcctcctggttcgcggctagaggtagaagatggcctgtgtgtcgtccgatcgtgtagcggcggccaggattgttggagggtgtcttgtcggctaggtgtaggagaaggaacgggcactgtcgatcaaggatcgtgcgaccagtgtgggatagaattgatagtgtgttgtggatcgtaggattcgaatccaacatgtgaggatgatctcaggttcataagtgtctcgggctaatcctggcggccgagttctgatcgaacgactctagcgcaaggataccccttcgccgagctgtttttcacatgggaccctaagtttattgagaatgaacctgccgtctagtagggaggaagtctgtgtcttgggaagaattgtagatgaacccctggtcttttatgaatttgacgcctagtcc

SEQ ID NO: 181068 - DNA, 454 bp, Zea Mays
aaacggtgcaactagaaattggggacatggtttagcagtgtagaaggttctcacaggaaatctcggagtggttcctcccggccacgacaccaggcggacggcggtgcatcatggcggtgttcggtcagcggcaaatggtctccgggttcacgagcccccaattccacaatggtagcccacgaagattctccccacccagctgaaaccacccagctgagccatgaagtcgaccgacgacccatgattgacgatggtgcggagcgacttcctcggcccctctctctctggctctagcgtttcggcatgatgcaaggtgcggctaacgatacgagcttgcggtggcagaggcatggcaaggaagttcttatacctagatgcgcgaggggaaaaagaagtctgcgtgccaaatccccggtgagatccacacgcgcgataatggcggggcggttacgac

SEQ ID NO: 181069 - DNA, 579 bp, Zea Mays
gccgaaccgcactctgtcgtggccagcgccgctcgggcatcgatgtctggtgaggactccctccctgagttcgccaggtcctttattacgtattgcgcactgtggattaggacctagggcttgtctgcgtagtttcgccgtgctccggcgagctctgcggtggggagaagcagggcgccgctgggtgttgtgaccgggattgggggaatagccctcgccgtggatcgtcgcatggacggctacgattaggagtagtataccggttcgggggtgtccaacgtgagccgtgcgatcggatttggatgcacagggctggtttccgttactttaaatccgcgacgtttatctcaaatccaacgaccgcgatcgcgtacccgttcagtggtgttctcgatctaatctgggtgctccatttaagatcggacgactagcatcccacgataccccttcggcctgtcagtttaacataagagcccctagcatctctgttattcaacccgcagtccgcatgtgggttagtctgagtcttaggtaaattgtgatttaaacccctgcacttctctgtattagtgcgcccgg

SEQ ID NO: 181070 - DNA, 478 bp, Zea Mays
ccttcgggatgatacccatctccctgtagttgaacaacattatcctcaattcctcaccctcaaagagatttcgcagctcaccctcacctacactcaccccagccggcgaagacaacaattcccgtttggcagtcccgtccacacgaagacgaccaccctccacctcaccatgatgacgcctatcacttcacgacaactcactcactctccgcttcgccaccgcccttcaccgcctacacctagcactcgcacccggaatgtcctcacccgtcacacgcagagaagtctccactgcagccacatccaatgttgcaaaatagtctaagtcctcatccgaagacccctctgtccacacaatcgaactccccgaatcatcagactcaaaacacttagacacagaatcgtcagaatcgtcttcagcaaccaaggtcgaagccaccaaattagcattgtcagtagcggttgcgtgcgcaggccc

SEQ ID NO: 181071 - DNA, 445 bp, Zea Mays
acagatagccaaatagctcaagttagggattgggagctcggtttcgcacaggaggaagggaagaaatggggtgcgcatacttggtgggtgctcgtcgccagcgaaggaaccgacgaagaagtgaccacctgccgtaggacggcggcggtcgcccagttgtcgcacgagaggaagaacgcgcacgcggggtgaacagcagaacagaaggcaggggtgaattccggggatgttactggatggtgatagctgcgccgttgggccaccgggctgaaaccgtgtgtgtggatcatctgctcttggaatgtgccttctcccatgcgacgtgtgctatactattggattcatggcgccagagtttcccaaactcggaagaggtccggcgagcggtgtctcggagaggacgcaccaccgtgggcgctggacggctggaggggacgagcaaact

SEQ ID NO: 181072 - DNA, 1268 bp, Zea Mays
ggaagatgtattttatttttaactaaacttctgataccttatttgagatattattttacctatagttttcagtattagtacaactaacaaatagtagtagaatgtactaatcaattttagagggttcaagcccccacctatgtctatgttctagtcttcttcattgtgtttctaaccttattttcttcatgcttggtcaaacaaatatagtctaccacgaaacatattctaaacaagtattcatgatggaactttgaggaagcataattccttgacgttctaatagaaaacacatgaacaccacatgaaacaagactgctagtttgcctcgaacatattaagaaaatgatgtacaccattaatgaactctttggagcatcagtctatgttgtacatatattgttagttcacttcattacatgagtattctaaccatattttcttcatgcttggtcaaacaaatatatatagtctgccacgaaacatattctaaacaagtattcatgatggaactttgaggaagcataattccttgacgttctaatagaaaacacatggacaccacatgaaacaagactcctagtttgcctcgaacatattaagaaaatgatgtacaccattaatgaactctttggagcagcagtctatgttgtacatatattgttagttcacttcattacatgagtatatccaaaacttggacatgtcgatgtccattacacaacatgattaattaattaatattgtatcatagccgtttagtttgaatattgatttattaaaaccctttacaatgtagataattccaactagcactaaacaaactaaatctagaatgcacttcaatagaataaggatttcacgacaaattctaacaaaacaaacaaatctttcgttagttcttcatcggtggacttttttcgttggttcaccacttcatgcttaggtgtactctcatcaactgcctcagatgatttttgcacattcatagtatattcttcctcccaataccaacctttacatacagtaccatccgactgaaactagaacatcaaattattcgaacaattaatcaaattcatcacaaaaatagctagaaattatgaacacgtctaaatgagaacgcacattgcagttcaggtacttgtaaaagatggggtcctggttgggacatttattcttcactctatactctagcacggtcttcttgttacacttgccatatgcagtgaaaggaaggtctagcctcaattgctcgtgaatcccat

SEQ ID NO: 181073 - DNA, 685 bp, Zea Mays
acaccctcaggggctgggttgtagcccgtactgcccatcggagccggatcaccaccggcaacaccctcgggggctgggttgcagcttgcgctacccacacgagtcggatcattaccggcaacaccctcaggggctgggcaaccgctggcaccacccttgaggactgggttctctgcaacagccacctctaaggctgaaggattctcagtcacctccatgggacttgaacgaccttgaccaatctcttggctctgaagaccgccttccaaggtcgacgatgcacgagacgctacctgggatacctctaatcccacatctggaatgtcagagtagatgtccatcatatcaccatcggttggctcggacagcagatcttcaggaacaacatcctcaagagcctgatcaaaatttgctagggataattcttgcagaccaacaagagcagacagagctggagaaggaatatcgctactccccccactaactctgtaacgccgactgttcttccgaattaatgggacttcctcttcttcttctttgtcctcgtcaacaatacggataataaatggcacagggtcacacccattgggttcagcatcggcagggtcacacccattgggttcagcatcagtagggtcacacccattgagactcaagtcaactgcttggacgatatgattacact

SEQ ID NO: 181074 - DNA, 901 bp, Zea Mays
taaatgaaacacagataagataattctctcatctttgctcgtgcataaagttttacccgaagtaacccgaagatatataatataatgcatgaaagcctttttggcatagaagacatcacaaattgggattctattagtaagcaaaaggccttaccaaatgatttaagactataaatctcagtcatacattgctcaaccagatgttggcacattgctatttgtcgctgaacggcatgaagcgaactttgagataaatggctagtaccttagcaacacgaagttgcgagtacatcgaaaggtaattctgagaattttttcacaacattggtgtgacaaaaaaacattgtgtgttcccgtcgaaccactttactcgtcctgtctaggacctctatgcttgtgttgcatacatctctcagaattataaatacttatagtcgctaaattgacttggcataaatggtataactttaagctaaatggtaaaggtcggtcctaaatggacatatacctggagtttatgtagcagaactacattgaattccaccctttgaaatgcttaccataatatatctctgatctaccaggagtaagaagagtagaaaatagccatgaaatcccatattaccacaaagcttgaagtgaaattgggcattaatatgtcattggttcttggcgccgaaagatccataattcttgaccactaagctattggtgatggtaatttgtgatagaaatatgaagatcttatggagaccagatgtattctcccttgtcttgatgactccttcgtatgagatcagtattatctgttgttgaagactagtcctagacgaatattggtatttcttttgctcttgccaagcagttatctccatttgctttgtcgaaagcttaggaatca

SEQ ID NO: 181075 - DNA, 832 bp, Zea Mays
cgcaagggcaagtactcctctagcaagtacaagtccaagcgaggattcaacaaggaggcactcaagaagaagtaccttcagaaggcaaagatcaaggagcgtgccttcctcgcctccctcagcgacctcgaccacgactttgacgatgttatatcttcctcgagcgacgaggatactgagaggcgggtcgaggacaagctaaacgggttgtgcttcatcgccgacaccacaggaggcttctgcaccatggcacttggtgaggacgcggtcggcaccagcgacgacaaagacatcagcgacgacactacttctgaggtactaccttccgctgatgatcttgtcgttgagatagaagagctgaacgctgctttggctagccaggataagttgcttaggcaggctgctcgtgagaggagagagtttagatccgagtacgagagcacgcttagggaacttgagtttgctagagcttcaattgaggtgtccgacgagactgaatgtgatgagtgcgctctacacatgtcgaacatcaccactttgcaaaccaagtactctaccttgctagatgagcgcgacgagttgagatctaggtctatcctgttaggtgcgtgtaccgtttgttctagtttgcagtctgagctagcagagagagacggtagaatagctttgcttgaaaaggctagctcagtgagtgcccctgcacctacgcagtgtgcactttgtgagggtttgcaatctgcccttgattcttgcagacacggcaagacaagaatcgaggaagaaaacacataccttcgatctatcttgagttgggtgtcgtgcagtgagccct

SEQ ID NO: 181076 - DNA, 402 bp, Zea Mays
acgaaaaatccttggattgtgctaagaagttgaaagatagttttgcaaaggtgggtgcatactcatctgagcaaaaatttattagaggcgatcccaaaggaatcatcgaatggatcggcgaagaagctgaagcctttgacgagatacttagcgaccgtggtgatttctgcgccttcgccggtgctagaggggttgcagcaattttagagaaaactggatgtgaacatgttaaagctgcaacccaggcagagactcttttctctgtagacaacacgaaggatccttcggctgaggctactgtgatgagagggaaattctattccaacgtttggatgaagggcggccgggagatatcagacgaagctataaataaaaatgaaaaagaatcccatgatgccctgg

SEQ ID NO: 181077 - DNA, 536 bp, Zea Mays
ggttgattcgacagatcgaggtattgtcttatttccccattttttgactcgatccaacaccgttcttgattatcttgtgtatcttttcaaggatattgtgtagtttaggtgcttggcacacttaaaccgttttcatttgtctcgaatattgtttattaagtagtttggtattgttcattgtagttaaactgctcacatgaacagttgaagtgcatgctcaatatcatacgtgtctttcctcaaacgtgttcgttaaaatccttgaacatcgattacctctctcaccatatgttcctctttttatcttaaggatggtgcgtcgtaggaatccgtctgtagttgagtccgactccgatgacgacgctcaagagatttgtgaagaaactcctccacggtccatatccaagtgcgggcgcggatctgggaatgtgctgcaaggtggtgaggccttagggtctcatggtgctcgtggtcgaacggcccagaatccctccggtcggtctcgacccgcggccaatccacaagcctgggaggca

SEQ ID NO: 181078 - DNA, 497 bp, Zea Mays
ggttgcccaccaaagacctccattctatccagtggtctcctttgatcgagcaaattcaaaagtgaatttttgaatacagctacaagaccggttgacaccattttctggacatcatatctctcctcttgaacatgtaaaaggccatcaatggtttttatgcttacaaccagctcttttctgtatgatcgcaaataatcatcattcagaattgtccaaacactattctctatagctggaaggttacagttgaccaaacagttatttctgtacttcccctcacttagcttgttttatgaataatgccagtaaatatcacatacagcaggcaggtagctaatcagtaattgattatttgcaaatgaactacaaatgtactagtcaatgactatatcggacccttgaaaattcttcatcgccccttctttttcctttcctgccaagattgtctatatctaaagaagtccaagcatcataaagaatgcataccagtatcaaca

SEQ ID NO: 181079 - DNA, 875 bp, Zea Mays
acgacagtgtggctcgacgacagcgctttcttgctcaggcgagcaattgcgcatgcacaggggcagggaatgggaaatcaggggcctagggaggttggttaccttgagagaggggtctgggacgcttgaacggcggcggggacacaacgaagcctcgggttgacggcggcggggcctcagttgcacggtggaagtccggtgagcgcgagaagagagagatagagggggaaggggcgcactgatggatgtcccggcttgctggcattgaggcggagctcagaggggcaaccggcacgacggggactcgacgacggccgtggaacaatcccgaaccacggtggacggcggtggagctcctcgggtgcgaggcgggtgctggggtgctgtgggtgtgcgaatgaggggggagagcgagtggggtgttgggcagctagaaaaggacggggcgagtgcgacctcagcaaagtccacgacgacgtgcaggtcgtgcgggtgggcggttcgggagggacgggtccgacatgcagggtccacggaccagcaagagcgggtgcacgaacgagtggtcagcgctgacgggcgggacccgttgcgtagagagagaatgggatgcgcgcgcgaggggaattggcgccgacaggtcgatcccaccggcaagagagagagggagcgggtgtgagagcgagcgcgggcgaaggaaacgacaccgataggcgggcccagctgtcagagggagggtgggcactcacggtgcttagttgggctagattgggccgacttgcattgaattgactttttcctttttcttatgaatttctaattccttttctttttattttctctatggaattcaaatcaaatcaaaccacaattca

SEQ ID NO: 181080 - DNA, 738 bp, Zea Mays
cctctgtgctctctgctctctgattctctggcgaccacccactgctctctgatcaccggcgtccaccgtctccggccgtgctccggcgacctccagccgctgcgctcgtcccttctccctctggtgagcagccatgtcttcactcctctctcttctctctgttcagcccagtgagctcacctccaccccttatgtgcccaaatcaatttcctgtcaattctagtgaatccaagtggtggaatgtgttcccatgtgtctcttaaatatccttgcaggttcctagctccttcgggagggttttcccatctcaaatagccatttccccgaaaccctaaaactccgtcccacgtgttcggtgaaatgcccaaaccagccaaaaatgctccaattgaacccaaatttttcaggcactttcacaacacctccagtaacatattcgccaaatttcacgcccatccgatattccaggctttaatttcaccaaattcaccgtttcgagcgatcgtttccgagccgagtgcccaaatctctttttcttcgcctaaattcaaaccaagcacacacttcactcatattcacccatataaacctatttgtgaagtatcggctcaattccatgtcatttcgtgccttaattcgaattccaaacctcctatagcactttttatcgttcaaacgtcgttttcacgtcgtttgacctctcgatcgtcttatctcttgttttctgtgccatatttc

SEQ ID NO: 181081 - DNA, 499 bp, Zea Mays
ggttgaatctcttttcccatcttatcctcctcctcttggttcctattgcggtccaagtggatgttgagtttgtttctcctctcttttttggtgcttgcttccaaaatgggggagaagtgctgaagatgcttagatgcttggagaagaagtaatgttgaatacggtgttcccgtgatggtggcctttgggagctctatgagtgatttccttttatgtaatgaactatggtctctaataactatgtgatgatgtctgaataatttgtgatggatgagatggtcatgggccatggacaatttgaatttgtgatgtatgatatggccatgggccatggacaatttgatgacgatgatctatctttattgtaatagtttgttagaatcactttttatgatctactataccatgagcttttcctatagagtatgtgatgagctatgtgcatgaattttcatatgcatcacgattttttatatgacactatgttttgcacccctcg

SEQ ID NO: 181082 - DNA, 421 bp, Zea Mays
cagcaagggcatcacacattacattggctcaaccttcgggatgatacccatctccctatagttgaacaacattatccttaattcctcaccagcaaacagacttcgcagctcccctcacccacactcgccccagccggcgaggacaacaattcccgcttgccagtcccgtccacacgaaggcgaccaccttccacctcaccacgatgacgcctatcacttcgcggcaactcactcaccctctgtttcgccaccgcccttcgccgcctatgcccaacactcgcacccggaagatcctcatcacccattacacgcggtgaagcctccgccgcagccgcatccaatgccgcaaagtaatccaaatcctcatccgaagactcctctgtccacacaatcgaactcccagaatcatcagactcaaaac

SEQ ID NO: 181083 - DNA, 518 bp, Zea Mays
ttggaacgtcttctttttttcttgttgcagagagagcgctgggaatgaccactaggaacaggattctccagcagacctttctccatcagagcttcaccagcaggggtaataccacactgatttcttcttcagagagtgaccctcagtcaaagtgagcggcgccggtggagctgacagctgttgccacactgatttcttcttcagagagcgaccctcagtcaaagtgagcggcgccggtggagctgacagccgatgccacaccgagggtctcccacacagatgaccaagacgttgccgcactgaattcctgctgacctgatgatccacacggagggatggacaccaggcagcttgatgaccaagatggaaacaacgagcaacaactcggtggctgggcgcaaggcagttgaagcactttccacgaagttccacttggtgccggcgacggggcaggggtactccgcgagacctcttcttgcgcatgactacttgccagccgtcatcgtccataggtcgcc

SEQ ID NO: 181084 - DNA, 821 bp, Zea Mays
cgggtgaccaagtccctgtcgagcaacctcacgaaagaggagcgggtgaccaagtcctgtcgagcaaccttgcgagacagaggaggcgaccaagtccctgtcaagcaaccttgcgaggtagagcggacgactaggtccctgccgagcaaccttactagagactagcgtaagggaaggccgacccaatgatacgagcccacgttggcgggacaatacgggtcatcaccacactacatctaggcctcgggtacaacatcgaatggtctctgacagatgtcagatgacacctcggcacgtactgtcttaggcgaacccccatcgactaatagggacagtcaatcccagtctaagggatctcagcattagagtctctatagtgaccatcatatcgggaaagatgtaatggatacaccatatcgggtgtatcgcacgatggcaaatgacacaggctcatgatgatgggcaaagctacactacacgctaccaggacatgggactgacccacaggacccaccacactactacaaagatgtcagcagaggactcacaacaaggacccgtatgacaaacgagcgagacagtgcgccaaccaggagtacggctacgcacgaccctacggacaacgtagcaccaggagcactatgtcaagccgaagcaacggatcgacccttgaactataaaggggcatctgccctctttcttctgtagacacacaagcacacttgttgtaacatgctcaaagcaatactacgatcaacactacactggagtagggtgtgaacctgaactagtataaaccttgtgtcccaagtgaaaggtaa

SEQ ID NO: 181085 - DNA, 567 bp, Zea Mays
cgcgagggcgtggatttggtcgcgacagaggcttatcaccgcgcatgtagccattgcggcgtggccggaccgctggtgtcgccgtggaaactctggtgacctcggttgtgccacgccgtggcttgttactgtgcggtagtgaccgtggcgcacttaagagtacaatcgtggagccattgcaccggtgaacgccacgaattctttgcgccattgctcttccccctctccggccgccgcgcctctccttcaaattagctgccaccgctcaagggccctataaattgagcacaccctcggctccgctaggtattcaagcacccagcacacccactcgtgcctccaattgttcacttgagtccccgaatagctcatttcccccaaatctggtttccgccaccgtaaaaaggtcctcgccgtggctagctcgtttcaggtccgatcttgtcctctgctctcttgtttcagcactcttacataccactgatgcccctcgacccattcaattaagctagaccgtgctagatcgccgggaacacttctgttcatccatagttcgcactgtctcca

SEQ ID NO: 181086 - DNA, 521 bp, Zea Mays
gggtgtcatcccggcacggattcaatacaggcccgcaacgaagtagtcgttcgtttagcccacgcgtgttcagaaaccaggcccaatccacgcgaaaacactgaatcccggcctggaattgatccactaattaacaggtgtggaactcctcccagcgcctgggtgtggaagcgacgacgcgacggaaccgcaagcccccttccgccgtcggccgccggcatcttcaccagcaacattttctcctgtgagatcatcgttcccttccttcccttatctctcgtgtctgtgatagtgtcccagactctctcccttgcctccacctccaccttgtcgcctgccatgcccctgtccacggtcggcgacgtggacgtcactatcctccacctgcgcgcggcggatcccgcccttgccaccattatcggcgcacaagtcctcctgtgttcaagtgcccgtaccgccggatgcactggctcgttcgattaatcctatacaagcactggctcgttcgatttatcctatac

SEQ ID NO: 181087 - DNA, 631 bp, Zea Mays
cttttcctctggtcgtgcccttgcatagaccacctgcaccacgctttccaagttcgacgtcgttcattgctatctcgtttacaacacaccgccggcaggcatccaggccatccctcctattgcgtgtcgttttgccctgcccagtaaagcccgcagtcatgcgttcgcctccctgagcgagcaggagtgcgtctgtgtccgaaccaccgtgccgtcttagtcgcccccacacacgcgtttgacccagatgtgatcgcgttcgcaaccacccctgcataaagccccatcccactatccatccccgtacaacaaccccactcctccagccgctcacacaacctcattctcatctacctcatcgcgtgcatgctccattaggcgtgcctttccctctcctttccctggccacaccatcccacaaggaccgacaccaagcaacagcgccgccagcaagcaccccatgccctgaaccaccccacaccatatctgcagtacaggtacaacagtccctgccgccggggacgttagacccaccctgctcgcgcgcgcagtctgatggctaattcgccacgtcatcggtcctgctccggtgagctgtcgacgctgtctcctgactggcgaagccagtgac

SEQ ID NO: 181088 - DNA, 1118 bp, Zea Mays
aaaagagccacatttgaactcttttggctaagtctgaatttcagtgtattgtgctcacctttgtgaccttgcaactttcaaaatatagggtttttgccctaggccaccacataaattttgtaaacctattataggagagcaactttgatgcagacatctcctgttgttgttatacaaaaattagagaaaaacacacccaaagtcaggctgtcaggcaaccctaggactgaatttccagtaacagtggacttaggcaggctttgaacctgattttgagttggattcggtaactattttatgttgagctccgtggcaaagttgaagatgaactataggtctataactttagtatagagacttaaatcagtcaccacagtaaatttggaggaaattcgagttcaacattggctatcaggttcatctgactgaaactcgcgatggtacagtagcctggattggatcaggctgccagcgcggaactctcaccgtcgacgatacctccgccgtgattcgtgtcgctggtgtttgggttcgtgcgggtggcaagtagataacgtcgcggggtgaaagtgcatcaccgtcggtgagctggactccactccggctagccgccgtgcccctcccctgcacactgatctttcggatagggttctcaccggcgtcgtgctgtcaccatcgtcgtgcaccacgtgtcttagcacgagacaccttcgtggtgactcgttagctgcatgtccgacgatcaccggaatcactgccacggtgagagctactttttcccccgcaccgagctcactggccgctaacacccctcggccgaattcgccaccgaccctcgatgcgcctataaattgcggatgccgcgggctccgtagggtagtaagctaaccagccacctcgaatcagcctcaatcattcactgagagccgcgaattcggagttctccccaaatcattttccgccgccgtgaaacccaccccaccgtggccagaccactctggcaaagttccgcgcctctcaagtattgttctagcatctatgtaggcacgtaaagctcaccgtagcaaccgtttgcccaatccgggcctgcgtaattgggaacatgggatcaacgccgc

SEQ ID NO: 181089 - DNA, 843 bp, Zea Mays
agaaaaggaaaacgagtaaatagtgttgggctgaatctagcccagtcggcccaacagcacaacgaacagggggcgcccgcgcgcgcccgcgtgcgctctggcggatttgcgaaaacgccctcagggttttcactaacttgcaaaacgttctacagaattttctaagagtcactgacatcttacaccgaggtccctggaaccttgcttcttccccaaatacgtcccagaccacggcgcactcgccgtcgactatcccgctgctcggtccggccaaaaactactgcggatacccaaaccagctgctgggtgagtatcaccgacccgaggcaaccatagaacaagctccaatgtgactaacccggaccaggatgtgcttgaccacggtgatggcggacaccaagcatcaatcaatacgttccggttgcatacgtaaggtaaagctccctgggttgcgtggataacaatcccgagcacatgagggcgctaaaacacgagcaacaagggcgaggacggacctggaatcagttgggcgcaagtaggcggttcacggcgacgcagtcgaccgaattaggggaaaacggcgttacggtggctctgggtgaaattgggggcggggattgaggctacacagccgtaagagactgtagtttcaccgtgcactatcaatttgggaagaggtagagaaggccgtgtgaatttctggttgtactcaagcttgcttgaagaacagcaagcacctcgccgaggacccaatggctatttatagccgtggcggtccggcgatcacttcgcggccacggacagcatcactagcgcatgccgaccacgtcggtaggaggtaca

SEQ ID NO: 181090 - DNA, 513 bp, Zea Mays
ggggcgcctagttggcgcaccagacaatgtcccgtgcacaccggacagtgtccggtgcaccatttttcagcacactcaagtccttttgctccaattaaattgtgtctctaacttgatttttttcttggtttatgttgaaccttatgcacctgtaatacatgaattctagacaaactagttagttccatgtgtttgtgttgattatcaatcaccaaaattaattataggatatggttaaccctatttccctttcaataccaaagatcaaaaaagcatgtttaccagaatttcctccgaggctcgaggagtcgattcaacttgcaccttcagaactttgctccgccttgtagtctccttcctattcttcgaatcttgaaccatgatgggatagtcaggatagaataagtcgatagcatcgaacacatggttcaatcgacgcctttttcgagctgcaaaagctcgttgtaaagcttcggcttcaggtttgctataattaccaagtattttgttaca

SEQ ID NO: 181091 - DNA, 353 bp, Zea Mays
tgctcgttggcctgagtgccatggatgcgtaggcaatgacccggttatcttgcatcaaaacacaacctagtccagtgccagaggcatcacagtacacatcaaatggcttgccgttgtcgggttgcgctaacaccggtgttgtggtcagatgctgtgtcaaggagtggaaagcatcttcgcacttctgaccccagtcaaacatggctcctttcttcaacaattcagtcatgggcttcgcaattcgagagaaatccggaatgaatcttcgataataaccagccaatcccagaaaacttcgaatctgatggacagttgttggcggcttctagttcatcacctcttgcaccttatcc

SEQ ID NO: 181092 - DNA, 1856 bp, Zea Mays
gttccagtcctttcgcctctcctatcatcttggctcgtaagaaaacaggagactggcgattgtgtgtggattatcgccggctgaacgccatgacaattaagaacaaataccccctaccaattattgatgagttattggacgaattacatggatcacaatggttcaccagtttggatctctgttcgggataccaccaaattaggatggaaccagtggatgtgccaaaaacagcattccagacccataatggacattacgagtacagggttatgccttatggagtcacaggcggtccggctacctttcaactcaccatgaactctatcctagctcccctccttcgaaaatgtgtggtggtcttcatagatgacattctcatttacagtcaaacttgggaagatcacatggcacatgtgagggcagtgttctccatattggacaaaaatcaatttaaggtaaaattgtcgaagtgtgcttttgcccaaaacaaactacactatctgggatacgtggtcagcagagagggggtggcaactgacccggacaaggtagcagtgatcaagacatggcctacacccaagaatgtgaaagatattcgcagtttcctcggtcttgctgggtactacagaaaattcgtcaaaaattttggcatcatcagtcaacctttgacaaatttgctgaagaaaggacaatcttttgtatggctggaggctcaacagcaagcctttatggccctaaaaacagctcttacttctgcaccagtgctagctctgcctaatttcaatcaaccttttgaaatcgaaactgatgcttcggacaaaggtattggggcagttttacaccaaacaggccatcctatagcttttatcagtaaaaccttgggtccacgacacctgggattgtcaacttatgaaaaggaatgtttagccattcttatggcagtggaccattggcgctcgtatctgttggggggcgaattcatcatacgcactgatcagcgcagtcttgtacaccttgatgatcaaagcctgaccactcaatggcaacaaaaggctctcaccaaacttttgggactgagatataaaatatgctacaaacaaggacaaaacaacagggtggccgatgccttatcgcggagaaccatggatcagctcatcgcagtttctgttactcaacccacctggctgaaggatctggcagacacttatctccagtttccagaaacaaccaaaattcttcaagctgtttctactgattcttattcaggatcttactccttgaaagacggtctcatatatctcaaaaaccgaattctgttgccagcaacatcaggattcccttggaaagtattccttagtcttcatgcatctccaattgggggtcactctgggtttgcagttacgtatcacaaagtcaagaagctgttcgtgtggacaggaatgaaaaagatgatacaaaattggtgcagtgagtgctccgtgtgccaacaatcaaaaccagaaagagtcaaataccccggactgctccaaccaatcccagtccctgatggtgcttggaaaacaatatcaatggattttattgaaggactccctaattcttgccactccaactgcattttagtggttgtagatactttttctaagtatggtcattttatcccaatgactcatcctttcacagctttatcggtggcacaacagttcatggatcaagtgttcaaacttcacgggttcccgcaagccattatttctgatcgggacaagatctttaccagcgctttctggaaagaattattcaagttagtgggagtagatcttcgcatgaccacagcatatcacccacaatctgacggccaa

SEQ ID NO: 181093 - DNA, 545 bp, Zea Mays
tcgctttgaggacagacccgagagctctcgtggtcacagacgctctaggagtggtgggaggatcaagaagtttgggcagtggatcaaggctatttttgctacttgcacctacacagctaccacagtctaagaggagcgcttggagagcagggaggctatcagggtagctagggagatgcagggacttccacctctaccacatgtccctcctcctccccagtttcctgacttgcctcgcctctctggatcctcttcagacgacgacgatgatgatggtggtgatgatcaggggctgcacggtgactactatgaccccgactttcaggagacactcttcagctactaccagggtcgccggcagtcgttccaggcaggcacttctcgtgtcggtccttcgcagcaggaggcgcagccacctcatcgttcggcacgcttcacttcgactacgcaccgtgctggatgagcctgcgtcgacagcaactctgacgacgagtgacttctcttcttttctccgctcttttttggtacttgatgccaaaggggga

SEQ ID NO: 181094 - DNA, 656 bp, Zea Mays
tccatggagagtgtcgacgccgaagtagagagtggaacatgtcgccacagtcgaacccgcggttcaccatcgccaggtcctcgaggaattaccatggagcgtcgtcggggcatgtgggagctggcgcaagtgttggcgtgcacaggtagcagtggggtgaccgggaattgctcgctggagtcctccttcgccgcctgaaccatcgcttgccatgggcgaaggccaccgactcatcgtttggcggtaagtatgtcttgattgagttcgcgtggttctctgctgtgtgtatgacttatccactgtagatcctatcctccggggcaccggtcggagactctttagtggtggcttcaccgtggacagtagagcggtgccgcgtccggtcagcttgaggagtgtgcaacgccgtgactgtctgatcctatgtgggcggccacgattgatcgaattcataccgattgtccaggtgtgatgagaatcgtccatttgtcgaggagcgatcgcgattagggcatggtgtggtcttctttgggaccattggtccgagatctagcggtgtataatgcgtacctgattcgaattaagaagtggtcgaatcgtagccgtagatgtctgatcgaaaggaggacatacaccaatattgtttcggctgagcg

SEQ ID NO: 181095 - DNA, 707 bp, Zea Mays
gaaaagaaaacgacgggaacacagaaacattttggaggccggtaggcactggtcagtgtttgtttcggcgacaaggccttaccgcactgcgctagtccacgctgtcgttagggcaatgctcgacatgatgcgacgagctggctagggtcccgcagcggcgacatccaccgtgcacgtctttgtcgccggggcaggtgcagagacacggctgcagcatgccggcatgcggccttggatgactcgctagagcagatgataacatagggctacggggatacacattttaattagaatcagatggtttgaaaataaaacaacgggaacatagaaacgttttggaggccggtaagcactggtcagtgtttgtttcggcgacgaggccttaccgcactgcgccagtccacgtcgtcgctagggcaatgctcgacacgatgcgatgagctggctagggtctcgcagcggcgacatccaccgtgcatgtctttgacgccggggcaggtgcagagacacggctgcggcatgccggcatgtggccttcgataactcgctagagcagctgataacatagggctacagggaggcgtcaaactgctgggaggaggcttggaaatgcatgagaaccactcacgctcgtagcatatagtctataaatgatttaaaaaacatatgcatctccacagagaacttgtttagagtttcatttttcc

SEQ ID NO: 181096 - DNA, 516 bp, Zea Mays
ctaggctacggaggccagggattggcatggcgcagaggtagtaatgatggtgtcagggcctcgcaccgcccatgttgttcgccataacgagcacgagcagagacgacgaggagaccaagacgcatgaaacaacacagcctcaacagggtaaaacactcgattttaccatgatatagtggttccttctcgagggagtcactgatggtcgaccctcaccttggcctataaaagtaggccagtcacgaggaaggggtttcaactcttagaaccggagacactcaacggaaggcaatgacacacgagacctaaaaacctagaggttggagccaaggtttagtgtaggactccaatcccgtagtcatttaggcccacccacacataagagacttgtgatctctccttccctttttcacccacttgtaacccacttataacccctactacgagcattgagttacaaaggtgttggtagtgcgagtcgcctaagactggatatagggatgttctgcccaaacc

SEQ ID NO: 181097 - DNA, 449 bp, Zea Mays
ggacggatgaaaactggttgcttgaaaggataggcgggtggacgaggaaaagagcgatttgtgttaaagggacggatcaccaaccttgaccacttctcggatccttgagaggatccttcacccccttcactcccaaatctttttgtcattccctgccctgaattcttggcctccagcgacagtgttgtgctcacggccctactgtaagtgagatctagacaagtggccatattccactgtagccggtcattcagaccccctcatgaaacaattcttctttttaggtctgtgtcaacttgctctatagcatactgggagagatggttgaatttgacgaggtattgcatcaccgagtctcctccttgcttcaagcgaacaaactcttccagtttcatctgtagaacaccatctggaatgtaatgttttctgaacgcatgcatgaactatgc

SEQ ID NO: 181098 - DNA, 435 bp, Zea Mays
ctttatttcctacaacatcaacactttcctcgagatgatatgagtttaagatataacaattcaaaataaccttgggtcaatcttggatatagatcattaaagattgatagcttgagttaataaaaattgaattgactctctcaagcatcccaaagcttcataccatctccttttcctgcaaagcttgtcaagcatgttttggtacccatcgcttgatggatccattatggttagtcaacaaagatctaggaacccaaatgtcctttgttctagcgcttggcagattcattgcctttctagcacaagtttcaattttgggttgcctagttatatatgaatcaaatgacaagctatgagtggaggagttaccaatgggacaatccttgcattgatgtcccttttcccggcatttgtagcataggcgttttccaagtt

SEQ ID NO: 181099 - DNA, 556 bp, Zea Mays
atcaaagcttcaggagtaagctgatgaaggtatatttcgaatctttttggcacttcaactagcatcttatgcaaaggaaagcaaagcccagacttcataaaacttttgaataccaccacttcgtctgcctcaggaagaggaacaatgttctctcctcatccctcactacggatatatcatggaaatttgcccttcattgcttcaatcaacaacatgacttggcctccatggctcatctttggcatcatcgttgtcactctcaacatcaaaactctcgctgtcacttgagtctccagacagtccagctagcatctcattaggaattttctcaacggtggttctttccatggcttcatagaaaccagccaaagcaggatccacacttttcttttctttgaccatcttggtgttgattgcagcaaaaagtcgaagctccaaaaagcaaccgcaattacaaaactagaaagctaaaacgacaaactcaacacaaagcttgataacacgaaaaatgttttcaacacaaaccctcatatatatacacatagcaccactgaac

SEQ ID NO: 181100 - DNA, 368 bp, Zea Mays
gggagaggatctgggtgagtatggcaaggagaggcgctgagagttttctcaacttgggtcggcatgggcggttccacgaacaagtgcaacgtgagcgccggatggagtggacgaacggttggagaagaagtcggggctggtctggtaggtggggctcgggttgcagcggcagcgggcaccgcgccggactggcgctgggtgtttacgagttgggccacaggggaaaaccaagccgggactgggagctgggtcgtgtggctgagctggcgctggtcacgcgcggggtggatatctaaaaagagtgggtgtgggaagtggttaccaaatttactgtggattgtgtgagaccgtgaaagatgacgatggga

SEQ ID NO: 181101 - DNA, 763 bp, Zea Mays
cttgcattatgttcacgatccgtcgtttcttttgcccccaaccttctcctccgcagccgaaggcaccttcatcttctgtaaaaggttggtcagttctgatctcagaggacttatcagcttgaatggtggggattcagtcattaccttcagaatttctgccacctcgacagtagtgggcgacgaagggctcaaggtctcctttggcatttcatctacctcctgttcggcagaaggcatctcatcaaattttcttttcataggggcttgcgctttcggcttcggtaccacttttatcttcttcaaagccttttggtctgctttcacggactgggcagcttctctacacagaatgctgacaactctctttctctttgctccctcagcccctttgtcaagtctctcataatctggatattcaaagttcagtgcatccattactcgatttagccttcgtttcggtcgggtgctgaaggcagcagtcattagttgatcctctttcttcgtgtaattgcctagaatcttgttgcacatagtttcgatcatctctagccattcagtgtgtggtttcttgaatttcttctcaaatttaaaacgataggggagccgaacaagctcatatttcttttccccttctttcttcttcggcatcccccagccgctagaggttggagaagtcttgtttgccaagtactcttgtactaaatccctggtgctgatttcggcagccaccactctgaattcaacctcggccagctagcacgag

SEQ ID NO: 181102 - DNA, 502 bp, Zea Mays
caacttttcaaaattaaaaatcgcttagaaaccagtgttggaatcgtcaggactagaacgctagacataggacgaaaggccttaggaatagtgggaaaataggcggttaactaagtaggccatataggccaatcttagaagtgtaaggatgccttaaaagcacccttctgactggtgaggagacattttattcagcatgcatgcattataaaacatgaaaagagtgaaaattaaaggaagaatgcatctaagtgttaatgtagcaaatagggatgataataaataacatgagaagtagaatctaatttaacccacctcctgtaaacaacccgagcacatgtgttttacttttccaccaccataacatttatatctaaccctctttcacagatgacttcaccacccccatcaacggaggagacactcgtttcagttccgagtacctttcccacgagggtttcccctccattttgtgggaggtgctcagctccatcggttaccc

SEQ ID NO: 181103 - DNA, 527 bp, Zea Mays
acaacgtctaccattacctcccataccttgtcgattacgtgcgagacgttgtcgcagcggtgcataaacatcgtcgtcatcgtcgtcgtcatccacaggagagtgagctggggctgaaattggtggtgggggacgagcctccagtacgtccatgcgtgtaacaagttcaacaactcgttgatcaagctgctcataggatgtcgccgcagagtcctggtattttttaaaagcttcagtcattgcacgcatcatctccttcaattccatctgagagacacactcatcgtcgttaagcttaggccccttgtccttgtccatttgattctttggtcctgtcattgttagcacaaaacagagacaaaaaggaaacaaacaatgtgaacctagaactatctctcagggtggtggtggaggtggaatacgaattatgaagcgtcttaccccgctcttacaacgttcttaccagcattgcaggtggcaaacggtgaccggtgtgactgtctaacgagcgtgggtgtgattgcaaa

SEQ ID NO: 181104 - DNA, 415 bp, Zea Mays
ctggagaggagcttgaagtctttatcgtctccagcacatctagtacgttgaccatcctttccctcttgggggtcactgtaaggcctttttgtgccttcggcactttcacttctgccgaagggcttgtaacttctaatatctttgttccttcgacccctatctcttcaatattatcggccttcggctcagctaatttggctgaggatgtcttcggcattgcagccggctcttcaatcttctgcgtaagcgcaggttctttggcttcagtagccgaagaggtctcaccgccaaattcgggcactatggccggttcaatatagcgcggtcggtgagtaagaaccttcacctttctcctcttcggcgcgggctcactcggacaagccgaagtaacatccttcctagaagtgcactcttt

SEQ ID NO: 181105 - DNA, 648 bp, Zea Mays
ggagaagggagtgagacccacctccctgcgcctccggagctgccattagacctagcccaagttctggccaaccaaacccgactcattgaggtcctcactagaagcctcgagaaccagcgcccgattggaggaagacctcaggacagaacaggagagttcttaaggctcaagcctcccacattcgccggatccaacaacccgcttgatgctgatgactggttgcacatagtaaagaggaagttagaggccatcggatgccccgaaaaccagcgtgttcacctagcggctcatcaactctccgggatggccctatcctggtgggatactttcagcgctgctgtaagagatgctacctgggcagaatttgaagccgcttttcgagagcatcatgcgcccttgggaatcgtttagctcaaagaagaagaatttcgggagttaactcaaggagggcgtttcgttagtgaacacatccacaaattcacagagctggctcgctatgcgcctgatgatatcagcacggaagccaaaaagatggtccgtttcttgaaaggattgagacgtaaactcaagaccatcctcgccagccaagacttcctcagcttctcgcacctctcaaagaaagccatccaggtggaaagggcacgagaa

SEQ ID NO: 181106 - DNA, 673 bp, Zea Mays
tccagatctttggcaggtgctccaggagtaggagatttggatttctcataggcaccctctttttccaggattattggtgcgatttcccgaaggtcttgcttcggtaggaactgagggtccagccttagaaatagtctgcgccattccagcctcgttaggttcctttgaaactttagcttccatccttggtgcttcagcagaaacatgagttgatgttttcacagactccattatagcatccagcacattagccattctcctttttcttggagttgctgcggggatgtttgacggcttcagcaatcccgttgcgcatggtggactcagtgccaactattctgctgttttctccacttttggctcctcagtcacatttgttctagcttcgacaggcacagagcgacttggctcagagataggagcgaacccttcaattagctttggcacgtcgatcgtctcaatgcgcctgggtcgacgcgtcaatactttaaccttttgcgactttgacgcactagaagtcgccgagatagcagcttttctcttcttcccttgcttctgcgaaggataacggtagtctggatacacaaatccgatgacatcgaataccctattcaacctctttttaccccgagctctgaaggcagttgtcatggcatcatcttcgaccttcgaa

SEQ ID NO: 181107 - DNA, 461 bp, Zea Mays
gtaccaagatgtattaggatttgaagcggaaatattggtggtatggattgaagagagatgtggctgcacacgtggctatgtgcgatgtgtgtcaaagagttaaggctgaacactagaggccagctaaactattgcatccactgaagatacccgagtggaagtgggaagagattggtatggatttcattactggattgcctcgcacccaaaaaggatatgatgctatatgggtgattgtggatagattgactaaagtggctcatttcattccggtcaagactacttataaaggctctccactagcagagttatatatggctcggattgtgtgtttacatggagtaccgaagaagatcgtgtctgatcgaggttcacagtttacctcaagattttagagaagctttcatgagaacatgagcacaaagttgaactttagtacggcttatcaccctcagactgat

SEQ ID NO: 181108 - DNA, 546 bp, Zea Mays
gtgagcacgtgggtgggtaacataactagttcaatggccggcaaaggagcgtttcgcagcgcgccatggcgtacatcgacggcgagcaatctagaccgatttacaaccttcccacgtgcacagttcaccaaaacatgttccaccttcctccccgctcccactgctccagacgctcgacgccgatcagtggcgaggtggagaatcatggctgcggccgagatcccaaccttcacgactctctcttctcacggtgttgttgtttctcctaggctagctgcgagggtggggctatcacgggcacacatttataagtgcagacgtcacgaattgtaagggtagatggaggcggctcgacggttgtgagcatcgggcgccgctgcaacgacatgggcgaggaaggcgacctgacgtgtgggccccatctggaagcgatgcagacttaagagcacggcacggtgaccgggcctgacttgagtgtcccacgtgtcaacgactcgggtggagaaaggcgcgcttcgagtgactgatgggcggaccctaattgtg

SEQ ID NO: 181109 - DNA, 614 bp, Zea Mays
ggcctttcttgcatgataagcatggaccggaggagccattgaggagcacgactatttttgaggaggatagaaggtcatggacccatatacaccaaagctctctgaagcctctgactcgtaagacagtgagaagggtagactagttgatggtatcaaaggctttagcaacgtccaatttcagcatgagggtggggagtcttattttgcgacaacattgcacatgctcaagggcatgcacaaaggtttctgagatgattcaacctttgacaaaacatgactgatcagggtctaacagccttgaaatttacactccaaacacgctatcaacacgctatgcttcttctcttgactatccgaaaggagaaaaagaagaacgagaagaaggcagttcaagttcgagttcgaaaaaggaagattgggaagtgtgatgccactcctacgccacatacctctggcaatcttgaccgttgatcttatcttcatggtctactagtacagtagtactaccacatggcttgccacatagggtgtgttataggtaaatagcttgtcgcatgggctcgtgtgtttggatgaataaggcgacgtttgcattcctacatattctatagtct

SEQ ID NO: 181110 - DNA, 742 bp, Zea Mays
cgcaccttgccgcatcgagggaaggggatggggaatctagcgttgcacacaggggaagcacacgacatgggaaggcagtggggatttcgggcgtccattctcacctgtggacgaccaacagcgcagcgggtgcgcagaggcctacactaggaggaggtcgcacctagataggggcattcacgtttggacgactcaacagtaggaagaaaggcagaagggagagaactcacatgtgtgtgaggatcggcgacggttctttgggcacaacggcgagatcggcatgcactctggcgcaaaggttgtgcgtagcggtgggggtggggcaatgtaggtgtatgggaggtgatgttgtgtgagggagtagggcatttaagcgagtggtttgaaagagaactagcaagcggttgtcgagctccttacgatgtggctaatccaagcgggactggaggttacagggaggaagatggtgggtgggcttcgtcgggcagtcctaagcgtgggacaagaagcttgggaggttcggctgatgggtcaggcacgcatgaaatggtcttgcaggtgaatatacgcgaggtattcgggcacagaggcggggtggttacagctgcgtccgagtgagactagcacgtgcaaaaaggacaacagtttgaggagatgaagccgacacgcgagctcggaatgacaacgagaagaacaagtgaggggaaaacgattgcgcgcacagcacgtgaggcactacgcg

SEQ ID NO: 181111 - DNA, 302 bp, Zea Mays
aaacgttcttgtgttggattaagtaggcgcgagtgtgccgtgccgatttaagtcattaccaacttaaaccgaccgctccgttagtagggtatagtggtcaccccgagttaagtaagcgtgagcatgttgcaccgccttaagctgtcgccgacttaagccgattcctccgttagtagggtatagtggtcaccccgagttaagtaagcgtgagcatgttgcaccgccttaagccgttgccgacttaagccgattgctccgttagtagggtatagtggtcaccccgagttaagtaagcgtgagca

SEQ ID NO: 181112 - DNA, 507 bp, Zea Mays
gcacaggatccttgatctacggtcagtatctatcaggacgcgatccaatatggaccatccgatccgcccaacggccacgattcattgaagcgaagggggtaagggcgatccgattccagccgttgtttcgcagatcaacggtcagatggtcatcaccttcaccgagcttcagtacgcccacgcgctctacaccgcggcggcggccatcgtcggaccatcacccaagcgcgatacggtggccaaaacccaatcggcgacaggtacgcgtagtacggaatgtggcgaacacgatcggagctacatacccgaggaagagcgacgatgattagtgcccacggagcagggcggctacacggtggaaggtgaaggccgatgagaaattcacgtcgtcgtggggcctcgcgcccccggatttctccctgagcacaacccacgagtccgcccgagtgcccggaatcgattcactggtgcaaagcgacggcgcaggtgagaggtccgcacggcgga

SEQ ID NO: 181113 - DNA, 279 bp, Zea Mays
cgaagaggacgtaccgattgagagcaagcaaaacctgatcatgctagcaggtgcaattgtcggacgaggatgaccatcaccaacgattggatgtcaggaacgactgtctagacatggaggatggcggcagtggcagccttgtagtctacaacggggtcgtccagtgatgggggctgacaatcgtggggggatgtactctgccagatggcgacaaccttctgcttgagggcagcgacggtggccttctcttgcttaagggtggctgtttggacacaagcg

SEQ ID NO: 181114 - DNA, 753 bp, Zea Mays
attcaatatacttattttctattaggattggtgcctcatttagtggaggacggattatctatcttgcaatatccagatgatattatcctgtttttggagcatgacttggagaaagccaagaatatgaaattacttctcctgtcttttgagcaagtctcagggttaaaaattaactatcacaaaagcgagattttttgctttggtcaggcctccgatgttaaggatcaatatcaattgttgtttgcatgcagaaatggggactatctgtttaaatatttacggataccaatgtattatcggaagttaaacaatagtgattggaaaatagtagaggcaaaattcgaaaagaagctcagcagatggaaagggaagcttatgtctgttggaggcagattagtcctaataaattcagtgcttaccagtttagttatgtttatgatatctttcttcgagatacccagaggggttctcgagagaatagactgctttcggtctaggttcttttggcaaggagggaatcataagaagaagtacagacttgccaaatggaacatcctatgccaacctaaggatcaaggagggttaggaattcagaacatagaagttcaaaataaatgcttgctaagcaaatggctttttaagcttattaatgaggatgggatgtggcaacaattggtgcgtaacaaatatcttaagagatatccgttgtggaatgtgaaacttaaacatggtgattcacatttttggtcgggg

SEQ ID NO: 181115 - DNA, 840 bp, Zea Mays
cgggttgattactgtgaagatcaggggctcttatgcaatagtgttgggctgaaggggggtatcgagcatccaggaccatccgatctgattcaacgacctagattaaatcgcgtgaaggggtatgcgcgacctaatccacgtcgtccactacacgatcaacagatcagattaggtctaccgcataccgaagcggtacgcgatacgagccgcacatcatccaagcgacggtgtagattttaaacactcgtggtacaacgttggccacctgatttaatttcaacgccgtggatgctattaagcgaacaggaacacgatcttttaatcctatccacccaattaaattcaacggtcaccgattcatcttcttcctcccagaacccagtagtggtggtggcattccctccccggtggagttgcgccagagaaggccaagccgatgcccaggtattcctatgcggtcgcggctagagctagaggcagctgagggtatgacggaacagcagaggagattacttacctagggcaaacactgggatatcccaggcacagcatagacgcatactgtccatccaacgagcaatccacaggcaaatgaggccggcattgtccaaatcgatgcccgtgatggactcctcacgccatggcgaccacccgcgactaggtcgtgtacaccgaacgtccgtgggggcatggaaccatggcggctacaccattttctctctctcccatggcatgactctagttttctcccaaaactccaagctcttgacgtccgagctttcttggtgacttgagacgcagcttcagggcggtgtccctacttcttatacacggggcgag

SEQ ID NO: 181116 - DNA, 282 bp, Zea Mays
taacaatgctagcgatttgtgaggcccagcggttcgtgtggcccagcgatgagtgcggcccaacgtccctcgcacaacgatttgtttacctcatgcagcccagcttccctatgagaacgacgcactacgcctgtcatcctcttcggcaacctccgcctccgcgacgacgccgcacgcatgagctccactcccgtgacctcctcccccacgacctcaaccagctctgccacttccacacgctccctgtgtacgccctcactaatcgcccatggccgaaacccc

SEQ ID NO: 181117 - DNA, 432 bp, Zea Mays
ttgcaaccaaagtcctcgaatcccagatgatcttggaaccgaagaccttcacctcgaagtgatacgaaaatctgtaggcggcaatgaagaaaaatgttctgttagtaggtggttcatgacctgtcaagattaagtggacctactggacatgcgggggaggggtgtcgcgggatcgaggatgaaccctagcaagacgacagcaggcagcggggtgggtaaggatggacgcgagatgcaccgtaccttacgaagatgcagacgcgatggttgggacgacgtgaaaccttgacgacggagcaagggcggcggcgtcactgcggcaaccatacggatagaggaaaagggtgaaggaaacgcgacaatgcgaggagaagacggtggggatggcaatgggaggagggatccgtacctgcgtacaccggcggcgatgcg

SEQ ID NO: 181118 - DNA, 453 bp, Zea Mays
agagagaggagatacgccgggagctacttcaagaacgagaagagatacgccaggagagaagggcgcagtagcagcagcaacaacaacaacaacagcaagcaccattgcctccatcaccaccaccagttccacctcgtgataagcaccgggagtttatgagccataagccaccgacctttgccagttctctagacccactagatgtagatgattggttgaagtcaattgagaagatgctcaacaaagcccaatgctcagaccgggagaaggttctttatgcttctggtcgtctgacaggtcctgttgctgactagttggattcctatactgctactcatgacgctgctgacactattacttgggcggaatttagtacatagttcagaaactaccacattcctgttggattgatgaagatcaagaaggagtttctgtcattaaagcaaggcaaca

SEQ ID NO: 181119 - DNA, 326 bp, Zea Mays
gtcgggattgtatcgtttgccatttttgtgccatgtcatctgtttcgcggattcctcggtcatgtatagccgctggatcctaggtatgaacggaaggtgccgtaggattttcatggggatgtcaagctgcctcttctggccatcagtagagtctacctccatgaacctagaggatttacactttggacagtactttgcttcctagtattcttttctaaataggatgcaccccttcgaacaagcatgtatctgctcatatggcatcttgattgcacgaagaagtttttgtgcctcgtacatgctctttggtagaacatgaccctctg

SEQ ID NO: 181120 - DNA, 648 bp, Zea Mays
gccaagttccctgcggtagccatctctaaggttgaaggtccctcggccacttccatgggagcaggggaatccaaaccagcctcctgaccctcaagaccgcgctccaaggtcgatgaggcgcgggacgctgcccgggaggaccccaacccggcgtcgagcacatcaacacgaacatccatcgcgccaccatctgccggttctgatagcagatcttctggaatcatgtcctcgagagcctgatcaaagttcgccagagataattcttgcagaccaatgagggcagacaaggccggagaaggaacaccgctactttccccactggcagtgtaacgacagctgtttttccgaattagggggatttcgtcttcttcttcaccaccatcatcagcaagacggacgtcacacccattgggatcagcttcagtgaattcaggcactggcacttcctcagcaacaggagcagaaggaccggcaccttaatccaagctagacacccgacaaaggcgtcttttcttctttttctccccctcagcaggaaaagaggcttgatcaactcggcgagaacgttttggacgaacattgacaggcttctgagcgtccaaggctttgtcagcttcagggatgggcaccaacaccaatgtttcagca

SEQ ID NO: 181121 - DNA, 837 bp, Zea Mays
ctcaatgggttgagccgacaagcatcaccagtgaacaggggtgttgaaacatgaacaaggagaacaagagcgggcctagaaatggcggtccacggcgccgcgacacacggaggcacggagaacctatttggggaaatcccaaattaaggcacggtggtgcacgataggagctagctgggggtgggttcgacgcgtaacaaagaggcggagcagagggtatcttcaatttatagaccccgattgaactgggcacaaatttcggttttgagatcacggttacccggctaggatatttcacagtggcttgctcacagtggcgcgcaagagggaactggtccgcgaatgataaccagctgcttgccacgacccttacgacaaggaggagtggtcattacgtgtcacagtcggagaaacggtgagctccggtgatgccagcgcgactgaccgcggcgggacacaacggccggtccggccagcgactagattcacccctcccaagatattttcaccctgccccgacgttatctacctctcccatggcatgaatctcccaggtggacgtaaattgcgatggcagatcaccggcgtcaagttcacggcaccggagatttttctggtcactatactgtggtgatcttcatcagaagctctgacagaacgatttggagaactttgttctccatttttcatgtgacaactcactcacttgcctggatcaattttgtcttccaaagtaccaactacaattttgttacaaagatcttactcagacatccactcaattccccacaatttgatctccaagttcttccaatttcactggtggtcataattcag

SEQ ID NO: 181122 - DNA, 554 bp, Zea Mays
ctcgatgccggagaggaattgtgccaactccgagggtctccgctactcgccgaggtccccgaaagttgcaacacaaactggcgacccttctgagcaactctccaaggtccaggcgatggtgattcatgagttcgacgatgccgaacacctcactgctcccaaccgatcatgcaggcgatgcacaacgccactacggtgatgatctttccccgcttttcctctctaagtgcgtggacgtagaagcaactccctcggcgcccgatgaagactaaaggatatcatatgtgtggatcgacgccggtggcttgtggttgaccacagaggaagtactcttctctcccttctctctcggtgttcaatgatgttgtgctagggctatgcgaaacttgcatttatagccacgacgaaaggtccggctggtgatcgatatgtggcgagattctaggcgtatatgtggagtttgttgggatttggataggagaggatcatcggcgaaatttgttggggctgttggtgggatttgcttaggaaagaagatgacgacgtgaccccac

SEQ ID NO: 181123 - DNA, 933 bp, Zea Mays
ggtggttccatccttaggatggctttgattttctccaggttggtctcgattccttggtgattgacaatgaacccgagtagcttctcggctggtaccccgaacacgcacatgttcgggttaagcttctagcggtagtgcctcaggctattgaagacctgttgtctgtcatcgatgaagttctcaagtccatggttttgattaccacatcgttaatgtaggcctccacccgcttgccctagtcgtcggctaagcacgtatggatggctcgttgataagtcgctccaacgtttttgagaccaaacgtcatgggggtatagtagaaggccccaaagggcgtaatgaacgctgtttttctggtcttcctttgctagactaatctggtgatatcctaagtaacagtccaggaaggagagcatggaggagccgacggtagagtcaaccacttaatctattctagggagcccgaagggatcctttgggcagtgttcgttgagatcgtcgatgcacatgcactaatcaactttattctttttagtacaagatcagggttcgcaagccactcggggtgcattagttctctaatgaaacctgctgctactaggcgagctaacttgactcgtatggcttctcttttgttgggcgtaaagcgacacaacttctgtcggattggctttgcttgaggatacaccttcagtttgtgctcgaccagctctctatggactcacaacatgtctacaggttgtcacgtgattacatcctagttgtcctatagaaaatggacaatcgcgccttcctatttggcggtgaggctgcagctgatgatcgtcgtcttgcattcgtcggagaagccgaggttggctctcttggtttcttcggctgggcgcatggcggtagctatagatgcttcattcatgggaattatgaggtcatccc

SEQ ID NO: 181124 - DNA, 700 bp, Zea Mays
gtcagaagaccatcatctgggacctctgaacagatgatgggattgccagcttcaggaggctctgatagaaggtccttgggggtgatctcttccaatgcctggtcaaaatcagatattaacaacccctagaggctgacaagtgcttacaaggcttgtatgggaatgtcactgaccctgtggcgacgactattcttatgaatcagcggagttgccttttcttctcctcgacaggtgccgctggatggttcactcggcgtgaacgcttgcgacgagcaccttctggtttatgaatctcctcgtcttcaccgaagtcttgcccaatcgcaactgccatcggctcaatgcggatagagttagatcattctctggccagcaggctaagaacaaaattcatctcagcatcattagtactggacgacatctcaaagtgagtccgcttctcagcctcgggaagatttcggaggggagcaattaaggcctcaatgtcctctgaggagggtcacactctatggcccgggctgccatctcgaacagaaggattggaaacaaaattggagaagatactctatggaggcaggttacatgcagagtaagataagggggcaccgacattcaaaaccctgccccttagcatcatatcaagtcggcttagcaggtcctcattgggaatttgtctgttagtgactcaggtagaatcgtt

SEQ ID NO: 181125 - DNA, 985 bp, Zea Mays
gaagagcgggtcgacggtgagggggggtcacgacgccgaggtgtaaaggcagagccacgcggcgagcaacgacgaaggcttgacgacggtgagcccctttatccacgggcggtgagcaaggggaaggaattacggctggccggggtggcatccagctcaccggtggcaaggatttttactgggctatgcttatttgatggccacgacgcacgaatcacggcgagccacaatcaacggcgacgggccaccggtgtcgagcagggggtgggatcgggatcttcttcagtttaatatttactgtaccatggcgatggtcattctgatgaattgacagagcaagtttaggtcacattttctctcaatttcaaatggcaacacatccagtgacctgcagcaaagttgtagagctatataccacctatatttcgactatagtgactgagctcatttgatcactagatcatggttgaattcacactcaaagctgactctgttacacttaatatctgaatttcagaatgaaaccagcctgacagccaagctttgagcttaattatctctggatttttcttaacaacagagctcacactcttaagcaaagttgttctccttagtttggtctacaactttgatgtggtgacctatggcaaaaaccctagaatttgaaagttgcaaggctccaaagttgagccaaaactctgaaattcagacttaacatgaaatctcaattagggtcctttttgcaaatgagtccaaaacttagggtttggcttgtaaattcacatatgagtgacccaaatgacttaagatacttatttaacttggtttttgcactttagtccaaaagtggactaattttgcacataggtccctagggtttggttttaggggtttccagggtttcaaatggggtttttggtatcccaggggtataaatgtgattcaactttattcttgggaatatttcatgactattttcctaaag

SEQ ID NO: 181126 - DNA, 655 bp, Zea Mays
gccttatgttgccttacttccttaataactatgaatgtgatcgaggttaaggttcggccttcgccccaacaggatggattagtcccctcctttagaggtgtttggattggagacactacgtgctatacctccatgatgcgggcttgctttatccctccaaattcggcggataacacaacccgttcctcgttccagatccatgtgatgcatacgagacattcagtgcagtaacatgacacatgtgctgtccctttcacccctccccttgtaggttgtagcgctggtgagtaatgctggggacgagtagtggcattggtgagcatgacacgagtgtagcagcagcgcgaggcgagcaacatcatggatgagcggcagcgttggtgagtgggagtggaagcagagtagttggtcatgacatgaagcaggtggtggcgcttgggtggacgtgaaggaaagagagaaaatttgggaattggaatgaatggaagctgctgaaatccaggaccacatcgtagtcatagtaatgaggaaaaggagagaaaataaaaagaagaaaacaattaaaatagggaggcaacctaaaaaactagagggtaaccgtattaatgtatcctatcctcatccctcaatcctaacactcgaaaggatatttcca

SEQ ID NO: 181127 - DNA, 576 bp, Zea Mays
gaggaactcgtggtgacaaatttatctgctgctctcgtcggtccggtcaccttggaggccagtgactaggatgctaggaatccactgtctattaatggagctgaggtctctccgagtcatgctttcaacattgttcctgttgatgcccctcaacaagcagtgcatcgatgcctccagctttgggtcttcccttatttctttccaatctttaggtgaatcaacttttgcttcttattgttcgtgttggcaaacgggttctcttgataatttttgaaattgcagaaagtcttcgattttgtatctgcccaggtgaaatcttgtggcgtccctgtccccgaccaagtttagtctttgatgcagtggaatcctctactgcttcagagacaaatagatgatctgaaggcctcaaaccttggttagtgagtctacagtttccttttttctgttttttgcttttcttatctcatatcttgtgttcttttcctgctgttttaccagttctgactcagcggtgctccgatgctgaggagaggtattcccagagccaggctgacctgaaccaagtctctgccttct

SEQ ID NO: 181128 - DNA, 578 bp, Zea Mays
gtggtttgtctcaaccacgtccatctccgactgcatcgctgcacgtcaagccacatgtttctcggcctctgtgaaagaccgaggcttgccatcgtcgcacgcaagatgcaactctcccgccaaaatgcaagacgccgggcctgacaccaacgggtcgatgagaaggccctccactgtacgataccgcaatggctcaccgtcgtggcacgcgtcaatgcgctcctcatcgtgggagaacggggtaacgagctccaccgggtcgtgctcaacacgagctggcgtcggaggggacgtgcctgaaggggttaccgtcagtactagagtgcgttgtggcgaagagctcgttgtagttggagctggagagcgtggaactggagttggtggagacttgggggctggggtagacctgctcggagaagaagagttgcctactcccccagctccctcgacatggacgtactcgatggtgaagtcgtcgtacgtcagagtcgtgttgtcgtccaccgccttgtcccatgcccatcctcgaccttcgtcaaacactacgtcgcgcgccgttcgcacacgctgtgttcctg

SEQ ID NO: 181129 - DNA, 632 bp, Zea Mays
tgtggcctgactcgatgcgactgtctatctcctttaaaagatgcatgctttttcttcaataatatatcttcagaagcaccttcagagttctcattctcatgttcagaattgtattcactttcatggtcataatccgactcacttttattacaataattctcactatcattatcagaatcaaacatattgttaccagtcccagtcccattgacctttgctgccatttttttcaatacttcatcgaaatgctcatcttctaagtcatctacaatacctagattgttagtaaattgaaattggcatgaaataaattactgtaaaggaatacatgaatgcaatatcaattaccatttgctgcagtatttggttttctataaggcctcttcttatgttgattcatggctgcctttataatagagctgtcattgttgattgttgtggtagtattgggttgtgaatagtaccttctcgctggttttttagcaatactctcattgttgaccagtatgttggtaattgggtttggatatgacctcctcgcatgttgctgacgaagcactcctgggctgatgaagcttgactgggcagaggctgttacttttccatacctaccctgcattgctacaacctac

SEQ ID NO: 181130 - DNA, 823 bp, Zea Mays
ctgtcagtcacccctgatactgaaactcgactgacaatgtgttttgatgaactttgagaacaatttgcgcatgattgagtgagaatctaatcaagaaccctataataaagtcaaaggtggtatattaggcaacaactttgatacaggcgggttagtgggttgtcacacaaaaatttgagaatgaggccctgcaagttgctctgtcagaatgactgaataggatcgcgatggtacagtggactggacaagatcacgggttcagtgcatctgtcaccgccggtgatctccgcgcggcgattcacgccaaccgccgcgattcgtgctctgtgtgaagtggataaccgtggcgggtgaaaagatcttgggtgagaagaacataggcctgagctagatcatcatcgtgcccacttgccgcgcggtcagtgaaatatcaccatcagtgtttgccgtgatcgcagtggaagacacgtagtcgcctgtttaaccatactgtcatggtcatggcaagcaaccggttaccatcactgaaccatttccctctctcgcgcgccacggtgagcaggtcaccatagaaatatcctggccgcggtgaactcgatcccaatccaaaattcgtgataagcttagtcggggtctataaattggaggcaccccctgctccgcctacttgttacgcgcccagtacaacacttctcacctcaaatcatccaccctagcgtccgaatttggttccccccccaaatcggtcatatgtgtcgtcgtgaggcaccgcgccgcggccagccacccacaggtccgctttagtccttttcgttcgtgtttc

SEQ ID NO: 181131 - DNA, 700 bp, Zea Mays
ttatacggatcattttaatgtcatctaaaattatactattagtttatattttctatcccttcaatgccattgtccgttacctgtcaccattaagtagtgcatgggtccagatgtcaccgttaatatggcattgatcactcttaacagtttgagcttgataatatgcttaggttttttttattttcaccgttacatcaacagctactcttgtcggctccatagcaacgaccaaactatccacgtagtccaaaaaaattcagaccgtctgatcgtcaatcaacggttgacggctcctctcgctctcctgctcccttcatctctcgatacttccgtttgattcgatgcttggccggtggacacctctcctcgctccttctgcctcgtctttcttcgttctcactccctccgtgtcgtcgttctctcagtcactttgtttttccgtcgctttctttttctctatgccatccttttcccagcacttttgccttatgtccctttcgtcgttggcttcgcatgtcgcctcctgtattgtcgccttcatcacccgctccaactgttgctatgaatgaggtttgtttcccttttccatcaacatttttccttgtcgcagatccagtttctttcgctccagattcgttttttgagttacgcatcattttctacagtcgcagttccttcttgacgtgcttccacatcttcc

SEQ ID NO: 181132 - DNA, 563 bp, Zea Mays
tctgctaggaaatcatcaataataccttgcccactaagttctccctcgtctttacctcgcgtagcatcaatggtagggtgtcgggtgttcggattcatcgggatggcgtgtcgccggtgagggcgccaccgcgacctgggcagcgccgctgtgctgactgttagcgtcgacgtgctcaatctgtggagagaagatggtgccagtgccgtcggattataattgaagggtcgagattagaatcatctcagcgtttcagtacattaaaccgtgaccgttgatattcgatccatcggcccgagtgaacgttgcatggatggggctgtgccttagatttcggatacaacaacggtgagtgatgacgaagctgtatccagggccgacctaatccagcccgttcatgctcaatcggacgaccgaaaaccctagatgccccttcgccttggcatttatgctaaagagcccctgtagaatcaagtaaccaacccgccgtccacccatgggattgatatgtgtgttgcggatattttacccctagcaccctgcctttctctgttatagtgcgc

SEQ ID NO: 181133 - DNA, 593 bp, Zea Mays
gtaataggcaatggccatgaaatggtacatggctggtttgccaatgatggcgttgaacgggaggttaacctccgcaacgtcgaactatacgttctctgtgcggaagttttctctgtcccgaatgtaaccgggagcgtgatgctccaaaggggatacaccggttgagcacactctagagaatggacgagagggtcccagctgggaccctgggatctgcagatgcttgaacgcagcgtggctgatgacgttgagcccagccccaccgtcgatcagaacatgatgcagcttgatgttggcaatgacaggggtggtgatgagcaacagtatgccagcccctgccatgtttttggggcagtcggatgctccgaaggagatagtggtgatctgccaccgctggtgtgaggccgccttcgggacccctggggtcgccgacaggacctcgcggcgtagggacttcacgttcctgtgggaggtgagttcccagcttccgtcgtacatcacgtacagcttcttgcggcggtcgtcatcatcaccggagtcggagtctccagtgaggatgtccttgaggacctgctcgggggactgatacccga

SEQ ID NO: 181134 - DNA, 1378 bp, Zea Mays
tgcttgactaccaaataaaccccaagaaatccacgtggattgctcgagtgatcgggggttacatcttgcagatgcgcttgcacgcacccaagattttagtcattaataagagacgagcaaacctggactcacgctcagcgcgtgacaaccatcgcaggaagggtacacccataatctgctggagtaccaagtgaacccctaagcaatccacatggattactcggggtctcaggggatacatctagcagaagcgcttgcacacacccaagaatttggtccgcagcaaaaacccatgtgcaactctaaggtgttacatgaaagctcggggcggctgtcgagtactcgggaaccaagtacaataaataggccctttaaaactgaccaactccgatgaccaactctgtgaggcggactgactgaccaactctccgatgaccaactccgatgaccaactctccggtgaccaactctaacgaacaactccgatgaacaactctccaatgaccaacttcaatgacccactctgatgaccttcttcgatgaccaactccaccaaccaactctgtgaggcgaaccagctaacaactccccgatgaccaactatctgccaatctgctccgcccgaccaactcaccgtcgattaacctgtgcaacgcaaatatctggtctagtgctactgatccacgtcagctatgaccgtatgcatcaccatcacgctacgttcggacatatgcacagcacaccgaatgggcaccggggtctctatagtgacccgtacattagaaggacggaacaacacaccatactgagtgtatgcccatgtatgctgacaggtgacaaagggctcatgacgacaggagaagccatgtcacgtgcgaccacaccatgagaatgatccatgggacccgccacataccactacaaagacgttagcgatggactcgctacaggagccagagtaacagacaacgccataccgggagtatggctacacatgaccctatgtaagacccaccacgacaacccgggggagccaatatctctctttactagaaaacagatctcctctataaggtcctacccttgagatataaaaggtaggcccccctccttcttcccacatgagcacatcagttgtaacacgccctcagcaatactaccatcagcactacactggactaggacgcaagcctgaaccaatataacccatcgtctcaagaccatccccttgagtcccacgcagctcatcattcggagtgagtccatgctaacgtccccttcgaacacaaatctgaccatagcttctgaaaccacgataactgagttctctcttttaatttcattccgcgtttgaggtctgatcgctggtattgagttt

SEQ ID NO: 181135 - DNA, 984 bp, Zea Mays
gtgggaatcgtctgttgaggtcttcgccaagaattattgtctgaattggcagaaaaagaagattagtgaattgattgcccaatttgggtcttgcacgttcacgccgaggattgggaagacatcggccgaagcagttgaaattattccatgtgccaagaacaagtggggtaactggtggtatttctggttttatggtgccagaggatgtcgaaggggtgcctggttttcccccatccatcttgtgctcacactgttatgtggcgtttccacaatttagagtgaagaaagaagataaaaacgaataggcccttcggtgcgtagcccggttgagcagcggtcgggattttgttgaagaatttgttgcctacggcgtgtggccgctggcacacaggtggggtctgggtgaagtcacgcttcacctgatgccatttttggatgatcagatggtgcagagccctgccttcgccatcgatctgcgagggcaggatgcagccgccttcgttagggaggtggagtcgaaggctgttaaaattgttggtaaatatgtgccaaagacagagatgataaggagctaggatatacgaggttccaacgttaggttgaaccgagtttttgaactgaatagcctgcggtacggccattacccggagggggactttgctgatgctggggacgaccgagggaaacaggtgaagactcggtctaaagagggcacctcgaagggaaagaatgtgattgcagcgactcgtaaaaggaaaatagaggcgaaaggtatggagagggaaacggcggggccgaaggcctctaggttatttgttgaggaattgacgaggacatgtgctgggcctggggaggttatgacttcacccgaactctgagaaacatcttcgcgaatgttgaaggtgaccgggggtcggtggcataagaaggaccctattccctgggccaccggcgatgactattttatgtcttgtatggctcgtg

SEQ ID NO: 181136 - DNA, 970 bp, Zea Mays
gttctgggatatagggagaataatacgaatatgtatggaggactaccttcggctagttccatcaagattcggcaagctcattttgttttgtatagtcacttcgcaacttttcgtagtatggcctttgttctccccatagaaaagacaaaataactttcttggttgtgcatcgaatcttgctccaaagcttcggtctcctctgcctcctcttggggctcgtgggcaaaaaatgctttgggaggattgttgttgacttcctgactcatggggctaactttgttgcccttgagactgaccaggtttgtcttcattttgacttggatagtgaatgctttggatatgttttggatgaaaccttcctccgaagccactggtcatctctgagtaccttcaggcctcctcctttctttagcgaaaatctgtgtccgccctgatatattcatccatctttttaagcatcttttccagggactagggaggcttctgggagaagtattgggcagctggtctttgacgaagccccttgatcattgcctcaatgatgatttcatttgggactattagcgcctgggcccaaagccgaaggaaccatcggacaaaggcctgaacatactcatcatggtattgggtgcattggaacaaaccttgcgcagtgatgggtttcgtctgaaaaccctaaaaacttgtgaggagcatgtccttaaacttccgcaatgaggtcacagtgccttgtcaaagagaagaataccatgtttaagccacagttctgactgccatgacaaacaattttgctattactaccatgttgccaccataagatgatattgtggcttcgtaactcattaaaaattgctccagatctgaatgtccatcatacattggtagttggggtggcttgtatagtggtggccatggcatgaactgtacttctgcagccaatggacaagtgtcatcatataagaaatcatca

SEQ ID NO: 181137 - DNA, 473 bp, Zea Mays
attgtgtcaaccactacggcatgggcaacctccttgtcagggggctcgggtacatgaccgagccctcggccctggcctcggctctcagcagaaatagggcgggcacaagtcaacagcaagtacaagccccatgctccgagctataccatctacaggggctcggctacgcctcctcaccgtacgcgaccaactacgatactccagatagccctccttgaaactataaataggacagtctacggcttcaagggggaggcagacacttcacggttttcaccctcaccacaatattggcactttcctcaatcaaccctagggacttgggatccttccctctcccgatcagtttgtactccctactacaagcacttaggtgcaagtaatataagtctcatcccctccgctggaagtagagccttctctcacccgaacctaggtacagacttgtgtcatcttgcatcacccatctgggg

SEQ ID NO: 181138 - DNA, 781 bp, Zea Mays
atttcaatagagaaaagaggaacagtacaaagaagggagaagagcccccttccgatgggaatactagaaactttggtaaagcacaaaatgtaaatacaacagaatatagcaggaggacaaattacatcatagaaaaactcacagattcagtaatttcgaaggagcagcacgtagaagaactaatgcctccttccaactccattgccgctcagacagaggtggaagacgttttagaacagatagacgccaatccaggtcttcaatagaatgtttggcatgtttgagcctccattctaacgcttgtctaccagcaggcgacagaccagtacttgaaaggtgatccgtatcagagccttttgattcgagattatgacgaagtatatcaagtaaaagcccaacaaaatataccaccacgttctttccctcagattcgatatttatatcatggcattcatgactaacatagcactcagaagggacagattgagacaatttggcacaatcatccatgtgtaacaaggataaaataatgctaaccatgaaaatctgcaaagtaacatagaaaaatgaagcttaatagcatacgtaaggaaccccgttgaattcttatctgtacaatacttttgaacagtgaacgtgatatcatacaggaataacttgcattaacaatttaaaatcaattgtaacactaccaaaaaaagcttcaaaaagtttaatcttgcattaataaaatccatttaatagttttatatttatgatctgtgtagggtgagtagtgttg

SEQ ID NO: 181139 - DNA, 591 bp, Zea Mays
cttaccacgtcgcagtagatcgcattatgcatatccggtgatcgccggtgagcttgccacagtaattgccacaaatcgcttgcgccagtgcacctccttctctccgaccgccaccgcacaagctcaaattcattggccaccgctcaagggccctataaattgagcacaccctcggcttcgttaggtattcaagcatccaatccacccgcccgtgcctccaattagtcaccagagcccccgaatcgctcagttcacccaaatcagtttttccaccaccgtgaacaagctctcaccatggtcagtgcccttcaggtccgatcttgccctctgctctcttgtttcagcactcttacatgccactgatgctccttgacccattcaattaagctaggccacgctagatcgtcgggaacaccggtgttcatccgttgttcgcactgtctccgtggacagggcgatttagggctcgaattgtgcaattgagcgaggggaaatgattattaggtgttgaattaggtctcagccaagttagagctccagccattgcgcgtcttggctggtgcaggttcgctggagctcggttcttcgccg

SEQ ID NO: 181140 - DNA, 557 bp, Zea Mays
gctgaacccaatgggtgtgaccaagctgaagctgaccccaatgggtgtgccgtccgcattgttgatgaagatgaggaagaggaggatgaaatccctctagttcggaagaacagccgatgctacatagtcagcggggaaagtagtggcgttccttctccagccttgtctgctctcattggtctgcaagaattgtctctggcaaactttgatcagactcttgaagacatggtcccagaagatctgttgtcggagccggcagatggtggaatgatggatatttgtgctgatgtgcctgatgccgggctagagttatctcgaacagcgtcccgtgcctcatcgaccttagagcacggtcttaagggtcaggaagctagtctggattgttctgctcccatggaagtgggtgaaggtccttcagccttagaggtggctgttacggagagctcgaccctcaaggatggcactagcatttacccagccctcgagggtgttgccggggatgacccgactcggatgggtagcgcgagctatgacccagcccccgagggtgtccgagt

SEQ ID NO: 181141 - DNA, 551 bp, Zea Mays
ctgtctcggaatgttggctaccatgcgtttttttccgtaccgggcatgacgttgatccaggggggatcggcggttaatgtggcctgacatcataaggagactttgaccgaagcatgtggtaccaagtgtcagggagtgttttgtcattacagctcgatgagcactccttctcccgaaaagaatcgatatgaacgggtgggggaaacaaaaacagagccttgcgtaggctttttgaaggcccgtgctgcatgcttgcctacgcaaactcgtctactactactacccaagccagcaatccaggccatcgattttgattggccggtggccaggatctgttagcctggcagtgccgcagtggctgctagccagggcctccccttggtgcggtgccccacccccacccacgcctgttcatcgccaggcattctcgtccggtgaggttggtgggtgggtggtcacacaggctacaatacttccgttgccaccttcaacagcaacccggcctgcatttcctacacatctacagctaccggtcgacagtaccgcacggc

SEQ ID NO: 181142 - DNA, 297 bp, Zea Mays
tccgagccatatatactctgccaattgagatcccttataagtagtcttgaccggaatgaaatgagccactttggtcagtctatccacaataacccatatagaatcatatcctttcgaggtgcgaggcaatccagtaatgaagtccataccaatctcttctcacttccactcgggtatgtttagtggatgcagtagtccagctggcctctggtgttcagccttaactctttgacacacatcgcacatagccacatgtgcagccacatctctcttcaatccataccaccagtattcctg

SEQ ID NO: 181143 - DNA, 2768 bp, Zea Mays
ggaagaggttctccaaatgggattgcctagatcctgacaatgagacgatcgtggatgatgttagccaagatctagttgtcttggatcctgatgatgatgagctcaaagtagtaacgatagttgctagaggtgaggatcgatcggtgtatggctacgtcaagagtgaatatctgcatagcttaaggagatctctcaaagctatgtaccttgttgctgcgaaggatgaaggctgccatacgacgacaaattgtcaacatgatgcacatagattgtgttgttgttaggtctagcaagtcaccaaacatgaacttgccccgttgaagttgtttggcgagaggctcgagtgtctcaagtcatggatggtgttgatgtgttcttggtagcgaggaagtggcaattggcgatgtcgaagaagatgaaattgacgaaggaatgataccttgcggccactcacggatcataaggatgctgatagggaagctgcaggtgatggctgcagtcgttggtggcgtgtagaaccccaacactagtagtcgtagattcctcatttcgccaatgacgacgtgtctcgaagaggtcgagcaatagtggtaatgtcgtggggaggtagaattgtccgttgaagaagaggagatcttggtccatggactaagttgatgcagctctcccgcctatgatggtggtggtgatggcgcgtagctcgagtaccattgcctatgatggcgtcgtacaatgctgattttgtcgagggcattaggttgacacggttgaattgccttgctcatgttacatcatggctgcgatggagaccatgatcgtgggagaagtgatgggtgtcgaggcaccggtaggattggcataagacaggaagaacaagcaaattctatggtgctcaacggtcagggacattgacgaagatgatggtatgttcgtcccattagaattgcttctctagggtcacaaagttctagatgatgttgccatggtcgaccaaccatggcatgtcgaagatgacgtcgatctggaacgtcttggtgttgatgtgaagccaagtgttgaggcaggcttcctggcgagcaatctcattgccactgttgacaagctttatggtttggatgcgctgttccgcaaggttggccggcttggcaaagttgatgtcgatgatgttgtgggtggtgcctgttttgacgaggatgagcaccaagttggcaccttccaggaacatggtgtgtcgaccacacgcacactagagtcttggggctgatcatcatcatgaggccagggtcgacaccgtcgttggcatgacgagcgtgatgtctaacaagtgcttgcacttgtggccacaggcaaagggttcgtcacagttgaagcatagcccaatgcaatgacgctccatcatctcctctgttgtaaggggcttgaaggggtgaggtggtgtagccggcgtaggtgtcggatgaccccggtgttatcgaggcggatagggttgttgatggcacctttgaatcttggggaagccgatgtgtggaatgttgtagatttggtgttgtcagcgatgacaaccgcctgtcgcttgtatgctcatggtagggacatggccatctctatgtcttggggttctagagctcgacatgtcttcagtggctcgagcaggtcagcagtgtagacgttcacctgctgctgttcgtcaagtgtctcggtgcgcaccacgtgtgtcaagatgtgctccatgtagtcgtcgatggtgctagtcttctgcaaggatgcaagctctcgtagtgtttgcgtcgtcttggcggcccaaaatactcgttgacgcaactgcaaagcatgcccagttggtgacaactttatcccgcgttaggtgcatcagtgcatgtaccattgtttagtgccacctagagatgaaaagatgcataccatactcgctcgatgtcagtagtcttttgccctgtgaagaactgctcacagcggttaagttatggcagtggattttccttgctgtcatatgttgggagcgacaattgtggtagcgtggttggaggatggggaaggagctgattgctgtagactggtgagggtatggcagtgttaagggccccttggtggcgcctccctctcctagttggcgacgaacagtttgccacttcttccacaagctcgaggacggtcaatgaccttgctgtctcctccttgaggaaggcacgtcgagcttgatctatggcgtgcttggtctccacttcgagctgcttggtgacagcctcacattccagcttttccttggctgcggtggcgatctcgtttttggaccctccttgcttcatgttgcccaggcagacgtcgaccttggcaaggtgctcttgcaccttgtccatgtgcttggtgagatcagcagcgagggtctcgagccactccatttctgtggacatggtggaattgttacccatgggatcgagacggttgggggggggggttgttgaattccaagcaaactagagtgagagataaagggaggagcaatagctctagtcttgcttagattgaaacggatacattgccgagtatgtatagtccttattagaattgtataccaagcaaactagatgattccttatagatttagacttgtattccaagcaaactagaagagtccttacagatttggattcactattcctaacaaaccaatctccttttctaaacgaactcgatttatttattccaatttatcgaaggctacctccagatttttgatctattcctgttct

SEQ ID NO: 181144 - DNA, 471 bp, Zea Mays
gcctgatatatagcggataattctcttgacagcagcccaatgttctgcatttagtgactccatcaatctactaaccattcccaccgctactttttgttctcgtagcagacctattacagtgcatcattaacaaggctcatcaacttggcctccttcagctccccttgccacccaaagatggggctggatttccgattatacaatatgccgatgatacaattattgtcatgaaagcctcacaaagggagcttttctgcttaaaagctttgctcgagagttacgccctatcaacagggctaataatcaactacgtaaaatcctgtttagttcctatcaacactgacagtaaaaaaactaaacttcttgctggtctctttggttgcaagattgaatctcttccctttacatatttggggctaccgatggggacaacaaagccaagggttgagcactatggacccattatgagca

SEQ ID NO: 181145 - DNA, 315 bp, Zea Mays
tgtcaatatattgatctgcttcgtgcgttgatgctaaactaggttggtggagagatagaccgcactcacatcctcgcaatagactagggtgctcttggtcaattgactatggagttcctagaggagttggcgcaaccaacaagcttctgcaatactattggcaacgactttgtacttagccttagcactagatcgagaggtggtgggctggcgcttggacgaacaagagacgagtttgtcgccgaggaacatcgcatagccaaacatggacttatgagtgtcaagacaactcgtccagtcagcatcggagtagac

SEQ ID NO: 181146 - DNA, 556 bp, Zea Mays
tttatgtttattatgtgtgtactgtgggaagatggcttcttcccaggtgttgtaataagttagcacttgaatctaccccgggcatgtaataataatacatactacttggtttgtatacttaaaaaatctactgatgtatattatattattgcaaagtctttcgctcaactcctgtatttaaagtttatgttcttgttggtttactgtaatacttgcaactatggtgaatggtccttgggaatgaacgagttcatcaaaacacgacaccccgagtaagttatctgattcacttacatatccatcaaaggccttgagggcaatgattggtttacgtggcccgataacttggttgggttgtgacattctaggccccttgtggctataaatggacccctagacgccttcaacaagtacccaagcatctcaagagcaaatcaacactccaaaactctgcaaccacgcatttcagtgattttagtgagatccgagcgcctattttgagttgtattgtgatattgttttcatgtgcttgtttaattgtgtttctaacatgtgt

SEQ ID NO: 181147 - DNA, 377 bp, Zea Mays
caattgtacccaaatgcatcaccaagcatgttgatatcccatttttttcgagtctacagcaagctgaaactaagcaattcttagaggggtactaataataggctgtgtacatggcgcattgcaacattgaactctaggatagacctagatctaaggattactaaatgatttagtaccgttttgctcacggttgctggttttaaaggtttcggatattcttatggttctttgcacttttaggctatttaaccgcctattgtgatctggattgggaaaaagtgcaggcatagggatccccaattatgttgacactcactcctcaatacaagccaaggtttgatgctctggtgaggattcactggtcttttataatttgc

SEQ ID NO: 181148 - DNA, 458 bp, Zea Mays
agacgaagattctattcgcttgctacttccctctgctcctctgctactactacttcagttctcgccttctctttctgccctcacctgactcctcccttcctgccatttctctctcgatagtcgataccaccacacctccgctcccctccaagcctctccttttcctaagccccgacgtcttccgacttccaggtcggtgccgggcaacaataacttcttggtcaccgagccaaaagggggtcttttcggttcttgcgatcgattgatgagcggcgggtggcggcgatgagagcggatctcagcaccatccagcagacgctcacgccggaggcggcggcggcgctggcgcgtgccatcgacgaggctgcgcggaggaggcatggccagaccacgccgctccacgtcgccgccgcgctgctcgccgcgccggccggtctgctgcgccaggcgtgcgctcg

SEQ ID NO: 181149 - DNA, 530 bp, Zea Mays
attactagctaaagccgaagaacggggttttcccgggatgcttggaagtatcgattgcatgcactggagatgggagaaatgcccccacagcttggcaagggatgtacacagtcactatcagaaaccaactctaatccttgaagtcgtcgcatcacacgaccttcgaatatggcatgcatgttttggcttgccagggtcccacaatgatgtcaatgtgttgcatcgctcacccgtatttgatgacctagcatctggtaatgccgtcgaggttaacttcacaattaatggcaaccaatataatatgggatattatttggcagatggcatctacccagactgggcaaccttagtgaaatcagtatcccttccccaaggtcggaataaacgtttttttgctaagaagcaagtagaattcaggaaagatgtggagcgagccttcggggtgttgcaatcacgttggtctataatgcatggtccagcaaggttttggacacctagggaccttaattatattgtgtattgcatcataa

SEQ ID NO: 181150 - DNA, 755 bp, Zea Mays
ccatataatattctttgccattttgtcataagcccaccatataatatctcttggtactttgtctccaaaccatccacctgctcaaccacgccaacaagctagactattggagtacaactagactattggagtacgttaggagtattcatcgggtacgttgacaacatcaaggcctaccgcatcctcaaccctgcaacacattgcgtgtgcatcatgcacgacatcgtgttcgacgaagagcaaggctagacatggggcaggatggtacatgatggcttgacttcaacgaccaaagacctcatcatcgactatgtccactttgaggaagaagtgaactagcagatcttcttcaccgagctcgcctaccctagcacttagtttggaaccaacttcgatgagtccaccaccaacgccgtcgaccacatcccactcctgcaatggtgctcacacctccggggtcagcaccagaaattttggtccatgatgagaagtgtatggtcaatgaggaccacattgaagcctactatgatgattcgatgagctctatgcttccgcataatggaaaaaaatccttagcgagcagtccgtccctaggctagtgcaccgtgactataagaaaagctccacctcaagcacgacaacaatgaacctcattccttcattgaggtagagggagataaggtccgacgtgtcatgatgcagcaggagatgcatgtcgtggagtgaaattggacatcgaagctgaatgatcttcc

SEQ ID NO: 181151 - DNA, 337 bp, Zea Mays
caccagaccagatcatgccgaggaggggagccaagaatcagggaggaattgaggattagggatttagggttaggatggcgacaccgacttagattcaccaaaattcagaactgaagaaacatcgttagatctgaagaacaaacatacagggacttaccaaacgcaaccggagcatcggagtcgccaatgacgacgaggataaggaacaacagatcgtaggaggtagcagccgaggaggggtacaaagcatcagggagaatttgagatttagggttagggttagagcgtcatcgaaggctcgaagcttaccgaccatcgtcgagtatagatgtccaaa

SEQ ID NO: 181152 - DNA, 1014 bp, Zea Mays
ggcgagcgcgcgcgggggttgggcgaacgccggcgtgccgaccagggtcgaacacgtgtgcgcgttcattctgcccgagttctggcgcgtgtggtcattcatctgagcctgctctcgccttggtcagtgcacaaaacctcttctcctccctttaagctaccgatctagtgtgggggtcataggattttgcctactggtttcaaagatttggagctctgaagtctggtttgtctcccagcccgagcccgaggcaaatccttggttttgtcgtgtctagggctcgcgtcccaatgccatcttctggtatgtgacaaaggggttagttagacacgattttgtcaatgggagcattaaggttagagctaaggatcaaggtgaacacactcggttttggttcaacgactaaaaattcagaaatctgaatttcagaaagccccattgaacctccacttgaatggcttgtttggagtttttaataaactattttggcgaagctttcataatctttattgtagcttatttagtgtatttcaatgtttataattggcctaaaccatgattttatgtttttcatggtctttcgccccttttctttatttctacttaaatagcttgattagggtcggtattagggtttcaacatttttccctcttttgaaaatctcatttgttttagtcatgattctttagatagaaacttagtggatcttttattcttacattgatttggtgcttcattctcactttggcttgcatgaaatgatgattcttgagttatcactgagaaaagccctaggtgacactggggtgtcacacttgcgtgaagcttttcctccccattcccccctctctgacctcggactcgtggccacaaccccggcatcgagttcgccgagtcgtcttccccctctctgaccaaccccggcgaccccggaaccgccgtagcacgcacccgccccaactccggcgacttcacagctgtaggaaggagcggcgccgcccgcagtcgttcac

SEQ ID NO: 181153 - DNA, 1322 bp, Zea Mays
cgcgtgtgggttacctgaagagtttttttacccatgcgagtacggatatgggtacagtttcatacccgcgagcgggtacgggttttttaactggcatatttttatctcacgggtatgggtaaacactacccaacggatatatatttgttgacatgtctactccatacatttataacattaaggtgttgttgggttcacagacagtgatgcaaatgactactacgactgcggtatttctagaggaagcaatggtacttgaaagcacgtaaatgattgcagcagctgttgtagaacaacttgaacggtgttggctccgatttggacgacaaacactagagatgaaccacatggcagtgccctctacgggagcgcggccagtccatagcacgggtctagacggtcagggacctcgacgtaggaggtgctccctctttgcacgcttccggacggtccgcgactgacgcggaggtcttcttatttgtaggaaacccagacctcgcctcctaggagggaccctgtcgggatgagagatcctaggcgtctcttgggatcggcaggtcatccaggacgtcaggtgaaagtttgagggagaggatggctaaactagtgctaggctaaggctacattacttctactcctagggaatggaaagaacaatgcaaataaggtatattttataaatagatttgattggatcgattatggggacgtcaatcaacagtaccccttctgtcggctacctagaaacggggtacccaaaataaggcatataacctcctaatcgccaaacgtcccctgcgaagcaagtccacgaggcggggcaaccgactaggtccctatcgagcaagtccgcgaggtgggacgacaaattaggttcccaccgagcaagtccacgagatagggcgactgaccaggtcccttccgagcaagtctgcgaggcggggcaaccgaccaggtccttgtcgagcaagtccgcgaggtggggcgaccgatctggtccctaccgagcaagtccacgaggcaggacgaccgactaggtacctaccaagcaagtctgcgaggtggaaacctaagtccagcatcgcgagtctgcgtcaactatgataagatgcgtcaacctaggccgcagccaggcatgtgaacggtaggtcgagggcacaccgaggggtcactatcgacatgactgcaccttctcaagtacgacccgtggtgcaccccactgccctgaggggtcagtcgaccctgttcattgagacctcagcaccagagcttctacagtgactcaaatacccaatagtgcgcagccgatactccataccggg

SEQ ID NO: 181154 - DNA, 372 bp, Zea Mays
cgatctagctcctcgaatctgccagttgcttatttactgaaactgaaaaaagaaaaccggccctttactctgcatattatatatctttaatttccgcatgaggtttatatatgtctcatgatcgacttctgctgttctgcagaatcgatcgaattggcatctagcttgtagtagctactagaggctagagaggctagccatagccagtacatgagcagctaatggtgtgattaaagctgatgggtttgggaaagtagaatggaggctttcctattcctatcacattcgcacgaggcatagctagctaggcagtaggctagggctcttgtctcttttgcttgacagttcctctcatgattttgattggagcat

SEQ ID NO: 181155 - DNA, 572 bp, Zea Mays
cgtaattccacatctagtggaaaataccatgagtaaaactcgtggaatgcacatgtgcttattcggtgaacttcaaatcctttggtacctcatcttatacatgtttgggtctgtatgggtctttatccctttatagggattatcaaactttggtgtttaacacagactttatttcttctggaaggttccagctgggaactataatctcaactatgagatattctctctacactggagagtggtcattcatcaggaatgtattattcggtatgagatttatatgttgcatatttataattcaaagatatgagtcctcctaggatctcatgacggatcttcagaatcctattaactgcatattataattcatgccatttgccagatatattacatagtggaactgtgtttattcaacacatatgtgggatgggtctctcactagaccacttgaaccatcacattcaccacatattatttcaatagtgctcataaatgtccgaacttcaagctcgcgactttcattttgcgattcttggttcagccttgattgcatttatcaatgacccgataag

SEQ ID NO: 181156 - DNA, 1162 bp, Zea Mays
aaaagatgtaacagtgctgggccaaatccggtccaggcagcccaacaacacaggaaacgcgtgcccgcacgcgatggcagatttgcacaggggccctcgcgtttttgtctaactgcgaacgggttcagtcactattcttacaggtctctgacgctttgcaaatcggtcctccatcttctaattctttacaggggaaggtccccgacgacggcagcgtgttgaggagctccggcgagtcactgtaccggccgattgaggcgatgaccgacgctcccgagcgacagacaccaaattggatctaccctaagcctttcccccaactcaattgcattcaaggtcaactatggagctctggccacggtggccgagaacatggcgggtagatcgtcacgttcccgacgattggcggtcccctagttcgaattgatggctcggcaagcatcacagagtcatcagagtgcttaaacgagggagagagagcgatgagctaacctagaaagggctggccgcggtgagttgagtttatggtggcggagagtggatttggggcgaatccagaattctcgacgtctagcgaaagactacaagcgattagcggtggctgagtgcgtgaggatgtggtgaagctcactgcggggtcaatttatagatccccagggtggtggcgcttaattcgagcggatagcggaggcgaccggagatggggaagaaccctggcgcgcgtgagtacgtgtcctatgtcgtggcagtaactccggtgatcgacgggcagttagagggggtcatggcgatgcggtggcgcggttaggacacgcggcgcacggtcggacgacggctatcaccggcgttcttatcggcttccaccgcgatgacacagtacggtggccggagttctttaacgactggagcttatccacggcggtgatctccaggcgttgtccactgaccctgagcacaagtcgggccggcagtcgcatgaatcgcggagacaatcggtcgccggcggtgagattcttctgccgcggctgatctgatccgtttggttactgtaccatggggagatggtattcagtctatctgacagacaaagtttgggcctcattttctctcaaattcacatggcaactaatccgaggctctgcagcaaaagtgtagagcaata

SEQ ID NO: 181157 - DNA, 469 bp, Zea Mays
gcaagatggccgaggtcttaccgaagccactgacgagtcgaggttggtccacggtacaacgcgagttcggcgaagggctccactccggcgaggaattccctaaccttcaatgcaccaccggccccaattcgccacagtcgcgctccacgcaaccaagcaagttgcctagaccccgtgattaccccgaatcgatggcggactagcgaatcgacgacggcacagtcaagtcaacgcaaggtcgccgcccccttctccctctcgttttaggttcagttgtctacacgattaattcggttgcaggcatgcggcgtgaccagttggttcatatgtatggcgtggccacaggatccggtcacccccttgaccgaggatttcgcgaacaacgccaccatccgcgcaaagcatgggtgagctgttgacgatgcccaagcctcacgtgcgagccccaggtgtcagtgggaaaggagtg

SEQ ID NO: 181158 - DNA, 623 bp, Zea Mays
agtctgaaaatgtcaccctttgaagctttatatggcaggaaatgcaggactccactatattgggatcagactggagaaagacaattctctgggcctgatcttattcaagaggcagaagaacaagtccgaacaatccgggaaaacttgagagtagcttaaacgaggcaaaagagctatgctgataatagaaggagaccactggaatttgaggaaggtgatcatgtgtacctcaaggtgtcaccacttcgtggaatgaggagatttaaagttaagggcaaattatccctcgctttattggaccattcagaatctttaggcgagttgaggagacggcataccaactcgagttacctgatatctatctgatgtgcataatgtattctatgtgtctcaacttaagaagtgtcttcgtgtccctaaggagcagctaccgatggaggaactcagagttcagggtgatttgacttatacagaatatcctatcagaattcttgacacattgactcgagtcacaagaaataagatgataaagatgtgcaaagtgcaatagagtcatcatggaaaagatgaagctacatgggagagagaagaagagcttcgcatagattttccccatcttttcc

SEQ ID NO: 181159 - DNA, 447 bp, Zea Mays
tttattctaggtgatggatcatgaggtccatcaccctaggtgatgattagcacttaggtgtgcgtgtgtatatataaaggaaggtcacaagggtttgtggtgttttctatatatttgtacgtggtattatgagtctaggtttttatctattgtccgagctcacctgccattaacccccttcttggtgttgcctctcctacgtgctgaccctcccctccttcgagcacttcctccttgtgccctcttcttccacactcatcgacacccctttctagcctgattagtctgtcttcctgctctctagacctataccattttgtgtgtcaaatcttaagtttctattgtccagaaactttaaaccctaactacaatcattggtccaactttttgcagccatatgaggcatatttagcctcatggggcacattgatgtcaccaaggccaccc

SEQ ID NO: 181160 - DNA, 625 bp, Zea Mays
gggaatcggagttccacgacttgcctggtgtgcctgctcgcgaccataaagaccggtccgctgcgatctaacccctatctcctccccaatcgccccgcgccgccgccaccgaagccatctcgagccgcaaatccgctgtgcgggcctctcacctactcattcatctacgctcgtccagtggtcgggggaaagctagtattggcgcgtgctaccgatcagggtacctcgggcggctcggtgctggctgggggctccccaatttctcgtcgtcgccatcggtccgccgcagacagcatccactccgtggcctgagctcgacaccgcgcaagcgccggtacgaatccccttcccgtcttcactgagtctgttcattcgtgttgcgcgtctcggttggtcaattggagctcgtcttggcggggacaccgcttgccggcgtttactccgccgcggcgcagagggcgccgccataccttggtgctggctgatggggaagagggctgccgagcgctgacctggcgatgggcggttgtgattagaggacagcgtaccatttcgtttgattaaatccgaggcgtccatttgtgatgaacggtgtagagtgggagatagggtgagtagatccggg

SEQ ID NO: 181161 - DNA, 606 bp, Zea Mays
ggaggcttgtattatctgcacctaagtgcttgtagtaggggatataagcaagttgagatagggagtgagtcccaagtctctaagtatgattgagggttcgtctttcaccgtcaaagggtgctaccattggtggagcgacggctgtgattgcatgagatgatgcccgaggccgagatggagagttctccgatgtcgtcagctaccctcaccgctaacgacctcctcaagcgagtcaagggcatggtggggaaggctgattacaacgtccttcctcaggtcccgatgcaccccaactagggttatgtgtctccgctaagccgaaaaacatgcctctgctttatctctgttttctgcgtttcaacctgattatctaggttttctgtttgttcccgggggttgcggggttacagatccgccctgcctccagtcccgaaggacgtggtgagccaagtgtcgcgcaggttatctatagagcagtagtagaagaagaaggactaggaaaagaagcgagcccgtgagaagagggtggctcacgacgatcttgagaagcgctgccgagcgtaggaaaaaggagggactgccgcgggaggcgtccccagacccgtc

SEQ ID NO: 181162 - DNA, 542 bp, Zea Mays
cagagtctgaacttttactaaccgtgacatggggtgaactttgggagctcttttgaagataatccattgagtgtttgagcatggttactatagcaagattgtaactggattatagggctacaactttgatacagagagggtgtctagtcactacatgaaatttgaagcaaatcgacctacaaattgctctgtcagaacaactgaaacaaccctgatggtacagtgtctgcagaaatatctcaggttcaagcccccctcgctgctagtgatcttgcgcttggattcgtgccggtcgccgtgattcgtacctagcacgcagtagatatccacggggaggtaaaaagatctcacgggggcgcggatttggtcacgatagaagcttatcaccgtgcctgtagccgtgcgacgtggccggaccgaaagtgtcactgtggaaactctggtgacccaggttatgccacgccgtggctcgttgctatgtggtagtaaccgcggcacatttaggattaaaatctttgagtcgttgcaccggtgaatgccac

SEQ ID NO: 181163 - DNA, 548 bp, Zea Mays
catgttttttccattgcctgtaaatatcacatacagaactacacaaggctgacagctaatcagcgattgattattcgcaaacgaacaattacaaatgtcagcagaaatggactgacattgttatgaaatttaccaatccccactgatgggctcataaactctacatatgctttcactgggaatcctttcgcactaaaaaaaatgttagttggtcttaacgtctactaatggtccaactgcaaaagcagcataaggtgtactaatcaatgcctacatcggatccttgaaaattcttcactaccccttctatttcgtttccttccaagattgtctagatctgaagaagtcgaagcaagcatcctaaatgtcactctctgtgattactccatctgattcattcagtgattcaacatcttggtctgatctggcaagactacacattgcttatgcagataaaaaagattgagagcaggaaaaaagaaactgcgagttccacgtgttttatcgttttatcaatgctatgctattgttccagtgaaacagcataa

SEQ ID NO: 181164 - DNA, 960 bp, Zea Mays
ctactgtggggccttcacatcttaggacccctcgtatccagcgtaggacgatccacactgtctcctgaaccattgtgggtgacaaagtccatgacccttgctctccatgtataggaatttgcctggccatggtggaggtcttcacttgtggggagccccctggtgggcttctgccttcgcaagctgttggaaattacaggagcgaggaccccgttggtgagcctgtttgaagtctttggtttggcctggtcgtgcgatcatgtatggttagttatcgcctagaggcaagtttatgaagggccgattaaggtcaatgatattaggcttgtccttcgcccaaacagtacctcaaggcaatgactcatcctgatgagccgacccctaagtctttattgaagggacaaactcgaatgctgccctcgatcatcaggtgaacagcctgggggttgaaataactgttggaagcgacatggtaggcgaggttcacacgttttttggtgagaagactagttgcgatgcaaaagcggggcgttggccgtctaggggactacggcaagggagggctctaaagccagagcctaggaggtgttctcattaggattgcattgatggtgcggtgtctttgctagcttgttgctgttgcgaacacgctagcccccatggcaaaagtccaggaagaagtggttcccgcaaaagcggagtgtgcggaggccaagaggagacttgctccgaagaaaactgaggccgagcagtagaaaaaaagggcaaagtctactgaggctgaggttaagttcctacgtaaggaggtggctgaattataggcacagaaggactccgccttggcggagctgtccgtgcagcggctttcgttcggagggctttgagcagagtgtgcagactaatgctcgagcggtctttgaggatttctgccgggtgtatgagttgctgggggcggccaac

SEQ ID NO: 181165 - DNA, 457 bp, Zea Mays
aggaaaaaaataataataaagctggtaattctcccaataataggaaaatccctattaagaggagaggccagtctggtggtcaggccccgatttgttcagaatgattggtgtgatttggaactgtcagggcctcggtaaagatgtgaaaagtgaattcctgcgtgatattatcatgaaagagaaggttaactttattggtttacaagaaaccaacaagaaagattttgaagaatcatggttgaatttcattagtggtaataaaaaatttgtctgggtttggtctccccctaatggtaggtcgggaggtttgctggttggttttgattcggacatgtttgatgttagagaaaaagagttgggtgaatttatgattcggacgctggtgattcaaaaagaatcaggttttatttggaattttatttatgtttacggtgctgctcaaaatgagcaaaaacag

SEQ ID NO: 181166 - DNA, 754 bp, Zea Mays
gagagtttggctatggttgctattgtaagtttgtagctggatcattaggctacaactttgctgcagagtggtggtctggtcactacacaaaatttggcacaaattgccctcaaaagagctcggtcagaccaactgaataaggttcgcgatggtacagtgcgctcatcagatcgccagctcagtgcctcgccaccgacgagctacgcgcagattcgttctttcgcgctcagatcagttggatagcgtcgggggtcagtaaatatcacaccgtggatatgctccggccactaaattacaccgaccactatacccgagctagccacggcggattcggatgagttcgctggagatagccgcttcacggccttgcgccacgtgccttagcacatccaccgcatcactgtgactcacattagccgtccgttcatcaccggggagcttgccacggtaataggacaccaatcacgcgcgccagtaacttcctgtttctccgaccgccgcgcgtcttcgtccaattcaccggccaccgctcacagactctataaattgagcgcaatgtcaggtccgtatggtaatcacgcaccaagccaccaagtcgtgcctccaattgttcaccagagagctccaatttctcatttcccccaaatcactcaagaacgccgctcggtttgacctcgccgtggtcagcgcgtctcaggtccactcatatcctctgccctcccgttttagcgttcttgtgtgcccctgatactcc

SEQ ID NO: 181167 - DNA, 813 bp, Zea Mays
aaacaggcaggcgtagaatattcacggggagcagggacagggccgaccggcgggaggcgcataggttggtggattagagaggcaatggacccctgggcgcgctctgatcggatctggcgttccggccttcttttctgtgtcgcacgtacgtaaatttcttgatccggccgggacgtgaccaccgacgtgcgtccaaatcgcaaggtagcggacctcctatggcctagctgctagctactcagcgtacgtgcatgcatgtgcacgtttcaccagtcgccgatcgatatcgaagagaccatacacacgtacgtgcaccggacaggcggacactgctgcagtgctgctgatgtagctagctaggtatatcatggttgggtgaatgggttgttgcaatatagtctgtacactctgtctgtatataagctataaagccaaggacaagaatttggtacaagagcatgcacgtgaggacgtctcagctttaagatggtttcacatgattgacatgcatgggtggagggtagattgattccttcaaaagctaaagctaaatctagctagctccctttgctgctggcctttgtttactcgggtaaaaaatcaaccaccggcacctgtgtaataatctctagcaatcgtcctccggcctcttcgctcactcgtgttggcacttatccctaaacctcgcatgctcatcggcgaaaaagagtaggagcacatgtcccttcttgggagcattttttttaaaaggattcttgacaagtctgcattatcattctggaacttgggacgcgccgggcaccgtgttcctgc

SEQ ID NO: 181168 - DNA, 780 bp, Zea Mays
aaatgaccaagacctatgccttagagtgtttgaatggaataaagatatgtttgtctaagtcatagaagtgcccaagacaacagccaattgaagccaagaaagttgtgcccaaaatggactaagtctggttgctctaagtgcagtggacacgccaaaacatcgtgctcgtggcgtcatcgccattgttagagtttggagcatgttctggccctaccagagcattgtagccctcaccactgagcttaatcctaaaacaattaacacacttctctatgggaactctacctgccttgaacgcctcgtccatggtgacaaacctctcattgtgttgcctcaccattggtaacccgactctggccatgctcagtcgaccaaatcaatactataaggtgtgctagaaggtactaattctatctcaccttttttctttcactctattatgccctaagtcatgcccgattactcacgggagttgatccttaccatgataagcacatgcgtcttcatttgagtacatccagccgctttgtcgttccccttttgtgcctagtgagtctgccttgatctctcgtagcctagcagcaaatcgtagcgctattctatctctgagtcttccggactaatcatgtcggcaatccttcgacacaaagaatgtcaccaccattgtctcgcccctcgcacacctccctattttaatatgcgttgtcaacatgtgatccaatggccagaaacccccgtgcattaggcagtgcttggtcagcccttgctgacaatgacact

SEQ ID NO: 181169 - DNA, 681 bp, Zea Mays
ggtggaatgtaacataatctaattactcctgggactgaataaagatacatatgtttgtttcagtcctcacccctttctcattacgtcgttgaggcctctctacaataccgttaccacatctgctccaaactttatcaatgttcccaccattcaaaccccagtgaattgattccattttctgttaccttagtcaagaacaaacccaacatcgtcctcatgttttcatcgaattagaatgttgtgagtcaacagttccaactcctagaaagttagatatgaactactataacctaagcaaaaacttggccagtggtcacaatagcacacaaaaaaacaagttaaaagtctcctcttaaacaaatgaatatgcgaaatcgaattcaatgaagcaaaacgagtatacagagaaacttatggctctaccatcgaacgctgatcaaacaccatgtcaccgtcaccacagatctaaatcaaacgaacgaccacaacagctaggcgagtaagagggggaatgagactgtgagagtactcacagcttcttatcgtcatcgatcttgagcttcttctggcacctaatggtcgggtttgcgatgttgaactacacacaaaaacaagtcaagagccataaaaatcagaacccagacagctgcaaatctaagcacgacacatgcatatttccac

SEQ ID NO: 181170 - DNA, 375 bp, Zea Mays
ggagtagaacacacacactagggatgtcaattttacccgtagatttggatatccatcgaatatctgaccaatcgagtttggattcgggtacaaaatttgacccatgggttcacccgcactcttccatgataaaatcatattgggtacatgttttatttctcgctcacgggtccccatggatatctgaatttaatttttgaccactagagaggcacctagagtcagcccaccaatggcccattacggaaacacatgccactaaccctagtgaccgaatcccatgtcggccactcccaccctagccgccaagaggcaggagccgcacacgcccacccaaattccaattggacgatccagcctttagcctaggcatcc

SEQ ID NO: 181171 - DNA, 938 bp, Zea Mays
ttgcgcgtgaggctaagcagccatatcagcagcttctgtgtgagttccccgttgtctcgcttctccgtaggccaccgctcgcccgctccaccctctgcaggaccgccactcacgtttgcgcccgctgcttgactctacgttgcgtgcctatgcctccgggactgcagggggaggagaaagatgtcgttggcagctaaaaagtatagggcacgacaacacagttatctactagcttatctttcccttccccggtttggtagtttctctgacccctcatctactactgcgtgagtccctcatctactactgcgtgaataacaagaataagtagcatatcctttcagaaagcattaaaatgaattatgtgagtgaaaaaggttttgagagattctgcctgttcgattcaatgaagttgtgtgaataccagtgccgagaaaacattaaaaacatttatttgatgggttccacgcattcaattcaactaaatcgtgtgattgaatacgtttatttgagaagctttgtccttattttatatttgtttgctataaaatgctttaagttattgctttatattaaattgtttgttgtcaactaaaacgtatgtatacacacacgtatatagatttgtacatgtagttctatataaaatctgacataccttaatttttgtgtgtcctccgtcactgctcaccggaacatatttccttctatctcggtcgtgccagtggatcagtatatttagattattttattcgcaatatatgtagcactgtttcatcttgatggattcttcagacaagacaaatgaaatacccgtcgattatagctaattggacaagcattcaaaagttgataatgaatcacccctcgatgcaaaaatagatgagcataccagacttcctatacatcccaatgaagaagatatatctagaacaaag

SEQ ID NO: 181172 - DNA, 697 bp, Zea Mays
atcaaactgttcaacgtattcagtaactgtatcactttgtgtaatgtgcaaattttttctcataagagagttgtgttgatcccgctcaaagcgagcacacactgcagcacaaaacttcggccacggtgccacacgtaacaccgaatcagatgactgtaaccaaaacgccgttgaccccacaaaatgcattgttgcaattttaacccaaagctcccggggtatggtgtacacatcaaaataattctcacttttagccttccacattttaggatgatgtccgtcaaatgagggaaaattaagttggggtaaggttgcggctaaacgtgactgataagacacccaataaggatcttgcgcatgaatcacaggggaatgaaagacatcagacgatgggattttagatgtacctttgaccggaggtggagtcagggtggttaccaccccaagtccatcgctccggtgcagagatgcaaggtgaagatcgtgattccctggactcgcctgttgcagagataaacccagagaggttgatggtaaaaaccccgactccagagccccggtgtcgaacaccttctgagtagtggtgttcgcctctttactcgccatcaattcatccaatttatccgacagagatcccacatcttgacgaagattcaacacctcagtttcgatctgaggtttccagacagaaagatct

SEQ ID NO: 181173 - DNA, 525 bp, Zea Mays
ggttcctttatcaacacaggtatcaacgaatcacagcccgaggctacattcttaccttagcagatttgcatctagctgcaccacttgcaacttagcttcaaccaaacgctgcagataaaagcatccataaatagaagatccggttagattgggaacatgcgtaaaacacaactcgtgagcatgaagagttgtccagaacatctatattatagtgtagcagcattcaaatcagagacaagcttgctaatggaaaagaaggaagggaaaagaaacatgcatgaacaccacaaattctaagatgagtaactaaatataccaagggacataacctaatgctgctagcaagaactcgtgaagtgaagcttcatatatgaaataagatttttcttcaaaacaaataagccatggccgatcatccaaagatggggatggcaaaaagataacactactgaactacgattgatgagatattggtaaaaaaatagccaaaaacatagacgatggacgcgccgacactaatccgac

SEQ ID NO: 181174 - DNA, 553 bp, Zea Mays
ttgtgagctcgtgggcatgaactgcattgagcagtataatcctcatcgtgttgcgaggcagctcggcttcgatcaggacatccctgggacggttccccgtgcaagctcaggttgggagaaagcatgggagacatacaacatagaggccaagagttctgcttttatctttccaaatcacaagcctggcgtgacggttcagtatgcaaagtggtggaagccttactcatcagcatgcggtagtgccgttgctaatgctgcaaagatcaaagaaggccacgatcttgttagtccagtgaaaaggaaaatggaaggggttcttgctggaaattctggcaaaaaggtgcgtctgcgtgtggccactgctaccctgggctgcccgcccaatataccagcaggaattaacgtctacccgtcccagtcctcaggcagccatgctgcaacaagacgagctgcggcagcaccagggcttgttctccgcgcgtgtccaccccacctaaggtttaaagctgtgtcccccacagggatgcctcagccactacgagatgcagcctac

SEQ ID NO: 181175 - DNA, 454 bp, Zea Mays
gcgtggtggagaaggggagaggagagtaagagatctgaggtaggagaagaagactgggaggcggtggcgaccaagacagccgaccgccagagagtaatctattatctcttctgttttccgatgccctccatgagttcgtttccaggtttatatcctcttcattacaatacggcccatcaggcctacatagtccactctggcccagataccctcacgttacggcgcttcactcgttgcggacgtgtagcttctccatcctcggactcgccatccgcttcgttgttcgcttctccgatgtcctgggcgccggagctgatattccctcattcttgaaatgccgcttgtccccaagccggcgtgtgtggaaacctgtcctgtagcgccttcaagtcttcccaagttgccaaggactcatccatgccagaccatatcactttgatttgcgccaccgtcg

SEQ ID NO: 181176 - DNA, 500 bp, Zea Mays
ctcggctattgggaagcaactgttagatgaaatccatgccgggcagtgcggaatacatgcagcatccagaactttggtcgggaaggctttcagatctggtttctattggccaacagcgaagagtgatgctgccgagttagtccaaagatgtgaagcttgccaattcttatcaaagcaacaacatttacctgcacagcaactgcagaccattcctgtaacatggccatttgcatgctggggactggacatgatcggactagagatggcaatggggccccattacccgttactcggcgggtaattactccattaggggacggatttggttgcaaatttgtacccacgggtcttataacggtagaaaaagaacacccaacgggtagagcgggttcgggcatgtattcgttaaacccatacccgtatacccgtgggtataaaatacccataattttagcctacctaacccattaatttgcctaggtggctaggagcctaggtcc

SEQ ID NO: 181177 - DNA, 477 bp, Zea Mays
gtccgattgaagtataccttcagattcagagaccggtttgatgagccaaatgatgattggctaaaaagtattgaggctatcagcgacgaactacttggagcatatagcagggcagaagatgatgccttttccgcagccttcgggggccaggggaagaaaggattgaacagggtatttgatgcgattggcttcgtataccctgattaccgctacccgctgcgagggcaaggaaaaaagagaaagactgccgcttcgaccaccacagttgtgccgaagggcaagaagatgaaggtcctgacccatcggccgcgctacattgaaccgactgtggtgcctgaacttggcgaaggggcctcttcaactgtcgaagcaggacaagttgctccaattgtgcaaaacgttgaagagccaattgtagtgccgaagatgcctacagtcgggccgatcgaagctaaggaggataaggccgaagagcta

SEQ ID NO: 181178 - DNA, 409 bp, Zea Mays
acagtatagcaagccttcgtaataagcgcaacaggcacaattatggctcggtaattggggtacacgataaatccacgcaacgtgcgcaacaggcgcaattgtggctcgcggcagacagacaaacaatgtcgacatggcatacgaaaaatacgcgactcgataatgacgtccgactcaacaggagtggtccgattaagcgagagtgtgacatagcaatcaaatgacgtagccaagttcgtacgacataaatattgcatcgtgttactagggtgtagccaatacttagccaatgttttaactcagtcgattaataatgtaacctgatcgacacatgtgtgtacccactataccatttaatcactcggcgtgagtccgaagcttaacgcaaaataaatatttagagcgattt

SEQ ID NO: 181179 - DNA, 519 bp, Zea Mays
gataaaccttgtatcatgcgatggactcagcagatgaccagagcagaggatgatctttagaaggcagtggtgattactgttatcagcgatcatgagaaggtcccggttgaagagattgctgagttgattgctcctaggctagagttggaagatagctccttgataattcgacagtcttcagagtcaagctacatcatgtttctacccaactgtggcatggtggatttgtgggtgggcagttgggccttttctcagggcagccactttcactatcacctgtaagaaaaggtctcgttttttgaattccaaaggtgttgtgttacctaccttattggacgtagagcttcagggaatccccatccttgcttgggaagccaagaccgtggaacaattgcttagtccttttgctagtgttcatcatgttcatccagacaccttggagctaaaggatgtggttgtttatcattgttcttcttggtgtttgaacgtgtcactggtaccagattcgagagagctttg

SEQ ID NO: 181180 - DNA, 444 bp, Zea Mays
tcctaatttctctcttaatccaccccaaccccctcataatacctggtcaccaaaacagttctaagcatggtctcttaaaatccctcaatctacccgaataagccgtcaaggtattgtggctcgtgagaggctgactgtgctcttcataattgaagatttgaatctgaaccgctgacacgtttgagccagctccgcgagcccggcgcggcggcgcccgtaaaaaatcccggtggacggcggcgacacggaacgggaaccagttgggcgagctagcatggaggtggagccgaatccagctgcgacacgcgaggacccacatcccttcgtcctcgatgttctcgaaggatcatgccgatgccgcagggcgcgggcagaaggccaaggcacacggcggaagcggaagcggaagcggaagcggaagcgggagccggaagccgcgaaaag

SEQ ID NO: 181181 - DNA, 562 bp, Zea Mays
tgtcggtctgcatctttgacatggcggtggtcagggactagagcattgtcatcacctcggccatggtgtgttgatcgccatcgcccatggttgacggtgcggacgttgccgtggacgacgaggaaggagatggaggcggcggttggaatggtggtgaggctgcgatgaaagattgggtggaggtggtgggagaggatcgacgagactgagataccaggttgtcaagggcagtgagcccgagggtagggggacctcggctacgtagatcgtaaccgctgtccgtgatggccggccgggttatacccccttgccgtcgttcttcgtcggtgggttattcccctaccgccggcttaggtagatgaagagagaggattagatattaatatctttcttaattcccaagtatttgattacaatatatttatagcctccggctcaaccaaaagaagtaacaaactccactaattaatgaccaaccaaaatagctaaagatctccatatttatagcctttcggctcaaccaaaaggagtaacaaactccactaattaaggactaactaaa

SEQ ID NO: 181182 - DNA, 419 bp, Zea Mays
gtcaaagaaaaacactcggcaaagtattcgtttctatgccgaatgttatatgccgaatgttctgtctttggcaaacaaggtatgtaccacttggcaaataaggtctgtgccgtggagagtcttagttcgtcgagagtggcactcgataaagttcgataaattatactcagcaaagcgtcgagcatttggcaaagaactcaattccggtaatagtgctgatcgagctccggatcatggagtctcggtgtaccctccccgctccgacgttctgctatactacgcgcggcacgttaattataggtagtgcacagtgctccgtcacgacaagtatgtatacgacgtatactcgctggcgccagcaagcgctgttccacgtcacactgacctgctggctttcactacaccaagatcgatccacc

SEQ ID NO: 181183 - DNA, 385 bp, Zea Mays
ctcggctccgctaggtagtcaaacacctaatccagcaactcgttcctcaaatcatccaccagagctcgccaattggagatttcccccaaatcggttcccgccaccgtgaaagagccctcgccgtggtcaacgtgtttcaggtccgttcatgttctcgggttcctcgtttcagtatccttaggtgctcttgatactctctgacccatccaattgagctagaatccattggatcatcgggaacatctcggtcggtccattcctcgcgctgtcaccatgaacagggtgatgtagagctggaatccagcaattaagtgaggggaaatagtcgtgtagggttgaattcggtgtccaacaaaggggagggctagtcattgcgtagtttggc

SEQ ID NO: 181184 - DNA, 473 bp, Zea Mays
cagaatttggacagattcagttactgaatttgtaaaaatcataactcctaaacgatcagacttatgtctgtcaaattttaacaccagcaagataataaagttatctaccacttttatatagcacatatctacagaaaatacaatttagttcatcaaacatacatcacgactaaaacagcgcgcgcagtccaaaacagcaaccaacaaatttcagctcctatataattcaagaatcgccgcgttctaagtacttgaattattctaacactttaccattcgttagagttgaattaattagatgaggactaacaagtagacttacaaattttatccaaatcatttagtgcactaaaattactacaaccaattaaccacgcattcttcacgataatcactcaacagtttgcgttttaatttagacatcacatgagcactactactttttacccgtgaccataaccatacacatttag

SEQ ID NO: 181185 - DNA, 552 bp, Zea Mays
gacggcgcgttgacgacgtgatggcgaggcgaggacactgacgtgaagaggagggtagggtggtagtgcctggacttggaggagctagatatggcagcgtcggaggggttctcggcaccagggagagcgcgacgtcggcttgaaagagaagagagcaagcaaccttgaagggagcagggcgggcggctcgactccgacgaactgttactgctgcttcaagtgtcggtgaagaagagaagggaagtcgccgagcactgatggacaaggttaaatctgatggaactgatggctgatcttaaatgctccaccgatgggaaccttcccaacgaggaagagataggggctcaggccgagcgctacagttgctgtactaggaaggcacaacggccagatgtggtgagctagtgttccaattgcacgcccaagataaggagtgccatgcatgctgtagcgagaaagagcaagggacgtatgagtgaggatccaaagcaacgtacgtgccgggtgccagcagctgattggactgggtctgggacatgcagcttcagaaca

SEQ ID NO: 181186 - DNA, 1125 bp, Zea Mays
gctaatgcaactgagcccaccacattttggccctatcaagaaaacgacccaataaataagttaaacaaagtttaagccattccgtttaggccgttttgaccaagcattgactgtttaaacgggtcaaccttttagaggaccgcctaggccctaaactacacgttgttcctctgtttactgtttagacccgcttaaacggtcgtctaaaaccatttaggataacactgcttcctacaccgaggtcatcttgcatcttcgtggcttgtatctttgtcgtgcgtgcgttcagccggagtttctttgtgcactgcttcggttgtagtctacctttgtccatcctttgtttatatgcctgaaacacatttacttatactaaaggttggacgctttgagaaccttcggtaagataggcccccaacagtcatcaagctaggaaggaccttatagagtgacacagtaatctttggtaatgcgtacatgctgcggacattgcagggtgatgagttacctaaggtattgaatggtcgttttctgaagttatatcatcccagtgtgtggcaagatgcttagaaaactgatgttctcacatcgagttgataacagcatgtatcaggtgcttttggttcgttttgcttccccaaaagggaggggaatgtattgagcaccatattcggcacctagaaaggttggacggtccgcgattagatcatatcaggcgagatatctcctttttccgtgcgtgtttatccatctaaaaatgcggagtttgttggagaacacctaaaattggtccagacctccccctatgtatatgaatgggtacaactgattgcgcaaatccccaatcgaaccaatcaatctatatttcattgcctttaatttcttgccctaggagtagcagtaattagtcttctcccatctccatcttcacctctctttgactctatgtcgtctggaggtgtcttgggtggcctgtcgaccctaagacaaaaactaggatctctcctccgtgacaaagtcccttccgggggcgagattcaggtgtggaaggcgatcgtcgctgcctctgctcgcacgcggaccgtctgaccccaggtgtgggtcgtccggccagcatgcagaaaa

SEQ ID NO: 181187 - DNA, 551 bp, Zea Mays
cagacgtcgtggatcccacgcgtgggctaagtccgtggcttgccgagctccatgctgaacctcggggtataaatatcggacgctattcctcctcgctcgtcttatctgcccccaatatcggtgtcgccgctggcatctctgaagaccgccaccgccgagcaagcttcaaaatcagaggagagagagaggtgcaggagtgacgtcgtgtggaaacgccacgggtgttctccttcggggttggtgcgcggtcagggacttcgatcgagcttcttcgtcgcttcgggtgcgtctgctgagtggtcgggcgatatgggagggccccaaatcgtcaccatcgctgcgagtccgcggcactccgtggacagggcttccatgacgtcgattggcggtgagcaccttccattggaattccctgtcattactgctgccaatttctacctttagatcggagtttaggtgcgggaatagggggattagtagatccggccatggcgccaccatagtccagggcgcgcgccgccgtgaggatgccgacgatgggagaggatgag

SEQ ID NO: 181188 - DNA, 1715 bp, Zea Mays
aacctcttgcttttatccttcttctcaacaaacaatactggggaagcccatggcgacctgctaggcctaatgaaacccttagccagcatatcatccaattgccgcttcaattcaacctgctcctttggagccatccaatacggggccttatgaataggctacgtactcggaattagtttgatttcaaaagctacatcgcgctccagtggaatgcctggaagctctgctggaaacacgtcggcaaagtcacacaccacacggatgtcttgcacccgcaaagcagcctcactctccaccaccatggagaaaaaaaattcccgacttccttgaccgacgatccggaagcattgcgacaacatggataatgtgaactttggagaacttcccaagaataccacctccctacctgatggcgcctgcaataacactatcttccaaaaacaggatataactgcacgatattgagataaccaatgcatacccaagataacatcaaatgcccccaaggaaatcacaacaagattagctgaaaagacctcatcagcaagaatgatggaacaaccctgacaaactgaatagctactaatggagccattagcagaactaaccataattgggtgacccaacctctgcactgaaagaccagcctgcgacacaaaattctccgaaacaaacgaatagaaagtgctagagtcaaaaagagcatgggccacaaacaaatcaactgagatcgtacctgtcaccatgtctccctgctctctgccatccgcagaaggtagcacatatgctccaaaaatacccatagaagaggaagctctcggagtgaagttaacagaagaaccccactgagtcgccggatgaggcagacgcggagctccaaactgagatggtataggagtagccggtgcagtaggcacggacagatactgaggaaaaccctatatagcacgaactgaggagtcccgagcacatagaactgttgcggggggagtggtactgaaaattgctgctcaacgcttgacatcatgttgaaagtgccctgagaagaggaagaagtcactggctcccatctgagcttcccattgggattcctcctacacaccacatccttgtggtcttggttgcagatagcgcacctgccactccactgacactcagcacggcgatgcgcatcaccacaacagaaacacaccagccccagcttgggcttaggaacagcctgatacctctaagtactttctcctgaagtaccctattcagagggtttgccacggtaggggtggtggcgctagtgctgagactttcccctcttgtgggctggacccctagtgttgcccctcctcgcgtcctggccatgaggctgatcaacacccgaagacttctatgactccatggtgtactggtgttgcatctccacgcccaatgtctgctccactgtagtacggaaatccaccaacataaaggcgcccagagcatgcctgattgaaggtttcaggccctgacagaactggctcgccttctccatctcattgtaagccacatgaggaacaaagcggaccatctcgttaaagcccacttcatactcttgcttgaaagataggaaatcaatcttcgttttctccaggaaggtgaccgggtagaacctcctctcaaactgcctgatgaaaacatcccaggacaggactcctggtgaggaggagtgagctgcctgcacg

SEQ ID NO: 181189 - DNA, 647 bp, Zea Mays
cggtcagccgcgtcgtcttcctcgcgtaagacgcaccgccgtcccctcaccgtcgtcccctccatcgccgtcccctcgccgcacatgaagagttcggcaccgccccgtcctcaccgcttgaccaacgtccttgcctagtaccgccccgccgtggagtctcatcggcgccgctgtgcggcattaatgccggcgctgtgcacctcaccggcgcccgccgagctccgccgctcccctaccctcgggcgcctataaaaaggtcgccccgggcacctccttccacgcaccggcctcggccactaccctcctcccctcgcccgagcgcaattcgcgaagcgccgccgtcttccccctctccggtgagttctcccccctcctctctctccctctccgttggtccagcgagcaattaagttaaccgagcagcttcctcacaatgccacgaacccaaagcaccacttccccgccccagtccctcgcccaaagaccaccgacggcgatccccgccgcgaagctccgccacctccccgcggacagccccctctagccaaattaagcctacccctaggatcgccagcccctgcccgtgctaagccacctccccgtggaccaagaactgggccaccggtggcgaatcgccatcgagccca

SEQ ID NO: 181190 - DNA, 890 bp, Zea Mays
aaattaagcgggtaacgggtaatacccgggggcgaaattttatatacgtcaattaccggcgggtgagaagtgttgcccgtatccttacccgtgggcgagatttcttacccgtatccatgcccatcgggtatgaaacccgcggatatccgtgcccgcaggcaggattgccatccctactggccgcatttcaaggattgcatatgagccattgatggaagccactttcccgcgtctgtcccggccacggagcaagcaaagtatattggtcgtcacggttacgcatcacagaatgtcatggtcgtttgtgacttcgatatgaggttcacatttgttgtcacgggttggccaggttcagtgcatgacactagagtcttacaagatactttgataacgtatgtggataggttcccgcatccaccagaatgtataactatcttttacttttgtatcattctttattaatttgtgtcatatgtattgaagtccagatttatgtttgtgcaggtaaatactatcttgtggattctggttatccgaataggaagagataccttgcaccttataagggtcagaagtaccacatttcagaatggcaaaatgcgaggcaacctgttggtagcaaagaagttttcaactttgcacactcttccctacgtaatgttatagagcgatcgtttggggtgcttaaaatgaagtggagaattcttctaagtctaccttcattttctcttaggaaacaatcgaagataattattgcttgcatgacattgcataacttcattcgagacagtgctctacacgatcgagactttgaccaacatgtacctactagccttgctcatgatgtacccgtaggtgagagtagtagtagcacatctgatgagttagac

SEQ ID NO: 181191 - DNA, 476 bp, Zea Mays
gtcgggatctaattcaaatgtaaatgggggtcggaatgctcagtccacaaatgaacgccgaggtgtgaccaccatgaacccgagaacagatgatggtaaattgtcggcgctgaaggcctacaggagggctaagggtctgtgcttcaagtgtggggaaaggtggggtcagaatcatcagtgttctgcaaatgtcccattacatgtggtggaggagatgtgggctatggcacaggcaactgaagaaagtgacagcaatgaggagttggaaaatacttatgaaaaagaggaagaagtagaaattctagctatatctgcagcagcggttagtggaggcgagggcaatcgaacgattcgactgttagcatctgtttgtggacagcaggtgttaattctagtggactcgggtagctctggaagtttcatgagcaacaagctaatgggaacaatatcaccggtgcaaaaattaccaaggccaa

SEQ ID NO: 181192 - DNA, 367 bp, Zea Mays
cggcagagtgcacacgcccggcgtttggcgtgacctgacctgtgttgtgtatcggacacgtacacattcgccggtgccatggcccatggcgctcctcccggccagccaatcctcgcacaggacgtcaggacaggagtcataaagcgagctagaggcctagagctcgcggtgtggctgaacagtgggtctgtgggtggccggggcccgggcccggggtccggatactccgcatgattaagcaataagcacacagagcagtgtcgcgttgcacggtaggagaagaagccatgcatgctctgcaacaacgccctcgcctgtcaagactcgagacccggttttggatacctttcctggggtaagaaacgtg

SEQ ID NO: 181193 - DNA, 623 bp, Zea Mays
gtcggtgtttcgaaccagctccaacaagtaaatttgtttgtgtgctttctaggtccggatggtgtgctcagtgggcgcaagatatatactggttcaggcataacgtccatacatccaatcttcgttggctcacgctaccagcaccttattgctcaatgctcatagtaggggttacaagccggcaagagagggaggagctcctaaatctcttatgcatggctagtcctaatgactagggtttggtgctctctactaagccttggtcgttatggtggttcgctccttggctttggcctccatagtccttcagtcttctggtgtggtcgtttgtctgtctatgtcaccctatatgtcagttgagctacctctttttataggccatgttgggggtcggctattggtagcttctcaaggaaggagctatgacgttaaaatggggcgttctacattggaaaattcgtatttgtccacatgcaccttggtcgtttgggcttccctagtcgcgcactttatggctagcggtgtaggcggcgaagagctccgacatcatcattatcgtctctgtgccacgccgacccatggcctccatagcctaggtctcggtgtggcccattgtgttgcag

SEQ ID NO: 181194 - DNA, 685 bp, Zea Mays
tgtggttctgctaaatcgaacccgcagtccttcccctaatggaacagtgaccgcggtggaagaaaagggcggaggggcttaccggcggcgaggttgctcctgtgaagggtcgggcgaggtccaggggtctctggcgatcacgtcgaggtgcagatcgtcggtactggtggtcggagtaggttggtccacgtgcgcaggcgggcgagctcgtcggcggcgaggtatccagcctgctcacggcacgatagtcccattgaacgggtcagagagcttcactggatgctagtgaagacgtgggtgcgaggaattagaaaatggcttacttgttagctcggttcacgcgcgacggcgggtgaccgaagtccggtgagggtgattcggggtctccggtgaggctttgtcgggtctgaggacttgggaagcttcacgggcctctggcaaagctaaccgagcgactggcgaagctaaccgagcaactggcgcagcccgggggtggctggagtgagctggccatggtggccgaggctcggatggcttggcgggcggtggcgcggcgtgctcgaggcaaagtccgatgaactcttgctcgggcaggactgagagcgcgtggggaggtacgaccaaggccttgggctgctttataggcacggcacggtgaacgggcggtcatggaccggcgagggcg

SEQ ID NO: 181195 - DNA, 797 bp, Zea Mays
gtgatcactgatgttatggcgtttttttttgggttcggatgtgcttgatcataagtacttctttctacggtttcaatatttcgagagtttcaccaggaattaccttttgtaaactgtgatgttttggcataatattccaaacccaacatgaggtgtgcaggggctggtggtcttataaacatatagtagttcataagcatgaatttatagggtacacagaggtcaaggaattacttattaggctgaatccattccagtggtattgtattaggctggttccagtggtatcgcccactcaattggctatcacctggtcacgtcactgcctcgtcgtcgtcgcctacgctctcgtcttagcctttccaatggttacctcacatcaaccgcaacatcttccagaagaggggactggctgcgctatccctgggcatcgaggaaagcaatgttgaggcttggtggagtacctcagttactcgccttaatgccttaatggaggtatccaaaatggcttcaactctctagtgattttaggagtttggtgtatttggcgataccccaacaagagcgtttttgaaggtgttccacctagtgtcactagggccttgtctttagctaaggatgaatgtagtttgtgatgtcttgctggtgctaagggtttgtccttgctctcagtttatggtcataacctaggttgaggcatgttgttgcttccctggagtagatgttttagtctcgtgtgtttttttatgtttttgtaaggcatttggcccttgtattgttccccttctatcttttaa

SEQ ID NO: 181196 - DNA, 386 bp, Zea Mays
gatacaaccgatttgtttagcgtcgtaccttcgccagcagtcgaccgccaggctcctggatcttcattactcccgcgttaacatcgaccttatacccagcctcgtcgagttgaccgatgctaacaatgtttgtcatcagtcggggaatgaagtagactccgcccagcgatctgatttctccagtcttgcacaggaatgcgacagtctcgcggccttcaatccgcgccatcgagtcatccccgaaacgcacagatcccagctccatctcttcgagcttgatgaaggcagctctggcgcccgacatgtgatttgtcgcccctgtgtccagcacccatgtctccgcatcacgctccttcctatcatcgaggtgggcgagcacccgttcc

SEQ ID NO: 181197 - DNA, 558 bp, Zea Mays
gttactcatcgcccacacaaatgtcggcaaggcgttttttcagaccgtaaggcattacgacatagcagtaaagctcatccactattacaaaagcgatatgcttcctatcttccctagacatctggatttgatggaaactagagtaagcatctaagaaggacaggaggtcacacccggaggtagaatccatgatttgatctatacgtggaagtggatacaggtccttgggacaagctttattaaggctggtgtagtcgatgcacatccgaagcttccagtttgcctttggaacgatgactggattagccagccacactgggtgatgaacctcttcgatgaagccggcgtctagcagcttccggacctcctttcggatgaagtcctgccgctcaacggactgtctccaaggcttctgactcaccggtttggcgttagggtggatctttagatggtgctcgatcacctccttggggatcccaggcatctacgacggctcccatgcgaacacgtctgcattttcttggaggaaagcgatgagcgcgagttcctatttttcct

SEQ ID NO: 181198 - DNA, 442 bp, Zea Mays
cgggataaacagaattgtgaaaacgaacggaaaccgaaatactatcggaaactcataatttaatacaaatataaatgttattgatgtttgactagtgattgattggcagaacaataacataaaacaaatagatatagagagacaacattttattgttgtttggttgctaaatgtgtacatttaactacatccgatgttgtttaagactttaaatcacttgtcatttgaaaagtgtcggtggttacaatggccaattgtgctataatttgtcacctaaatacacgatgatttagtttatatactaatgcatattaggctctgctggccgaaaaatgggcaagaccctcgtcgacaccacccaccaagaggcctgcgaagacgacgcactcggcaagaggcagcgcaacgagcaacccactcctgaaggcagtctccgcacctg

SEQ ID NO: 181199 - DNA, 639 bp, Zea Mays
caacactcgtgaaccctaccgaaccctgaagatggattgcaataagaagttaaagaagctcgcccccactaagaagatccggaagaggaccaagagccaaggatgccagactgaacgaaaagaggaagccccaccaacactgcctccctccaggatagaaaacatgtcagacgttgaggatatgtccctagctagccttaacgaccttctcagggaatttggggacaccttagaaagggagtttggaagcaccttaggaagcgctcgcgcgtagtgtgattggtggcaacttatgcttgtaatgaacttatgtgatgaataaaataacgtgtttgaaaaagaattggcatgagcatagtagtaatcctctccccctggtagatggcctcggataaaaccacgcctaccgcctctgggattagagcaaggtctcctcaaattgctgaaggagaagtcggtggagaaagggagtgaaacccacctcctcgcacctccagagctgccattagatttagcccaagttctggccaaccaaacccgactcattgaggtcctcaccagaagctttgagaactagcgcccgaatggtggaaggcctcaagacaggatgggagattttctaaggctcaagcctcccac

SEQ ID NO: 181200 - DNA, 294 bp, Zea Mays
atccgcgcagaagtcgcctaagggtgcagccggactagcacaacaagtgcgacaaacacgaagtctatcgcgaagactatccgcgcagaagtcgcctaagggtgcagccggaatagcacaacaagtgcgaaaaaaacccgaagtctaccgcggagactatccacgcagaagccgcctaaaaggcgcagccgaactagtacaacaaaagcagaaacgacagcatcaaaccgtccgcgttaagaccgactataaccacaccagcacagcataacaaaacataccagacaaagtaca

SEQ ID NO: 181201 - DNA, 549 bp, Zea Mays
ggtttatatgggtgaatatgagtgaagtgtgtgcttggtttgaatttaggcgaagaaaatggaatttgggcactcggctcggaaacgatcgctcgaaacggggaatttggtgaaaatgaagcctggtctatcggatgggcgtgaaatttggcgaatttgttactggaggtgttgtgaaggtgcctgcaaaatttgggttcaattggagcatatttggctggtttgggcatttcaccgagcatgtcgtgtgcgaggatttaggtttttggagatatggccatttgaggattgaaaccctcccaaagagagctacaaacctgcagggatactcaatgggcacataggaacatattgcaccacttggattcactggaattcacaggattttgaattgcgcacaaagggtggaaataaggggtgcactgcctagagaaatagaaagagagaaaagacagagggagaaggggctgctcaccgagagagggaaggggaggagcactgggtcgaggtcgccggaggacagtggacgtcggtgaggggagatcgtcg

SEQ ID NO: 181202 - DNA, 587 bp, Zea Mays
gatccatgtcatagaaaagcagctaacagactagaactggttgttaacggattatgtccatacttgaaagaataactagatgacacctaattcttttcgctaacttagttacatcagcgggctttggcttgtgaaagccaaagaacagaactatctcatcatgacgagcatcgtgatggtagtagctcagatgacgagccaaaatagttacatgtcgttgaggttgtttggcctgctaatgccaaactttccgcttgctcttatctgtagtcagttcaaaagaataggcaaggagaagttaagttcaaatttagtgttgctaagtatgataaaatatttgatgaattactcaagagtgacaacattaaactgtctcacacaattctcccgatagatgaattgaaagggtgtgattattataagcggcataactccttttcccatgccagcaatatcttccatcggtaaataccatcggttataaatgaaggccagttgagcttttggaaatgcatattaacagcaacccttctctatcaacacagagagctggcagataagaaagtcttggttcgaccggatgtggt

SEQ ID NO: 181203 - DNA, 796 bp, Zea Mays
tactcatcatcttcgagatcgtataggatatgtttaaactgaacaacaggacaaagatgttaactatgagtctatgactgtagtcctaaatcacatgacagaaacatattgctacaaaacttatttaaacttgtgcataacattcgacacatagctatcatgggctctccggtactataaggctatctaattagttctcaacataaaaatagaactacaaagagtattacctctatgtgatttcagtcgtcctcgttctccggcacgcgcgcagtcttggtgatacccacttgagaactacaaaaaaggaagggttgcagaacggtgatatcaagattatcactgagaacatggattaaatccaatgaaaaggaagcctttgctccacccaattacagaacggtttagcagttacgctacaaatatgaaaggcaaccatggggagggaacccgcacaggaacaaacaacagcagatgtgcaacgatgcaggcgcgcgcattgccctaacgggagagatctgcgcttcagggaatgaggtcaggaggcagtggggtagaccttgggggcctcgtcaatggcagaggagagctcggagaggagatcgaagcagagcagcgcgtcgggggtcttctgcctggccgatgccactacggactccagcatgacacaggtaaagtagagatcgtgcagagggagcatgcgagagtggaggtcgtgggtagagggagagtccgctgacaggggggtcgtgggattggggacggttgtgccgcgcatgagtccactgaccggttg

SEQ ID NO: 181204 - DNA, 788 bp, Zea Mays
gcttcgatggcacacccaagagccaacgggcaggttgaaagagctaacgggatgatattggaggcactcaggaaaaagtcttcgataaaaatgaaaagttcgcaggaaaatggacaagggagtttccctacgtcgtttggagcctaagaactaaacctagtcgagctctgcatggaaatactcctttcttcatggtctacggttcagaagcagtactacttgctgatctcaagtttggggcgccaaggttgatctttgaaaacatagcagaagccgaggctactaggctggaggatgttgatgtactcgaagaagaacggctgaatacggtaattcaatcagcacggtaccaacaaactctgaggcactatcacgataagaccatgtgacatcgatccttcacagtaggagatctcgtcctccgccgaattctaacaggggaaggacggcacaagttgtcacctctatgggaaggaccgttcatagtagcagaagtcactcggacgggatcatatcgcctcactcagatggacgacacggaaattgggaactcatggaacatagaacacctcaggaagttttacccctagccgtatttaaaaagctattgggacgacaatgtactctgtaaactgggaaatatatcatcaataaaaagacttcaagagcgctcaaattattcattgtcgacctgcattcctacttaactcagggtgaccactataccctactaacggagcaatcggcaagtcggcgatgacttaagacggtgcaacatgctcgcgctt

SEQ ID NO: 181205 - DNA, 460 bp, Zea Mays
caaccatcggaacttttgaaaccaattttcaaaagcatttttggaaaacaaaatactaattgtcaaaccaagtcataactcatccatatccatggacgcaaactattcgaataggttttggaactctgtgaagaggtgtacagttcacccaatagtccgatttctgcaatctcaccgtcgtgagatcggattaccgaaactctctcctcccctacacgtctttaccttaacagttataccaaaaggaacatggccacctccatgcccaaactaggacaaaactttccccctccttgtcctcccggtgctccctagccaacataaccctagggtgccgaccgtgcaagttcggatcaagcgactacccatatggtctagagtggttgtacttgataagagtataggcagtgaagaatggcataccggtccttatacaggaggggtaattcttcattctcac

SEQ ID NO: 181206 - DNA, 513 bp, Zea Mays
cgctcgctgccatgtggacccatctgacctaccccactcgccaggataggggcgaggcggcgacgtgtcctacctgctgtcccacccgtagagtgcaagggagcctatacttcgaagacacgtacgtaaaggttcactcttactgacgtgtgggactaggcattctcgttggcccaaatgtcggttcctgggggttagctatgcaggagaagttgggcgagaccacgaggaggagaaggagaagtggacaaatgagagctcgcggagtgtgcagcgctttatggtggggactggaagatggaacacgtagggaggtctgtgggcccgccaccactgctttatctccctggaaaagacccggccaccaatattcatcactagccccacacaggcacttgctatgtacggatgacattcctcaccgatcagtgggccctggtgaagtcgctagatttctactctccgcatctcttgaaaaagtatagttccggttattggatgagccgatcaata

SEQ ID NO: 181207 - DNA, 298 bp, Zea Mays
tggtgttgctttgcaacggtgaaaagagactgcggatggctagagtggccagaaacggcagaatcttcccttctacgcaggaacgccaaatgttcctgcactcactgtcgctacagcagaagtaagattgacagattctgtaaaagtgaaactacagaggggagcccagaaagaaatactgcctatggatgaagtccagaacgaccgtttctgggcctctggctgtcccacgtttgcactccgaccttctccatgtgctgagaaactcgaccgtttctcttttagcaatgaagtccgg

SEQ ID NO: 181208 - DNA, 747 bp, Zea Mays
tatggtacccaacaataagggtactaaaatgggagagcggaggtcatgaacggacctatagtacgctggccatggcgagctcacgcagtggggtgctctggaccaaattggagaaagtttcaaattggggctctctggtgagtaattggaggcacgagtgggtggattggatgcttgactaccttgctgaaccgatgtcatgctcaatttctaggatccccgagcggtggcccgtgaatttgagatgtcgttgtggcggtcggagagaagggggggggggtactagcgcaagcaattggtggctttcatcatggtgagctcaccggcgatgatcgggtgggctaaggtgactcattgtgacgtggttaaagcactgaagcacgtggcgcatggtcacaaggtggctaactccggtgagtctatctgaagcggccgtgactcaggcgggtacggcggccagagtagaatagtggccggagttcatccacgatgcattttttcttacccttgttcattatccatctacgctgggcacgaatcaccgagccagacgcgaatccgggcgcacagtcgctggcggtgagacatcttaacctggcgtcatggtccggatactgtaccaacacgctgcctattcagttagtcttccagagcaacttgcagggagatttgttcccaaattcatgtagtgacttgacctactctcggtatcaaagttgtagctctatgatacagctacaaatcgac

SEQ ID NO: 181209 - DNA, 437 bp, Zea Mays
cttcagtcacagattgatacatttctatgaccaaatttacatcttcattaacaattacaagggacgaagattagacttgaatattaaagacgaaaatgaaaggaacgtcatagacacaaagtttggacgcaacaagttcgtcacatattagattttatatcgtcatcgctaatttggcttgatcggctgacgtaatgatgaaataaattggtcacagatgagttttagtaaaaaacggcccacgtgtacacaccacttgacggcgtgggatcattggcctacatgggccgcagttttttgggacacagcccccgcctggcgacgcggacccggcccagaactggaagcggcagttagttatttggcaaaaaaaagttgcgcccgcggagcttcgaagcagggacctgcgactttctttaaatcgttgctaccaccag

SEQ ID NO: 181210 - DNA, 396 bp, Zea Mays
ggagcattgagcaatgtttagcattttatccactgacttcaaccagttgtcagcgtgcagaggatctggagagctgacgaaggtacacggcttgtggctcataaattcccggtgcttgtcccggggtggaagtggtggtggcaatgggacttgctgttgttgccccatcatctcctaacgcttctcctctctctattggcgcatctcttggcgttcttgctgcatctgcgcgtgcatatccgccattgtaccagtcatatgttgcattatctgcatctgggctgcaactggtggatcagttccggctggtggaggatttggaggatccatctcttcttgttgttgttgctgtctaagtaccctccggttgtgtggattggggggtagatcaattcc

SEQ ID NO: 181211 - DNA, 1792 bp, Zea Mays
ctcagatggatctgtgtcagcagctgccacgtctgagggtgatggaggaagcacagtgacagaattgggagttccagcttcctcctggttcaggacattcttgagtctttgacgaaaataaactttcagctgcttcgccttcaccggtgaaacaataaccatgtcatcagtcatctctaccagcctaggagacaagttccccccatcagattccaaagttctcttcaaatctgaaactgccaccccggagctaatgctccgctgctgcatgctctcatctcttgggcccaaacgctcatgaactgagagacgtcccgaatgaccatgttccccccttctcccactcgaatggggaggtcttgaaaaaggaggggatccctgctgcacgtgaccagaaccatccccgcccgaagtaatagcatgaagcttaggatcggatccatccctccgtggtgcagacgagaatgtgatgcggattggatacatcagcgttctcctgccagaagacatcccatcaacggcaaagggaggttcgacgatccaaagctcccttgaagcaggcaccaaggacgggtctaaacaccaagcagaacatcggtaaacagccacatccttaagctccagggtgtcaggatgaacctgatgaacactagcaaagggattaagcaattgttccacagttatggtttcccatgcatggatggggataccctgaagctcgaagtccaacaagacaggtaacacagcacccctggagttcagaaaccgggaccatttcctgcaggtgattgtgaacgtggctgccctgagaaaaggccaattgcccaccagcatctccaccatgtcacagccaggtagaaagagaatgaaacttgactgggaataatgccgaattatcagtgtcccctcttccagctccagcctaggagcaattaactcagcaatctcttcaaccggtactttctcacgatcgctgataacagtaatcaccactgccttctgaagatcatcctcagctctggtcatctgctgactccatctcaagatgcagggtttatcatcttcagcaggcgacaccggtccagcggggcgcttatccaaatcagaaatcggtttggttctacgccgtctcttgcgagtccgctgtctttttgattggacaccgacagcatcaagtgaaatcaagcctccgccgtcgccctccattgttgatggttcctggtgtcgaacagcaatacctgaatctctaggaggatgctgattgtctttccttctccacaccagtctcttcttcttcaccttgatcacagaggttgctgaagacgaagagagcctcctccagaccgagagccgtgtctcaggtcgaggttgctcccttagtctgtctccactggtcgtacttggctccggaagattgatcctcctccaaaccgagatctcagtctcaggtcgagaggcagcactgttgttcaccgccaccttcacagcctcaagcctcaccggccttttaagtagattgcaatcaaaggagcgatgcccctgcttccggcaccgaaaacacctcgtcttctgcgtacactggaaggcaaagtgatcatgagagaggcagttaaagcacctgccagccaggtcctctgggacgggccgtctctgacgttgccgctccatcttcaatcggcgtcgctttgactgcttggattccaccaactgccatccatcgactagcggctctgttttctctgtgttccgaacaacctgagcaacgcccgtcgacgacacaaacctcttccgg

SEQ ID NO: 181212 - DNA, 530 bp, Zea Mays
acacagcaggagaagggactccactactttccccactggcaacatattgccgactgttcttccgagtcaaagggacctcatcttcttcctccccctcgttttcatcagcaacacagacagcacacccattgggttcagcgacagatggagcacccccattggtgtcagcgacagatggatcacacccattggggtcagcgtcggtaaattcaggcacatgcacttcctcagcagcaggaaccgaaggaccaacatcccgatccaagctagatacttgccgaagacgtctctttttctttttctgctcatcaacaggagaatcaagttgattggctcggcaagggcgtttcgggcgaacactgacagacctctaaatatccaaggttgtaccagcttccgggagaggcgccaccaccaatgtcccagcaagagcagcatcagaagagtcctcagccagcatatcaagcatagcacttatctctgcgtcactaggatccaaaggcacctcaaaatggacctgccgttcatcg

SEQ ID NO: 181213 - DNA, 396 bp, Zea Mays
cgcgagcgagaagaagtgtattgtatgtggtgagcgtagattcgtagaggttgaaaatgacgatggtttgaccgtgacgaccgaggtagcatgtaagcagcttcgttacatgcctcttatacctcggttgaaacatttgtttatctccaagaatataggcagacacatgaggtggcacaaagaaggctacgtgaaaatctcgatgtcatggcacacccaactggtatagatgcatggaaggaactagatgcctttgattccagctttgctgacgaagtgcggaatatccacttcggtttggcaacagatgatttctcacctttcaatctaactgcattgtcttactcatgctggcccttttttgatgttccatacagccttccgccagctctttgc

SEQ ID NO: 181214 - DNA, 812 bp, Zea Mays
cttcgataacttgttcaggaagagaggtaagctcgggtattttattagaaaagcttccaatctgcacggaagaagttgtcggaccatatctagatcagtaggggtgcatcgaatgggtgcaatattgttctttgctatattagttctcaaccctgaagcctcccccaaacagatccaatatcatcatagcagtatttaagtcactaggcactggtctaagagcaagatctggtactgaatggaattagaagaaatgggatgcaacaacccatgctccttagttttgaccataagtgtattgaggacatccataacaagaataaatagtagtggagacaaggggtgccttgccgcaagccccttctatgagaaatgaagctccccatcacaccattgagcatgatctgagtggaagaggtcataaaaataccactaatcacatctctccacacaggaccaaagcccaatttctccaacacttcaagaaggaaaggccaagagaccgagtcgaaggccttggaaatgtccaacttcaagagaattctaggctgatttttagcatgtagaaatcttgttgtctgctggacaagcataaaattgtcctatatgaaacgacctttgatgaaggcagtttgagctttagagactagcccctccatgcagcaccccaacctattagcaagaaccttagtaaccaatttcgtgaaattgtggatcaaactaattggcctgaaatccttagcaacaagagcatcattatgctttagcagcagggtaatgaaggttgtgtgaagaaatctataattcctaaa

SEQ ID NO: 181215 - DNA, 732 bp, Zea Mays
cgcgcccgccccatccacgagcaagctcttgctgcgaggtgggggaggttgttggcggctccctctatataactcaagatgcctgccccccacaccgtctacacgcctggaggcgccggaggcacaaccaaggaggagccgaagaaggagcaagccctctgactcgcacccttcatcacccgtctccttccctaatcccactccatcgctgccaggtcctcctctcccactttctcagcgaccacgacgacagcatccgcaccgcccaccaccaccacctcctgctctgttgcaccgattcgttgaaaggtccctaccatcctcgccatgcccttctctagcctcgcatcgtgccctagatgtgtctcactgtgttgctgccagctagagaggccacagactcgtcatccgactccgatgaggctgcatcctgttgtccccgactgctaaccgctggtaagtcaccctagcctgtctatcattcatcccgatatcgtctctccgcgtcccgcaatcccagccgcgaggaactccattcgcttcctccatccgcccggatccgcgctcacccgaatccgactcaccttccctgctctctggttccgcgaagtccgctttctcctcacgcaatcctcgccatccgcccggatccacagacacaatccctgctctctcctgtccaccgcttcctccagatctctccagcagcgaggaattgtgtccgcttcctcc

SEQ ID NO: 181216 - DNA, 695 bp, Zea Mays
gattgacatagtagagtcgcctggcagttcctccacgacggggagcaggtacagcgtgtgggtcggctacgaccacgtcgagcacagcatctccgtcgccgtcgactctacccatggaacgccgagcacggccacagcaaacggggtcctcagactcagcagcatcatgccacagtttgcatccctgggcttctactccaccatggggcagctccagctgcttggcgactggagcttgacggccgaaaggctcccctactcctactactatccgtcgagctcaaactccacgtccacgtccacgggcaacaatggcaagaccatcatattgtcctcggtgctcggatccgcggctgccgttgccatcacggcgactgttgcgtacgtctacttcaactccaagtacaggaagtggaagaaagagcaggacaagctcgccaaaaccatgcagcgcctccccggagtgcccacccaggtcgactacgccgacatcagaaaggccaccaagaacttccacgacaccaccaagctcgggaagggcggattcggcgctgtgtaccgttgcacgctgcccgctgcttccttgagaacggggcgagggatggaggtggcagtcaagaagttcatgcgggatgttgaggaccagcgctacgacgacttcctggcggaggtcagcatcatcaaccgtctgcgcc

SEQ ID NO: 181217 - DNA, 563 bp, Zea Mays
catttacatcccttcctcttcaattcagaagctctatccttgggttgtagctagcctttttgctctctattttttgtatgaatctcaggtggagttctaactttgatacgtttacggacttgatcaacgagcaatctctgcaacgtcttgacactcctaccagtgcagggtaggttcttctttgaccgtctttctcccatccatcatcgatgagagacattcttggtcatctccgttcattgacttcgcaaattttgttttcttatccctaccatcctcctccatacacataccaaccaaatatcgatgttcctcctactactaaacctcttacgaccgacactcttaccattgaagccccttccatgatgctcctactttacaatctttttgcttatatgtatcctccttcgtacatgtataaagatccatatggtcctccttatagagcatatgatgctcaccatccatacgctcttccttatggtgctcctcctatgtttcctcccatgtatcatgctcctcccacatatggttctcgtgttcctttttatcctcttgca

SEQ ID NO: 181218 - DNA, 361 bp, Zea Mays
cgctgttggctagtgaagacacgcacaaaggtaagtgtgtaaggttaggagccagtgtaccatcacatcagatcagatcgatcgctcgccagagcttataggggatggtaggcgacgtgaggaggtgcggcctaggcccggccatggcggtggccctgatgctcgttgcgttggttgtcgttgcaagcggcggcgcggagacgaggtagaagctgcctgttggcagtggcaatgacgacgaccacccagccgttcttagccacctgtccaacatcattgatccatcggggagctagcctgcgcacgctgatgttgtcatggtgaagcggtgcggtggcgtcactgctctgccgccttggta

SEQ ID NO: 181219 - DNA, 656 bp, Zea Mays
caaatcccccaaaattaatgatagacctgggaaaaaaactttatttacaattcatctaattatacttaattggaatttgaataactaatacatacatgctcggatctagttttcctgacaaaatgaagttaagtaggttgcgagcacagtcttcacgtgacacgtggggatgttcagctttagaggaactatcctttgcaacaaggtcagtagttgcctaatatatgaatatatgttagtaaacaattgcataaatatgtatgtcttagtgtatatataggaaaaatatgagaatataagacaacatgtcttacatctgtcagtggggttttatcgaactgaggtgcaccagatacaggagtatcatgtgtaacagatttttgtccttcctgtaaccaataaatttattaatataaacgtaatgaaacataggttataattaatattagcataatatgatgaaggtgtaaatacttacactatttatatctggtgttaacttaggagcagcaggcttgtctgttgtgggagcctggtgaattaaaaaaataaagcatgcatatatattaatgttacttgcatacattgtaaatgaaataataataattgtgatataaggaagtcaaacatttgattttggagtcttgtcaaatata

SEQ ID NO: 181220 - DNA, 462 bp, Zea Mays
agcacctctgtttccaccccttttgcccaattccaaatcctgtgaaatcttgtgaatccatgttgtggtatgtgtgtctctgtgtgttttgagcatccctgcaggtttctagctccctttgggagggtttcacaacctaaattggctcaatctcccaaaacctaattcaccgcacgccaagtgttcggtgaaatgcccaaactagccaaaaatgctccaattgaacccaaatttttcaagcaccttcacaacacttccagtaacatgtttgccaaatttcacaccaatccgagattccaggcttcaatttcactaaattccccatttcgagcgatcgtttccgagccgagtgcccaaatctctttttcttcgcctaaattcaaactaagtacacacttcactcatattcacctatataagcctattcgtgaagtatcggctcaattccctgccgtttcgtgc

SEQ ID NO: 181221 - DNA, 727 bp, Zea Mays
gtcgaacatcatgggtgccctcacctatggctcagattgatggtggcagctttcattgaagatggtttgctctttgatttgaagagtaaggcaagcgttgtttgggttatggaggagcgacaactagatgatggatgtgttgatggcttaggtaggtgtgaagtttaatagtatgggcattagggtcgatttatcggcagtggaatgacaactcgctatagaggaaaaatctcgactagcatagtgtgagcggcaacatcatcacaatgcagtcagaacttcttgagattggcagggcaacttggctcatggtggggcacacatttagctttgattgaagtgaatggctgatgtgtgcttaggcaggtgcatttggtcttgcctaagtatttctttgcacttaggtatcactttaaggtttgcaacatggcactttaactcggtagctcggtgtgcacgacaagtctgctttatggcattgggttgaggtgggggctcaccggggtgcagggttatcaaggatgctagaggcgggcttgcgatttcttcatgcatgtttttcgtcctagatggttatcagcaccttatgtctaggagtgagttataatgggtgggtatcatccagggtgaaatttaccacggtgaatgataggctcaggcttgcactgaaggttgctagaagaacaacgagatatagcaaatggaagccatggtttgcgtaattttg

SEQ ID NO: 181222 - DNA, 826 bp, Zea Mays
cggctagagaagtcgaaggagacatcacttggtgaaacaagtacgatgccaattacttgcccttcattgcaaaccgatccatcaaaatacaaagtctaaggagtaatagtgagatatgacatgtctagtttatgaatatcattaatccgatgttctacaataaaatccgctacgacctggcctttcatagatttcaatggtgcataggccaaatcatattctacgagtacataagcccacttaccaactctaccactcataattgggttatgcaacatgtatttgatcacatcggcttgaccagaaacaatgcaatgactagacagtaaataacatctgcacttggtgcatgcataaaacaagcataagcataacttctcaacaaaagtgtaccttgtttcagcatccaccaacctctgacttagatatgtcaccacatgctcctttccttcagtttcttgtgttagaacagccccaatgaccttatctttagctgcaatgtataatctgaatggtactcctagttgtggtgcttttaatacgggagccaaagacaggtattttttaatgagatcaaatgcgtcctgctgctctgccccaagcgaatttggcctcattcttaagccgaaggataggggtgaatgcatcaatcttctcggctaggttagagataaatcttcgtaaataattcaccttgccgagaaacttctgcatttcgaccttacaggttggaggtcccacattccgaatagatttgattcggtcagggtctatctctataccatgttcatggatgacaaatcctaaaaatttaccagccgacact

SEQ ID NO: 181223 - DNA, 686 bp, Zea Mays
ccatttggtgaacttgtcaatggcaaccagcacgtgagtatagcctccctgagctttcttgaagggttcaatcatgtccaacccccagcatgcaaatggtcatgttatagggatggtctgcagctgctgtgccggtaaatgttgttgcttcgacaagaattggcaagcttcacacctctggactaactcggtggcatcactctttgctgttggccaatagaaaccagacctgaaaactttcccaaccagagttctggatgctgtgtgtactccgcactgtccggcgtggatttcatccaatagctgcttcccagtagttgaggaaatgcacttcatgaggacttccatcgcaccccttctgtatagtgcgccccctatgagggtgtagtgggccgactgtcttgcgatgcgttctgccatagccctatcatccggttcttcttcattctttatgtacctgatgataggctctctccagtcattagggtccaactttggttggtttaatgtgttgcattcttctatctgatcggagggaatactcgggtgtgacacttcttggacgaagatcccaggtgggacctgggcccgactggatcccagcttcgacaacgcgtctgctgctgcattgcggtctctttccacgtgatggaattccaacccttcaaacttgtcttctatttttc

SEQ ID NO: 181224 - DNA, 500 bp, Zea Mays
gcagggtttagagtaaaatttgaaataggaggtaaattaggaaggctactgtaaacaaccttacatgaaagacgaggatacataaaaagtaatcgaaaaaggagaatttggccaacaaccagtaagatacttaaaaagtaatcggaaaggagaatttcggtcaacaaccagtagattatcgatttatgatctgcaattcacaattgaagcctttgttgctgaagtttatcgtgacaatagaaaaaaatgtcatccatcctcgaaaatggcaaacaatcatgtgcttcctttaatttgtcaagggaaacacagaattaactcttataactagtaagttgtctgttcatatatgttttgttggttaggtaatggttaggtaagtgtgagcgtggagtcaacaaccaaggtttaaatcctaacttgtgcacaattttaccttattttttgcataaccgtgaaaactggtggatgtggtttttaccttatttttgtataaccgt

SEQ ID NO: 181225 - DNA, 619 bp, Zea Mays
atcaacagctaatggacatgacggtgattgaatggatgatattcgtagatgagattggtgataggtagagttcacatgtgctgatgtggctagtttaaaaagtattggggaatgtactgttggggatctgttgtggggcaacctgattttgggaaaataaaattttagcagaactgcaataaattattttggggaaagattttttggaacactgttggagttgctcttaatccctgcatacgagggcggcaagcgagcgacgacttgcacgctagagttaattatttcaaaattcctcgttctcggcccggtggaagtgtcgtgtttttacggaccgttccagtgtcgtgtcggacatattttatggtccaaaaatatattttatgttggaccagcccaacattcgtgttctgctgatatatatgtatggtccaacatattttatgttgggacgtgcttcgagtttttatcttctgagtcgtgcccaagtgcgctggagcagcgtcaaataatgacctgcctcatgcctcaaactctcgggtctagtttcacactgcgttgattgagaaattaagtcaatgtcaaataggcctcagatgtcattctctattgaaataag

SEQ ID NO: 181226 - DNA, 639 bp, Zea Mays
gtcaaacgactacaaattagttagctgatcataaacatatgtttaatcctttgttggccaaagagcaacatttgaggtattataggtgagctcatggattatgttactattgcggggataaaattgactctactcatatgaagaaatgtcccaaacatcataaaccttgtaaatgacttggatacccctctctcagatgacataatgaatgagttggttgtggaggacactattgttgaagagtttggtaccttatccttgaatgcattgtcaagaataaagtttggtgcctggactggcattatgatggattttgttgagggcctcccccatcgacatcttacaatacattttttgtcgtggtggataggtttgcgaaggtagctcgtttttgacctctaaagcatcgatttgctggtgacaaagttgatcgtttgtttcttgatcatattttcaaactccatgtgattcgtaccaccattgtcttggaccgtgatataatattcttgagcaaattttggcaacatctcttcaagttaggtaccaaattggtctcgaggatgatgtatcaccctcaaactgatggacagtcagaaagagtaaaccagtgccttgaaatgtatcttcagtgtgcaattt

SEQ ID NO: 181227 - DNA, 635 bp, Zea Mays
attaccatgcaaagtcttctttactcttggttcaaggaaagccaagaacattgcagttggaaaggtatgaagcaactgcgttcaccagtaaccttttcccctaggttgtagggtcagagggctcccaacagtgggaatcaaggagccagcagctatcacttgcaccgaagctgttttttttaccataaaggcctgatgaatctggtaaaggaccattttgttccgaatgttctcttctactatctttcagatgtaagaaagccaaaaaggtgaaacatgcagctttgtaacagcagtggctaataattgcaaccaatcaagtgcagcatctgaaagtttgtatgatggtttacagaaactggctgaaagtaaactttatgctttgcttccaagatcaaacagtacaatacatcatctctgaaattgaactgctgtccatcaagtgggttcgtagcaaatgctgcttagaaatcgagtgcccaaaaaagcactcaagtagttacaatctttacatttgatctgtcgaccaacttttgtcagatatggcatgacatgtaatcaaacaatcaaataaccttgcacatttgtccgagaaaattacaagaataaagcaatccatcaattgctaaactaac

SEQ ID NO: 181228 - DNA, 452 bp, Zea Mays
ggcgaggttgcctcccgagaattgttgacaaccctttcagaaacgctggtatccaacctcaacacatcaagcctgcatcccaagcggggggacagataccaaggaggagtcaacaatatcgcacacagcaggaacaagttggaaatagataagtgctaatactgcttaacaaataagtactcttgagtaccttacaaaaagcgaaagtattacatctgctttcaagtggagccctagttccatctctactctacaggtatgaactacctccacaccggtagggccgcgggatagctagctccgagcggctcgccagcggaggcgaccacctcagcaccaacggcggcggccacctctgcaccaacgactctccagaagtggcgaccacctcggcacgtgtgccactgcgaaaaggtcctcgcccccgtcttcctacggggggcgacaacgag

SEQ ID NO: 181229 - DNA, 437 bp, Zea Mays
agagaagctaggaaccgatgaaggggcgagcagcaaatgagccttgagacgagcagcgaaatcatcctgatcatagccagactccacctctagcaaccagtgacccagtgtggtgttgctgaagaaattgcagcacaagacgcatcatgagaaggttcgcggaagagtgcgtcggccacccgattgtccgttccacgcttgtacacaatacggtaattgaggcccaacaacatggaaaacaccagttgctgccaagcagtatgaaggcgttgttccgacaattgtaccaaactgcgttggtcggtatggatgatgaattccttgagctgaagatatgcacgccactaagacaaagccataaggattgtaaagatcctctcgcaccaagattgaagtagtagaaatggaggcaccagatgcactattaccctaggcgg

SEQ ID NO: 181230 - DNA, 301 bp, Zea Mays
ggagtgcttcatgaaaaggtagcactacttgttcacgttaatcttccctgtgcctacatctatgatttggttttgctgacctacattaatacaaccatttgttttggtcctcgacatcttcgacatttgttttggccctcggtgtggtcggatttctaatcgctttggtcagcttgtggtctactcttgatgtacaacatgacaaatgcaattcagttgggtggaaatgtagttagatctgagttctttcattagttctagaacccatttcggggagaaatattgttctataggatactcc

SEQ ID NO: 181231 - DNA, 784 bp, Zea Mays
ccgacccgaatctcgggacgagattcctttaaggggggaaggctatgacaccccagtgtcacctagggttcttctcagtactagctcaagtatcatcatttcttgtaagccaagttgagcaagaaagcaccaaatcaacttaagaataaaagatccattgagtttatatctaaagaatcatgtctaaaacaaatgaggttttcaaaaaaaagtaaaatgttgaaaccctaataccaaccctaaattagccatttaagtagaaagggagaaaagggatgaaagaccatgaaaaacatgaaatcgtggcttagaacaattataaaaattggaatacactaactaagctacaataaatattataaagtttggccaaaatagtttgttaaaaactccaaacaagccattcaagtggaggttcaatggggaaatctaaaatgcagatttctgaattttcagcctttgaaccaaaaccgagcgcgttcaccttgatctctatctcaaaactctaagctcccattgacaaaaatgtgtctaactaacccctctacctcataccataagatgacattgggacgcgtgctctggacacatcaaactcgggatcttctctctgtgttcggcagtgagacaaacccaacttcacccctccatatctcttgatccagtcagtgaaacctacaagcctccacacacaaatgacaaaggaatgtcaggggaagagatctctcaacgggatcatggccataatctcaaatatttggagccaatccgcgcttgaacacga

SEQ ID NO: 181232 - DNA, 714 bp, Zea Mays
aacacacttgttgcacacactcatagactacagatagatgatatctggtggagcataaggatcctagttgaggtctccaaacacatcactcgaagcatattcgacgatggcattgtccaagtccatgtaatcggtgtcggtcagaagcggaggattggtcgtgcttagttccattgtagccatgcttgagcaaccaactccatccttcaagttaggtggggtggtgaattgagcttcatatccctgtccttcagcattttttcccttaagagattgctggtacaatgacactaaatgacaaggaatgcgacactttttagtaggatggttaaagcatccacacttcttacacttctcttgcttggaagtgggggtgtctttcctcggagcctttgtattttgcttatccggacgcttgttgcgtttgcgcttctttgaattatcagagttcttgggatggtttttggggccatcccctttcttctcattcttcacagcatgatgtatttcataggagcagctccaacacgacgttgcttatgatttttcatcgtaagctcatcatgcttttctgcctgaagtagatcatgtatgagtttagagtaagtctgataattgcgaacacgatactgatgctgcaggaccctatcagatgggatcatagtttgaagtgtttttttcaatcttatccacatctgatggttccttgccgca

SEQ ID NO: 181233 - DNA, 494 bp, Zea Mays
attgattcagaaatctagagtttcatttttttatagtcaataggggtttattaggagagcataggtctccagccacttattatgtaggatataagagatggataagttaaggcaagaatagtttgggtaagaaagtttatagtgggaaagaactccgtgttgagcggcaatgcaactgaaggttgggtttgacctctttcctttcttgacgaggttgatcctttcttctccggtcttgagctcattgattcgaggtcagtgtatatcatcagagttacccgagtatggttaagatggatatgggtgagatagactagataagatctacttaatttattttagaatagatcatgcttgttacacttttatgagataagcaaattggtgggggtaagtatgctgattaggacaagatgagtctccaagagtaagatagaatcttctgagattggtcagatctattaggataggatagaatcttttcgagataagat

SEQ ID NO: 181234 - DNA, 647 bp, Zea Mays
gtggacccatccaaggtagaagctgtttcaaattggaagcaaccatccaacgtcagtgaagtacgaagctttctgggaatggcagggtattaccaccgctttatcaagggattctccagcatagcaaaacctatgaccgaactcctcaaaaaagacaataagtttgtgtggactccctaatgtgaggaaagtttccaaatcatcaaggagaagcttacaaccgcaccagtattgactctgccagatatacaccaggattttgtcatcttctgtgatgcttccaagcaaggcttagggtgtgtcttgatgcaaaatgataaagtcattgcttatgcatcccgcttactcaagccacacgagcagaactaccctacccacgatctggaattggcagccatagtacacgccctaaaaatatggaggcattatctgatcgggaacaaatgccacatcttcactgatcacaagagtctgaagtacatcttcacgcagccggacctcaacctccgtcaaagaagatggcttgaattgatcaaggattatgatctcgaaatccactaccaccccgggaaggccaacgtggtagcagacgccctcagccgaaaacctttcgggattaaaggaaccaactttctggaagattggaa

SEQ ID NO: 181235 - DNA, 571 bp, Zea Mays
tttcctggtttgcgcttcaattactgaaaagatcaggggctatctcagaagattacctagactccgactacaccccctcttggacggcgggttgatttttactttggccagggtctctttagtaaaacgtactcgcgaaggggtatcgcggcatgagagccgtccgatcaacaccggaagcgccagattagatcgccaggggtttgaattggtacgcgccgttggccttcggatccaagatccacgacccgcatttccccccgcgatgacccatcagatccgcccgatcgtatctcaacgacctgggtcccctgcttgaaccggcatgatagaatctaatctcagccactcgtcttctgatctacggtcacgatcgctacagctatgatttatccgttgatcaactctacgccatccaaattggatccgacggcgcagaagctgtctttcccccgtgatcccgatctactgtgcgccccaatctcagtcattggcccgacatccgacgaccagcatccgtcttccaccacgcgattcccaggtcagaacggtggcggccagtcccacggcg

SEQ ID NO: 181236 - DNA, 481 bp, Zea Mays
aaaagaccggaggtaataacacattagtcgtgggtccaagtgtgttgaatccaaggtctattctctacttatgcattaaatttaaaacaaccagcttaattaatttacatatcccattattaaccgacgttaaataatggctgcttatttattccattactcatgcatcactttcacagacgtgggtgatttgcaaattccatgcatatgcgaatgaataggaaggatcaagccaccattcatggaagttgatcccgtgaatggaatgtttaaagggtcataatagataggtctaatatgatttaaaaatttcacaaaagccgccacacatgtaagtttagaaaaatatgtggaagggttgatcttatattataccaactgttgaatttgaaatccatgaagccagttgacatacatccaactggaccttgttttgatcacatctgcaccgttccattgtgtatgcatcactttcacgcag

SEQ ID NO: 181237 - DNA, 596 bp, Zea Mays
aaaaaataatacaaaaaaattatttaaatacttcataatattcttaataacactgccaaaaattagctttaaattctatgtatatctatgctaaaatgttagatttatgatacgagtcggatgttttaggaacatccctaaacatcacccacaccaaccacgacctagagacaaacaccatgagttcatgagccacaaaccaccgaccttttacagctccccaaatccattacaagctgacgactggctgaaatctatggacaagatgctcaacactgctcgatgcaccgatagggagaaagtgctatatgcatcgggtcgcctcatttgccttgttgcagattggtgggacgcttattgcgtagcacatgctgccgctaacaccatcacttgagcagaattttcaaccaacttcaagaactaccacattcccgtccagctaatgaagatcaagaagaaagagtttctttccctcaaacagggagggatgtctatgagcaaatacagagacaaattcatccaactatccagatatgctcctgcaaaagttgatgataatgagaagaagtaggagttattcctagaaggacttgttg

SEQ ID NO: 181238 - DNA, 282 bp, Zea Mays
cgccaatcttcggccatgatgaggttgacgatgcggtggccttcggcgtcttgagttatttgtaaaccttctgggttgcggacagccagtgtgtcgatgacgtggtagaatacgtcggagggcaaggcctcgcctttggccgctgctttagccaacgcgtcagcctcttcgttcctggcgcggtcaacatgttgtagggtgaaacccttgaattgtctctcgagactgcggacggctgcgagatattgcatgagcgcatggtcttttgctgagtattccttt

SEQ ID NO: 181239 - DNA, 747 bp, Zea Mays
ccgagcaactctgcgaggcggaacgaacgaccagctctctgtcgagcaaccctaggaggcggagcgggcgaccaactctctaccgagcaaccccgcgaggaggagcgcacaactaactcactgtcgagcaacctgagatggagcgggcgaccaaccctccgacgagtaagcgtgcaagaggtgagggcctgagccactaagccacatcgcaacaagacgcatcaacatcaaaccatgtcttggacgtgggtacatagccgaaaggactccgtgatacatgacgacacgcccccgcgcatatccttaagtatgccctcgctgacttgtggggcccagtaaaccctagtcgtagggacctcagcacaggagtctatacaacgacccacatactaggaggggcgtgatggtacaccatacatccataccgggtgtatgccaacgcatgttggaaagtgacgtaatgacacgacgaaagatggagccgcaccaaccacgaccctgaaccccaccataagtctactctgtgggacccataaagcactacaacatcgacatcgaacacgctacagggacccatataccggacggatagagtagtacgtcataccaagagtacgatagtgcacgaccctacgaacaatgtgagaagggctacaccacccagtggcaacaagccgagcccccaacagaatacagagttcctactgtaaagtccactattgagctatgtcggcgtttcgagacagg

SEQ ID NO: 181240 - DNA, 456 bp, Zea Mays
ctaattggaggcagtagtggatgctttggcttcgtgatgacttaacggtgctaggggtgtgctcaatttatagtatcccagagcgatggctcccaatttggtcatggcgtgttggcggcggaaaagagggaagagcattggcgcaatagctgcgtgtctttcactgtggcaggcttaccggcgacgagccagcaatatagagcggcttgctgcgacgtggtgaagcttcaaggcacgtggcacccgatcggtaggcggccaactccggtgagcttatctgagccggccataaagcaagggggtacgacggccagcccctggtgtcatccgcggcgaatatctttttaccctaaagcgttatccgggcaccagtgagcacgaatcacctcgccgacacgaatccaggcgcgggggtcgtcagcggcaaggtgcactacaccagtgatctacttcagt

SEQ ID NO: 181241 - DNA, 617 bp, Zea Mays
acttcttcattttttggtctcttcttgagcatcgtgaggtgctttttcttttcttttttataataggttggtcagctatcttacgtccgccctttatccatacttcagagtaaaaatttaccgcttaacgaagatgcttcggctgaaggattcttaatgtcgtcggttgagataacaagttctggctgaacaacagcctttgcatggtcatagccgaccttctccaaaattgatacagccccgcgggcaccagcaaaagcacagaaatcccctcgatcgctgagtatctcatcaaaagcttcggtttccctgctgatcaactagataacgccatcggggtcaccgcggatgaacttctgctcggaagagtatgctcccacctttacaaaactgttctttagattcttggcgcattccaaggacatttcatagcatctctctttggagtcatggaactgttctttagattcttgtcgcattccaattttgcttaactcgtgctttgccattgcaacttcaaaattttcactcgtttctgcaatcttcttctttaaatcttcaacttcgcctttgtgagcttctgcttgtgcagtaagtttggcttcgctagatctcag

SEQ ID NO: 181242 - DNA, 769 bp, Zea Mays
gtccaccctgtggttgtccattcttcggtggagggggaggtccaagaggtggtccaatcagcccatcgcccatagaagtcttgccaggctccctcattcctccaactgtgttggacacagtattggccaacctgctttgatcctgggaaacctgagccaatgatttcatcgataaatccatcttggtctgcaggtattgcatcagcttgtcgtgttccatctgcctcttctccatttcagacaacttgacggacaacagactcagcccgtcgatcttcttggacagctcaacaagcgtggtcgtagaggcgtcccaggcctgctgaaacttctcggacatgcgcttctccacttcatccatcgcagtcatcagttgtcacgcttgcgtggactgcttgctcggcgccgtggcttccgaactggattgccgccgctggtccggcaagagcagactgcgatgaaccgcctctgataccaatttgtcacgacccggcgacgaacaccagctccgacgagaaggaagaggagaatagaaggaatcataagataagagttcgaggaagagcaggtatgtattctattattccataattccttctggaatacacaagctggctttatatatcagccgccgaccaacacagtacaggcccaaaagaattcaacaacctggcccactggcccagacttcactgcacaccacaacaacaattctcgctccgtctctacagggcctgcggtgatacctgtcaacctccggcgatctggg

SEQ ID NO: 181243 - DNA, 679 bp, Zea Mays
gtcttgactaggttgtgttatgtgcttctcttgtcttgctatctaggaaatgttttagttgttcaaacctttttttaaatatatataaaatgttgtttgtttcgctcatgaaaagacccccgcccaaacaaccttgagcttagcaagtgaaacctctttaaaaacaaaaaaaattcatgcttgagttggtatttcctagcccttgagtgttttatccttgaagttacacctgcacggcttatagacccccacagcttgaccgctagaccaacccaagtctccttgtgcacttgttgtgtcaaaaaaattctttggtgtctagttgcacaaaccctatcaaggctgtgtttctttccataaatctttgcccctaaaacttcatagcattcatgttgatcatcctagctgatcctgtttgccgatctctcttttcacctggatctagtactctttttccttgtgaatcatgttgtggctttatcatccgaatctccggatcccttattgatcctgccctattatctggttgtctgctataacctgttctcaagtatcggatattgatcttgcctaaatctctcgttctggtcattctcatacccccttctccgaggatcatgacgcttgttttatcaacttatctctaaacgacatatccatgtggattaatggatgttgc

SEQ ID NO: 181244 - DNA, 506 bp, Zea Mays
gaatagttccaccctctcggtcacctcagtatgtgactcgattcttccgggactgttatatctcaacggcgttctcgttgccccttatatcatgcaaaaccttctttcagttcgtcgattcaccaccgacaactcatgttccattgagtttgacccatttggtttatttgtgaaggatctggctaccagaacccttctcgcccgatgtgacagctcggggctgctgtatacggtccgccatccacctcctccgctggcgcatcctcgtcatctgctttggcttctaccaccacttggcatcgtcgtctcgggcaccctggacccgacgtcatgtccaagctctctagtcgtttagatatatcttgtagcaaggtccattttgatagtctttgccatgcttgtcagctaggtcgccatgctcgtcttcctttctctacttccacttctcgggtagatcaggcctttgatcttgtacactgtgatctttggacgtcgcccacacaaac

SEQ ID NO: 181245 - DNA, 822 bp, Zea Mays
tacctgaagtggcattttccgttttagatggcaggtgaaatcgtcgatgagaaattcttcggggggaaggctgaagagcttacggaatgcagaatttgtctgagatgagcgcaagtgcatctgaacattcagttatgcaagttaagtaaaagaatgcattgcacaagcattaaaagaaattcagaaaacttttcccaagatcaaattttggacaacccataccttcttgccaacttctttccccattttttccagataattcataacaacttcagtcccccgcgaattgttcaaaaagatccgcagatgcaatttgggctggtgcccttggggaaaccttccatcaagaggaacccacatgtcacccaaatctgacaaattgtttttcacaaagttcacttctgtttgaccgataggagtttcattgtttggtatatctgaatcatgcacaaccacgtccaatcttgctggcgggtcgtccatcgcatcaaattcaaatatttctgtaaagttgaaaaatcgaagaatcaggaaaatctcagaggtcaagatgatgaaggtgtttccagctctcctttttaacttgtgggattcaataaagttataatgtagaagcagcacttaccattccatttaggttcagaagtctggtatttgacggagctggttttcctctttccattgcatgtaaaaactacgtaaggatcaggaaccccaggtgtacctgcacttactacaccgcttccctcaataagtgcaatagtcaacaaccaaccgtctccatgagctttgaccccatgatcactacctaatgttgagaca

SEQ ID NO: 181246 - DNA, 614 bp, Zea Mays
gcaggtgcagctcgcctaggccgacggtcgcgtcgtcagtaagttgtttgattctcactttttctatgggtttttccttctttgtccctttttcttatcctgctcgtttctcatggtagccttagaagcaaaacttgagatgttgcgccaccgctcgggctagcttcttgattacgttggggtctgtggtgcctctttaatcgagtgcctggataacgccccgtgtcgcgtttaggacaatgatgactttggtgttcattgtggggctatggtggcgctgctcatggcaaaggtctgttctagctgtcgccttcaggatctcatcggtccccttcgtccctctcggatgaagggttggaggacctgcaggaaggttacgacaacgtagccagccacgtcgtgctcagggtgcctgctaatgacgttgttcgtgctgcacgctaaccacaatgtgctacaccttggcattgtcctcatggcaataataatatatatgaaaaagacttttgctttctgatttctagcgatgtggggccttcgaatcacttccctctactatctacatgggctcgtctgattacctctcctttttaagagcgcacgatagagagaga

SEQ ID NO: 181247 - DNA, 724 bp, Zea Mays
gggaaaaagacaacagcaagacattctgcctgctcacccaaggttaagaggcacaaagtgtagcagggggccaaatggctattcaatcaggaaaacaaaggaaatttaaggtactatttaacaatgtggtgtctgggagctttgtgatacgatgaagagttttttaagaacatagaagcgtacttgtcttggagggcggttgggagagcggagggcactggggcgaccgcgctgccgctgcctacagttactggggctaggtgccggggcagccgagcggggactgctgcttgctacagttgctagggccaggccgtggctggctgccgcggtcgcacgggaggaggagagtccactacggctagcaccgacgctgaggatgtcgagcgtggcgagggcgaccttcttgaccatgtcctgctcctcgtgtagtgcctggcctttcttcgccacagcatccctcacgtgctttagctccacgtcgatctcaccatcacaccggaaaaggaaaaaacaaagtatattggtgcaaagaacataataaaggtgcgctaagatacgcataatcgcacagtatgttctaggatcaatgcacttcaatagtcatgttaacgcatcaatgcacttcaatagtcatgttaacgatgggggaagtcatggaatgagaaacatacctttatcaacaggttcaatacaagtggaccaacaaattgagaagcatcat

SEQ ID NO: 181248 - DNA, 631 bp, Zea Mays
accaacagtcctgctcactacatcaaaaggtacatcattattttttctagactctgcagccctaggagcagcaactgggtaaatctgtggcatatctgagcaatgaagagaatgcgaattaatattagaattactaccttcattaagttgaaccatagaagccaagtaagaagaaggcccaccggtcctagaaaattcacctctcttttgtgcagtttgcttggcgttcagaataattgtgccttcagcctctgtccacttattatcataaacgaccccatgcgcaacagcagttggtgctgcaacattctccctaaaaactgaagacctattaacagcaactaagcatttttctagcgcatctgagcaatcaagagaagatgtattaatatgaggaataaaactttcagtactttgagccaaagaaccaaagtcagaaggcacaccggtttgacgaatatcacaattctgctgagtagcatgttggacattagaagaattatcaactttgctaccggacacatctttcatcacagtgtccctggtggtatcatcaaacttaggctggatatcatcgagcccatcaaaatcctcatccttggattcaaaatcatcatctttcttatcagaa

SEQ ID NO: 181249 - DNA, 626 bp, Zea Mays
ctcgctgaccatcggaggaactcgacacgactagcagaggcgggtggacggagattgtgtactaggttgtgcgttgtaactcctctttggttggtaataaggctaaagaggagcccctacgaaaacaagtagaccctcagttgcataatcattttccacctccagaattctctgtaatcccagttaccgagcaatacacatccacaaactcataggacatagggtattacgcactcgagcgacctgaacctgtataatccattatgttccgttgagccccgtacgaaccatcgagctacgatcaacctcgccgcgcacccaaaagcactacacggtacaccttgtagtgtgccgttggtaccaaacaccaacacatatatagtgttgtctcagtataacaagatatgatatagattgatagagagagatttgagaagaggattactagttaggatcaatcatgatctttaccatttaggatatttccttttgtctcacctcctcttcatgtgttccctctcaatcgataaatccattattcctacatcatctaacatggtaatcactatcacttctcggttgtcatctatgtagctgtcaccacccttggccgccgccaccacatc

SEQ ID NO: 181250 - DNA, 412 bp, Zea Mays
ctcccagtcaaaaagaacagatgcagcagttctctctaggtcttgcttcttagggctcttcaaatcatttccattaagttcagataagctcttcaaaaagtccactgtatctgttaatccttgaaggtccccatggagtatctcaatgtcttcaatacatctgtgaaatcaaatatgcaattccagttgcaaaatatttcactgcaaaacttgagatgtctgacaataacaagagaaggtactcacaatgctgcactttcctttgtagcaacattttgtgaggtcggaccgccaccagttttggtttcggacacagagtaccagtcaggaatgcctgcatctctcccaggaaccctttgaagtacatatcctgagaccatggcatcttgcaatcttcttgcaccactagcct

SEQ ID NO: 181251 - DNA, 560 bp, Zea Mays
cggggttctgcatcttctcccatataaagcttcaaaaggtgccatctttagactggactggtagctgttattataagaaaactctgccaaagaaagacacttgtcccaatcctttctgtagtgtagtgcacatgcccgcaacatgtcttccaaaatctggtttaccctttctgtttggccatctgtttggggatggtatgctgagcttcgtatgacatgggtcccaagtgattcctgcaattgttcccaaaatcgtgccacaaatggtgctcctctgtctgagactatagtccttggtatcccatgcaaacaaactatctggtcgatgtagatctctgcatacttctctgtcctgtgggtggtgtgtactggcaagaagtgagcggtcttggtcaacctgtccacaataaccccaatggaatcatggtgcctggaggtattgggcaatcccacgataaagtccatgcaaatgtcctcccatttccaagatggtatgggaaggggttgcaaagggcctgctgccttcaaatgactagcttttatcctctggcaagtgtcac

SEQ ID NO: 181252 - DNA, 620 bp, Zea Mays
aaagttgcctaagggtgcagccggataagcacaacaagtgcgttaatcgaagtcttttactaaaaagacactccgcgcaaaagtcgcctaagggtgcagccaggttagcacaacaagtgcgcgacacgcagtctctcactcaaagaaggccaacaggccacattacaatacaagttgcagttacatacactcagcgagggcaccacattctacatcggctcaaccttcgggatgatgcccgcctccctataattgaacaacattattttcaattcctcaccctcaaaaagattccttagatccccctcaccaatgctcgtcccaatcggcaaagatagtagctctcgtttaccaaaccgatctactcgaagacggtcccgctccatccccatctgatggctcctaccacttcgcgaaacctcgcccacgctatgcttcgacaccaccctttgtcgccggaacttggtcctcacactaggaagatcagacacctcgccaacctccacccgcgacgaggactccgtcgcggccacatctaacgcagcaaaataatccaagtcttcatccgaagactcttcggtccaggaaaacggactcccaaactcaccatcagacgaaaa

SEQ ID NO: 181253 - DNA, 681 bp, Zea Mays
gtcgagtgtcggttagactgttgttcagtaaatttagaggtgtcaggcacccaattctatggaaaatgtaaatttggtgcctcagatttggcgcctcaaatttggtacccaatttagactgttgttcagtaaattcagaggtgtgtgttttagattgtttttttgcaaaaaggtaaaattaaatggcttatgttctaggagaaataaacttactttgcaagaaataaattcagcaccaatccaaaaagaacaggtgaattggaagtaagcacaatctctaggtaaggtgtcatcttggttgtgatcgtgtgaatcatgcgaagcaagtaatcaagctttttatattaatgtagaactatagtctttaggatacaacctatgcaagtggtatctagaaccatagcttgttttcctacacttatttttttttgttgatttcttaatgcctcttttttatccatttctatccttactggatatgaaatccctatctccatagcccccttacttagttattgtcttgtggttgtaatgccaaccttaacaaggctcttatgtagagatgttgaatgtgtctctgcactctgttaatgactgctttccaaaataagttttggtgtgagtatacttgctgaccgtcttttcattcacttgtactgtacgactacaattgatcaatac

SEQ ID NO: 181254 - DNA, 385 bp, Zea Mays
tcctctttcgggtggcattccaggaaactcttccggaaatacatcctcaaactcttcgattacagacatgttttctgctgccaggttaaacatcattggatcgatggcgggcgactgggcttgacaggaaactgcttttccttggcgatcggtgagaaggacggtcttacttgcgcagctgatgatacccttgtgcttagttagccaatccattcctaggatcacatcaatccctttgggatggtaagacggttaagtccaccaggaacactaccccacttaagagaattctgacttgggagcacctgagttggcataggaggtctgatcccggggttcgggtgaccaaagggatggctaggggtgtagaggggatgccatgctt

SEQ ID NO: 181255 - DNA, 358 bp, Zea Mays
aaacaaccggggatcggtagccagtggtcgcacctcagtctcatctcgctcccggaagtgggcaggtgggatgggtggagcggaaaagggagcgggaggaggagcagtggaagctagagtggtggaggtggtaggtatggctgaggtggtgaatggcgcaggagtgactggagcgggcgaagtaggaggtggagtggtagcagtggcaggagtggtaggtgcggaggagcgaggccgagaggcgtgacgacgaactcgataagcaatctgatcggaagatatctgcagctgaccacctctctctgcctgctcagctgctgctgcttgagctgctcgggttgctctatccaaacgccgc

SEQ ID NO: 181256 - DNA, 768 bp, Zea Mays
gaaagatgcaaatattgctctatgtgatccttgtcgcattccaaaagctccaacaattttcaggcgcatacaatctcaatggttactttccatatcgcaaaggatttagtcattctagctaggttctacacttgtacactagccaataactttgctaggaagataaagcacacaatcaaggtaacacaatataaatgtggaagctaaaagtacgatagaaatagaaactccacttagcatgccgatatttttaccgatctatgaagaagcccacaagtttccccctaatccttgttggtgttctaagggaatgtccatgcgagggccaagcgcctgatcatgtaacttcgcggatagctccaagcattcttcatgtgaaagtggtactcctttgatgtgcattacaaataaatacctaggtagggatgaaaacgaccagaaacggtcagtaaacactaaaaccattgccattttcatatttttttatcagaaacaaagtcgaaaacggtaactctagaaacgatatcggtatttcggaaacatcgaaaacgaaaattcagtacggaaatgtcgggtaccaggaacagggtatccaaggcaaggcccataaacctctctctgtcccatttaccaaccaagtccccgccgaacaagtctgcgagatgaggcaaacgaccatatccccatggagcaagtctgcgaggcggagcgggcaaccaaaccccccgccaagcaagtctgcgaggcggagcggacgaccaagtcccc

SEQ ID NO: 181257 - DNA, 792 bp, Zea Mays
gactgtaacgtgacggagtgggtccagctggtctattgaagcttggtcccttgggtggaagcccgaaggatcgagctctctggtgacggtcttgctgctgagctcggaggacctggaatttcctcttgaggtgccctttttcttcctcttttgccctttccacttggatggctttgttggagaggtgcgagaagttgaggaattcttggctggcgaggatggtcttgagttctggtcttagcccttttagaaaacaggccatcttcctggtctcggtgctgacattgtcaggcgcgtaacgagccaactctgtgaacttgtgcacgtactcactgacagatgatccaccttgagttagttcccggaattcatcttccttgagttgaacgatcccctggggtacatggtgctcgtggaaagcagtttcaaattctgcccaggtagcatccctgacggcctcgctgaaggtatcccaccatgctagggccatcccagaaagttaatgagcggccaattgaacacgctgattttcgggacatccgatggcttccagtttcctcttgatcgtgcgcagccagccgtctgcatcgaggggattgctagacccagcgaacgtgggaggcttgagtctcagaaattctctcatcctgtcctgtggtgtcccaccacctgggcgctggttttccagacttctagtgaggacttcaatgagtcgggtctgattggctagaacttgggccaaatctagtggtagtttcagaggtgcggggaggtgggtctcactcccttctc

SEQ ID NO: 181258 - DNA, 1024 bp, Zea Mays
cttaacccgatcacttagatcgtttgagtgtttcttctcaatcaaaggacacaaagtccccgcaaggaccttcacgcaaattcagagtctcttgctagctctttacaagttgaaaatgagaatagaagtgaaaagaagctcaagaacacaaaaaccaaatgcaacaagctcaaattaaacactccataagacactactattttctagctcaatactagtgaatatggcagttgaggggagttttgagacttggagttgttgcaagcaatgaatatgactttggtgtagctcttgtatgtcttgaaagctagttagggtgtatttataactctaaccaccccacataggcgttggagagaactcagcgaaatcaacctaacaaatcaattcttagggcaccacttagttgaaagttgagacaaagaaacatatactgttggtcatggccgtgtgctccactgttgcagtcagatcatcgttgcaagagaactcaaaggctacagttggatctgattcgacaccggcaattggaggacgatatgctcccgcttcttgagggatcgcgccaccgaagtacaagatctctcgcatcagcttgctgtcacgaggcacttgcatgtcaagtctggacggtccattctgccgccactgcctctacttcctctaccaccaccgtcgccactgattcctctcccaccgacgccacctctgcttcctctcccaccaacgctgctctccactccaccgccaataagagcacgtagtcgaataaacgcaggaaacaactacgaagcgcgggaacgaatagaccggggaggaaatcttgtcacggaaaattgcgggatgctaggactcaaatacgggacgcgtgaatatttgggagaagataggaaaactgttggatgtggtatttctgatttctatggctaaaacgagttttggggtatgtttatgtcgctttttagacttgctctaagatagataagtctagtggagaaaaccaacgtggcacaagacggtcccc

SEQ ID NO: 181259 - DNA, 585 bp, Zea Mays
tcagatctgaatctgatggtggctattttatgcaagcgggatcggatcgggtccgtcagatcacatccaacggctacattgtgttcctccctagatctaatcttagccaagcatatccacatcaacggctccagatccctccctcacctccgtccggtccgagtacagcgacggacagcatcacagctgtgccatcaccaaagaaggtgaacctgagttcctgtgcctgaaaccctaatccactaggtgctacactatcatagggctagagtaaaaacggcgtagggcttactcatcgaagacggacgacgggtgagcacagtcgcggtgcatggagacacgactccggcgagagattcccgagcccccccccaggttcttagcccgaattgaggggtcctgcagcttcacgggttcccggtgaatgccctcgaccacacgtcgtggtcggattccctgcattgatggattccaccagcgacgcaatgggagatctcacggtgacgtctttcttgcggcagcgcagctcggtgtacagtagggcaggcgtttgtggatgtggggcgtgatagaggggaaggatag

SEQ ID NO: 181260 - DNA, 490 bp, Zea Mays
ggaacacggcgattctcgaagctccagtaacgtcaggtgggtcccgctatatctatactgttacgatcttcgtagcactccagttggatcaaaccagctattgatgtttatctgtgtcgaggtgctggggattttgtaggttggacggcgtcgaagcacatagtgatcaggcacggatgagatcgccacagataattcgtgttttaagatttgctggtttgagaagctcatgggttcatgttaattgttgtttccaggtaccaggtttgcttgatgagcaacgtgagggtgatgttggggagctctttagcctggctcaatggagtaattcactcttcccttgctttacctaatgttagtgttccgtatcagaccacaacttaatactgcaactattagttttcatctaacgtagcacattttccccttggaagcactctttcacattgctcggttccttgctgataacaattgtctgttacagatatcc

SEQ ID NO: 181261 - DNA, 549 bp, Zea Mays
caaagacacatctggttgattacctgtgggtgctgccagaccgtttggcactcgccatcgccgatgacatttgtcgagggggtggcatcgcccctggctggatggtctctcattttgatgagatcgacgacgacgttatcgtagagggctacgctgccggccggagcgatgaggaggtagacattatcgaagagtaggtccgcccccatgctcagtcgatcgcaagcctagttgatgtcaggtccctcctgatcggccctttgaccctagaacttcccgttggtggtccaactgctcctgtttagtcgatgcccctaggattcatgtattgaacctctccatggtgcattttgtgtatttgaaaacacatgtttccgtgtggacaatagtttcgatgcacatttccaactttgattgattttgggcaaacttacacgattgcgacttgcttagacggggaagtttctttccaaactccattgctgggaaaccctttcgtcttgtgcctgtgcctatgcctccctatccattgactcacgcatgtttggg

SEQ ID NO: 181262 - DNA, 506 bp, Zea Mays
gaattcttggcccattggccactgtcgtttcccatagggagtttcaagtgcacgaatatatagcctgtgtgtgtgcagcagctctgcctctgctcagctggacgactgcatctgtgcttgaggccttgagacattgtagctttgtttcctgtgtgactctgtagtgtgcatgtgcctcatggagctagggaccctaataagtaaagctgttggcctggatgctggactactgttaacctcgcattggccgtgggcgcactatgtagtgcgctgtttttttttccagcgcttgtgtgctgtcactactgtgtgcatgtagttgttccgactactgtccggctaccgtctgttttcggtgaatattcatttgtattcgttcgttttcgtatacccatatattccgtaaccgttttcgcaaccgccttttccgctcccgctcccgttttcggtaaaaaaatggtaacgaaaatgggagaggtagtttcctgcccgttcccgttcgtttt

SEQ ID NO: 181263 - DNA, 390 bp, Zea Mays
gtatccttgaaacctcttttttattgatgacatatttccactttacagagtacatcgtgatcccagcagttttgaggtacagctagggataaaactttctgaggtgttctatgttccaggagttcccaacttctgtgccatccatctgagtgaggcgatacgatccgggccgagtgatttctgctaccacgaagggtccttcccataagggtgataacttgtgtcgtccctcccccgttagaattcggcggaggacgagatctcctactgagaaggatcgttgtcgcacagctttgtcgtgatagcgccttagagtctgctggtaccttgctgattggattactgcgtttagccgttcttcctcaagtacatctatgccctccagcctgg

SEQ ID NO: 181264 - DNA, 336 bp, Zea Mays
ctttgagcaccttctctggtgagggcagcagtcgaccattctccattgctggaagagcaggaggtagcactggtggggcgcctttgtatggtttgaggagaccaacgtgaaagacgtcatggatgcgtgctcccgttgggagttccaggcggtaggcggtcatgtcgattctttctgtgacacagaagggtccagcatagcgaggtcccaacttgcctttgggtcggcgcacctgggactgagcttgacggttgagtagacggagccaaacccagtcatcaactgagaactccaagtctcgatgatgtgcatcatagaatcgccgagcatgttctt

SEQ ID NO: 181265 - DNA, 585 bp, Zea Mays
agttagaataaaataagctacctatgatgtgctgacgcctgtagcagctgatgtccattttgagcttcgggaatccaacactcttagacagggtgcatataattttagcactggtgcggtcgcggatgcatcccacaacttcttcatcgacccctccaaagagcattgaccccgactggtaccataggagattgcaaattctttcagctctgtatgtcctcttcggagagctgttggccgcacaagtgtcgtatgtcgaaattcactccttccgaagaggtttcttcaatcttctttcgcttgtctgaaaattctacggccacctgcttctccgcaaccacgtatgatataagtctgtcaatttcggacagagtggttgtgagatttttgtcttcagctacaacggtagcttcggcatcagtcggtttagcagctttgtctgtcgaagctaggggttaggtttgctcaatggcttgcagtatattcatcatgcgttgtttcttctggcccccgtctctcccattagcagccgaagaaatttcctttttctataagaggctcgtcagttccaatcccagaggactt

SEQ ID NO: 181266 - DNA, 752 bp, Zea Mays
atttcaagttttgtctattcacccccttctaggcaactttcaccaacgatggtatgattcctacgtttcacatcacaaccccattatgttggggcgagtagggcatcgtcaggtgtcacttgatgctgagctcgctgcagtatttgctgaagttgttcaacatgaactccccgtcgcggtcggtgcgcaacacacggagtctttccccccactccgcctcagcacgagcttggacgcacttgatggcatctgtcgcctccccctttgcagaaatcatgataagccacattagcagctcatgtcatctacgagcagtaggaatgacaatttctcacctggtgtgggtggcgtgatcggtccacacacatcgctgtggacaagctccaggggcttggtggtgcggtacatcccctcagctaggaatgacgtgcgtcgttgcttgccgatgagacaaccatcgcaaagcttgttgacggtgttgatgaaggggagtccttggatcatctcttctttcgccagcctctgaaggaccggaagttgagatgcccataacgggcatgcaaatgccaagacgcctgttctgcttttgctgctagggacacgagatgctccaccctgatctctagaatgtacagacgactggacgaacgttgtaccttcctcaagagctggccacgatcgctgtaaatgcgcaggggtccctcttgatgacaatgccacagccgtcctcatccaactgaccaagacttatt

SEQ ID NO: 181267 - DNA, 520 bp, Zea Mays
tagaaatccaaagtgacttaatgtctacatgtaatgatctcgacttctgaggttgtatgagtgggtagtagggcgagagggagccatactggcgcacggctgagacagaatgtggcaaggagcaatactgttcttagattgatctttgctaatcctcctaggtacaaactacggactttatatagtctagtacaggcgcacataaactgcagccgcccctatttattctctaacaaactcctactctctctccttttgatatctaatctaacaaacttatccttatccctctaatcttgatctcctggcgtggcctggcctatgggcagcttgggccgtctttcatatgttttacccaccataacatctctctcctcctccgagaacagctcgtcctcgagctgaaaatggggtaggcagacgtgaactgttgcaatggctcccaactagcttctgtcggctgtgttccactccattgtacctgaacatgccagacacctcgttgtatttttgctttgag

SEQ ID NO: 181268 - DNA, 1323 bp, Zea Mays
gctctgcttgctgaggttgggctgctgaaagagaggggtttgactgcagaggttgtggttgccgacttcattttcaagaacatttagccactgaaagatagagcataccccacatatctgtatcgaggcctggctaattcaactggggtaatcaacagaagaattcctgctatggacttagtgagtcggctcaagatgatactcagaggtaaggtgtcgaacatcggcgctcctgtcgcatattcggcctggaatctgcctccttccaaggcctttaccagttttgtgtcaaatcctcctgctggtgatagcggtttgggccttagagtgcgaccctctcccaaagaagttagtgctttggttgcctcacttgaagaaattcctgacgacgagagacaggttcattttgaggtgcctttgaatctgagtgatgcagagataagtgccatgctggatatgttagctgaagattcttctgatgcagcccctactgaaacactggtggtagcgcccatcccagaggctatcaaagctttggatattcagaagtctaactgtgttcgcccgaagcgttctcgccgagctaatcagcctacttctcctgctgaggggaagaaaaagaagaagagacgtcttcgtcgagtgtctagcttggatcaggatgctggtccttctgttcctgctgctgaggaagtgccggtgcctgcatttgctgaagctgaccccaatgggtgtgacccaactgctgtggaacccaatgggtgtgacctagatgatattgaacccaatgggtgtgatctggccaaagctgaccccaatgggtgtactgtccgcgttgttgataaagatgaggaaaaggaggatgaaatccctctaactcggaagaacagccgacgctacattgccagcggtgaaagtagtggtgttccttctccagccatgtctgctctcgttggtcttcaagaattgtctctggccatctttgatcagactcttgaatatatggtcccagaagatctattgtcagagccggcagatggtggcataatggatgcttgtgctgatatgcctgatgctgggttggggttatcccgagcagcgtcccgtacctcattgaccttggagcgcagtcttaagggtcgggagactgatctggattgtactattcccatggaagtggttgaaggtccttcagccttagaggtggctgttacggtcttacggaaggctcggcccttaaggatggcgctagcgcttacccagcccccgaggatgttactggagatgatccagctcggatgggtagcgcgaactatgacccag

SEQ ID NO: 181269 - DNA, 782 bp, Zea Mays
atcagcgcctcatcccatatgacaagagaagtacgctgtataagtttagacaacatggtacctctcttgacaccacatacacctctctcatctagatcgaagggtattttgaaacgtgaatgagcagtacggccttttggtaataggagcgaagccacgccagaggaggcaacagcaagcacatttttttgccgggacctcaaatgtgtgagtatagcgttccacaaaaaagttttacccatcccaccatgcccacatacgaaaaatatgcccggcgagctggagagcgcagattcagtcagcttttcgaaaatgagccgttggtcagcattcaactgcgagacagcagcggcagcatggtcacgcaatagcaatggttcagacctcagttcgtcgtttatcagtcggttgccaaacatttcgtcaccacaggccgataagattggcaggtcataatcagctatgttggcaccactgttagcaaacgtgtccgctagtttcctcgaaagcaatgtaaggagttgctcatgtggagctgtgtagcatggattgccaaaggcctctctaagtccacagtgtatgtcatcggtgaagtagatccaatatttgtcaagtaaagcacgaacattgcaaacaggacagtgaacgacaatggtaacgaacagttgctgaagctgaaacgccgaggcagagactattgcctcatcaaatagaaggttccactcgttgtcaccttcgagcaaaccacgtgcttcgcacgcctctctgaacgtatcgtacac

SEQ ID NO: 181270 - DNA, 519 bp, Zea Mays
gtaatattaccttgagtgtgttacaacaggtgtgcttgtgtgtcgagaagaaagagggactgcccatttatagctcaagggttggaccttacaaggagatctgttttctacaagagagagagagagagagagagagagagtgatcggctcctccgggtttgttgtgtgggtcctccatagggtcgtgtgtagccgtactcctattatggcgtatcatctcactcgttcgtcatacggatccctatagccagtccatcgctgacatcttcgtagtagtacgcggtgtgccctatgggtcagttcaatggtgcggtcgtgcgtgtcgtggctttgtctgttgtcacgaacctgcgtcacccaccggcgtgcgtaggcatacacctagtatggtgtatctgttgtgttcttttgggtatgcgggtcactgtagagactctagcgttgaggccctacgaccggggttgactggcccatgtccgtgggggcttacttgaggcaatacgtgatggcatatcgtcg

SEQ ID NO: 181271 - DNA, 657 bp, Zea Mays
catgtggggccaggggaccgggtctccatctccgtcgaaaccgcgccacgcgtggctgtccgcccctgacgtgtgggcccgtttagtcagctccatcctcaacggaagctccttgcatggcgggtaacgtcgcacctcccccctcccttcgggttagctggaacgtgccaccaaccccgcgtgcccagaggctaaatacggacccgtggccgcattgccctgttatttcccatcgcacgatctcgccacaccgctcgcaccacaattcgccgccgctatcgtgacgaagggagcgccgcggcgtggacaaccttagttggccgtcgattcgacccgtgtgtgggactgtgtgaaggcgcgggtatccgtggtggtgtgggagtgaatccaggggcgcacaaagaccagaacctctacgattgctcgtcggagtccgtaagatccgccatgcggccatcatccgtggctagctatctctgtaaccctccgtctacggtacgtgttcccattcggtccctattcatcgcctctgtataaatttggggcttgcgttggatttcaccaacggtgtgcctcgatcactcagcgccgggctcgtgccgccgcgtagggcgcgctccgccaccgtctcagaccgcggagggggaatgaaggcag

SEQ ID NO: 181272 - DNA, 841 bp, Zea Mays
ctcgccgccacgcactccccgaccgcgtcgctcgcccatgcccgagtctagtggttgcctgctcacttcgcctccctagtagatcaagtgccacgtcctttcctattcccctctcatttccactaccaccggtagtttcttatcgccattaatggcagcgagtttgtcaccgtccgctcctgcgcatctattagctttcagtttgtgtaattaggctttaattctcctcctctcctctcctcttctatataaaaggcacagcagctcatcctcctttttccgacatcaacaatttttcgtctgtcattctctgctcgtgcagctcttatccatcatcggtggaaattaccctgggattctccacgctagagcttctccccacgcccatctctcgctctcgccctctcccgtgcttgcctctactcgcagctccaagccgccgcgccattgccgtcgttcgccatactcgaagtcgttgtcgaacccgtgctgctaccgcgtatgtgctcccttcacgcaaaaccatcatcgcttcgtgccacaactgtcacaacctcgccagcgtccacgtctctcgcctacaaccggagttctgccttgcaccgttggtgtcctcgtcgtgctcgtcgagtcccgcatcgaggctttgctcctccgccacgatgcttgctgctcaccgttcgttgacaccagagttcgttgacctttctgttccacgatgccacgcaacagctatcattcttcgccgtcgaagcccgcgacattgttgaagtttagttccctgcacgtcgcagtttcccgtcgcgccgtgaagtcgctagtgcgtgaaccgctgcccaag

SEQ ID NO: 181273 - DNA, 736 bp, Zea Mays
agggggatagcgtttcccgctaatctcatagtaatggatacttagggaatagatgtcatcctagggataaattggctagacaagcatcaggcagttatcagttgtgataagaggacaatcaagttgatgtctccactaggagaggaagtggtgaccgagttagtctcgcctgagccgaagaaaggaagttgttatcagatagctgttgatagcagtgaagtagacccactagagatcatcaaggttatgtccgagttcctagatgtgttcccaaaggacctaccaggtatgccaccaaagcggaaagttgagtttgctatagagcttcttcctggaaccgcccccatctctaagagagcttatagagtatctggaccagagttggttgagcttaagaagcagatcgacgagctatcagagaaaggttacatccggccaagcacctcgccttgggccgcccctgtcctattcgtggagaagaaagatggcaccagaaggatgtgtatcgattatcgagctctgaatgaggtcacaatcaagaacaagtaccccttgcccagaatagaagatctgttcgaccagttaagaggagccagtatgttctccaagatagatctgaggtcaggttatcatcagctcaggattcgaccttcagacattccgaagacgacattcattaccaagtatgggttgtatgagttcactgtgatgtcttttggtttgacaaatgcaccag

SEQ ID NO: 181274 - DNA, 655 bp, Zea Mays
ggttttcatatagctgatttatgcaaagcatttgataaaatgcgtcgatacagtttaaaaatgaacccgcgtaaatttgcctttgtagtgtcggctggtaagttcttaggatttatcattcatgaacatggtatagagatagatctcgaccgaattaagtttatttgaaatgtgggagctccaacctataagcttgagatgcagaagtttttcggcaaggtaaattatttacgaaggtttatttctaacttagccgggaagattgattccttcactcctatcctttggcttaaaaatgatgctaaattcacatagggggtagaacagcaggaagcatttgatcttattagaaaatatttatctttggcgctagtattgaaagaaccacacgtaggagtaccattcaggttatacgttgcagtcaaagatagttattggagttgttctgacaaaggagaccaatggaaaagaacacgtggtaacctacttaagccgaatgttggtagctgctgaaacaagttacacctgcattgagaagttatgcttatgcctgttttatgtatgcaccaagtgtaggtgttatttgttgtctagtcattgcatcgtttctggtcaaatccatgtgatcaattacatgtttcaaaacccaatcatg

SEQ ID NO: 181275 - DNA, 416 bp, Zea Mays
cacaagcggtttgcagaggtgaggtttttaggttgcagctatcctactgacaagatggcttcttcatctaatccgtggcaccgacgtttgaaacgcatgtacgaggatgaacaagtgctacacatgcttcatgcatctaccgttgcagacggggaagaaaagccacatgtgcatagaggatcggttccaggtagacgtattattcatcgggataggtcttcaggttatgctaggcttgtggaagactactttgcagacatccctgtgtacaatgacgacattttcagacgacggtagtatcctggttaccattgtttcattttcgtggcaatatgatatgtaatgaagtgttctttttcagattccggatgacgaaatccatgttcgaacacataacagaagctctacaagtggtg

SEQ ID NO: 181276 - DNA, 329 bp, Zea Mays
attagggttagggtttcccattccaactgaaagattagctctcaaaccagaggcatgccaaaaacagtccaacagatccttaaccatgagaaggtcattccttgagggtctcaaaaaaagaaccacatcatctatatatagggagatctgatcgaggttatgaccgctagcaagctgtagatgctatccaactaaatacaatgctatgctacataatgcttaccacatatctgagcaacgtgatgcattggcggctagaactctaattttttctgaacatgaaatagaactgcatgtcattgcattaatcaaaaactccacaacctaag

SEQ ID NO: 181277 - DNA, 754 bp, Zea Mays
ggattagtagttttgtgagacaaagttaaatagaggcaacacaggagaattgggacagggtgcacggttccacacatattcttatgcttgtgtgatggcttgattctttcctctgaaagtaattcttaagctatgatttattttctgcaggtccagtttttcgcctctgttttatgcacttaatgaataaactagcctttcatgttttgtccttcagtgtaacttgattttgttacctattgctttcactttcaatgattttggtttattctgttatgctgttatcatgtggcattttttcatctcatcaatatcacaaattctatcctcttcataatgttgctagctcttaggagatcctaaatgaatgtatatctgatctcggtcatgcagatgcatcattttagtggttgttggtaatccgatctgtgatattatcgaacacattgatttaaaaactcggccggagaggaaaagaccgccctcctggtcttaaccatcctacaaaaagatttaaaagttctgatgaaaataaaaacaacccaattaaagtggaatccagattcaagttctcaatttatggagagcaatgtaaattttatgcacacgttctttatttggacaatcttgaaaccacaaaggattaacctcattctatttttgttgttgttattgatgtgatcattgaaagagaaatcgtgtcagtattgcagtcatgacataagaagccacgatgaaacttttaacagacaaa

SEQ ID NO: 181278 - DNA, 738 bp, Zea Mays
gttatttccaattaaagtcagggtctcttttgcaagtctggctcagtgaaggggtatgcttacatctggaccattggatcagaaacacgtggcccagattagatcagagaagttgcatgtaatgaagccaatccagaccgttggcgcatggatccacggtcaatgctttacgcgaccatgatctaatcccatacgcccgatctggaatcaacggttgtcattggatttgaccaaatcgcctccagcaccaaatctccaccgtcgttttgccgatcaactatcttcgttcgtcacccaagcccgcgttcgtcaacattgcggcggtctcccgccggtgtatgaccacccgccgagccagaactcctatcatacaactacacggtcctacacggagtagacacgaaagtgaaccttatggatagattcatatcgacgattgcgccacatagggcactgtccaacgatccctgcggctgggcaacacggaagatgtttcggcgaggagtctgtcatgttctgcgttgtaactgcgcttgatgtcgtcaccaacaccatccagaccatcccagtgaaccatgacgttgtccatcgggtcccgacgaacggcgggagcacgggccggccatggcagatgtttggccagtccccccccccctcgcgcaagagctggtgcttactttctgcatggcgacgatagtgatggattcgactttggacgccataaataggggcacaggg

SEQ ID NO: 181279 - DNA, 331 bp, Zea Mays
gcgatgggaagaagaacgtgtcgttaccgttgatctcaggatgatcggtccggattaggttagaataccacttgattggtggccgtcgatctccctgcgatcggctcggatcacatggccgaggtaacgtttcactcggtctcatcctatgcgtaggatctggatcgtgtggttaatcgcgtgcgccagtttataagcgcccaaatccattctgcaccgttggatctaatctgtgcggttcgcattcacctataccccttcggtcgggatcttttgctaaagagccccagctcttttgtgaatcaacccgccgtccatatgggggttagcc

SEQ ID NO: 181280 - DNA, 1542 bp, Zea Mays
atccttttcaaaagtcctgtcgagcacggcactgtacaggctatagatgccgagataagatcgcatacaagttgacttgacccgctgcctggaaaacgataagcttcgaacgaatcatgcccacacaacacattccgcaagattgattgataatcacaaagaaccaaacggggatttggaaatgaaaatccaacactggtagaccattcaatcatctgaattttgtcaccgcaggacacaggtggaacatcggccgggaatatctctgtccggtttcgctgagagatactctaggattccgaggtttgacacgtcgcaacaaccttgtccagatcaaacaacgacggcggtgcgctaatagactaacgggatggaagcagaaaagtgacggcaagtaaatgacgagtttgacggactcacggtctcctcttcaccggcggtcaagctaagcctagtgctattctgtggatgtaacggtgctgtaaaagggtttataaaccccataggaggtcagccagctgagtatccagtttaaagttcagagttgaaactcacagcaccaagcaaaaaggaagcagatcaagggtagccgagcgagcagaggtaccccggtctctctttctccttccgtacataattatccaattcagtttgttacttgttaagagaattcgatagtaagtttgtagtaagcttggtcactccttgaactcaacgtagtactttctccgtaatacgccgccaagagatcattctttattttttgcaggttgtcaattacgtgccttaatatgagtcattggaagcagccgtcgaaactcgccatgcttgtagtactgctgctgctgctatgtcatgcagtggacaaagtccattgctcgacgcaccataacaacagccaagattttcattccctgcttgagtttcacaagggcatcaccagtgatccgaacgaagccttgagcaattggaaccccagcatccacttctgccattggcatggtgtgaactgcagtttcactcgaccatatcgagtcacggagctcaatctcaccggccaaaacttggctggccaaatcagctcctctcttggaaacctgaccttccttcatacccttgatcttagctacaatagcttcagtggccccctacctcttcttaacaagctccgaaacctggacgtactctttctgggaagcaaccatttgggggatgttattcccgattggcttacaaactcttccaacttagttgatctagatctctctgaaaacaatctcaccggccatattccttcaaacataggcttcctaacgaagctagaaggtatagccctttacaataataatctcaccggtgtcatcccaccaaccttgggaaacatctccacactagaggtagttgatttttcagcgaatcaactaagcggaagcattcctaataaagtttggcaaatctcaaacataacaatgttaaatctaggacaaaataacctatcaggtggaatcccagatactctctctaacttctcttctcttacag

SEQ ID NO: 181281 - DNA, 829 bp, Zea Mays
gaggtagtccatgaacacactattcatcaagtacataaagaaagctggtgcgtttgttaatccaaatgacataaacgtgtattcgtatagcccatacttggtgataaatgccattttcggtatatctgaaggtcggatcatgagctgatggtatctgacctcagatctatctttgagaacactctggctcctctcaactgatcgaacagatcttctattcttggcaagggatacttgttcttgatggtgacttcattcaaagctcggtaatcaatgcacatcctctttgtcccatctttcttctccacaaacaaaactggagcggcccaagtcttctccactagcctttctctaacacctcgtcgatctgcttcttgagttctactagttctggtctagacactctgtaggctctcttcgaaataggggcagttctaggttcaaactctatggcaaactcaactttatgttcgggtggcatgcctcgtaattcctcagggaacacatcggggaactccaacaccactctaatagcctccagcaggttggcctccttaccatctacagacatatggtgacatgctccttcttccagatcaggcatcaacagttcagttactacttttttctcagatggggacactaactttactgtcctcttgtcacagctgatggtttcttggattctgtgcagctaattcatccctaggatgacatctaaccccctgagtacccattactactaggttagcgagaaagtctatcccccttatttcaatccttagattcgggcacatcttatcggattgaacttttcccccaactgaat

SEQ ID NO: 181282 - DNA, 941 bp, Zea Mays
gaagggaacgaacgacattgtttatggatcgtataatgcgttcagctttgccattctgggcggaggtgtaggggcatgacatatgaaaggtgaatgtcgtgcgaggagaaaaatgtgtaggcatgtaggttgtcgaactcacgaccgttgtcgcactgaataccctggatggtgatctcgaactgggtgcgtacataggcaaaagaaagtagtgagggcagaaaaggtgtcggatttgaggcgcaaagggaatgtccacagaaaatgggagtaatcgtctaaaatggcaagatagtatttatgactagagacactagtcaaaggggaggtctacaaatcacaatgtattaactgaaaaattttagtagccctggaggtggatgtatgaacaggaagacgaacatgatgtcctaattgacaagcatgacataaaggagcagtggcactcttattacaagaaatgattgacgactcggctaggtgggataagacagcgtgaccagggtgcccaagacgctggtgccacagagacatagtagattttgccgaagcatgaagggtggtagccgggagcggaagggggtatagggccaagtgctatcacatctgaggatctcgcgccgagtaggaagatccttcacagagcaaccaagtgggtcaaattcaacagaacaattgttatcggtggtgaattgacgaacataaatcaaatccttaatacaggatggtgagacaaggacattattaagggatagattatgtggaaggtaagcggtgccagtggaagtgacaggaatgagatgaccattaccgacaacaatatgtgaaggaatatgacgagaaggaggggttcgagagatgataccggcgtcagagatcatgtggctagtggcaccagtgtcgaagtgccactcatgctgaacaggttgttgaagagcaat

SEQ ID NO: 181283 - DNA, 615 bp, Zea Mays
ggcaaacccacaataaaatccatgctgaggtcctcccatttacaagatggtatgggaagaggctgtaaggtatccgctaccttcaaatggctagccttgattctttggcaagtatcgcattcagatacatacttagcaatttccctcttcattctggtccaccaatacaaagatctgagatcatgatacatcttgttactgccggggtgcatggaaaatttggaaagatgagtttcatacaatattttctacctgagttcgggattattaggaacaaccaatcggtcttcaaaccatagaactcccttgctgtcctgacgaaagaatttgtacttatccaccttttgttcgagcatatccttaatgacttgaacacccttgtcacccatttgtgccatgactatttgctcatgtagagtgggctctactgaaatataactcaaggtacctgaggaaacaacttccaggttcagcttacacaactcgtcacatagagtgggaccttggagtccatagttacacagttgcactgggcctttcgacttaaggcatctgccacaacattggccttgcccggatggtaatgcacttctaaatcatattctttgatcaatt

SEQ ID NO: 181284 - DNA, 651 bp, Zea Mays
ggtttgtaatgtgtttataatgacattttatctcaagtgttatgttctgcgcataaataagaagtatgtatgttttttgtagtaaggattgattgtgagagagtgtgttgcaagaaatggattagtgcgcatataggagatgaatgagtgtgatgaaatggtgacatgccttcgtagtcctcatgtcgtctgtttggtgacttagccgaaagtcgtaaagaaatgtcgcttacctatgttttattattgttactctacgactctgtataaattgccatgtgaagtatgattgaattagtctatgtttgcgctgtgtggtgtagtggtggtatgaaaaatgggttaggaatccatcggctaaatgccaagttcggttagagttgttttgttacttgggagtgtgtggtgaagtgatggcatgactacgtagccgtcacgtcatctattgtgtgactatgcttgagtgtgtcttgatataagttagagtaagtcaagtccctaaaacacgacgattcttgaattaaaaaggagctgaaaattattagtgctgttttggactgcacccagtgatttcctcgtgttgtatgtttgatggactaaattatgttttctgtagaaaagccatgtaataaagttgtagaaaagtttatt

SEQ ID NO: 181285 - DNA, 568 bp, Zea Mays
aaattactcacaagttttatattcaaatgataattaaattccaacccctaattagcccaaaacagtccacaagataaaccctgcaatctgtttttggacagcagcatacccggatttaaacagcgatatcccctaaaatataactccgaatcgagcgcataagtactcgttggaaaggtatgacaaagctctacatcattatcatactgattatcactaattaccctcgaaaaatccccagaaactgctaatactactgctgttcgcccacctgcaaatctgttttttttgacagcaacatacccggattcaaatagcgatatctcctaaaatataactccgaattgagcgcataagtactcgttgaaaaggtatgacaaagctctacatcattatcatactgattatcactaattacccacgaaaaatccccagaaactgctaatactactattgttcgcccacctgcaaatctgttttttttgacagcatcatacccggattcaaacaacgatatcttctaaaatataactccgaatcaagcgcataagtactcgttggaaaggta

SEQ ID NO: 181286 - DNA, 455 bp, Zea Mays
cgggttggacacaaactcagaaaaatgactctacatcaataaaatagtacaatgagcacataacatgtaacaattcagcaaaacagaactcaaatagtcgtaacttaccagcggaggaagattccaagaagaataagaccaaggagctccacattcacaacaacacctctcagcatcatcacaacccagttcaaaacattttcctctgatatatgcatgtttatcactcgggaaggatctcttaccccagtatacaaataggcaggatgaactctatccttgagaggttgaatattcttgaaaacaaaatcaatgaccacaccttcagcagtcaaacctctatctttcaaaccagcgactttggctaacaatattttggcttcaacaacctcagagtcggttgaggcatatatccaactcgacacacgggcatcgggctgccttccagagcgaac

SEQ ID NO: 181287 - DNA, 526 bp, Zea Mays
gtcccgccttaggctggagcaatcgcctcgacgaggcgtcgttagttgttggtgaagacgtggtgctctggctagcccccagctctcgatgtcgtggtacaagacctttggcttgctgtcgcatggtgagactgagtaggcttcgggtttcttggtgggtcccccgttcactcggaatttttgccctagggagtctgttcgggagtgttgcagcaagcgcgatgttctgatgtgcccgagggacttgtggtggtccaaccttgtcgtagatcagaggatgtggggtgcgagttgctttgatgcgcatttgcagaacgcctcatcgtagattctctatttgccatcgaggcaacactcgctccccaacgggaggaccccggctgccccaagcaggaccctgccctggtggcgattctcggcactacgggtcgagttgatatgggtctgatgtagcggcgcgcaccatggcatcgtcgagggtctcctcaaggctccccgagagcaaggaggggtcccaggttgacaa

SEQ ID NO: 181288 - DNA, 469 bp, Zea Mays
tcgagcctctagacagcttccccgtggagccgtgaagcttctccaagcaaggatcgagaccctgcctcactagaacagtgaaatcaccatcgccggacttcagccgcccgccaccgcgcgtagtccaggctaccaggtgaaccattcttcgattccttgcacccataacctccctgacctcccgtgaagctccccgactcactggtgtgcgctatgtcatcgtggttaggccgggatcctcgcagccgacgaactcccccgcctgcgcacgtggaccagccaacttcgatcatccctgacgacgattcacatacctacgtgaccgccgcgacctcccctatgtcgtcgaccaccttgccagagctatctcgccaccgataagaccgctgcccttttctccaccgtgggtactattccattaggggaaggaccgcgggttagattagggtagaacttaaggggttattcg

SEQ ID NO: 181289 - DNA, 579 bp, Zea Mays
ccttcctcctctgcgcctgctctcagacatctatagaaagcacacatatatcagatctaactccgcagtctttcagcataagaaaagatatatggaaatcttcatagcactgaacaattgatcatcttcactgactcccagcacagctaacacaacttctaagataaagaggaaagtggaaataaatgggctgcccaactaaataactgactttattaataactacaccaagttgcaggggatgcccacaccttgatgacaatcattacaaagatccaacttcattacaagtttatcacgacaagcaccaagacatatgacaagcaaactaactctaactaagactaactaggactaagacactgaattaagcattattacagactccgactctgtcgatctatggattcaagtccatctgggtcctgcagtcaggggtaccataatcaaagcgaccacgggacgacgaacggtaacggtgctgaatcccgacaggggcgggagaaccaccatccagatagtggcacgctgcatgctcagcacgcaattccgccacttccgccaagcgagagggcaaaa

SEQ ID NO: 181290 - DNA, 588 bp, Zea Mays
tgaagttttctgagttttctgttttgatcaccacatcatcgacataagcttctacccgcttgccccagtgatcggctaagcatgtttgaatagctctctggtaagtcgctccagcgttcttgaggccgaatggcatggaggtatagcagaaagctccaaacagggtaatgaatgttgttttttcctcatcttcttttgccaggctgatctgatggtatcctgagtagcagtctaggatggacaacatagaacatccggcagtcgaatctaccacctgatctattctaggaagtccgaagggattctttggacagtgtttgttgagatctgtatagttgacgcatatgcgccaatccactttatttttttgagtacaagaacaggatttgctaaccactcaggatgcaacacttctctaatgaaccctgctgcaactaagcgagctagctcgacgcgaatagcttctctcttgtcaggtgtgaaacgatgcaatttttgtcggatcggccttgcttggggataaaccttcagtttgtgcttggccagttctctcgggactcccggcatatccgcaggctgccatgcgaa

SEQ ID NO: 181291 - DNA, 1101 bp, Zea Mays
gactaattatgttgcttaggcaattggctttggcacaaacggtccagactttgttccatacaggttccacatgtgctccatcagatccttctggagttgatgattagtctctttgtcttgtatgacggcctgtgcatctacaaattcttcaatacagggaatgtctctatcctggataatagttgggttagcagccctaggccattctgatgtgtggatgttaggtagatcagcatccctctcatcctcaattatcatattgtgaagtatgacacaggcacgcataattgtattcaatacttctggcttccataaacgtgatgggttgtacaatatcttccacttggcttgtaagactccgaatgaacgctcaacttcctttctacatgcttcctgctgctctgcaaagatcttttccatgtttgtaattggaccactgatactcttcactagtgtagcccaatcaggatagattccatcagctaggtaatacccaagggagtaggtgttgccattaacattgaactcaacaggtggtgctattccattagccaaatcatcaaatacattggagcggtgtaaaacattaatgtcattgtgggagcctgggaaaccaaaattagcatgccaaattctaagatcctctgtcgccacggcctcaagtatcatagttggcttccctttgtggcctaagtacataccggccaatgcggtagggcagttagcccactcccaatgcatgcaatctatgctaccgatcattcccggaaatcctctttcttcattccgtttcaatatacgttctatctcagcacttgtgggtgggcgaagaaattcatcgccaaagacatcaaccacagccaaagcaaattccttcaaagtctcaaggacagtgctctctcccattttaaggtattcatccattgaatcagcaggtcctccgtatgctagcatcttgatacctacagcacacttgtggtcaggactgaaacttaatactcctgcagcatcacgtgacagttggaagtattttttcttggcagcaatcttcctcacaatgtcatggaacagttccggcctcatgcgaaatctgcagacgac

SEQ ID NO: 181292 - DNA, 384 bp, Zea Mays
cggggtcgcctcgaatgaagttctcctcagaggagtaggcaccaacttttgcaaaggtatttttcaaatttttcacgcagcccaaggatttttcgaagcatctttccttggacttgcgaagctcgtcaatatttttctccagcctggccttccaccattcacttatctcttggctggccttcgcgacttcacaattctctttagcttcggctagttgtttccgaaggtcttcaacctcagccttttgggcttcggcctgagcattgtacttagcttcatcttcttttattttactcaccaatgaaattaaatttttttctttctctagaccttcgtttatcagttcaattacctctgagcgaaggttgttgagagctagctatt

SEQ ID NO: 181293 - DNA, 448 bp, Zea Mays
agcgtgggccaagcatgttcattggatacgcaatcgacggatgagattagagataggcataatggttcgcgtgatcggggtgtagccatcggattgagatctgaggatgcgggggagagagagttgttatccgtagatcgtaatgaacggaccggattagatcgtagtcacattaaatcctaggcgtagaaattagatccgagggctcgtattgcttatcggttcaagtggggcggatttaatctatgcccttgtttcctgatcggatggccaatactcgcccgtaccccttcggtcggtgcgtctttcaaaagagaccttgcgcttatcaggaattaacccgcggtccatagatactgtgcactgagtctagtaagaattgcgctggggcccctggcttttccagattttggcgcccagtccggagaattagaaattcagtaaaagt

SEQ ID NO: 181294 - DNA, 438 bp, Zea Mays
gagctatgggtaggggtaaaggcttatgatggtcatcgaaaacgtgaatttaccttacgtgttgtatatttgtggtcaattcatgatttgcctgcatatggtatttggtctggctggtgtgtccacggtcgactgtgttgtcccatatgcatgggggacacacaagcatatcgattggagcatggtaaaaaggtctcattctttgattgtcatcgacggtttcttccatccaatcacccgtttcgaaatgatacgaagtcatttagaagaggcataaaagttaaagagggtccaccaaaacgtttaatgggtgaagatatcatgatacaacatcgtgcccttcaaagggttatagaaggtcatgagtttgaaggctatggtcaagatcacaactggactcatatttcttttctctcggaacttccgtatgcgaaagta

SEQ ID NO: 181295 - DNA, 2496 bp, Zea Mays
ccgccacaacggtgtgtcgccgcgtaccgccccaccagagtcgccttcgctattcaggacccccacatgagctttgtcgttaggtgggatgtaccacgctctccctctcacttcctttatcctagtgacactcacccatcctcctccttaaataccgagttcaccattgcccgccatcgccgttcgacgccatcaacgcctccctatcgtcaagctcgcctccctaacctgtgcctttaggtgaggaactcccccgactaggtcttgccctctctctctctctctctatctgatcagacgacaatcgctcgccgtagttggcgaggccgccaacgcccctacacactaatgcaccgccttttccaagccatcatcgaactttcccaacccccaagctaggttcgtggtgtcacgtcattgtcacgggctcataccttcggcccgagcctcacccaatcgcaagtatgctcgcacgtcgactatcctccgacacagagtcgaagtggggccgtcacaaccctcccctcttgattgtcgcagcccctcaacggatccccatagcttgcccacgatctgacggcctagagcaccaaatgtcgcttcacctcccaccgtctagtcttaactaatggtgccgaatccagcgctcaaagagctccacgtcactgcctcatcactaacgacaacacttttgctaaagaagccctagagttctgccaaatcaactcgcaatccaagattgtaaaatctagatccccttctctttgcactaaagctcctgaaacccttgtattcttcacaatcaagtccctgaggtcgcctttaagcaccaaatacagtagtctgatagcggagatttgaacaaagaatgttggtggagaggtacacaatctattgttgtgacccacgcgagaacgagaacaagggcagcagataatgtgcctaaacggtgacattgcccttggcggagatcagtctctccccaggggcacacgatgtggaagcagcggcaactagggttaggaactaaacctagactcgtgatactatgtataagaatagaattggtgaaatattcattgtatcgcattaggccttccgggctagttataactcatatgggtagacaatgtggtattattatttactataacacaaacctttttttggttatgctctaaaaaatcacaatttatttctttcaaaactcaagaaccaaacaccccttcaaacattaagtataataccacctaacaactgcctcatgcagaggccacattagcacaacttgacaattgcacatccctgatgtgcaaacccaaaacaagtcataacccaccttctattatatgccatgtaacaagtttcagtgtggcaattagagatggtccaaattgtgaaagacgtggttttttgcttcgctgctaaagcataaaaattattcagtaaatttgtttcacaactgtatatgttgagacacctaagtaacttaacacacaagcaaatacaacgcagtcaactttagatttacatcaattattcatttataaaacagaactataagccacgtgtaagatgtatgaagcacaaacatacaatgaatagcataccagccctagtaaattgccaacaatgattgaaccaattggatcatacatagcatttcctgtcatttgaacagctaccaaagatgttgcagcaatagcaaggcctgtaacagccgcaccatcctgcagaccaatatcggatgtgaaaaattgagaataaaatcaatacagaaaagtactaggtgttgaaaagtaaatgaacaagaaatcaattaagaaaaccatgagataataattttcattaaagtcgaccattacaaatggcagaaatgaaaatgagtatgatgctgtgattgaactacataaaaagcagttaggtagtcatattactgacttcagtcataacagcaacagaagttggatcatgaccacgccagatatagtcccaaatacccattccctctgcttctgcacctttcctaacagcgtttatagcaacaagcagtgaagcacctaacagacaacaggatttctcaagtaaattatagctaaaatagacaccctaagaaaaagaggggtgagtgaggtagcagcaagggagcaacaccttcaattaggaaggacccaccaatcactaatgcagcccagtgaatattctctggaggctgtcaaacaaaagtatgggtatgggcattatcatacttggatggcgactgaagacatttcataataaaatgcaattttgtgcataaagttctcatgactcaaatgacactttggtgacatacttgacaattccataaattttgaactccatgcactatggtagcacctgaacccaagcaaaatattccaactgcagatatgagagaccatacaaatctttccttcgaataaccatagctgcaaaaaagaaagccaggattaacatctgttgattcaaaacata

SEQ ID NO: 181296 - DNA, 851 bp, Zea Mays
gacgatccttctccatcactgccgatacaacagcaccaacattccgtctgtaagggaaaattttcatctcacgagctaatcgagatgtaaacatgtcttcgccgcccacccggggaatcgtaacattcctaggccagtggcccccgataacctttagcattcacgcggaagattcccagagctcaggcgaagacatcatctcctcgggaaccgcgtaggtctccagcaaatccatagcaaaacgatcggaagccctccaccccttagttgctgtacctaatttcctcttcttggcggccgctctcggcgtagtttcccgtgaagggccctcgtcggccgttgtcatcacctttttcccctggcggacagcagcatcggcatcatcgtcccccgggtagccagcatacggcagacggttcaactcaaagacgcggttcaacctaacatttgaaccgcggatatcccaactcctcagagtctccgtcttcggcacatactttcctacaatcttcgtggcctcggcctccacttcacgcacaaacgcggccgggttgcgacctcgtaaatccaccacaaaggcaggacttcacactagctggccgcccagggtttgcatccgacggggggtcaattcgcccaatacccagccgtgcgccaagggccacactccataggcgataaattcctcaaccaagtcacgcccacaactcaggcgggcagcatgtcgaagggccccttcgtcctcgtcttcctccaccacctcgaatcgaggaaacgccacatagcagtgtgagcacagaatggccggagggaggctaggcaggtcttcgacgtcaccaggaggcacatag

SEQ ID NO: 181297 - DNA, 414 bp, Zea Mays
caagcgcccgccatcgatctcttctctccggcggcctccatctccggcggcctccatctccggcgtcctgcgcaccccttctgctccccctccataagcagccctctgtcctccctctctctctctcttttctctgacagttaggcagtgaactccaccctcttgcaaatccttccaatctctgtgaaatccgatgaattcctttgtgaaatgtgttcccctatgtgccttaagcatccttgcaggttcctagctccttcgggagggcattcccacctcaaatggccatttccctaaaaccctagatccccgcacaccacgtgctcggtgaaatgcccaaaccagccaaacttgctcaaattgaacccaaatttttcaggctccttcaccacacttccagtaacctacttgcca

SEQ ID NO: 181298 - DNA, 948 bp, Zea Mays
tccccgtggtctagccaacgaccttccccggcaacacccgagaccgaatgcaacacccgagcgtgaccctggctggatgtggctccctcaagacaccctctcggccgccgagtgagacagagcgcgggttgggcgtgcggcggcggaataaggtcttcccatccccgccaggcgacggcccacacccacgacgtcggcacggtgtatacgcctggtgcggaggaggtgaggttccaggtgcaatttgtcgcggcgaagttcccccgcgatgcgcgtgaagcaacaggactccctgtggccgaaggaaatcgagttcatctgaggcgacggtcttctcacgttcgtacccatggcggtgtatagcttgggatttataccagagccacgtccgatttttgggggaaatcgatcggaggagagcgagatgcgcggacgtaggtgggcacgcacctgagatcgtggtcgttcggggttagcgcgatccgatccccacggagaagaagcctgtcagccgagggggcccagatggcggtggcttgaggcgcgggcgcggccaggtgggtgagactggaatgacgtccccacatggcggtgtactagggcaagcgcggatgggggaaacgggctgcacagatgtgtgccgagctggactgagagggagaatttggcccatgagcgtggttccttcacttcattttcatttttgtttttttttctgatttctattttaaatacaaatcaaacccaagtttgaattccaagattttacttttgggtgcacaaataaaactccaataagattataattttatttatttattattctttcttttagtaaatgctctccacatacaagtcataaataaggaatacttttaggtaaataatttctaatgtgtaacattcattaaaaagtgattttacttaccctcctttagaatgtacctc

SEQ ID NO: 181299 - DNA, 765 bp, Zea Mays
gaggatccactgcttcgatccataatcgcttcgggcgtcgtgcgagaaactgcacattttgcagggttcgcactgcctcggacggagcgctaggggagcacgcgataggagaggcatcagtaacggacaaggcagttaaccaccctatcacgctacctacgcacgatacgacaaataggtcgtttcgcgtcccatcaagctgcccatgccaagcggtgtcatgatgaccctctcttttaccacgtcgccacaataaccgcctcatgttaaccaaggtaaaaattgaaacttgccctgactcctcacgtagagcaaggggtggaccgagcaagctcacagcgagccgcaagctaggtggccggcccataggtcatttcctcatctccacatccaaggtcgtacctcacattctcccacggcaaacagactgacagggtggctatggggccccctttgatcggcgagaccgaccaaagggacaatataagattcaataaggaaggactcaatgagatgcccccagcaggtcgagcccccctagtgggactactctccaagactcaatcttaccggagggtggtcggatctcacttggaaacccgcttgttgctcgatagcctccttccccgtgctaactaggtcagagtaaggtggacctcccctcaagagagggctttaataaagccctctgaggggagatgtgtgcaacacagaaaatctgaaggtaaatggtgaccaactcaagggaatcaccaagattgtgct

SEQ ID NO: 181300 - DNA, 564 bp, Zea Mays
ctctaccttggaatcatgccaaacttgtccctaagaataatgttgaatagatatgcagtagcagctcctggagccgagctctcatgacttggcctggtggcatatttgtctagccacacctgcttcttggcgtctactccaaaaactgctaatgtcccaaactacactaggtgtgttgtgcagacatgatctgggacatacatacatgaatagccatgtggaatgtggttaggcagatcgttgaagatttggcaatcttcaggaccaccacccgtcttgtaaacaacatacgctagcgaggtaggcggatgtgcctctagggcgacaactaaatatggcaatggtggcctaatctagaatggaatttccactttgtgacttcctagagctaggcctatcgaagagtattaatgcttcatgatctcttcaatgacgtggatggccacgcatttgaaggcattcatcaagctctcagagtggtgatgcaacgaatgagccactatgtagttgacttcctggcatagagccctagtgcgctcctccatggcaccgaaagatccactt

SEQ ID NO: 181301 - DNA, 525 bp, Zea Mays
ctgactttagccaagtcagtggaattcatacaagatataatattcaggttcggaataccgaatagcattataactaacttgggatccaatttcactagctcgaaattctttgatttatgcgagcaaagaagcatccagatcaaataagcgtcagtagcacacctaagagccaacggtcaggtagaaagggctaatggaatgatatttgaaacactcaggaagaaagtcttcgacaagaatgaaaagttcgcaggaaagtggatcagagagttgtcgtatgtggtttggagcctaagaactcaacctagccgagctttgcatggaaacactcccttcttcatggtctatggttcggaggcagtgctacctaccgatctcaggtttggggcaccaaggctggtcttcgaaaacatagatgaggcagaagctactaggctggaggatattgatatattggaggaagaacgattgaatacagtaattcaatcagctaggtaccagcaaaccctggggcgctatcatgat

SEQ ID NO: 181302 - DNA, 546 bp, Zea Mays
aacgaggaaagcgcgcgcgtgcgcccgcgccctggcagctttgcagaaagggccttgcgtttcagaacaaccagaaatagatccgtaacactattcactgagtcgctgatgctttacaccgagccccctgggtttctaattcattgcacgcccatgtccccgacggcgttcacgcccagccgagctccggcgagcacctacgccggccgattagggcgatgaccggcgtcgagactaagactaacccaaattcatgaccagtggagtattttccccaaactaattgcatctaagactaactatggagctctagccacggtgaccgaaagcatggcggttagcttgacgtgttcccagcgattaggggcggtttggttcgattggaagggtcggagagcatcaccaatacgtaagtatgctagacagggatgaaaaaggaatgagcagacctggggacggctggccgcggtgagatgaactttacggtggcggagacccgatttggggagaattcgaaattctcgagctccggtgaaggactgctag

SEQ ID NO: 181303 - DNA, 497 bp, Zea Mays
tgggccggcgaggtgggctgagggaggctctttcccttttgtttttcttcatttttttcattttctattttcctactatcaaatttcctatatatgaaaggagctccaaaacacggcttcctagcctagccacgtcggcataattttttcaagccgctggattgtgcatcaatggcttgcgttcgcatcactgtctctgcctctctcgttctctccaccttgtcgctcgtcgctttttcgctgttggatcgcacatcctgcgtcccgaagattctagaaatttcacgccctgcctccgtgactctccactgacgctctcgttgtgctccgcctctcttgcgtgtgctccacctctcttccatgtatgcttccctcgccttgtggcctcgctgctcgccgcggccccgcctccatcctggcctccatcaccttcgcctctcgcctcctcctcactcgacggctgcggccttgttgctcgacgtaagcccgcacctcgg

SEQ ID NO: 181304 - DNA, 548 bp, Zea Mays
gcgatctaaggcagcttagctcaattgagttggtcgaggagtattcggggcaggtatgggtgctgaaacaagagggcagggagcacgaacggacctagagtacgctgaccacggtgagccaacacacggcggcgcggagaaccaaattgggggaagagagaaattgggaggctctggtggataatccggggcaaggactggtgcaatggatgcgtaattatccaatggagtcgcgggtgcactcaatttatagcaggcttgagcggtggccagtgaatttgggttgggcgcggtggcgatcggagaaggaatgagtcactggtgcggtgattcgtggcattcaccgtggcggcctcatcggcgacgaaccagtagtagagagtggcttacggtgactcactgcgacgtggtaaaatgttgaggcacgcagccttaccggataactgcgactccgatgatgccagcgcgactaaccacggcgggacacgacgactggtccagccagcgaccggattcaccccgtgctggatattctcaccacacccgac

SEQ ID NO: 181305 - DNA, 478 bp, Zea Mays
aaatctgcaaccgctggcagtcccataaaaaccaggtgtgttttcagtatttttgcatcaagaggtatgagttcacgagatgatttgtacttactatgctataaaccagtagctcgaacttgtaatctagacatagataagagggctgcaatattgttgccggccagaatctccacacctagaacagttgggtgagatcctgaagctgctcataagtcatccttgctcggttggtccactatttcaacaccctagtcatctaatgattgtcctgttccatgtgccttctaacacggctgctagtcccctctgcggctctgcccgcgcccacatcatctcgtaccggaaggatccctgcagtttcaaaaggagcagtgtggtccgacttggaagaacaaatgtgtgagatgtcaaagcttgggaattcagaggaccattcagagttggtcactcctcggtctagccggactcacacgcc

SEQ ID NO: 181306 - DNA, 800 bp, Zea Mays
aaaagagaaaagaggaaatagtgttgggccaaaatcggtacaggcggcccaacaatgagaagaagcgcgcccgcgccaacgcccgtgccaactttgcactgagctccctgtcattttgaatattccgaagcaaggtcaacgcactattgagacgagtcactgacggtttatacggaacccctcggacttctaattctttaccggctgaagccctcgacgtcagacggcgatgcgtagggctccgacgagcgcgtgaaccggggattttgctcagtggttggtgtcctactttggtcgaaaccaaattcaagttctaaggaccatttccccccaataaattttacggttggtgatctgccaagctctgcccgcgaggacagtgaacggcgcggacatgtgctcgtgttccaatcgattagcgggctcctagttcaattcggtggtttgtcaagcatcaccagcatgcatggacataagaacaacgcgcgaatcggatggtgtcttaccagaatggactgaccatggtggagtggtgctttacggtggcggagaccaatttggggaaaacggcgttgcgacggctctgggtgaaattggaggcggggattaaggctacacggacgtaagaaactatgcttttcaccgtgctcaaacgatttgggcaaaggtggagaggtcagtgcgaatttgactcgatttggtttactggtatgtgggtgatgaccgagcctcgccgcgaaccatgggctatttatagccgcggaggtccacggtgatggcacggtggccgccgattaacc

SEQ ID NO: 181307 - DNA, 887 bp, Zea Mays
gtgttttttctgctttatttctcgtatgtagataattggcagaaattattaaaacgtgtgaaggctatactgtgcatactcaaaattactctaaatatttgtgttgcgttgaacttttgaactcacgccgagtgattaaattgtatagtgggtactcggacacgctgatcagtttgcgttggtaatcggctgagttatggcattagctgaatattggctgcgccctggcaacacgacgcagtatttgtgccgttcgaacttggctgcgtcatgtgattgctatgtcgcgctctcgcttaatcggatcgctcccgttgagttggaccgccatcgctgagtcacacatttttcgagggccctgaaggcattgcatgtgtgtcgcaactattgagttacaattgcgcttgttgcgtctgttgtgtctgttgcgcgtacttatcgtgtacccctactaccaagccacagttgtgtctgttgcacttattacgaaggatggatgtgttgtcgtagccctgatggctgcacacgcgttgacaccagacgctagagcttgtactcgtgtggattgtggtgggttgttcaagcccctgaagccacatcatagcgcgaccttcataaacaattttatttggctctatattttatttgattgtgttgtgtgacatcatatatttatatatatcgccaagtggccacaacaactatatcaagctctataatgcttggaaatctgggaaattaaattgaaatacaatgaaacacagataagttaaatatctgctctctcctcatgcataaagttttacccgaagtaacctgaagaaattcaatattaatgcatgaaagcctttttggcacagaaaacatcacaaattgggattttatta

SEQ ID NO: 181308 - DNA, 548 bp, Zea Mays
tccgattgtaccattctttgcttgtatttcgtcagacacttgtaagagcttggtaagatacattagagcgtgttcctgtgttccatccgagaggagcatgtagtgagattattagggataaccttcaccgtttgtttcctgtttttgtgtttcgatggcaggcgacgacgaagaagcaaggatccctacagacttcgatgaatgtgttagccgccaagatcttgaggcaaacaacaagctcctgaaggagcaaatggaggagacaatccacaagtcagtgcatgatgccttcatcaacatggaccttggcaggacttacgagaggccggatcaacgattgtcccagatcgtcgacagacttgctgtgttggagacgcaacaacaagcactgccaccaccacctcctcgtccacgtcttcccgatgatgcggtgattgatgaagaaggtaattatgatgaagcggccaccaaacatttgcgcctccgtcgtcgtcttcatcaaaacacagaaggtatgccacaccgccagcaaggtaataacaatcgtg

SEQ ID NO: 181309 - DNA, 416 bp, Zea Mays
tcttgttactgccggggtgcatggagaatttggagaggtgagcttcgtccaatattttcttcctgagttctgaatttttaggaacaaccaatcggtcttcaaaccatagaactcccttgctgtcctgacaaaagcatttgtacttatccaccttttgttcgagcatatctttgatgacttgaacacccttgtcaccaatctatgccatgactatttgctcatgtaaagtgggctccattgagatataactcaaggtacctgaggaaacaacttctatgttcagcttgcacaattcgtcacacagagtggcgatcttggagtccataatcacacagttgcactgggccttccggcttaaggcatctgccacaacattggccttgccaggatggtaatgcacttccaaatcatagtcc

SEQ ID NO: 181310 - DNA, 364 bp, Zea Mays
gaccgccggagcggccacggccaccaccacgaccttgctgattgccacgaccgcggttattgctgcctccacggccgcgtttggccatgttggcagatccttgcgatccgccatgcagtagatccaatctgtgctcaaagctcagcagctgagagaccaattcacccactgagatagactcggtgcgcgcccccaccgccgtcacgactggactgaactcctcatcaaggccgaccaggagataagaaaccagctcttcatcatcaactttctttccagccgaggtcatatcatctgccaggaactttatttttgcaacatactccgtaacagacatgttacctttgcgggtcgttgcaagtgc

SEQ ID NO: 181311 - DNA, 535 bp, Zea Mays
catatatataaatatacgatgccataacacaatcaaataaaaaatagagccatgctgtgacttcagaggtttgaacaacccaccacaatccacgcgagtacaagctctagcgtatctggtgtcaacgcatgtgcggccatcagggccatgacaacacaacaagcctccgtaacaagcgtgagaggcgcaattatgtctcggtagtcggtgtacacgataaatccacacagtgcgcaacaggcacaattgtggctcaatgattgcgacacatggatagtgcctacagggcctgcgaaaaatgtgtgactcggctatggcggtccgactcaacgggagtggtccgattaagcaagagcgtgacatagcaatcacatgacgcagccaagttcgaacgacacaaatgatgcgtcgtgttgccagggcgcagccaatggttagccaatgctaaaactcagccgattaataacgcaacatcgcgcgtgtccgattacccactatacaatttaatcgttctgcgtgagcctgaaagctcaac

SEQ ID NO: 181312 - DNA, 693 bp, Zea Mays
taccaaattccgaatcaaagtccgttgagccacaacaaatttggggttgttgcgatttcgtagcaagattgatgcgaccacgggtgtatatatacgcggactcgtgtcatccctagctgagcgaaccagcagcctttctctcttctttcctttccctcgatgcagtgagttggagagagaaattgggggagcacctcgcgaagaactcagtggcgcttgtgattggttgtcgaggcaggatctgggagctgcgcgtgctcatcctgtgccgatcctaggaccctattgtgcctattgacttggttccgcggtggaccaccatcgctgggtggatgctcatcggtgggtggatcgtgccatggtctgggtctcctacacatgatagctcggtaagaattccgtcgaacacctcgcctcagttcttggaccgtgtaacgcgatttgattagcagtttgggcgtgctgctcgctggaggggcaccgctgtaagggaatgagcgccgctgcctgttcggctaattggagaaaacggtcgggcgtgatctgctgggcggctgtccgccttgccgtggctggcgaaccacaagcgtcgttcgcgttggtagggtgtcgtggccagccgccaggggccgcaggagttcggtcgcctcgccaacccatgctcggtattgggcagtggatggaggaagaagg

SEQ ID NO: 181313 - DNA, 640 bp, Zea Mays
cagaacaggaaaagccaaattacctgaagattggagaagaatgaaggaaatcccaaatcacgagaagccaggtggtggctcgacaaagaatatcaaccggggcaatctgaagaacatcaccagagatcaactcaacatcaccagcatgcatcagaactctagcatccggtgcgtcgatctctaaggcgacttcctcatttgaagcatgcgctgttactatgccaccataatgtggtggagaagacccgacgtggacatccatggaggtatgagaaggggagcccgcattgcccatcggagccagatcgccaccggcaacaccctcgggggttgggttgcagcttgcgctacccacccgagctggatcattaccggcaacaccctcgggggctgggcaaccgctggcaccatccttgaggactgagttctccgcaacagccacctctaaggctgaaggactctcagtcacctccatgggaatcgaacaaccttgaccaacctcttggcttcgaagaccgccttccaaggtcgacgaggcacgagacgctgcccgggatacctctaatcccacatctggaatgtcagagcagacgtccatcatatcaccatcagttggctcggacagctgatcttcaggaac

SEQ ID NO: 181314 - DNA, 3899 bp, Zea Mays
cgcatccggagattgggcgggtggagcagggattgcggctggcgacgcatccggagatcgggcgggtcgagcaggtgcgatggtttgtcggctaggaacccagaggtcgggcgggtggggctgggggcgggggcggtctacaatgaaaccttaatagttagtacagaatagattttattggttaacgtgtccatccctctcaaacacagcattaaagaagctagagatcaaactgtttttaaaatcaaaaccctatcaaactagagctaaatacttttcgttgctactatattttttttccagcacgccatttccattctcctttcatccattgcgagtttgcgactgcgaacacgcgcgcaaaaaatattgacgaaaactggaggggtaaaggggaaaaggcgacggccgcctgggccctggaggagcgagaaggcggaagaaggggagcggcagtcgcaggccgcagctcgttgatggtggttagggtttcgccgcccgcacgctcgacctgctgaagaatcgcccccctgttgaagaggtctgcgcctcgccctataaggctccggggaagaggagatagacatcagtggaccccggcgcgcggctgatggcggagcaggagcggagggacgcggaggctgggggcgatgccgcgggcgcagcggtggcgtctcacaccagcagcatgcaggtgaggtctccgcaccctacttctcggctgtcctgtacgattttgggagctttatgatgcgtagatccgctcgctgctatttgattggctaaacctgcgtccgttgcgtgccttcattttagtttgttagtgcgtagtaggttctggaagggagctgtcggaattttgcatggaggcggtggggaatttctgtgggccaaccgtgccttagatccgagttagctgccgttggagctggtaaattattgttctgagagggattgggtgtgcttatttcttggtgaactgtagtaatgagcgagatatcataagacttggtttttttgttcatgaggaatatgtgggtatgtttttttttgttttttgtgctatccccatgctgctgtaccagcacctgcatgtttgggaagtagtgaggcctgctttactgtggagttagcctgtgtcacttggtttctcactctgtcagtgaacttattggtgatagtctcgatgtgaacagttcagcacaatgagattgacaatttaaacaaagacgaatgtgccctgagcatgatgtaatcactacccatatgccatatcatttcgtaaacgtggggcatacttgattgaattatattgatacaatatatcagctactaccattttgattatttctatgccggcagtagtatccttctatcttgaaaactgtagagccttcccatctcatctgaaatttctatacaatcaaaagttccagcttaggtggatgtgatctacattgataaacttaacatctaggaagtaggaacagaagttgttttgatttaaatttattgcatcatttgattatatgtaccggtgggattttgttcctctgaagccaaatatcccaacttcattgaatgtctcacttcattgtagaaaaacaatcgacttttggtagtttgacctaaaagaaagataataaaaggcacccatgatactccctttcagtggttgttgcgtatgtcagaaaggtcaaaacagcttgtgatacctgccagctgatctatggtcatatttgtatccgtagttaactagttatactacccaatccaagtatcggtcacttcagtattaaacaaacactgatagccatgatttgttagacattgttgcaatggactagagcacgtgatgaatgtttcacttgcacagaatttttattgtggataagaggcccttgcagcagcatgtcattaggtctaggtgcagcagaggtaccaaggatagcaaagtatgacagtagctgggcataatgtgggagagcctagagtgcagatctaaccacgtcaaaagtcctacaagtcttaacgttcatatgattagaccgaaattttgtttttaggaatttgcaaattttgattagttcttactgtgttagtcattggtccaacgtccaatgaatgtttaatttgtgttaactactagcctttctagggtatctatatcgaggaggtccacacgcataatataatgatgaagcattcttctattttctgtctctcgagctctctagttctctctaccaagctatatctgtctgtctcattacaatccttaaccccattcagccatgtatattactaacgatggttacaattctaactgttccagcgtgtcaaagtataccgtttggctgatggtgggaagtgggacgatcaaggaacaggtcatgtttctattgattacattgaggtatgaagaatttctttgctaatatgggtggtatttataatttcttattcatgggtctaagctaattctcatactttctcctgattttctttgatagtgcccaaatatttgtttgcctcttgatctactttagttttgctaccctagtaccttgttgcaacatgcttcatttgaccctcattctgtttctacaaataatgaaattgtcaactattcatttttttcactgtcaagggaacagtgtcccaatgtaaaactaaagaaaaccttgtcgaagtagacatcattttcatatttcatactgtaatggtgattcatggaacagtgtcccaatgtaaaactaaagcaatagtccactaaaaatgaaaataagcacaaattacttgatgatgattcatggatcaatatatcggtgtaaaagtaaagaaatggtccagtacaaatggaaacaagcagaaattacttgtagtctatgcctctatggcaccatgatattctgtcattgtattatgatttctaatctgtgtgcttactttttggaccttatatgatttattatttcgttggtttcagggttcgaaagaactcggtttgactgttttagatgaagatgacaatgagacgctacttatgcacaacatcacatctgatgatatttacagaaaacaagaaggtgaactaactcagtatcactctgtttttgagctaattcatatcttttttgcaacttcctaatccatttcttttgttagaaacaatcatttcatggagagatcgtgaagcagcgacagacttagcactaagctttcaggaagctgcaggatgctcctacatatggtgattgaagcaagagctgtggtgcagttaccatgtttttgttcaattactctttttggtttatttgtgttctttgttggtgctttgcagggaacatatatgtgaaattcagagaaaccttcagttcagtaaccttggtggtgagtttttaaaaatcagctgtgactgtttattcaaccacacatttgcatgcagcatgctcttctcattttaacgatgcctgcagctccggaagttggtcgtcgtcaatcatcagaatctctagaagcctctagaataatgcattcaaatggtacaccccctttgctgaacgtccacttgagattgtgccattgtggtatctttcaaaaataatatttagaaattattttaaagcgtctagtttgggaacataacagaaaagtatcttactgtccattgcaaagtaggtgactagattctggagtgaagcacaactagaatctggccgttcactatttttgcttggtgttatgtgaacgaaaaggcttgcaccatctgaatataaataaatgtgtcctatgttagtagagttcagtgaccatttgttactctattttgtacttttagctcgataactaaaatgaattctttcaattgtcctcacacattcacaacaatgttcgac

SEQ ID NO: 181315 - DNA, 1197 bp, Zea Mays
agtatatgatgaatatgtgaatatgtgaatatgaaaactgacttaatatctttgatttgtagaaactggagtttcgtatggaaggtgtaaacttagcaagaccagataaggccaagcctaagggaagaacgatcaaaagtagtgagcaacaagttcttaaattgggtgcgaaaggagctaagaagatgagcaggaagtgccaaaaatgtggcatcgctgatggtcacaacagccgtacgtgtttaactatggaggataatagggttcaattggctaacctatctggacgtaagcgaggacggcctcctggttcaaggaacaaaatcagaggtgcagcaccacagtggaatgagacatcaacgtcgaaaaaatgaacggtgtatgtcagagatgatgattcatctggtagagagtagaataccaaaagatttatgagacaatgggcttgtttaccgttgtaactagtgatgcaaatgaatgaatgacatacagtatgctggaaatataagttgaaaattatattctggatgtaaatgtgaatcgtatgttaaattgtcaatgcacagacagcgtcataaatatgtgtacataatgtcataaacgtatgtgaaagttatcataaacatttaacagttatgtagatttatgaatgtacagcgaggtttttatagcatagaacatggatgtatgtagcataaatgtatgttgaaatatgcataacacggggttgtttattgcataaacttgccatactgtgaagcttataactatacaaagagatgtttccagcataaaacgatgatgtttatatatgtaccataaatgtatgttgaaatatgcataacacggggttgtttattgcataaacttgtcagcctgtgaagcttataactgtacaaagagatgtttccagcataaaacggtgatgtttatgtcataaacttgagacaaaataagcataacatgatgttgttgacatcataaaaatgtacaggaattagcataatcaagtgcatgaaacacacatgaagataaaacacatagggtacaatattccagtttagacatcactgctccccaagttgtcattgacataacataagaaacgtctaccgtctttgccatagtatacacacatgactcaactgaagtttatggaaccattgtatacacaatatattacatatctaaactata

SEQ ID NO: 181316 - DNA, 824 bp, Zea Mays
ccaatgggtgtgatcgtgcaccagctattgtttgtatttttgacgaggacggagaagagaaaagaagaagttccgctaattcgtaagaatagccgacgttacagaggtagtaggggggatagtgatattccttctccagctctgtctgctcttgttagccttcaagaattatccataacagattttgatcaggccctcgaggatgtcattcctgaagatatgctgtcggagccgactgctggtgatatgatggatgtttgctctgaaattccagacgtgggattagaggtatcctgggcagtatctcgcgcatcgtcgaccttggaaggtagtcttcggtgtcaagaagttggtcaggattgctcgactcccatggaggtgattgaggatccttcagccttagaggtgattgtctcagaaaacctagcccccaagggtggtgctggcggttacccagcccccgagggtgtcgccggtaatgatctggctcgagtgggtagcacaagctgcaacccagccctcgagggtgttgtcggtagtgatccggctctggtgggtagcgtgagctacaacccagccctcgagggtgtccaagtgagctctccttcccacacctccatggacgtccacgacgggtcgtctccactacgatctgatggagtgatagcgatgcatgcttctttaacttcgagcgagggagtcgccttggaggtcggcgagccagatgccagaattctgatatctgctagtggagctgaatcaacccctgacgatgctcttcagattgttctagttgatcttccttcgtcgagctacaacgcagc

SEQ ID NO: 181317 - DNA, 542 bp, Zea Mays
cgtccgcgacccgggacacccactcagttcgtccctttcccctctaattctctctacccacgctcaccagatttccctccgctcagctgcagcgccaccgccgtcgacctaaaccatcgttgtgcctctgccgccgttcaagggacccggagactcccctcgaggtaaccaacctcctccaccccttatttccctttttgccgctctcggttgcgcacaattgctcattggagagaggcagcgccgctgccgagccatctcgccgcggatcgccacccttcggtgcctctacgctggtggcgtgcccacccccatgttcgccacacctcccctgacctccctaagccctttctgtggctttagaacccccggcgtgtccgtacccgtgcctgcgtcctcgtctctggcggagctccaccacggacacgggtggcgccgccgctggtggctagggagagccgagcagggttggtcatctgatctcagatgcatatcctagatcggacgactccgttttaaacaaaccagacctaatcctaacc

SEQ ID NO: 181318 - DNA, 576 bp, Zea Mays
agtttttggacggctgtgcaatacttgcccatggagtcattcgagcaatcccattctttatttatctgacttatgaccaccagtgaatctctgtataccatcaatcttttaatgcccaatgatatagcaatgttcaattcgtggatcaaagcttcatattctgctgcattattggatgctgggaataataattggaaagcatatttgagttgatcacctctaggagcaatgaagaggattcctgcgcctgctccttacaatttcagtgagccatcaaaatacatccgccatacttctgcagtctccgggttatctggtacttgttgctcggtccattctgatatgaagtcaactagtgtctgagtctttattgcagtgcgaggccgaaactcgatgttgtgagcccccagctcgcaggcccacttggctattcttccaatggcttctttgttgtggagaatatcccctattggaaatccagtgactactatgactttgtggtcatcaaagtagtgacggagcttgcgcgtagttagaagtactgcatacaatagtttttgaatttgaggatacttc

SEQ ID NO: 181319 - DNA, 950 bp, Zea Mays
tttgttgcaatatgaatttttttggggcgcaatccatgtaggcacgggctgaaatactctaaaccaaactaaccgaactgcaccaaatctttttggtgctcagtggttcttgcggtaggggaatcactaactatttggtttatggtgtggtgtttgatatggtttttgagtaattgagtctttgaagctgaatcaccgaaatcgtcgaatgtccgagcactagcaggcagcctactggctgtcagcccatcctctcacacaatgtcccagagcccatgttatgacttgtccaagattgtatctcctttctccatctccaatcagcatgactgcaaggcagtggccatgatgagtgcacaagcccccatggacacaataggggccaagatgagtgatgagcagatggccctagctcgctcgctactcttcacatccaggagtgtgcaggaggtcccgaggagtggtgggctgatggccacaatcggcacgctagcctctgcagtcgcacagtcagtttcagggccagtggacatctcccttgtttggaccacctagacaacaggcatgcaggcagccaaaggtaatctatgatgtcccagagcccatgttatcttagatgtcccagagcccatgttatgacttgtccaagattgcatctcctttctccatctccaatcagcatgactgcaaggcagtggccatgatgagtgcacaagcccacgtggacacaataggggccaagatgagtgatgagcagatggctctggctcgctcgctactctccacatccaggggtgtccaggaggtcccgaggagtggtgggctgatgacaacaatcggcacgctagcctctgcagtcgcacagtcaatttcagggccagtggacatctcccttgtttggaccacctagacaacaggcatgcaggcagccaaaggtaagcataccggcc

SEQ ID NO: 181320 - DNA, 807 bp, Zea Mays
acatactgagctatttctttcttcatccctctccaccagtatctggttttgaggtctaggtacatcttggtagtccctgggtggatggagtaggctgagttgtgagcttctttgagcaggacttctcgtgcctccccttttggtacacacagacgatttttgaaccaaaggattccttggtcatctgtcctgaggttcgggagttgttccttgcgggctttctccacaagtcttgctgtctctgagtctagacgttgagctttgcatatgaggtcttccagcattggtttgacttcgagactgtcgttgtttcccagacatttatgtagttgagctgattctttcttccaatcttctaaaaagttggttccctttattccgaatggtttccaactgagggcgtctgctaccacgttggccttcccagggtgataatgaatttccaggtcataatccttgatcagctctaaccatcttcgctgatggaggttgagatctggttgagtgaatatatacctcagactcttgtgatcggtgaaaatgtggcatttgttccagattaggtaatgcctccatatcttcaaggcatgcactatggctgccaattccaaatcatgggtggggtaattctgttcgtgcggcttgagtaggcgcgatgcgtaagcaatgactttctcgttttgcatcagcacacaacctaagccttgcctcgaggcatcacagaagacgacaaaatcttgatgaatatctggcagtgacaaaacgggtgcggtggtgagtttctcctttatgatctggaaacttcct

SEQ ID NO: 181321 - DNA, 632 bp, Zea Mays
accgcatacatagaatgactcattcacatattacatatatctttaccaaaacattccccgcatcgcttgcaacttaaacctaagctactatgcaaacataggacctctattttaatcacgaatatcatcatcaaaccacatcgactcgatttgaaataaccctacatgtttatcatatgaatggagtatttcaacaatcatcccaagacgaactgattccattacacaacttgtattacgagcctacttgactacctgatgtgtctactcaaaatcgtgaacacaaccatacactatatgcgaagcataatttaataaacacataatgcgcattgactcgacttataacatagaagagtgatgactacttcggcgtgtcaccccttatctattcaagtcaaaagaatttctacctacaccgattgaactttcgtgtcgaccacaccttatatttcactgtcttgcatacaaccatgttgcggcgttcactcgagacacttccgtcagcctaacacaacactaatatatcgcactttggcatacatacgcccataaaaatatacatctcgcataccaacccacgatttttaaatctattcgccacatcaaacaacccaactcgtgtgccctcc

SEQ ID NO: 181322 - DNA, 439 bp, Zea Mays
tgacaagtcatgggtcggttgaacagttcatatttcagaagctgtgaaaaaattcagaagctgttgacatgacaagtgatgcagcgagactgggaatgaaggaatctgaaactagctaatagcaatcagagctctttagatgaggagtagcaatgcgagtatcagttgagaacttgagatcattgagcactaatgattgttcttgatattgtctccttcgaatgtcaagttcatatctgcagtggagattgagatttgaagagagagagatctgatcacgtctgagggagcaaacgaaatctgcaatctcgataccgctcgagaacgagtacaagattttcaaatgcagagcttccgtttccatgtgactcgcatggaggttaccaacaactcaaacatagggattgcctacggcacatgttttcgtggcatcatcacc

SEQ ID NO: 181323 - DNA, 818 bp, Zea Mays
tctttgtcttcctctttcctacagatccgatttcctcactcatgccgggtgctgtccgcagacgattagatctgttttattcactcgcgttgggtgtcttcctaggttcgttctcatgtcgtttgtgacctagatcgtgtggaggcgttggtgggtgcaagtttgtatgtgtggtgttgctacggtttcggaccccttcttgataggttgatttgtgtctctcatgcaaaattgaggagaatgatgtttcctaattatagataggtttagaacttttattttctagaaaagtagttaatgagattttcttatgtgtactttggttcataaatccaagagagcacttgactagaatatgatctggaatttcaggtaaaggtacaccctaccttctatcaggactagaatcttaggagaaaaggtaccagacatcaggatcgaagctctagaccacagtgctgacaattggtgaataaaaactgcataaccaaaggttaaaagagactggacaatcttgcagaggataaacacaatagaatgcattattgcaggttacagattagcagcatattctaccgccaatatacgcactacccttgagtccccaatccccagcacaagcttgattctgttccacttttatcaccaatagatgttatcagtacttgccgattaaattcacatcctttgatatctgaacgtttttgcatttctatcgtgcattcaaaggagcaaatatgtgtctggtcactgctatgtaaataactttatgggtgactgtatatgctgtacaatttttcataacgacatgatctgtt

SEQ ID NO: 181324 - DNA, 692 bp, Zea Mays
cttgtcaggagctccagccacctttcagagcgccatgaacaataccttagctcctatattgcggaaatttgcattggtattttttgatgatattcttgtctatagtaagacatgggaagatcatctatatcatctaacacaagtccttcaagttttggcaaaagaggagtggcatatcaagttgtctaaatgtgcttttgctcagcaacagattgcttacttaggccatattatcagatgtcaaggagtggccatagaccctttcaaggtagaggatgtgcacaattggccagttccagagaattgcaaggagctaaggggatttcttggtttggcagggtactatagaaaatttgtccgacattttggtcttatagctaaacctctaactaatctgttgaagaagggtgccttatttgtttggacacatgaccatgaagtggcctttgacactatcaagcagtccctgtcttcatccccagttttagctctgcccaattttgcaatgccctttgctattaagtctgatgcctcgtgttcgagaattggtgcggtgctgttacaggacggtcatcctctggcctttgtaagcaaagcactggggtccaaaactaaaggcatttcgacttatgaaaaggagtatttagcaattattcttgcagtcactcagtggagacaatatttacagcatt

SEQ ID NO: 181325 - DNA, 386 bp, Zea Mays
gtgaagcatcgctttcctgaagcactcgcttggggtcaagcggatattgaggcccggggaactgtcatgcctggtaaggatgggaaggcgtctaccagtgatgttggcgggaaggtgtgagagtagtgttgattcaatggagtgtctggatcgtgggccgtgggccggttgaagttgtatcgagtctgatgggttgtaaggcgtactggagtctgtaatgggctagccatggctaaccatatatgctgaaccaatgccagatggcaggaatatcgaataacagaaagcaaaaccacttcgtaacaaacttatctcgagttgcgttgcgattgccgtgcctccgacgatctcacgtcccggcggtggctcgccggcggccacggggc

SEQ ID NO: 181326 - DNA, 413 bp, Zea Mays
ctctatcagctcatgagtctctgacgctgctatccacctacgctgcttcagtcagcgatgctgctaggcgaactctgtggtccctcagccacacttactggtagcagctgcacaatacaaagtagcatcttcatgtgcatcttcgtggggaaagccataccaacattattccaggtggagctggagaagatcgcctcaacaccctagttggtgtggtggcaggtattaacaccgacttggacagtgctaccctagacctctccagggcacatttggagctagaagatgcacacgcaaggattgcagccctagaagctcaactagaaggaagggatccccctgaagctcaagtccctgccatggcgttgtcctctccctacaagaggatccgctatggagaaccaggatccatc

SEQ ID NO: 181327 - DNA, 507 bp, Zea Mays
tcatgctttagtcaacaaatcagctttccattcaggtagttgattagctattttgtccacaatgggatgcacatgctccctttttaatttatgtaaagaaaggggcagaccaaggtatttgcaaggaaagctagagatctcacaaggccaaaactattgaatcatctctaaattgtcctcatgacacctgatgggatagacactagatttctgattattatataaaccagaagcctctccaaaaaggtgaaggatgtctgaaaccataatcatgtcctccgccacgggattgatgaagagaaccacatcatcagcataaagagaaacccggtgctgcaactgcctagaagaaagaggttgtaacaaaccttcatcgtctgctttagagaaaagctgaccaagcacatccatgacaagcacaaacagcatcggagaaagagggtccccctgtcgcagccctcttttatgtgaaatgaggcttcccgggtgaccattaaataacacccg

SEQ ID NO: 181328 - DNA, 647 bp, Zea Mays
gtttttgtcccaaacacagcaatagtgtggggggtcttattgcagtattagaccaacatactgcacacagaagctggctctttagagtaacccactaggtatatcaaccctgtctgtggccagtcttggtcagaagaataaagttagcttttgtacaaacatctctatccaatacagctacaaaaatgtaactctagagcatcattcctttggatgccatgtctgcggaggaaccacggcctaacaaatcagctccctttgaaacaacccactaacacttacatataaaataccagcagaagcatgtttcaatgcagtgagattgttgaactacagttacagcactgctgaattatcaacgcctggtgattcgaggaaaatgtaaagtcgggagatgggtgcaggttaagcttctgaggaaggttgcatcacagacacatggcctgcagaaatcaccaaacctcgtgtcagaataataatttattgaaatgctaatttaccgcaatattaaagaacagaatgtcatcaaagaataaataattcctactagaaggtagatccattcagtaaagtaaacttcgggtgttgaaaaggcaataacagtatgatggtgtattggtttggtgtccttaactattaccaaatct

SEQ ID NO: 181329 - DNA, 444 bp, Zea Mays
aggctgtcggccccctacttttgcatagaggtcctaaactgcaaccctggctgttcaatccagatgtcattatgcctggtgggatgggagctgggcaggtgggttagataaaacatgatcagaaactgtagggtgagactatggagcagtaggaaattgctatcatagaggcatatcttgagagggtagttttcctttatagctaatcatgcatgggtgcgggccaacaggccgggtttatggggtcagaccctaccaggttggcatacccgtgtgcactacctagttacaaaagggaaaaacttcgacccctcagacttgctctatagataaaacttacagagatatttcgacagttggggaggcattccttcggtcgtagctagacagttgcccttgggtcggggtactcccattaccatgaagggtccttcccagctaggg

SEQ ID NO: 181330 - DNA, 1859 bp, Zea Mays
tgcacgtctgtcatcgcggaactggacaggaccgccttcaatggcgtcccagagatcgcgcgcctgcatcctcagcttcatagtttggctccactcgtagtaattcgtcttgtccagcatcggccacgccgtgccgctgccggagtcgcggtacaccacccttccttgcggcgactcgtagcgaccaccgccgcggcagcgcctccggtcccgcagtggtgactgcgaacgcctccgatctcgcggaggagtccacggcctccgattcttctccatctcctcttcctcttcctcgacctcctcatcttctcccttctcggcggcgatttcagcccgcagctcctgcgccgtccttgccgccgcctctgctgcagccgctgcctgctttgctgcctggactgccagcgccactgcttcctctgcagccttcaggcgtgcagcccggctggagaagtcgcccagttctccttcgctggttcccttggccttgagcctggcagcgcgctcagcagaggtcgacatgagtagagaagagaggagtcggccttgaggctctcaggtgtctaacctaagctctggtaccaaatgttagaggtagacagagtgttttgccgggagtactaacctcagctatcattgcttgattatatagaaagatgagtcacattgattacataacatctcattagagcttagctaatctgataggagccttggcagccgcacacacctgttgagctgctcaaggtctttaatgactataattaactagcacaagtaactaggagaatgcttaggaaacaggacttaataacaacacccaggctgtgccagctgccatctcatgcgggcaaatgctgtatgtatattggaggtatatggcgagacaagttcaattatatgccagcatctacgtgcgaagctgcacttcaagaaaagatgggacactgtttgttctttttgcagaatgcaattctcacgtgtgtatgactccagttccatttctcttgagcattgcccttgtattgaccagaagaagaatttctatttaggttggcatttggagttccacatcaacataaaggtaggctagactggcacattccccatcatgtgtgtaggccttttgtgaggagtagcctctgcctccccaggtgtatgtccatttatcaagagggccaattcaaggtgctgaaactgttggtaggccttagttgacattgacagttgggacatgttttgaggttgtgcttgtgccttggcctgcaatagggtaattttcttgccgtttgcatacgggaatagtttggggaacgataaggcagggattgctgcactccacctgtcatgccataactgaatagagcatctagaaatacctttatatgttttgagcaacttgagtatgtcattctaccaggaggaccacttttttggttgaagggactgcctcggatctgtaatgattgttctagattaagttcacccaatgtaaattctgtctatagaagaatttgtctagatttttcattagcaatgcttcattttgtgtcctaaggttgatgactcctagacctccatgttttttcggtttgcacgcaatttgccaggctgcctgtggtggcctttttgcgtttatgtcagcacctctccatagacaatgcttcatatatttgtcaatttgtttgatcatcgaacttgaaagtttgagggtgcatatgaagaaagtaggtaacgaggagaacattgaatcgaccaagttgtaacctcccagcttctgacaagaatattgaagttgatgataaacgttgttcaatcttccgtcttttaccactctcggtccatcgacacgaaactgc

SEQ ID NO: 181331 - DNA, 655 bp, Zea Mays
atgcgcattgctttattactcaacaaaaagacgcgtacaatacataaaaactaactgagggaaacaaagcacggtgttcatcgctgaacacggaccatactgaaaccaaagctagcacagcacagcacgctgacagtagcggcaagaaaagaaccctctccctgaaactacaactagaggcagatctgctgtgcatcataacaggtctcgccactgcagcacccgagaccgaagtaagcaagggcgcagggatacccttgcggtatgcacaagtcctgcagcagtagctttcttgcgccctgcaggctgaacgccgagtaaccgccgctgcggctgtcagtgacactggaccagcccgtggctgatgccggctccacggttgccgccgccgccgtcaccagcagcacggcagtgaacacgatcagtgctggcacacgaacgcgacagttttgagtgctggcaatcaccgcagccatcttcttcttcgcgcaacaaggacgcacagccctccctcgcccttgttccttcacgcaacacgggcgcactacgactacttggtctctctttttctctctctcgctctctctggcttccacgagtagacaggtacactacacccctctcctatgcttcttatacggatattctttcttcg

SEQ ID NO: 181332 - DNA, 383 bp, Zea Mays
cacgggattggtggagaggtagacggtgttgacgttgtcgcagttgacgagggtggcgcgatgaagggggttgtggagctcgtggagtagctgacgcatccaggaggcctccgccacgccgttggccacaacgcgttactcagcctctgcgttggagcgggagacaacagactatggcttggcggcccaggagacgaggttggcacccaggaacacgacataaccagaagtggaccagcgcatgtctgggtagccagcccagtcagtgtcggtgtagaccacgagctccgatgtcggggatggttggattaggaggccgtagtcgagggagccagagaggtagcgcaggatccgcttgagagcgatgagatggggctcccacg

SEQ ID NO: 181333 - DNA, 549 bp, Zea Mays
cgccaccgtggggggaactctgctccgccgtcggcattcgttccgcgggtgagcaaataggtttggtccgttgatcttgagagaaacggcgtagatcgtgacgcgcatcctgttttggtctagttaaatcggtgtcgtgggatctagatccaaaagcccttatcgcgtaccggttcaactaatgtagatctaatctaggccgtggaagtgagatcgtgcggtctacatagaatgctggtttatttacacctaagtctaatcctgggcgctcgcagtggatcggacagctcacgggagccgataccgcttcgccggctgatttgcaatagagcccttcgcttattagataactaacccgccatccagaggatactattcaccgagtctagagttttcttgcgccaagccccctgctgtctctggtaatcttgcgcccagtccagagccggctgtaaattgaataatgaattagaaatagatttttaatatgagaataaaccctagaaattgtataatccatagaaaattcatatgaaccccgaattaatt

SEQ ID NO: 181334 - DNA, 898 bp, Zea Mays
atttgatgcccaacaggttggattgctgaaaattttgcccacaaggtactagcaggccctcttagctattgtgcggcaaacattggcttttgcgtctccgtacatcgaattaacccaaacttatgttccataactctcacccattcatcagcttctaaaggttcttctactttgatgaagagcgggggtcgagtctcagagaattccaaatatgtagtatcacgcggtccttgaggtggagctcttcctccgtgctgttggaactaattgcccgccatttcacgcaagaagcgcgtattatcagcagtggcattgaccagggcagcgatagcctcggccaaagttggtggtactggtggcgggttgggagtatcctccctaccgcgggaagtccccgcaccatcatgtgcgtgagtccgtgatggcatctgaggcaaagaaacatttggaaaaatattacatgccaacatacaccatcatattacattaccaaaatgtaataattatacagactctagtgtacaactcaactttattacttattttacataagcataacacttagactatactattctagtcttcttcatcctttattgctccatttcctgctgcaggagaccgttcgtcagcaaggttcatggaaggagggggcctaaaaaggtctagctccccatcaggtcctccatttgttgttcccgattgtccggctcccattgcagcaatgtctgaaggcacgtccgggtgtagtcgagcatacaatacatgcacttcttcatgtaaagtattagagtacacttgcagactttcgagggatgcactgagctttgtcacacgagctagagctttcgcttcgcaatcccaagcgaaagaacacgagttaacgacccaatcaatg

SEQ ID NO: 181335 - DNA, 372 bp, Zea Mays
ctaaggggcctagatgattcacaatctccccctttttggtaattgatgacaacactacacattttatccaagagaagttttgattttcaaatcttcctcataccttaggcataagaaggattttagagatgagtttcataagacttatcttgatttgaagttccgtccgagagatagataagtctcaacaaaactcagagtgtaggaatagctccccctatatgtgtgcatgatatttctagttgaagatatgacacacataatcgatcggagttttgatggagatcttcctacagtcatggttatcgaggcatacaggaagtaatatgtaaaaaaataagcgcagcaaatttaatcactcctcgatcaacc

SEQ ID NO: 181336 - DNA, 585 bp, Zea Mays
gctagagactacctgtcagtgaggaggcaaaagaatggtctacacaaaaagcacccaccgttggataaaccctgaggcaccgaggccaaagtcaagtgggttcgtgcccgagactgactcgttataagtggtcggcctcattaactacgtctgacatcaggccgcagtagagagccggtctacctcactcatgacctgcgcaacctctcggcttacagcgcactcataacctgcgcatccctttggtcaccagcgcattcttgacctacgagcccctcagcccgcggatcactcatgacctatcaagcttagacctgagagcacgaatcgtccatagggcccataacgcaacgagacacgccgagacctaggctctagaggccaggggtcggcgtggcacaaaggtagtaatgatggcaccagggcccccgcaccgctcacactagccgtcataatgagtgggagcagaggttaccatacgacaatgtgcatgtgggcaaacggccttgccacggtaaggcactcggttttaccacggaataatggctccttctcaaaggagccaccaacagccgaaccccgccc

SEQ ID NO: 181337 - DNA, 474 bp, Zea Mays
cggaagggaacactcagcataaatgtgatggtggtatgtgattttgatctcaacatcacttttgtttctagtggatgggagggatcgactacagattctagagtgctaagatcagctatgagaagagtttccacgttcattcaagaaaattctatctagttgatagagggtatgcaaatactccatcttttcttgctccataccgaggagttcggtaccacttgaaagaatttggggctggacatcgaagaccacagaacccaaaggagctcttcaaccatcgccacacactattgaggaatcatgtggaaagggctttgggagttcttaagaagcgcttctccattctaaaagttgtcacgttccacacattggaaaatcaagtaaagatacctatggctgctgccatcttccataatctaattcgatcacttcatggcgatgaggaatggttagatcatcagctagataata

SEQ ID NO: 181338 - DNA, 466 bp, Zea Mays
aaagctgttggtaataacaaagatgggataaaattgaaaggacattgcttgcttgtgacgaaatctgatgttaatgaattatttgcttccacttctgttgcctatgccttggtatgcaaggatgctttgatttcaattcaagatatgcaacattctttgcttcctgttgttgctaacattttgcaggagtattctgatgtatttccaagtgagataccagagggactgccacctatacgagggattgagcaccaaattgatcttattcctagtgcatctttgccaaatcatgcgccatataggagaaatccggaggaaacaaaagaaattcagcgacaagtgcaagaactactcgacaaaggttatgtgcgtaagtctcttagtccgtgtgctgttccaattattttagtgcctaaaaaagatggaacatggcatatgtgtgttgattgtagagctattaataata

SEQ ID NO: 181339 - DNA, 508 bp, Zea Mays
atgggtgtggccctgctgatgctgaacccaatgggtgtgaccctgccagagctgatcccaatgggtgtgaccctgtgctgtttattgtccgtattgttgacgaggacgaggaagaagaagaggaagtccccttaattcggaagaacaatcggtgttacagagttagtggggggagtggcgatattccttctccagctttgtctgctcttgttggtctgcaagaattatccatagcaaattttgatcaggctctcgaggatgtcgttcctgaggatatgctgtctgagccaactgatggtgatatgatggacatttgttctgacattccagatgtgggattagagttatcccaagcagcgtctcgtgcctcgtcgaccttggaaggcggtcttcggagccaagaggttggtcaaggttattcaattcccatggaggtgactgagagtccttcagccttagaggtggctgttgcggagaacccagtcctcaaggatggtgccagcggttg

SEQ ID NO: 181340 - DNA, 929 bp, Zea Mays
gaaagctaggaagttgggatgtcttgtcaagtgtcccccatccataatttggacaagggtatttatagggtaactgaggggctagggtctaaagtacatacttatccttggttacctgctacattcctaatatatactatacaatagggtaattacaaaacaatgatacaccttgcttagttacaccagacactatacccatgtaggaggatgattgcagggactagaggatgcgaccgagactggccccagctcaacacaacctcctcgcactcagcccccttcagcccaagtcaagtatgcattctctctagggtcttcatcgttgggtcttcgcttcgattgccaagaggccttggatagtggctcaggacatgactgtgcgtagcaacgaatgggccatgccctctcaggggtctgctcagattagacatatctcgatcatcaacgatgtcttcagaccttcgttgttgggtggggcctgcaagcctcatcatacgctggagtagcccccactattctttgatgtttgcaccatctatgggtgtcaccttagtggtcccctaggcccgaggacgcccttcgatcccagcacttgcagacatgttcttacttgtggttagcagatgctaacgattaagagcgatcaaggtctagtttggccctcgtcccaacacatagctcacccaaatgcatggatgttggcttggccttgccccaccctactcacacctgcggtagacccacataggagacacctgggtgccaccataatgactcatgcccatgcctagaccaccttgcctctctagtatcaactgtctttttgcccatgtctagttccctttacctcattgatcctttccaccttcgtgtctatgcccccaatctcattggtgttgaccgcggccatggccatgcatgccctt

SEQ ID NO: 181341 - DNA, 389 bp, Zea Mays
ctcgcggtgactttgtattggtcaaatgtcgaagaccgtcgacgcggtcctgtttcgacgtagatttttgtggggaatttttcgcttgtatattacatggctccgcctcgttaaaaacctcacccctcgggaggaaaagagtgcgggccagaataaaattgttttgcgaattacaagggcgagctggccctgaggagtcaaacaaaaaatttgcggagattatcaatgttccaagaatgctccaagtcctcgccggctggcgttgcgagcctgtacgcgctggggggacgccttcgtcttgacgataaaagggccctcccacttgggctccagcttgccccaggactctgtccgagctgtccagacgagtatgaggtctccttcgctga

SEQ ID NO: 181342 - DNA, 403 bp, Zea Mays
ctgcatcacagtatcccctccctgttttagtcgaatgagttcatcttgtttcatgtgaagcactccttctggaatatagtgctcacggaatgccaacttaaattcatcccaagtgacctgatgtccggcttgttgaatcgccacaaaatttccccaccaggtactggcagaacctcttagttgttgggcggggaacaacgacttttgtgtttcggtgcagcggatgaatccgaacttctactccattaccctgatccactcatcagcttcaagaggattttcagctttaacaaagagtgggggacgcatttcagagaagtccaggtatgaggtttcatgcggtccctggggaggagcccttccgccttgctgctggaattggttacccgccatttcacgtagg

SEQ ID NO: 181343 - DNA, 593 bp, Zea Mays
gttgttgagaagatgttggagataattaagcccaaagttggactgtcaggctggtggaactctgaaattcagaacttcagtgtaacagagctaactttggacttggatttaaacatgatccagtgcaagtttgggcatgattcccataacaaatttgtagctggtatgtagattcacaattttgctgcagagatctggacgagttgctatatgaatctgagagaaaatgaggcccaaactctgtctgtcagaccgaccgatgaacatatcccatggtacagtactggaaatatcaccgaagtggataactctcaccgccgacgaccaccgtgcacggattcgcgtattgggtcgccgtgattcgtgctgaccaagtggatagcacttgggatcaagcaagggtccccgtcgtggataaactccagccgataaagaattccggccctcgtaccgtgttcaccgcggtggaaaccgataagaacgccggtgactcccatcgcacggccttgtgccacgtatccgaacacctctgtcgcgtcgccgtgactctttacagccatcaaatcgtcaccggtgagctcgccacgactgag

SEQ ID NO: 181344 - DNA, 930 bp, Zea Mays
tttctcatggctctggggcgaccaggaccgacagggaggttaggtgttgcttcaattcccggaaggcttgttccgcctcttcggtccaagcaaaagggctagatttccgtaggagcttgaagaagggcagagtcctctcagccaaccttgaaataaagcggctcagagtagccaaagatctcgtaagtttctagatgtccttgacacgggcgggaggcctcattatctcaatagccttgattttttctgggttagcttcaatgccccggtatgaaaccaggaaacccagcagcttccctacagatatgccgaagatgcatttctccgggttcagtttggtgtgggttgcccgtagcttgtcgaagaccagggttagatcttctactacagtcgaccccctactagtcttgaccacgatgtcatcgacgtaaacctccaccttgtctcggatcaggtccccaaaggtcttactcatcacccaaacaaatgttggcagggcatttttcagaccataaggcatcacaacataacagtacaacccatctaccgttacgacaagtaacccgctgattcctgcgaccgcgacccttgtttctctttttcttcttgacaccgtcctgggtgacggcgccgaaactgccggtctgggtgacctcagcttgcggcattgagtgccaagcacggccctcggcggccctggcacatttatcagccagggcgaagagtgtggtgacgttgtccacatcacgtgtggccagcttttccagcatcttttcgtcacgcaccccctggcggaaggcagtgatgatggaagcatctgagatacgaggtattgtcccacgtaccttggtgaagcgggaaatgaatgcccggagggtttccctgggtccctgccttactgcatggaggtgtgcttctacaccatgctgc

SEQ ID NO: 181345 - DNA, 475 bp, Zea Mays
gggggcaatctcactttcactcctattgccaattagccatctgtccttccagaagagcatattggtaccatcccccactactgtaaccacagccgcctcaaaaagcttctgaatctctttactagaattaatagaaaaaaatggtccaaggtttattagactcagtcttttgcaaaccaagaccatctaaccccaagagcccagcataactaatttaaattttaaatcatgcagccctagaccacccagttcctttgatctagtaactttaggccatgccagcaaacagtgccctccattagcctcttttctgcccctccacaaaaagccttttcagagtttatcaatttccttgatggcccagtgaggcaagtcaatagccattgcagtatagattatctttgcagtcataacaaactgaacgtatactgccctgccagcctggttcatcatctcagctttcaaaatcaggagc

SEQ ID NO: 181346 - DNA, 799 bp, Zea Mays
ctcccctctggttccctaaatccgaatctgacgggtgctagacagacggggcgttattgcgaataggttggggagaatcttaccataggtagaagtcacaagtcgtgggtccatggcacaccacggagcattgaggcccacggcggcgctaaggtacccggcgagcaattcctactgcgccaaagctcgaatcgtccctaccgaagcagctacacgaagcggaaacaagcacgaagctattggaggattgctcaccgagaatcgcccgcgaagatgctctgcccacggtggtcagcggattccagaggaggaatggacggcggcgagaaattctttggtccagggcgacgcttacgccagatagcaagcttgcgtacgatcctcggtcactggttatcgcctccgaccaccactctgggatccgaacggcaggaattgccgcatgcaacggtggcggcgtacttttctctcctctcttcctctccgcggcggcggtggtaaggcactgcacgcacggtgatacggcctcgaatcggtggatggagggaagggggtcgcggagcttcggcttttatgcaccacggtgaagtccgagcatggttaagaagcgatatcttcgtgcgcggattcagcgtttgcgaacggaactagagctgggagaagatcctgccggtggggcccaccagcaagtgaccgagtaagacccggaaagattagttgcggttgcggcgaactcggggggtgagagccagctccgcgtggattttgttcaggtgcgagcgcggatgagaacgatgac

SEQ ID NO: 181347 - DNA, 503 bp, Zea Mays
agcctagggtcgagcgagacagagctaaaagggaggtcggacagatcaagaggaagccactcgagtggattccacgcctaacccaggactggtccgtcgtaagcgatcgaccgcattaactgtgcctagccccgagccacagagggagagtcagcccaccttccactcatgacctatgtggccctaggccttcgtccaactcatgacctatcgtgcctaggcctgagtgcactagtcgcctacagaatccgcaacatgacgagtcacacggagacccaggctacggtggttaggggtcaacgtggcacaaagatgacaatgatggtgccagaactcttcatagctcgctataaagaacgtgaccagggaagccaagacgaatgatgcacatacagacaaacacatctttaccaaagtagaacaccctgttttaccacatcatagtagatccttcccgaggtcagccagaacacggatagaaggaggaggtcgacctataaaag

SEQ ID NO: 181348 - DNA, 458 bp, Zea Mays
gtcgcaggagacccgcgcccgcgttcccggccatccagctcatcggagaccactccaagcctacccgagctccgcctcgaggtgagacacccgtccccatgcccaatttcccctattgtccctgtgtttggccaatttcaccttcgctgatgctccaccgcggcggtccgccgtgctcgtgcggtggccggccgatttagccaggtctagttcaccggagtaggtccctgtgtcacccctgcctctgctgaagttagccaaggccttagtgcaccttaagccccatccccgtggccggaatggctcatcggagtcactccagcccgtccgaggctttctcaccgccgttctcccctctctgcccgtggattcatggcctcttccccgccattgagttcgccgtggcgccctctccctctctgcccaactccggcgaccccggagccaccctaactcgc

SEQ ID NO: 181349 - DNA, 337 bp, Zea Mays
ctctgtgtgcattaagtatccctgcaggttcttagctccttcgggagggttttcccacctcaaatagccatttcaccgaaaccctaaatccccgcacaccacgtgctcggtgaaatgcccaaaccagccaaacttgatccaattgaacccaaatttttcaggcaccttcacaacacttccagcaacatccttgccaaatttcacgccaatccgagatcccaggcttaaatttcaccaaatttcccgttttgagcgatcgtttccgagccgagtgcccaaatctctttttcttcgcctaaattcaaaccaagcacacacttcactcatattcacctat

SEQ ID NO: 181350 - DNA, 458 bp, Zea Mays
cccaaacccaagcgccgccactgccagccatgtcgtctcgcttccaccacggcggcggcgacgaccaccgcgtgggcgacgcgggcgacgccgccctcgcccgcgacatcgtcacgctccacaaggcgctctccctcgacccttccacccaccgccgccgcaccctaccactcccctccccatcccccgtcgtcactgagcagccgcgtaacaagccccgtctcaagccctcctcctcctcgtcgtcgtcgcgtaagctcctgccgtccacccctaactcctcctccgcttccacttcctcgtcctcgtcttccttctggaagaagtccctgactgccatttcgcacctgggccgccgccgcctcgacttcgcgttcgcgctgcatgtgcactccgtcaacggcctccccgctgcgctcgatgggtctgcggtctccgtacgcttccgccgaatgtcc

SEQ ID NO: 181351 - DNA, 734 bp, Zea Mays
agacaacctaaggctacctgcagcggtactgcgaggtgtccccaccacttctttagcggctacaggagcacgctacacgccacaacggtgccccatatggtgcatgtcaaatcgcggtaggcttctctctctccctccagatgaagttgggctctaccaagcggtcgccaacttcgctctgtctcccgcgttcatgtcgaggttggcaacgaatgtattcgggcaacgctcgaggcgacgatagtctcccccaccgctcggaccttccaaggagttcctggagcatagtgtcttcatcccacatcactattgtcatcctagatcctcactagcttccgcttcttccctcagtcaccctcggcacgtaatgacggcgacgctgatacttgggcgctcagcaatggcagggcagtcctagactccacgtatgcctcagtggctctcccacacttgtcttgccaaccgcctcacgcctttgcctctggtcatccgcacatcggccgacgactctacgtgtcgtcctcctgctcccctcctcccactggtggaccatcaaccgcgcccggctctagcgtctgcactatgcgccacatgcaatcgttgggtagcagaagctagcagcccgctttgaatgacctagatcatatgaagaagatgccccagatgctactcgactacaaggtttatgtttctcaggtgactaaatacatgatgtgctgatgttagcgattctt

SEQ ID NO: 181352 - DNA, 529 bp, Zea Mays
gcttgaccgatcttaagtttgtcgttttgtagccttttatggatatctcacggattaggttgttttagaaaaatcatagaaaatctcgcccgtacacccaatgggtggtgtgtaagttgtcttatctcaaagtagtaacctgatgtggcagtgcgtaataatgcgcctaagcggttggttttattcctgttcgatgtcgtgttacgccaaggggtgtcagtggcgtgaaatttcttggaaatttacatggctcttgaaggctttacgacctttcgttgtacagacgggagccgaagggtcgtcccctagcttctttaaatagaccgttcacctgcaactatcttcttcactcgctctagtctcatttcctatttccacttcccctactctaaaatccctaatggcgcgaggcaagagcggcaagggcaagcgtgacaagaagaaccagggcggcaagaggaagcaccctccgaatcctccgtcggaggacttagatgacttggagtactcgaagtagacctgttcaaac

SEQ ID NO: 181353 - DNA, 654 bp, Zea Mays
tgtgaaacgacgtagcttctaatggatcggctttgcttgaggatacaccttttgtttgtgcttggccagctctctaaggactccctgcatgtctacgggttgccacgcgaatacatcatggttgtcttgcagaaactggacaagcgtgccttcctatttggcagtgaggctggaactgatgatcatcgtcttgcgctcatcggagaaaccaaggttagctctcttgggtttctttggtcagtcgcatagtcatagcggtagatgcttcatttgtggggattgtgaggtcatcccctggcgatgagttgtcgttcgtccctagaaatgacatcgagggcccagcggcgagggccctctggatagcccctaaaagcattcagcggctccctagaagtcagcccggatggtgacgacaccctgagttctaggcatcttgagtatcatttatgggtagtgtgggatgtccatgaatttgtacagccccggtctcccgatgacggtgttgtacccgcactcgaactgagctatctcgaagcataggaactcggtccagtagttgtctggagcgctgaaggtgaccgacatgaagatgtgccctaacagaaactacccttcagtcggtatgatgtcgaagaatggggtatctgactgaat

SEQ ID NO: 181354 - DNA, 558 bp, Zea Mays
tcgaagccctgccccgagtacgtggcaagtccgtcatcttgacagtggtggacaggttcagcaagtactgtcattttattccgctggcacacccatattcagcggagtccgtggctcaggcgttcttcgcggaaattgtccgcctccatggggtgtcgcagtccatggtgtcggaccgcgacatcgtgttcacctccaagttctggcgggagctcatgcgactgatggggaccaacctccacatgacatcggccttccaccctcagtcggacggccaatccgagtcggcgaacagagtcatcaccatgtacttgcggtgcctcacgggtgatcgaccacgacaatggctgcagtggcttccgtgggcaaaatacttcttcaacaccgcctaccagagctccatctgtgacacgccattccggatcgtctacggacgcgatcctccatccatccggtcctatgagccgggggacacacgtgttgctgttgtggccaggaccatggaggaacgcgaggagttcctcgctgatgtgcgccatcgtctggagcaggctcagg

SEQ ID NO: 181355 - DNA, 310 bp, Zea Mays
attttccaaaagactccgcgcaaaagtcgcctacgggtgcagccggaataataggtacgcaaaatcgaagtcttttccaaaagactctgtacagaagtcacctacaggagcgacctgatcaacgaaagcgcgcagcttcatcacacaaaattatggttacatacacacagcgagggcatcacatattacattggctcaaccttcgggatgatacccatctcctgtagttgaacaacattatcctcagttcctcaccctcgaacagatttcgcagctccccctcacctacactcaccccaatcggcgagga

SEQ ID NO: 181356 - DNA, 703 bp, Zea Mays
cttcctcttgcgcatgtatcgcttattgcctctcacgtcgcgacgcgcaccgtcgacaacgggcggtgacaacgggtatcggagacaccggtcctcggcatcccggcgctaggcgacttccatcgacggtagctcttctatgaggtgcttggtcgatttctctgtcgctcgtcgcggtgcaatctcggcgttggcggcggggatccgagttaggggcgtgggcgacggtagaaggcggcactcgtgacctgttcgacaggaggtctgagtgcctatctgcaaattgggcttcgcgtgcacaatatgttggtgttcgattctttctgttcgaggtctgtttgttttcccgtggcaattacagcgcctccaaagccatcggtgcaaactcattttgtattggatgctatggtcgtaacttttgagaaagaggaagcgaattgtcatcgtgttctggacaatatcgatctgatgtttgctaatcaacaatgtacgatggctcaattggatcacaattttggggtgattggtcagcttaccaacgatcaacgccgtaagcagttagaagagacagcgccgtggtagatcgtctgaaccttaaccggatggctggccagttggatgatgatggatccagtcaatcatctagcttcgagcgctggttgggcagtctccatgcattcgtcgtactaacggtcgtggtgag

SEQ ID NO: 181357 - DNA, 712 bp, Zea Mays
tgtaaatcatgtgagaatatatcacctatgattaattgaactttagtctatgttataactgtattagattcatatttttgttaggctgtagtcatagattaatttataatgtcacattaaccttgattagaaaagtcaatgtaataaaaaagtatttaattatttctgaaaacattaaaataaatgttgtgatcatgtagacaatactaatatgaagctaacgcaatttgaatggattaaattggagttgcaatgccaaagttatggactaaataagttttatgagttaattgatgtaaattttatatctggaattgcttccagaggattttctgcaaacgccaggggcctctatgcaattccctactactgtcgggacgacgggttcaattgtagaaaagggtaggggctaaactgcatactatccgggttgaaggggtatccatgtacgagggccgatgataaatctgtggtcagaattagattctcattgtaacgaaccataacgctataacgaccgtcagatcaaggtcagactatccggatcacaggcgcggagggactcgaccagagttgcacatcaaccaatctacgaccctgatcgggtcggatcaacgcggcaatccggttctaatccacaccgtctatcaccggatcaatgacttgacactaatcccccaacatccgcctagatacctaatcttaaccgtct

SEQ ID NO: 181358 - DNA, 391 bp, Zea Mays
caatgggaaaccggagtgggatggaggggatgggggtggaggaggacgagggagggagcgcgattacctggaactctggagcgccggtggagaataccgatggccagacgagcgggggaaggtgaggtttttgggggaagagagagcgcgagattgaagacgctggggaggagggagcgtgagactcggtggcggagagacctagaagaatctgcaaacaacggacacaggggagaatggcaccactggataacgatccaacggccaaggacttccggattccttgctggtttaataataaggaatagcaggggaggcaatgcggcagggagctgaactggtggctgcgtccgtcaaagcggcagcgtctggtgcgagcaaaaaaaatggc

SEQ ID NO: 181359 - DNA, 588 bp, Zea Mays
atagtgggtttatactggtttagcctttacagtggagtctcgcccttgacgagaaaatagagggaaagagagaggcctatctccctaggtcaacgagctaggtcttctttcccgtgcatggccgtacccccgatatggtgttgtccatcatgttggtccctgtagcgagtccgttattgacgccctggtggtagtacgtggcgggtcctgcgagtctgtcctagggcgtgatcatacgcggcgtggtttcgcccgttgtatgccctgcgtcaccttccatcatacgtggtacatacgctcgttatggtgtgttgtcccgtcttttccaatatgtgggccactgttgagacccctgtgctgaggtctcccatgactgaggctgaccgaccttacggggcaatcgggggcatgtttgaactgtttgcaggggcgtacaagtgtgatgatgatgaacccttggcgctcgtcctgtacagtgtgcgcatgtccgggcgtggctaggtgatggcgtgtcttgtcgcatctggtgtgggctcgtaccactaggttcggattttcgcctcgcgggtttgttcagtggagacttgg

SEQ ID NO: 181360 - DNA, 691 bp, Zea Mays
gcgagatcaaagggaaacagagaaggtctagaagcagaaagtaaagctagggctcagaatgcagaggcatgcgatggcgcggtacaaatggggttttcccggattaggcactgattctaaaagtgcccagtcatcactcggctgttacttctaaaacgccgacgtggcttgatgtaactcagctgttatttctaaaacactgacgtcaccagtcttcactcggacgttatttctaaaacgccgacatggctcgatataactcggctgttacttttaaaacgccgacgtcaccagtaatcactcggccgttatttctaaaacgctgatgtggctcaaaaggactcggctgttacctctaaaacaacggcgtcgcaaaaaaaccattcggctattacctctgaagatacttatagtaaatcagccgttttttctctacgaatatgcaggcggacttaaaatgcgactcaacaattccaagtcgttactcgagcattacctccgagaacaacgactacattaagcacaaatacaatcgatcgtccgactgcaaaaggaacagtggaaaagcaaagaaacgcacacagaacgagatggagtcttcttcattatataaggaggggaagtatttccacaaacttaaaaaccaactcattatgagttggtcttcttcccactgtccgatacattgcac

SEQ ID NO: 181361 - DNA, 561 bp, Zea Mays
ctcttccaaccacctagatgcagaaacattctagacaattcactgtgatggcgcctagtgccatgcaggggtcgatgccacaacaataataacagctctgtcaggcgccaagtacaagtatgccacacgcctcggttttgctctcgaaacagacaagtgtaccaataatatagcagagtacggagcagtcatcttaggactccacaagctaagagcactcgatgtcagaacatgcatagtgaaaactgactccaaactcgtcactggaaaaatcgagaaagacttcgtagctcgagaaccagtcctcttgcagtaccgatgaacagtgtgcagtctagaaaaacagttctagggcttcacgcttcagcacacagacaaacaaaaatgaggacgctgacgcgctagcgaaggcttctgccagaggatatcccatgccctcatatgtattcttccacatgatcgaaacctcttcgttaagagacaccgaaggcctaagaatcacaaaagacccaaccgaccaaagaatcgtaaatctcattatgaccgaagattggagggccc

SEQ ID NO: 181362 - DNA, 763 bp, Zea Mays
atgggtgtgacccgactaatgctgaacccaatgggtgtgaccttgattatgttgaacccaatgggtgtaatccggccaaagttgaacccaatgggtgtaccgtccgcattattgatgaagatgaggaagaggaggaggaaattcccttgattcggaagaacagctggcgctacatagccagcggggagagtagtggtgttccttctccagctttgtctgctctcgttggtctgcaagagttgtctctggcaaattttgatcagactctcgaagacatggtcccagaagatctattgtcagagccggtagatggtggaatgatggaagtttgcgctgatgtgcctgatgccgggttagagttatcccgagcagcatctcgtgcctcgtcgaccttggagagcggtattaagagtcgagaggctgatctggattgctctgttcccatggaagttgttgaagatccttcagccttagaggtggcagctacagagagctcggtcctcaaggatggagctagcgtttgcccagcccccgagggtgttgccggagatgatccagctcggatgggtagcgcgagctatgacccagcccccgagggtgtccgagtgggttctccctctcatacttccatggatgttcatgtagggtcttcttctccgcattctggttgcatggtagcggcacaggcttcggatcaggaagtcgccttagaggtcggcgctcctgatgacggaattttgatttccgctgatgacattgagtt

SEQ ID NO: 181363 - DNA, 1037 bp, Zea Mays
gcgaatcatggcgcgagaaccccccacccacggtgaagtgtgaaccgcggcaaacacttcaacgccggtgcaaaattcagccacccccgaggaccgcttctttgctctagtgccacggacttgctccttgcgcctccaccagtccttccgagccactatcgcagacacacagctccaattgccacgattcctcggcagcggcgatgaggttgtcccgaccccatggacagggagtggcacaacaacgagtgcatgggggaagttggcggagatcgacgcaaggagcacggggcaagcttggcgtcgacgcagtggaatttgagggcggaatcgcggagaagacgacgaacttctccctctacggcggagctcccctgggcggtactctccttgccggcggcaaactggatggcggccagggagcccaccgcggcggacgctatgccagagcataagccggactagcctcgcgcaggagcagaggggtacagtggagcaggagcttgggaacgagggtgtggacttgctaccatggatgagcacgacgtccaagagccaaggcgcagggcaaggatggtcaggtaagcggagggagttccactggcgacgagggaggaacgtgccgggggggtcgacggcgaggctggcctaccatggcgcccgcactctctctctttcagcgctacctagcgactcgatgttctaggggctcgaccctggtgtggttcgcggcgaggaaccacgatgtgggactttatccccggaatcaggtgacaacaacccacccgaatcctaggggaagactccgagctggcatctttgtagtttctgttggcgctccccgattctcttggggaggttgacgatgccagacaggtgggtccctcggctagagagagcagtagcagcacgcgaagcgtaccggctgacaggctacccggttgggccgagtggtggagggaagtcgtgggctaaaagcaaggttaaggcccagttcggttaacactttattctttctttttctttgttgtgtttcc

SEQ ID NO: 181364 - DNA, 866 bp, Zea Mays
atatagatttaaaaactttaaaaccccgcagggcaagggtcgggtctacgaagtcggaggaggaaggatgccacccttggagtcactagagggcacaacggcggtaggcgacgagatgggaagaaccacctcatgctcgtagtggtgagccagcaaggaccctagccccttgacggtatcaacgagcctctgcatctcggcatcggcaaggtcgggctcatcggggaggacatagcccttgcacaccccgctcaagatcgatctcgtagtgagaggcgaccactaccaacgctcgattcacaacaaggtgaatggcctcgtggagttcgcctcgtatgtagccactttgggctcacatacggctccgtggggactctcccttggggacatctaccacatcgaggtctcggctgaactctaccaccgcgtcgggcatctccttcaaatcggccaccttctagtccatggtctgggagagcgttcgggaggtctaggcggtggtctccagatccatctcgagctctagaaaaagaaagaaagtgttaagccatgactagaaaaaaagattagaccagataaaacaagacttcagccaaatacctcccatctgggccctcaaggctcggccctcagaccgctcgacctccaagtgattagagagggagtcaacacagagggaagcttcggtgacctgacgccgatattcatcccactccacggccaccgcctgaaggttccccttcaacaatcacatctcctcctgctacaaggccacctctgtcttcaggcgactgacctcctcctctagcgaaggcaccttcctgcactcggtcgcgacctcatcctttatatcagcgcacaacaac

SEQ ID NO: 181365 - DNA, 458 bp, Zea Mays
tagaagttatctctgtatgagtaatcataattacgtcgaatcgccttaagtcgatgctgacttaagtcgattatttttgttaatagggcgtagtggtcaccctgaattgcgtaggcatgagcatgttgcaccggcttaagtcgctgctgactttagccgattgttccattagtagggtatagtggtcaccccgagttaagtaagcgcgagcatgttgcaccgccttaagtcgttgccgacttaagtcgattgctccgttagtagggcatagtggtcaccccgagttaagtaagcgtgagcatgttgcaccgccttaagtcgttgccaacttaagtcgattgctccgttagtagggcatagtggtcaccccgagttaagtaagcgcgagcatgttgcaccgccttaagtcgttgccgacttaagtcgattgctccgttagtagggcatagtggtcaccc

SEQ ID NO: 181366 - DNA, 789 bp, Zea Mays
atggtgctctgtttgtgatgaattaatgaacaatttgaagtgtatttaatatctagcttgtcagatttagttatgcaagtttgctatattttggggattgatgtaccgttggaagcttgtcaaaaatctggaaatgcttctctgggtagaatgattggactgttctgtggttggattgaatggaatttagcagttcagatgttagtactttgttaaagcgaggatggcacttcttctaaaacaagtgaatggagtatgagttggatgattgattcaagtttctgtttgatgtgatgactcttgactcatggtcactgtattatgaactttactatataaactcaaacatttgaaattgctataacctgtaatctagtgatagcaatttttgtttgggtcatcttggcagcagactaatttatgttccgtcaatcggaccgcgcgaggatgcacatttattagtgtttaatggaataactggttttgactcgaaaacctatggggaacataacattgggttttggctgggtggtcgacaatcatcaaatggccaggacacccaattgtatattattcctactgtcccacatgcgaatcatgacacagatagaaaaaggagggtacacgtcaaaagaatcttgctgaaatggatacctgtaaccatggacatggaggggggactgcgttttataagtagtactctgtagtacattgcgagtggttctactgagaaaaaataacctgagaaaagtaatataacccttgattgcatcttacgaaacataaccc

SEQ ID NO: 181367 - DNA, 320 bp, Zea Mays
cacatgcaccaatccactttattctttttgagtacaagaactggatttgctaaccactcgggatgtaacacttctctaatgaatccggccgtgaccaagcgagccagctctgcacggatggcttctctcttgtcgggcgtgaaacgacgtaatttttgttggatcggcatcgcctgggggtagaccttcagtttgtgctcggccagttctctcgggactcctggcatatccgcaggttgccatgcaaatacgtctcggatatcttgcagaaactggacgagcgcgccttccttgtcatccaggctggaactgatgatggc

SEQ ID NO: 181368 - DNA, 880 bp, Zea Mays
tctatattccatgaattccctatttccgtgccatccatttgagtaagcctatatgatcctggccgagtgacctctgctactacaaatggcccttcccataatggtgataatttgtgccgtccttcccccgttagaattcggtgaaggaccaagtctcccactacaaaggatcgatgtcgtatggccttgtcatgatagcgcctcagggtttgctggtatctagctgactgaattactgtattcaatcgctcttcctccaatatgtcaacgtcctctaatatggtagcctctgccttagctatgctttcgaagaccaaccttggtgccccaaacttgaggtcagcaggtagcactgcctccgaaccatagaccatgaataaaggagtatttccgtgcagagctcgactaggttgagttcttaagctccaaaccacatacgataattctttgatccattttcctgcaaacttttcattcttgtcaaagactttcttccttagtgcttccagtatcattccattagccatttccacctgaccgttggctcttggatgtgctactaatgcatatttaatctggatgcttcgttgttcgcaaaaatcgaagaattcagagctagtgaaattggatcccaggtcggttatgatgctattcggtatcccaaacctgaatattatatcgtgtatgaactccactgccttggctgaagtcagagaagcaatgtgtttgtattctatccatttggtgaatttgtcaatggcgaccatcacatgatatatcctccctgagctttcttaaggatccaatcatgtctagtccccaacatgcaaatgtccatgtcacgggtatggtctgcagttgttgtgctcgtaaatgctgc

SEQ ID NO: 181369 - DNA, 289 bp, Zea Mays
gagttctcctgtcgatctagtggttgcgtagttgctatgagaggattaatgagctatgaggtggtagtgggatgtgacgagataatcgtaggcgtaccccctcggccttatatagatgacaagagggttatccctttacaagtcgtgatgactatctaactctgtctgagtctatccttttaacgcgtcatgcattcctgcttatccagagtttggttgagcttcacccgagttatctctgagtatctaacacttcgggtatgcgcaacctccctgcgtgagacatcgg

SEQ ID NO: 181370 - DNA, 566 bp, Zea Mays
cagatacaccaaaacaacaggggcttcaggggaaggatccaccctaggcaggttcgaagcattcacaactcgatgcagtgtgaggaaaagatggcccagtcttagggtcagtcgatccagcagcaagcaagctcccagtagcaagcaagctcccagcagcaaccttcgcataacacatttcgtccacctgctccaagaggcggaagaggaggccaaagttttggtggtagattcaatgcacctccaaggaagccattctgcttgttttgtggtgaagacaaaggccacaccacaagaacatgccatcatactatcaacaagaagaaggaacttgcttcgttggccactcaaccctcccggtcaaaagaggtatttagtacatcgtcgtattgttcaccttatatcccacattatgtctaacctcagctacaggagccaaggctaagtttaccttcagcctcaaacgcattaagaaatccagtgatgagcgcatggtcaccatctgcctccttcgtcccagaaccacctccctatggccaagttcctgctggtcaccccaaattccc

SEQ ID NO: 181371 - DNA, 568 bp, Zea Mays
accttatgttaagttgacgtttctttttccgtttttcgtatatatgatcctgattcatagattccatcatgctgttcctgtcatctgtatttcactacctgtttaatagatgtatgtataagccagacatgtaggtagtatggtgttgagggttaaaagtttgattgtatggaagaactgactgaagtgctggctttaggataaagacaatggcttttgccatatcactttctgctttattgaacatattttcttcaaggaagggcagtagctcttccaattcactaaagaagaatgtaaattgcaccagatagttagcataactgaaattttcagcaaagttagtacttgcgtggcctgcattgttcgacctaagtggttaggcttttagcggttagtttgtggttgcaattccccctccctttctaccctgtatgcagcaaaggaaatagtattttcattcttcacttttgatgatttgcataaagtaatgtagaagaagagcttagcttcatatattgtgctgagcaagtgagcatactttatgaaatttgacttctatagcagg

SEQ ID NO: 181372 - DNA, 531 bp, Zea Mays
ttgtcgtttgtgtgtggaggcttatgggttttgctgactggagccaaagatatggagtgatgaagtttggtttgtctcactactgaactccgagaggaaatcccatatttgacgtgtctagggcacgaatctcgatgccatcttcacatacattgtagaggggttagtttagaacaattttgtcaatggggacttaaggatttgagctagggatcaaggtgaacatgctcaagttctaggtgagggctaaaattcagcaatctgaatttcagattttccctagagagctttcacttggatggcctttttggggattttaattgattattttggccaaacttttataacaaatattgtatcttaattagtgtatttcaacttttataattggcctaagccatgattccatgtttttcatggtctttttaccaatttcttccattctacttaaatggcctaattagggttgttctagggtttaaacattttcccattttgaatgcatgatatgatttaggcatgagtcttagg

SEQ ID NO: 181373 - DNA, 425 bp, Zea Mays
atgccttgggtggaccaacgactttaccgtttgtctgaaaaatcgaaagatcactacacggaggcatctcttgttcatcatcatggtacctcttctttcgagcaaatacattatgttcttctgcaaagtaacaacttgtgaagtgtgctacctccttcagtttaaattgttccgcaatacattcttcaactcttgccttattgcccaccattgctctaagttctttaatgctcttactatatgaaacatccacctgtactgaacaggaccaccaaccttagcctcatatggaagatgtataaagagatgctgcataggattgaagaaacccggtggaaatattttttccaatttgcacaaaagcactggtgcctctttctccagctgttccatcacatctcttctgatttctttagcacacaatt

SEQ ID NO: 181374 - DNA, 695 bp, Zea Mays
atatttcctcttcgttccataccgggaaccacgcccggtccctgcggggtggaaaatatcccacacgaaggatcgctgaggcatcacaaatgaagggcacgaggcgacggtggcggcgacggctctccggcgtcgatctaccctgcgtccatgtttttataggtctgcttcttcgtccctagtatatttaatcttgcaatacgttgggcggtcggtcctttgcagcacagttggagctttccgtccgcacgtcagctcgtccgatgaggtcgctccgttggcgtccaacgagggagctttctattcccttgcagggcagcaggtgaggtcactgcgtcttattcgttgtcgtgtgacctgattgcctctcctctcctgactgcctaggcgaaatctttgtcatgttctcaccatgtttatctctgcctctgcgctatgcctgctttatcgtcgccgccccgagaagcccttccatgtgcatgtcgtcaagcagcaaaaaaacattaatgacgagcaagactgtggactgctactaaaattcatcaggtcaccgcatctgaaattttgaatacgatattgattagattaataggcatatctgaataccgccataacatccatccaaagttgcactagtagctccctgtgttatatatttaaacatttggttttctgccttaaacgacctgaatcaa

SEQ ID NO: 181375 - DNA, 543 bp, Zea Mays
ggctcactggtggctattcggcccaccaggggatttccctcgcgcggcccaatcccttttcacagcgcacgcccgaccaattgccatgtgggacccttctgtcggtcgcggtgatgcacggcgcggtttctagctcgctgccatgtgggccctggacgcaatgtagatcttctccctagctgccgcaacgcccggccgattcctccgccgctgcaagctccaactgactgctacccgatccctctccgtgctagcatgtggggaggggggtataaaaccctaccatcaagcctccttcctcctcctaatttgccgccgccagtaaagccaccgcgaggaagaagactcgagggagtgttggttgtgttactgtcgtcgtggccgccctctcgtaccgtgaatcctcacctgagggtgttgggtgatactagcggtggtcgtgcggggtgattcttggaccgcgacacataggttctccaccagggacgtctaaattgctcaccggacttcatcctacgccgctgtgccgcgcgtctacgtggc

SEQ ID NO: 181376 - DNA, 341 bp, Zea Mays
gcagagcgggggagacgaggagggccgaacggatgcagcattggggtgagcgcggaggagggggaggagcttcacgccggctagagcggcaatggcgacgtggtagtggtgaagacggagttagggttccaggaccctaacttggaggcaacgacagcgacaaccctcatacagtgtgagggcgagggcggggcgaggccagaggcggggaaggagcttcacactaatgacagcgactaagaggggcagcccatcggggtgtcagtgtactcgagggaaaaacctagcctgttcagaggggtgtgtgcgccttttataggtgacgattaaccgagacaaac

SEQ ID NO: 181377 - DNA, 1405 bp, Zea Mays
tccatgggtacgtatcggaaccgacgtacccgtgtcgctgtagcacgctgaagatcaaacagcctgggatccgcagcaagtggtcgcacctcagtctcatcgcgctcccggaagtgagcaggtgggataggaggagcggaagcgggagcggaaggagcagtggaagctggagtagtggaggtggtaggtatggctgaggtggtggatggcgcaggagtgactagagcaggggaagtgggtggtggagtggtagcagtggagggagtggtaggagcggaggagcgaggacgagaggcgtgacgacgaactcggtaagcaatctgatctaaagaaatccgtagctaatctcctctctctctctctctctctgcctgctcagcgactgctgctgctgctcgggctgctctgtccagacactgcttcttgcggccttcctgttgctccaaatgcacagtcttccccttgacctgcctaaaggggtgagaaggatcctcatcatctcctccccctggcgccgacacattcttcgtgcgtggcatcctatcccgatgactgcaaatgagagagcgaagctaagcacaagtcgataacggccgataggatgtcaaaagaacaaatggctacctagaaatctcacaggagatggagagaatccaggcagggcaggagacggctcatgggcaggcaaggtcactgaaatgacagaagaggtgagcacgtattagtcacatagtcataagtatatgaaatgtgaataaatacatacatagagtgttatggcacagaaatcgagagttatggcgatcgagaggtcaaacgacgcgaaaacggcgtttgaacgagaaatagtgtcataggaggtttgaaattgaaaatgaggcatgaaatgatttggaattgagccgatacttcacgaataggtttatatgggtaaatatgagtgaagtgtgtgcttggtttgattttaggtgaagaaaatggaatttgggcacttggctcagaattgatcgctcgaaacggggaattgaatgaaattgaagcctggtatatcggattggcgtgaaatttggcgaatatgttactggaggtgttgtgaaggtgcctgaaaaatttgggttcaattggagcaattttgagtggtttgggcatttcaccgagcatgtggcgtgcggtggattagagtttcggtgaaaaggctatttgaggattgaaaccctcccaaagggagctagaaacctgcagggatattcaatagagcactagacacattcacaaccacttggattcacagaatttgataggaatttgaatttgcacaaaaggagggaggggagagcttctctggtggcagaaacagagagagaaaaggggaaagagggagcaggggctgctcaccagagaggga

SEQ ID NO: 181378 - DNA, 500 bp, Zea Mays
cgtcgggccacggtgacaggtggcttcacggtggagagctactctaatgagaaattcatgatgtatcggtggttttcttcgcttgaggaggctacggttagcatcaaaagtcacccacaaatgccccgatactccactacgaccttgtcattgacgcagtgtgaatcgagctcgcggcgggtctcttccctctccctatttctctcgatggcaagactctcaagattgaggttggctagactatcttagctggatgaaagtgatggacgaggggaaatggccatatatatggggcagggtactcaccagggccacgaatctcgctgaagtttggtgcatatcctggacatagaacgaagttcagttggagagatgaaactggtagctaggtcccccatgcagagatgtgaagtagcgtatgtgcacgggataaaggctaacgcgcgggcaagtccatgcgcatgtgagggagtggtggctatcaagtgttacccatggtc

SEQ ID NO: 181379 - DNA, 1107 bp, Zea Mays
acaaaatgaaagggggagcaaaatgtctagatgatttattatactctgaaaatactcatggaaacaatttcattctttataatatgcatgtagtatcttttttaactaaaagtggataactggatgtagttgttgtgtgccttatactaatcacaaaaacggttcacacggtccatcctccgttgtacaatgtatagacagccatggcagaaaaccatacatttgtcttttgaatgtgccccttccttactgtaattttaccaatttattcagctcaaggaatggtttggacgtttggtcatgcccccccctctaaaaaaggagattgatatggctcttaggtatcattatgcataggtagctaagtgataaattaacttgggagtgctaatctctcttgtactctgtcatgatagggatttataattgcatcaacagctactgaggagatgaggcactgataacacccttagctttgtgttgtgtaccaactaccaagcaccaaaatattcctccctatcatgcctgaattaagagaggttacatttgtctgcttaccttctttcaggtaccgcgaacatgttgtatgaatcaatagagacaccaagttgaaacttttatgcgcccatggtaatcagacaacatggatatgtttttcttgatattgtgttcataaatgtgcccatggtctaggtaaagtaaaacattcttgggacagtcagggctgtgagaaaacataataaaatatatgtagctcatgtaatatcaattttttgaagttgtattccttggtacacaactcttttctactactattttaaaaaccaagtttaacctaccagttgagtagttgtcattgccaatagttgtcttttttataacacctcttttttataacttctgaattttatcccttgtggttacgatttcatagttaactttgcagaattaatactttgaaggtgacaagcagtacacacaatagttccacacgtcctagctaaggtgaggcatcaactttttattttcctgtggaattcagtacctaacctgatcattgactacttgttgtcaccagtatactactaggtattaataaattgtgta

SEQ ID NO: 181380 - DNA, 526 bp, Zea Mays
cccatgaatgcgttgtcccgtgaggggtgcaaacactatgaggtcttcgaccagtcagatgaaaactttgagcgtgaaatttttaaggtcgaggaccctgtggtaaaggattctgcgggggcactctttgatcggatgtggggtcctcatggccgggaggcggttagggagcggtctgaccgggcgagagagcaggtaaagcttgtcttttgtttcgtgtggttgagtgtgggtacgtgtggttttgctgaatgagtgtgctattgctgcagatggcgcgtgccgaggatgtcgaagaccttggagatctgaacggcgcgtggcccgaggctgaggtcaacctggtgctgcctgaggctgaggtcaacccagcactgcccttggaaaccggtgaaggctcctccgctgcacctgtgtctactgtgtccggtgaaggctctttgccagcccctgcgccggcggcggaggaccccccgaaggcggtggcggagccggcagcagaggatcccatggcggcggccgggcc

SEQ ID NO: 181381 - DNA, 1042 bp, Zea Mays
ccgcttgggctgcgtcctcagccattcggcccatttggccaaatcctccgcatagcccaacacctggaaatgtggcgccgacaccttgggcccagccgccagtctcttgggcgagtgaactgtcgctggcacgtgggcccgagggatcagttgcgccatcttcctcctctgaaacgaccgtgcggacctgtcgcggcggcgtcaactaccgcgcgcgaatcacggaggcatggaccgagctcatgccaggcgcataaatggattcgtctgggtgctctccgcctacctcgccacttctcgtagccccactaggtccgcaaccgacctaatttctagagccaccgcaaccgcgaaacccgccgtggtcgaagcacgcaaccgccgtcgtaaagctgacctgagccattgagggagcttcgcctcaacaccctgaagatatcagtagtctcgccgcgcaagttttgaggccagagtggcgtgaattggtcgtcggaggaaaagctctgccgtgcgctcgcacttcgtcgtggtcaaccatcgtcgcgtaatcatcgccggtgagataaccctcctcggattcacgttgctggccatacggtgtagacctatttggttgggtggatattccattgggggcctcggatcgcttggctccggtgatgggcgccaccgtgcgaggggctacgccaccgccgtagaggtagctgagtcgggtgttggtcagggtcgttgatcgggaaaagaacggccaggattagaacttggcgtaccgcttgggttgaataggcgtaaccatctgattgtgatccggtgactgtgattcaatctcggaaaataagatcgggacctttgatatacccatcaacggtctgtttgtgtatgagaccatcggggtatccggaccgggggatcaaaatcatgcggtcagttttgcataccggttcgacgtaatatagatttaatctgcgcccttcaaatctgatcagtcggctctggattcaggttacccgttcgctctggcgcatttgcgtaagaccccctc

SEQ ID NO: 181382 - DNA, 487 bp, Zea Mays
ttgcagcctcgcccagcgtagtcaacgcatcattagtccaagaaaaggcaaaagacggcaagactcaccaatgtccaatatattttgtctctgaagtcctcacaagctcaaagtgcaacatgacacagctcgaaaaaatagcatgcacggtcatcatggcttgacgcaagttaagacactagttcgaggcacacaaagtatgagtcactttcgatagggatctcggggagttgctcagaaatctggaggcggccgttagaataacaaagttggtggtggagctcttagggtacaacataaccttcgagcccaggacaacaatcaaatcacaggtgctggctgatttcatcgtagactggacagggccttcggaactgcagcagggtcatgcagaaacagtctggacaatccactgtgatggagcatggtgtcacgcaagcgtcggtgctgcagcaactattacatcacctgtcggactcaaatacag

SEQ ID NO: 181383 - DNA, 516 bp, Zea Mays
ttcttggggtcggcagtggaggagcgccagccacggcacacggcgcggaggtccatgtagcagtcgaggtcgtcggttgccagcaggaggtcggcgatgcggttgacaaggtctgccgggagcgacaaccagctcgccattgccgctcggtaagagcacagatgcacagcagcacagggttaggctttggaactgagactgggagagggagagtttgtgcggaggttgaagcagtgataatttcaattttcaatataaatgattggtctttcgtgcatttagtttgcagcgctttcgaggagctggaacttcaaacgtcctcctggtacgacggtggccgccaatactcctccaattctttctcgggaaggtgcagcatgaggacgccgttgcaaacttccaatcatcggccggggaacaatccttgaacttccaagctccaacgacttctcctggaatgtaaattgggtcgtatgtccacggctccacgcttcttggttttcaaacggcccatgc

SEQ ID NO: 181384 - DNA, 394 bp, Zea Mays
ccagctcaagtgctctcaagtcagaatccttttaagtggggtagtgttcctggcagacttaactgtcttgccatcccaagggattgatgtgatcctaggaatggattggctaactaagcacaagggtatcataagttgcgcgagtaagaccgtccttctcaccgaccgccaaggaaaagcagtttcctgtcaggcccagccgcccgccaatgatccaatgatgtttaatctggcagcagaaaacatatcggtaatagaagaattcatggatgtatttctggaagagttgcctggaatgccaccagaaagaggagtggagttctatatagatctcattcctggcactgcgcccatcgcaaagagaccataccgcatggcccccacagagttagca

SEQ ID NO: 181385 - DNA, 840 bp, Zea Mays
tcagcagctgaggcatgcgtcgcagcagctgaagcatgtaagttgtgttggacttcgatagttgattgtttttatgtggttgcgaatctcatgggtttttgtggcaggcggccgccttcaccgaccatgttgcgtcgggtgctctgactttagagtttgctgccgaaatcgagcgtctccgggtgcagcatacggatgctgtttggaagaagtcggctgcggaaaacaaaagccgcaggctgacggtgaggttggctgatgcggcgaaccatctgccgaagacccagcggcggcggccaggccttcgcaggtggcggaataggggttagggatttaagtgtaaacttttctttctgtgatactgaacctcggttgctgcacatgttccgacgtttgggcctgcgcaagcaaccactgctgacaatactggttttgtggcggcctcaagcgtagtgcctgctgatgatagtttgtttggctttgtgtctgagtgttttgagtctgatggtgaatctgggagttcgtttccttggacggaggagtcctcagatgaaggtttggattattttgttgcgttggatgtagctgcggcggagacttcgccgcgtgtggagggtgtcggggatcttgctagtgcgagtactgggtatatgcggcgaagggtggtgggaaaacgtagtgtgggtgaatttttgcgaagtggtaggcaccgtcgtatggggatggagcgtggccgtctccgagtagaccgggttggtaaacgagaattgttgtcctcgccgattggggcgagcataggcgagggggatcttcgggatctttttaagggtgaggaattga

SEQ ID NO: 181386 - DNA, 485 bp, Zea Mays
gggtactcagacacgtcgatcagactacgttattaatcgaccgagttatggcattggctgagcactggctgcgccctggcaacacgacgcaatatttgtgtcgttcgaacttggctgcgtcatgtgattgctatgtcgcgctctccattaattggattgctcccgttgagtcagaccgccatcgctgagtcgcgtattttttgcatgccctgtaggcactatctatctgccgcgagccaaaattgcgcctgttgcgcatgttgcgtggatttatcgtgtacccctattaccgagccataattgtgtctgttgcgcttattacgaaggcttgctatactgtcgtagccctgatggccgcacacgcgttgacgccagatacgctagagcttgtactcacgtggattgtggtgggttgttcaaggtcctgaagtcacattatgtgcaacctttgtaaataattttgtttagctctatattttatttga

SEQ ID NO: 181387 - DNA, 398 bp, Zea Mays
gtggttttcattgatgatatcttggtgtactcaaagaacgaagaagaacatgtcgggcatttgcatgtagtgcttcaacgtctgcaagagcaccatctttatgccaaattgtcaaaatgcgatttttggctaaaggagatcaaattcttgggtcacactatctctcaggcaagaatagctgttgatcctgataaggtgcaacaggtgatggactggaagccgccaacgactgtccgtcagattcgaagttttctgggattagctggtaattaccgaagattcattccgaatttctctctaattgcgaagcccataactaaactgttgaagaaagaagccaagtttgtttggggtcagaagtgcgaagatgccttccatgcattgaggcaacatctgac

SEQ ID NO: 181388 - DNA, 426 bp, Zea Mays
tctgaaattcagactgacagaccgatgccatgaacttcaagcttaattctaaataggatccagtggctttttgtaggaatcctatgtagcaaagttatagctggattgtggctctataactttgatgcagatctttggacaggatgccacaaagatttgagagaaaaatcgagttcaaacgttgactgtcaggccaactgactgaagaagcgccatggtacaatgttctctgtagatcagaacgccagcacgacaacctcaccgccggcgacctctttgcgccaaaattcacgccgccgccatccgggtttgtgcgcagtagggaacggataacgtcggggaggaacaaccttacgtggcgccaccgccctagccctgccggagccttcaccggcgaccaccgtgactcagtgagctctcgccgcg

SEQ ID NO: 181389 - DNA, 732 bp, Zea Mays
caagcgctaggattacatccactcatcccgaaccggtacacaacgataaccgtttgatcctagatcaacgctccggatctaattacccacatatcaactcttgaccgcctgatttgaattggacggcacacgccgcattcgactgaaacggtattcctcgtctaatccgggccgcagatctcacggtcgacggttagaaactcgtcagcaacctccgccaccccgaccggcggcgcaaaaacaccgcacgacgacgcccatcgccggacttccagatcccgcgatctagcgcatcaacctccctacagggtgctacgcaatcgtagggagctagtgaacacggtgcaaggaatattcaccggagatgggtactgatcggagttgaccacgacacgcggcgaattcgtagcgacgatgaagaattggaggcgcccaaatcgctcccccttcttgattccaccgcaagtgcgttccggatgaccaggcggagctcctcgactccaccccgggtacccaccggtgatgttctcacgcggcggctatctctttccctcatggagatccgtttggacgacacagcggcgccgaggtgattcacggggtgtcgcaaagcgaaaaagaagaggagaggagccacgacgatccgacctatatgggcgcaaggtcgtgcgtgacgcagagcaacgtagctccgggtcttcgggcgcacccgccatagtcggcgagttggtt

SEQ ID NO: 181390 - DNA, 434 bp, Zea Mays
agaaaatcgagctcaaagattgactgtcagttgatctgaatggaactcgccatggtacagtgcctgaacagatcagaccgccagcgcggcaatctcaccgccgacgaccaatctccgccgcgattcgcgccgccgccgttgtgatttacgccaccggtgaccagataagcctgccagatagtagcttttcgcctaaggataactccggtgactcaccgccgtgcctccccccttgctcaccgaacccgtggataaggttctcaccgtcgttaagccatcaccggcatccgccgcgtgtctctacctttccaccgcatcgccgtagcctactctcactcttcgttgatcaccggagtaatcgccacggcgtaggacaccaagacactgcgctagtaactttctattttctccggccgccgcgtgtcgtcatccaa

SEQ ID NO: 181391 - DNA, 457 bp, Zea Mays
cggggtgatcgaacaagtttcggtgcatggacgaacgcttgcggaccgctgagcttttagtgccatgggaaaaggctgtaaagcggtggcacttgttgcagaatgtatgggtgtcatgcatcgaggcattctagaagcttcctgtctgttcgttaacggtcgggaagtttaagaagggtgccattctggcctgcttctgattagaaacgtggtctccgatcagctggagtactcatgcttattattgatagaatgggaattggatctcagttggatgctgtgatcactgccttctagtccgtagtatttatttgttgaagagttgggacttgtataaggaaattagttgcagtgttcatgctatatggtttgatctgcagttctgcagcattctttgatcgataaaacatttcttggtttcattgaatatattaagtcaggcaatgctgctgcacca

SEQ ID NO: 181392 - DNA, 401 bp, Zea Mays
gaccctccaacatcgctcatcatccaacatccatgttgtttgtctatatctgatattgctcactttagaacctccctagcctccactttgatgtttggcgactgtgaagctccatccacatgtaagacgacaatgcaacatctatcgctttaggtgctatcatcgtcgtacatactactcgtgtagggtgccatgtgtgcgttggaccggcatgactataaacatgatgcttgggcctagcactgtgtgtgtaagactcgtgaggcatgacgtaccgcccccttgccaacgaaggcatgatgttgaattggctagttctagaggctaggatggcatctcccctgctatgttgtcaagctctcgtgctcttaccaaatctatagttggcaattgttttaaac

SEQ ID NO: 181393 - DNA, 1045 bp, Zea Mays
gtctagatggtttattgaagcttggtcccctgggtggaagcccaaagggtcgagctctctggtgacgttcttgctgctgagctcggagaacttggaatttcctcttgaggtgccctttttcttcctcttttcctctttccacttggatggctttgttggagaggtgagaaaagttgaggaagtcttggctggcgaggatggtcttgagctcgggtcttagtcctttcagaaaacgggccatcttcctggactcggtgctgacatcgtcaggcgcgtaacgggccaactctgtgaacttgtgcacatactcactgacagttctcccaccttgagttagctcccggaactcatcctccttgagttgaactatcccctggggtacatggtgttcacggaaggctgtttcgaattctgcccaggtagcatctctgacggcctcactgaaggtgtcccaccatgctaaagtcattcccgaaagctgatgagcagctagttgaacacgctgattttcggggcatccgatggcttccagtttcctcttgatcgtgcgaagccaataatctgcatcgaggggattgctggaccccgcgaacgtgggaggcttgagtctcaaaaattctcccatcctgtcctgtggccttccaccacctgggcgctggttttccagacttctagtgaggacttcaatgagtcgggtttgattggctagaacttgggctaggtctagtggtagttccggaggtgcggggaggtgggtctcactcccttctccgccagcctctccttcggctctcagaggaaaacctgctccaatcccggaggtggtaggcgtggttttatccgaagccatctgccatgggaagagagtcactatcatgcacatgccatttttttaactagttattttattcattacatcgggccattacataatacagcacacagctaccataagctcaatacacgcgagtgctatctagggtactcccgaactcctctaaagtgtccccaaattccttgagaaggtcatcaaggctggctaggg

SEQ ID NO: 181394 - DNA, 529 bp, Zea Mays
ggtgtatccatgagcactatacagtgcatgcgctttcgacagctaccaactacatcatacttgaagttgtgggcacatatactcaccatcgtgcttcatatacgatataatgagtatgatagaagtagttggacttctattgggcagagcatgttctccatcccaaggatataaatcacatataccgtcagatgccctcttttactattgactttccaatgtctaaataacttggtttctgatgtcacagtgcgctgtcatcattcttggcatcctcttcagtgatggactttgtccttagactggttccccctaatatgttttctttctctatagcccgagttagtctgccaatagtttcttctacatggtcctcctcagcggtgatggtaacattgtttcattgaagggcttcggaggaggtgggagtagaaactgaagcggtcatctggacgcgagccatctcaaaaaaggatgaagtgaagctaaacaacaaagagagttttggaggtggagctcagggcaatag

SEQ ID NO: 181395 - DNA, 327 bp, Zea Mays
catttccagagagaacaaactgaaattgaaccgctaacctccttgtgcggttgtgctggtcctcgctgaccggtcagtccgccggggaggcgaaagagaaaatgaacaagtcacctgtggcgattcgccgattccaaacggctctcgacttcccgtcaagatgagggcgcgcggcgcgctcgtggcgttaaacgacgggggtagatgctcgggagctgttcgacggaatgcccaaccggcaccaaatactacggcttactaacggaccggcccgcacttcaggctgctagctatcggaggagaagagcaaaatgcaatcgaagaacg

SEQ ID NO: 181396 - DNA, 873 bp, Zea Mays
gtgcgttccaccgccatcacagagagggagagagaatgaagaaggagtcgcagcgattgattcaggcgcatggcgacgttgggattctttgctagctcgggcgccgtgccgggacaccgatggcgtgctcgtggccttctcggacgcggggaaccaccggactcgctgggatttcatggccctacctcgccaatctgtgtttcatgggcggccgcagtgtgtcaccatgaggtatagccgctcaccgacgattttggccctaataagtgggcatacacaatcactagatgctactacgcgtgccggggttcctgatgtgcggcggaaagcggattgggcaacagaattgctcgacggagcaggggcgccaccgctgaaccgcgctgctctgtgggtgggggtcatcgtggcataatcgcctgtgagtatgctactagcatgttaatcattggccctgcatcgtgtagctcacgttagatcagggttggaccatcgggcactcggatggatcacgtcggtgggggctgcgtcgccgcaggccgtgcgcaacgttggccgggggctcgagttggggaagatgcgcgtgagccattgatttgatcataggtggatgagattagatcctttgagtagcctctcggcatggtatcttggccattgatctttagggaatggtccggattagaagtcgcatataccccttcacgccataggatctgagccgttgtaactagatcgggatgggggtatttgatcactcggtaatggattctagaccatagatcctggatctcacggcctcaagagtgtactggttcagttttaggtgatctaatattggtcgtagactttagatcgtgcggcctaggctca

SEQ ID NO: 181397 - DNA, 864 bp, Zea Mays
ggattgggtggaggaggagggtttggaggaggccttggtagtgggtttggtgttggatcaggcatcggtggtggcggtggatcagggggaggccttggaataggacatggaggaggctttggtggtggaggcggaggtggaggcggagggggagggggactcgacggtggccatggtggtggtttcggtagcggaggtggagttggaagtggtgtttacggcagtggaggagggtttggaggcggcggcggaggaggccttggtagtgggcatggtggaggctttggctctggactgggtgtaggaagtggtagtacacatgaaggtcttgatggtgttggaggcatcgggggtggcggaggacttggtgccgggtatggtggaggttttagcgcaggagcgggtataggaggtggcattggaaaaggtcttggaggtggaggtgggtatggcggcggcttcagagctagtgctagtttcgaaggcagtgttggtggaggcggcggtcattgatagggcagacaaacaagcatggtgttttgtcttgttgtgtttcatgacgtacgtggatcgattgcatgcttgcatgtaatctccagggttcatctctaatttgtctattagtccgtgtttgatatgagatttgttcgtttagagtgatgatattattcaacgtacgtgaactaataagtagtatctgctgattcagggatctcaggtgtgtataagccttaaactgtgctctgcattttgaatctgtagcgaaggaataaaacagtgagatgtgattcactcaccaaactagttcttgaccgcttacaaattgctacacgtgacatacgtcctggtctttcttgggtcccg

SEQ ID NO: 181398 - DNA, 379 bp, Zea Mays
gttatgccacaactcctaagagaaggaggatggtaaatgtattagatgttttggaaacaaccgactccataagtcccgctcccatagggaaggttgccgaagctgacaaaacgcaacccaaagctgatactaagcaaatagaagttgaagctacaataacccaggctaaaaccgaggcagggcccacagtgcctgctgagatgaagcttgccaccaccgagcagaaggctgaagaaataactccagatactaatatagcttttgagaagagtgtggccaaagaagccgaatcccttgcccccgaagcactctctgaagattttgattatatcattcaacatgctgcgagaaagagattatccgaagaagaaaattttga

SEQ ID NO: 181399 - DNA, 563 bp, Zea Mays
gaggaggcagagctcaccggggcaatggacacgacaggagctcgacggcggccgcgaaacggacggcagacgacgacggtgctccacgggtgcgtgcggagtgcgagagagaggtgcgagggcgtcaactggggagtgctactgagtgaggggagtgagcgagtgggtgcaggcttagaaggaggtcgggcatgcgggggagtggttgggaaacacgagacgtgggcacgtccatggtggatagcgcgggcgggggttagggaaggggaggatgctaacaggtgaggtccgcgagccagcgagggcgaaacacgaatggatggccagcgttggcaggatggtctcatcgagcagagagagggagtgagagtgcgcccgaagaaatcggcgccgacaagctggccccatcgggcagcgggaggtagtgagggatagagcgaggacacggtccgtcgctgataggtgggacccacctgtcaagctaagcgggcgcgcgtgcggcctggctgggctgggcttaacgggtccaaatcactttttatttttctggaattttccaaatg

SEQ ID NO: 181400 - DNA, 350 bp, Zea Mays
ctctagtgctgacttcggccgctaccagtctaaactccacttcggctagttggcatggggagccaagctgcatatggcacaagggccttgtcattccaaagctcaaagtcagtggactcataaccatagtcattagcttctctctctttttctcgtctgctttcatataaaaccattcactcttccaaccagttggccacttggtacggtagctaagaaccagtgccttcgtatcctttcgatacacaaaattgtagcaaccaaaattctcatgaaggccatctgccctagcctttgtctggtaatgcagctcgtgcacccgacagaaagcttcggcattaggacccatc

SEQ ID NO: 181401 - DNA, 1006 bp, Zea Mays
atgtgaatcgttggtggccttcgggttgtgtggtggtgagtggtcagtagcgagggcaagcttgcccttcttggcggcgagggctgctctagcgtcatcgtcgtttagtggtgagctagaacggtctttttggaaggcatcgtgggaatagtcttcgtcgtacaaacgatgggcgtcaaatattgggcactgacatgcgctaacacgttgtcaggcggacccaaacactcagacggtgggggagagctcaactgcacgacaagacaaacgacagggaacagaagcttctcgttatatgtgtctcatcccgctacaggatgggggtatttatatgaccatctaggggtaggtggtccaaagttcggtcatatcctggtcaccaactatatccggagaatattacatgtaacggaataattgcagcatcgcacgcgcagcggccagtgcacaccgaataacacacccgctaactacgctgacaagtgggccctcggaggtgcctcgtggtggactgatgacgtaacgggttgacgtgtagcttccgctgcccttgagccttcgcgctatgctacacatcgctgcacttagacgggagagcggtcgctgccgttggagccttcgcgatacggtacccttcactacacttagacggatgagtggtgacggagactcagggatgacaaagcggcgaggtccttggttgctacagactgctccgaggcctccaccgttgttatctcttactattggtcgaccgttggatcgaaggtcccttcaaccgtggacttgcgtagttagttaacatgaaacaaaatgtgaggtctttgatgtatgatcgaggttgtgttcggtctccgcccaacaatagtgattaatcggttattggtgggcaccgggttctatggattaaagtcggttgtttggactgttgcagctgtaacgcatagagaaaaaacattgaaaaatagtaaaagtcggtatggattaaagccaagcgagcatgtca

SEQ ID NO: 181402 - DNA, 793 bp, Zea Mays
tgagactcgattctagcacacatttgagacgcacacgggtttgccccataaatccgggtgtgacagcgcgcgccaactagcgcccgtgcccatgtcctacgccacaaccggcaacacagcgtcgcacatgtgtccacgcctataaaggccactccaccctcgaactattctccccgaccattgacaagcaagccctcaccggaattctacctaaaccaagcacgccactgcccgtcgtgatcacctgagccctactcaccatggttcggccaccaccgccacccctcgcccaagaaaactccaccgtccgctttcctgagtcgaggtgaaactcctcgacaagctccctcactctctacacccctgcagcggcgtgacattgctcgccagagttcgcccgccaacaggtgaacgtggccagcgccaccccgtacaccaccatccaattccttgcaccagcaacaccacaccaaccccgtgaagcttttctaccgaccggggcaagctctattgtcgtcgttggtcggaatttggaaccaccgacgatctccgccgcctgtgtgtgtggaccgagcagctctgaccatcaccggccacgatccgcccctcgacgtgatcggccggacctccgcgacctcgccagactcgtcattggaactcaaccaccaccagtgagcttcgtcgtcctttttcccatgtctggcactattccggtgagggagagttgcgcgggttgcataaccaagaaacccagggggtttttcgtcatgtctgagagtcatgggaatagtgc

SEQ ID NO: 181403 - DNA, 951 bp, Zea Mays
gtgagcgtggtcgtcagagtgttgcacgggcgagctccggcgcggtggcgtcgactccagcgaggttccggcgagcgcgagcgaaggagagagtgtggggagtgcgagcgagcttcgggatgaagagaggaggaaggtgctcgacttttatagagggaggggagagataggggcgccaggaggaggaaatggtggccggtggccattaatggcgggtggcggccatgaagagagggaggtaatggaggagggagaaacggacgacattgaagctccattaacgacaaagacgggcgggtggctcgatcgcggcgtcctggtgctaaacacggtgctcggcagcgcgcggtcggacggggcgtgcaggggcgcggtcggcctaggcgcctgggctgctcggggtcggcgcgtcgcggctgggcggtgatgggcgcaaggtcttcgggcgcggaaggccaggtcgcgccctggcgcatgggctcctggcggcgttggggcgggttgttccctggctgcgtaagagagagaagaggaggggaagaagaggagaggacgccggagagaaagaacggttgcgccagccaccaataattacgcacgaagcagtaaatgcaatgcgggagacggacaaccagcacgacagctgagcagaggaggcaagcggcactagcgagcatcaatggtgtatggcagttactagcagcgcatgagtgcgggagagcagaggacaggacgaagcacactggcgtgctccacagaagcgaggagacgcgcacggagacgaggagacagctaacaggcgagctagcgcggtgtcgaggcagcagaacaggtggcggcgacgaacaaccaagtgaacggatgaaggtgatgtgctccgtacccacacgtaataggctgaaagaaaaaaaagccggggcgagcgtccgacgtttggtgtttttgtttttt

SEQ ID NO: 181404 - DNA, 1200 bp, Zea Mays
gatgaaaaacaataataacttaatgttgttggaatgacttaacgatgtgtgaatgcctgaatgaatttgcttggactctaaaatgacttaatgttgtttagacgctagaatgacttaatattgcctagaatgactgaaccgataataaggaatgtctgagtatgcataaaaagatgatgcaatgacttaatgtacgttggaatgtccgaaaccgaagggaaaataacttaataggtgtgtgcctatagagccgacgtgtggctagagcggagccgtgcgggggatgtagggggcgaacgcgagcaccaaggtggtccatcaccctaaatcctattcactgaagttcgagtttctctctaacttctgcaaggaatttatccccatttgtttatctgtcgaggccactcgggacaccgccgcaaccggttcgatgagagcttcgtcgttgtgcttctggttcgtcgatcggatctacgattcgtcgtcaatcttcaataaaccatcgggcgaggttcattttttccggtaaccaatcttcattatttcacctccttatttctttgtttttgttgtgtgttttttcttcttccccatcctgtagctcgtgggagctagtgcccactgttgtggtcgccctactgcgtggcttagcgccgcaccatctgcatcccgggtcggccagtggcaaggccagctgagcccccatgattgaatttagtttttaattaaattataatttagattaaacttaaattagatgcttctcaaaatatctttcttatatgatttataataattaaaatcaacttagaacatagtttttatgtttaattatataaatcttccgaaaactatactttttcaaccgtagctttgtttttagtggttctttctctcgcgtgaccatagagataagccctatcctttgatgtgcatttttaatcgattcctttgtttggtgtaatgttatttttatttactattttcctatgtgtttgtattgctgtgaatagaaaacgcgaggttgcgaggccttgggaaacatctaagcatctgagtttactaaataagtaaagttgttaacttgatcatgtctttttgtgacctaataatattttaactttcacatgattaatatatggaattaaagttaacctaacatgcatatggttgtattatgagtaaccgtttggctatgat

SEQ ID NO: 181405 - DNA, 496 bp, Zea Mays
gttttgccagaagaatttttgtgcagtcttcgatgttattgtggatactgccctagcctcaatccactttgtgaaatattcgacggcgacgaaggtgaacttgaggttcccttgagctgtaggcagtggtccaacgatgtccaacccccagcgttgaagtggccatgtatgggcgatgtgtttggtgtatagtgaggggctgcctgagcgaggggagaacttttagcatgcttcgcatgacctcgtgactcgattggcggtgcagattattgcgggccaataaaatccttgacaaatcactttggcagtgagggccctgggtcctgagtgggagccacaggttcctctgtggacttcacgaaggattgtcatgcctttagtttcagttatgcacttcagcatgggctggctgatgccctttttgtacagctgaccctcgactaaagcgaagtccctgctcctgtgctttagtcgtttggcctcattgtggtcgctt

SEQ ID NO: 181406 - DNA, 355 bp, Zea Mays
aaaaacttgccctaaaaagaaaatacctcttaccccaagaaaagttttctcttctcctccccgattttaacaaggcccttcttttcctattccagatggaagactctctggccattaggacatcctactgctcagaggtggaagggttcccgcatctcctgcgaagctgtgcgcttcgcatgggaatccgcaaaaagccggaatacgtctggacggaacatattgaaggcggaatagtgaaatgctctatggcagtctacctgggagaaagccgaaattacccaaaccatccttccttccaagtcactgttacctgataccgtttccccgatacttgccaaaatgttgcccgaaa

SEQ ID NO: 181407 - DNA, 629 bp, Zea Mays
cggtggcatgctggctgcgtccaaaaagacgtcaacatattcgcacaccaccgtaattccttctagtggagactcgaccatggcgaaggcactagagttggtgcatttctgagttagctggtacaaggtaagttctccgcatgctgggtaaagtatctcaatagcttaggttgcgacatctattagaacttggtgtcaggtcatccaatcgattcccaatatgacatccacaccttctagtccaatgataaggagggtggttttgaaaatcttactccacaacctaattggcgcctggtgggtgagttggattgttgccaccttaccacctagcttcacaatcatataagtcccgctggtgtgacagaagggcaattggcatctaacactgaacttggtacggatgaaactatgtgatgcgccagaatcaaataatataactgctggttgattatggatatagaagatactcgtcatcactaaagctccttctggcagatcgacaacattagtgaaatttaccctcccctgctcgacctggacaatttgcttctttccattgttctggttggagttctatccttgtttttgaccattttggggatactccttgtcatagtggccagtgc

SEQ ID NO: 181408 - DNA, 536 bp, Zea Mays
gggctcggctggccgcataggtgggacgtcgggcacgagcgggagaactccgacgtaggtcatcgacggggcgtcggcaagcatcagctggtacatggaacatgtgcagcgagcagtagagaaactatgggaggggttcaatggggtgtcagttttatagccgaaagatggggagacgagtggtcgtcggtggagcgcagaaagacggacgtcattgatggcatagcagcactaggaagggagagggacaagcgtgcgtagtggccagtggggaagaaacggatgactaattaaagaggagagtagagcgattacaaccattaatggtgtgaagaggaataatcaacgtcgtggtgggagagagagatgggaaggatagatgatgcactgatgagggcaggagaagggtcgcgggcggcttctccactcatgggggaaggcgatgtgtcaaggtgccaagccggcactgctctaaatcacgagcagagacatgggagacgcggggaagatgaacagtgtgctgacgtgtgggcccc

SEQ ID NO: 181409 - DNA, 452 bp, Zea Mays
ccacgttcgcgcgatctccggccacgaccgagcccccgcgccctgctcgcccacctcccctcttccatttgcgccctctgcccagctctctctctctctcgctctgcccacgcaaaccgaggacctccgccaccgtccatcgacgtccaccgcctgttctgtggccgccgttgcgcccgtgtcccgtccagtgccacggtaagattcgccttgccgttagctactcgggacacccttcggtgtgccctctccctccctgctgcgcccggtccacgctcaccggagcattttcttgcacagccggagtccgccaccgttgccccgtcgagcctctgcgcctccgtcgttgctttgcgacgccagcgcttcccctcaaggtgagcaacctccccgcgcccctatttccctgtgtactgcactggttagcgcgcaattgctcgccagagttgccc

SEQ ID NO: 181410 - DNA, 408 bp, Zea Mays
ggaagtttggatgagtagcttgaccaacgtgaatttagtggtgagtggtgatacacgcttgtgaaatctactactatgtagctctaagtaagctcaagataagtttgagatcaaacgcaactcaaagagtgtttagaatatgagttggtggtgctacaggtacacatacatgtccaatatacatcgaatatgaggcaccatacaagaatgtgtcttgttgcatagagaactagcatggatacgtatggtgtgcagaactagcatgggtatgtatggtgtgcactggttatggtgcaccaaacacaacacccatagaagactacaaattggcatgctggcaaatatactcatcggacatgttcgatgggtgctgatcaacaagcaccatatattagtacaataacatct

SEQ ID NO: 181411 - DNA, 990 bp, Zea Mays
atcgagagtaaatcaacgccaaacctgctctgtcagaccgactgatgaagctatgcaatggtacagtagcctgatcgggttcagtgaacctcaccgccgatgaccgtcgcgctgtgattcacgtcgatcgccgggattcgtgcattgtggattagggataatggtgggcgggtaaagatcttggcgtctggattaacttgagtccggccgcggctaagctcgccgtacccctttgccttgcggcggcgcggataagctcaccggcgacggctgcctactgatcctgcgccgtgtgtacaggcactttaccacatcgccgtagctcggcttgcgataattactcactgccggtgaggtcgccacgacggaggacacgaatccactgcgttagtaatctcccctctctccggccgccagcactgctcggccaaattgagcaccaccacgtaagccctctataaattgatggtcgggtcagctgcgctatgtcatcacgaaaccaaagcacccgctcccaccctcaatcattcgccagagctcacgaatttctagttttccccaaatcggttcatcccaccgcaagaacatcctcgtcgtggccagtacaattgaggtcagttcaaaccttctgctcccttgtttgggtgatctcacatacctgtgatactcatcgacctgcccaattgaactgagctgccttagatcatcggaaacgcgcttagtggtccgtcgttgccgcggtcaccgtgggcagagcattgtggggctccaatccagaaattaatttaggggaaatagtcgtaaagggttgaattcggtatccagcaatgggggggagtagccgtagcgtaatttggccggtacaagatcaccggagatcggcctaacgccactcaccgtcgtggatcgggcggtgtaaagaaatagaaatccaaggacctttctgcaaactatcagcgactcagtgccacagtaacagaacccgtttcg

SEQ ID NO: 181412 - DNA, 846 bp, Zea Mays
atcctataaggccttttagaaataggtgtggtgccaggttttaactcgatcaggcaacatacctggtaactactcctagaaaacatctgggtattcacaaaccactgtgatatcctctaggcacttctcttctacttgatttagcaccatatctgcttctgctggcttgttgacactgaccttgatcctttctacttgtgaacttgtcaaggtaaccattctcttggcacatgagattactccgtcacaactcttcaactagtcgactctaagaatcacattgatcccactagaccttaggacaactaggttaaccaagaagtctattcccataatcttaaggttaacatgaaggcatgagtgtgtgactctgttttcacctctaggtgaagtaattaataacttcatctttaggggataacttagtatgctatacttttcgacaaaatgcttcgttatgaaggaatgagatgctccagtatcaaataaaactgatgcaggtattaagttaacaagaaacataccgaacatcgcattagctccttccagaactgattctacagtcacgtgatcgactctgcccttgctctggttctgttgtcctttgccttgagtgttgtgggagggtgtgttctgggctgacctctgattgttagtgtcttgtggtgtctgaaagttcctcttgggatagtcgttggcataatgtcgaacctctccacacttgaaacaaccattgggatgcaatggggtgacatgattgttggcctttgttggggtgttagtggaaactccctgacgagtctactgacttccaccagtcctttgctcctctaggttgtacctcag

SEQ ID NO: 181413 - DNA, 657 bp, Zea Mays
catgcttctttgaagtagttgttttattccattctggagctctcgacgtattaatgttcctcgaccttggcggacaccctctttttcttgggttagcaaggattaccaaacgagctctattttcttcgattgaaaggaaagttctgctattatgaccatctgcaactccgcacttcttgcgccttctgttcatcttttttctcctttggcgcctaattttacagtccttacatcatcatttctaattgttcttccttttggtttcgcatttattggtttatccatacttactcctccaatgttaaaatctagcttatgcataataaattaatatgtacaatattaaaaacacacacgtcagttgtgccctttaacacattagttgttatcgatactacattgtattttcttttattaccttcctagattgtttgtccattttgcaaccaccccatccttctattccaatgccaacgacatcatgtcaacatattagagtgtcgtaatttattatggtatttaacataaatacaattattataatgcataaattcttacatgttcaactcttactaaagcatttgacgcaccaggctcacccacgttttcatcaccaatgtcctgcaacacagacttattctaatacaataaacatta

SEQ ID NO: 181414 - DNA, 515 bp, Zea Mays
tcgaaaagtttaggtctgaattcatgcattatagagccagagaaagtgttagatacttaggctggcagtacccaaacaatagataaattagttagcgactgtccaagtactaaatttgaacttaagaagctcaatgtgcccaaacaatcgagaagcccactcggattatcaatatggcacaagaggctagaaaaactcggtgcacaagagctgaaggagagaggcatgacatgggcccctaatgggagttctcaagatctaggtaaggatgatgattttggaagaagtggagtaaagtcaaacaaaaggaagaaagcaagtacaagacatttgggtgaaaggtttgccccagctcaacaaagctattggtcattgcatcgtccatatttttcagctatgccatatacgtcgtcccaaggtatgttcggttatcctttatggcatcattttgctccatatgggtctttatattatgaaagagtgcaaccgaattattatgcatatggatagttgcg

SEQ ID NO: 181415 - DNA, 739 bp, Zea Mays
gttttgaaaaggttgtgcaaattccacagctagatatcatgaaaattttggaaccgaatgcagcttataaatttgtagtgtttcatttcatcatgtcctgtatttttttgtagacactaaggttcacacattgcacttgggattattaccatcatatgaaactactttcaagctgttgatatgattgaagaagttacaaacaatcaaccagattatgttaaaattgagacactacatttaaaatttggccgaaatttacactgtcttctccaatgcttctacggacacatcatcatgacccatttcactattatcggaagatgctatgaaatagatggaagcatgtttaagcgtgtcgcagccatgccgatcggctagaaccaatgtgctagccgcgttgtccacatggagtgtccttgcaaggatgtgctcgcacatcgccttgagcctgtcaatggcatatcgatccgcggccgctagcaaatgctggaccaactctctcgtctcgtccatgcccatatggctcatggccggcaaggagtcggtgtagatgaaatggagcaacgccctgaaagtgtcaggccgcatgtcacctaccacgacagtgcgcgcgtctgtcgtctccgcagtgcaagtggagctgtagagctccgcctcaaagaccggcgaccgtgcggcgaggatgatcctgtgagctgcaaatgcctcgccatccacaccgaaggtcacgtccgcgcct

SEQ ID NO: 181416 - DNA, 445 bp, Zea Mays
gtggtttcttatagtttggaaacgctttaggaatgaccggagagtcttgtcgtttcggtgtttgagggatttgaggtcctaaggctgcactggtttgtcagaaagggcctgaaagtttgcgacaatctagtggaagaagtcagtccaatcgtcgatgcaatggtgaggaagatgtcgaagccattggagtgcgtcctgtatgagtatgatcagtaggtacaccgtcatgacatcctccattgcacctgcggcttgggcaatcgtggggtagacggccaaccaaccgccatggttttgcttgggctcgtacttgtcgacgtttgagactttaagttggacaaccattgcatcgcccaatgccgaggggagatggctgatactccgtagaaccctcagtcccatggcggtcttcctaggtgtcgtggtgcccatggtcccgccaaag

SEQ ID NO: 181417 - DNA, 525 bp, Zea Mays
gtttcaatcatttctagccattcttggcatgggttcttgaactctttctcaaactagaaccggtaggggagccaaacaagttcgtgcttcttgccctcatccttcttcttgggcatcccccagccactagaggtcgggaataccctattttccaagaatttctgcaccaaatccctagtactgacctcggccgctaccactctaaactccacttcgaccacttggcatggggagccaagctgcatgtggcacaagggcctcgtcattccgaagcttaaagtcaagggactcataaccatactcatcagcttctccctctttttctcgtctgctttcatgtaaaaccattcactcttccaaccagttggtcacttggtgcggtagctaggactcggtgcctttgtatcctttcgatacgcaaagttgtagtagccaaaattttcatgaaggccatctgccctggccttcgtctggtaatgcagctcgtgcacccggcagaaagcttcggcattaggactcatcccc

SEQ ID NO: 181418 - DNA, 462 bp, Zea Mays
agcatgcaggagagagggcgtaatatatttccctccaatattatttctttggtaggggaaattaattaaatgcgtactaaaaaggtagaaaaatagtggaagaaaatatgtgacgctcgggctatggtcggtcgagttgtccacttgtccgtagtgtgactgtgatgttggcgttggaggcttggaggcggtgcaaacagcgagagggaagacgacgacgatgtcaccgacgtatagtttgtgtgagacgtcgtgtggtagatatctagggttttacataatgtctaccgtcgtattttccactatattatactgcaggtgataggtttttgaattaccttatatcaagagatagctgcatatatatacgatgtaataatgatgtatgcaagtgtgtgacttaattttccatatatacatacagaaacttgtgtacttcataaagtatattgaaatgttgtc

SEQ ID NO: 181419 - DNA, 540 bp, Zea Mays
catcccttgaaccaaatggatacactgtttagagataaaattgataaaacagtgtcatgatcctcggagaaggggcatgagaatgaccagaattgagaaattttggtagatcaacatctgatacttgagaacgagttagagcagatatccagataatagggtaggatcaataggggatccggacattcggatgataaagccagcatgattcaccaggaaaaaggattactagatccaggtgaaaagagaggtagtcgcacgagatcgattaggatgagcaccagaaaggttatgaagatttgggacaggatctatggaaagaaacatggcttggtcatggtttgcgcaactagacaccaaacgatgttttttttgacataaccacgtgcacagggaagtttcggtttggctagcggttaagctatgggggtctacaagttgtgtaggtgcaacttcagggtaaaacacacaagggttagaaaacaccaacacaagaatgaatttgttttagaggtttcacttgctaaactcaaggttgtt

SEQ ID NO: 181420 - DNA, 475 bp, Zea Mays
cgcgcggcggggactgatgaggtgaaggggcgactggggcatgcgatgtggaggacgattgggcagaggtgtagaggggcggacgtgacgaagctcgacgcacacggcctatcaaattttcgagtcggagctatggagcacgtgtccatgcgcgatgggctgaagacacgccgaacgtggagagcgcctgaattgggttcaggttttaactatctagatatcctagtgagcagaagggagggctgatgaagccccattaaatatagaggtggagagttgagaaaaatagagatgaataaagaataattcagaaaaatgagcctcctcgttatattggagaaagagagagggtagagagaaaggaacaaaaaagaagaggaaaaaaagacttctataagcttatgctatatctgtcattggtcaccagaagatcagcctctcctttagttcgttcttggatccgccagtacttgtg

SEQ ID NO: 181421 - DNA, 390 bp, Zea Mays
acacatttagaagaatacgccatttcattttcaaaactccaaatgaacgttcaatgatgtttctaagtgatgagtgagcatggttgaacacctccttcaatccaatcggttgactgctattttgaaattctagaacgtggtacctttgacctttgtacggtgctagataaccctttcgatttggataacctgaatcaacaagatagtactttccttgaggaggatgtggaaaatcatccttgtacttgttccacaaagtgtctctccatatccgtgtgtcatgagcagacccaggccatcctgccaccacaaatgtgaacctcatatcgaaatcacaaacatccataacattctgactactatatccatgtcgattcatatgcactgcct

SEQ ID NO: 181422 - DNA, 420 bp, Zea Mays
tgtttgccgattcggagtcccgtccgagctcacagttgacaacggcaaacaatttgacagccaggacttcaaggacttctgcttctccattggcaccaagcttgccttcgcctcagtatatcacccacaatctaacggcgtcgtggagcgcgccaacggcaaaattttcacggccatcaagaaaatgcttctcgacgacaagaagggtaaatgggccgacctgctacctgaagcagtctggatgctgaacatgaccgagtgtcgggcgactgggttcactcccttccgcctgctatatggatcggaggccatgaccccacaggaaataaaacatgggtcaccgcggataagcacttcagccgtccccgacgtagacgaaccaacttccaaggacctcatcgacggagaccgtgttttcgc

SEQ ID NO: 181423 - DNA, 477 bp, Zea Mays
attttccttgaaggagcaggactcaaggtttttgctgtttctaacacaacatctagcacatttgccatccttctcctcttaggagttgcggcggagcttttctgtatcttcggcagtgttacttctgttgaagggctcaaaatctctggcatttttgtcatttcttcaatttttgacccttcagttttatcagccatcgtctcaactagtttaactgaaggtatcttcggcattatagccggctcttcagttctctgctcaggaggagcggtttcttttgtctaggcagctgaagaggcccctttgtcaaatttaggtatcacggtcggttcgatgtaatgaggccagtgagtcagaaccttcaacttttttcccttcgacacaggctcatctggagtgaccgaagtagcagctttcctctttttcccctgtccccgcagcgggtagcggtagtcggggtaaacgaagcctatggcg

SEQ ID NO: 181424 - DNA, 900 bp, Zea Mays
gctactaattctttacatcccgaggtccacgacgtcggtgaatgcagccgcgctccgatgagccactgtaccggccgattaaggcgatgaccggcgctcctgagcgacagacaccaaatcggacctatcctaagcttttcccctaacttaattgcactaataatcaactacggagctctggccacggtgaccgagagcatggcggctagagcgttgtgttcccggcgatccctggtggttcggttcgattaaagggatcggggagcttaaggaggacctagggatgctagaacaatcaacagaggagtatgaattcacctggaataggctggccgcggtgaagtgttcttacggggtgttcaaaccgatttgggggaaattaggaattcgagctctcaggtgaacgattgaggacgatctttggtggctgggtgcgcgatgatgttgcgaagctctctgcggggtcaatttatagatccccggggcggtggcacttaatttaagcggacagtgggggcggccggagatgaggaagaaccttggcacggtgaatatgtgtccaatggcgtggcattaactccggtggtcgacgaagagtttagagggagtcacggcgatgcggtggcgaggttgggacacgaggtggacaacggcgatgacacgacgacggcgagcagctgtatccccggcagtgagcaaaggggatgaattgcggctagccggagtgacttccaggtcaccggcggcgaagatattttgaccccgcgacgttatcgacttaccccgagcgtgaatcacgacgtcagcgatgcaaatcgcggcggggaggtcaccggcggtgggattcttttgctgcgtccgatctgatccgttgggggcactgtaccatcgtgaactccc

SEQ ID NO: 181425 - DNA, 319 bp, Zea Mays
tggaaaatctataattgatatttgttttaaggcttgtttggttcagcatcatgaaccagattcgttacctaaaatttgtaatctcaaccaaatagttacaatcagtagcagactcaacttccgagcaaggcgggcgagcgtccgggggcttgtaccggtgaaaaagactgcaacttgagtagtatttatgcatgcctatggtccttgcgaaggactgtccgcaatggttctcactaaattttgccccctatattccaatattttgtcacctcagcaactcctctgcccctatatgctcactctccgcagtagtttccca

SEQ ID NO: 181426 - DNA, 710 bp, Zea Mays
taataatctggagattgcgaaagaagtgcataactccattgccaaatcaggtaatggccaaaatttggtcagattgtggctaagccaaaaaaaaaaattaaaaaaagacagactggtggtgccggggtgagacaggtctgctgcacataagtcgaggcaaaaattctacatctgaacaaatctgcaccttagcaaagactctgaataggtgaatgacctgctggaaggctagcggtgaactggcgatgaaggtaaaagcctggtttgcaactcatattgcgtgcggattggctcatgcatgagctgtttttttcttcttttccctactgaaacaagcagatgaaatcagtatttgtagttacattagagccgacggaaaccagctgagccgtgctaaacgaggttgaattccgaggtcaaggattagacactagagggccacggccacctgaattttgccatcctctagcagaaaatagacgacgtacggtgttcggctgcgtttgagtagtatttaccagcatcacgatcgttcaacatacatgacgaccatacacaaatgccaattaattccacgcacatgcatggtgtgtgcctgcatagtattcgcacatgaagggtttgcaaattgcaagcggcccggccgggggtgttctattctattattcctctgttgagctccagggcggctcaatgatttgggttaccca

SEQ ID NO: 181427 - DNA, 978 bp, Zea Mays
catgcttgcaattctaattaaaagagcaaaagcggagggacaagtagaagggttggtgcctaatttagtagatgatggtttgtctattctacagtatgcggatgatacacttttgtttttggagcatgatttggacaaagccgagaatatgaaattactcctcctagcttttgagcaagtatcgggcctaaaaattaactatcacaaaagtgagttattctgttttggccaggctgccaaggtggaggatcaatatcagcatttgtttgggtgtaaaaaaggggaatatccatttaaatatttagggataccaatgcattatcggaagttaaataatagtgattggaaattaatagaggcaaaattcgagaagaagctcaacggttggaaaggaaaacttatgtttgttgggggccgactggttttaataaactcagtgcttactagcttagcaatgtttttgttatcattctttgaggttcctagaggggttctagagagaatggactactttcattctaggttcttctggcaaggcgagaatcataagaaaaagtacagacttgccagatgggacatcctatgccaacctaaggatcaaggggggttaggaatacagaacatagatgttcagaataaatgtttgctaagcaagtggctctttaaactaattaatgaggatggcatgtggcaacaactgttgcgcaataagtatctaaagagatatcctttgtcgaaagtgacatataaccctggggattcacatttttggtcggggctaatgaaggtaaagaatacttttctaaacctaggaacgttcatcctgaaaaacggggaacaaattaggttttgggaagataaatggctaggacatcaatcgttcatgactcaatatccatccctgtaccaaattgtgagacagaaaagtgctacggttgctactatttttggtagagtacctttaaacgtatctttccg

SEQ ID NO: 181428 - DNA, 541 bp, Zea Mays
gctgcctccgtccatactatgctcgcactgctacattgcctttccacaatttaaactgaagaaaggagatgtgaacaaagacgtcgttcatcgtgcttccaagatcagtagtggtcgtgatttagtggaggaatttattgtatgtggagtgtggccacttgcgcatggttgggatgtgggcgaagtgaggctgcgcccgatgcctttcttgaagggtcgataggtgttgagtcctgccttcaacattgaactgcggggccaaaacgttgtagcttttgtctgggaagtggaagcggaggctgtgaggattgtacggaaatattcgatgaagacggagatgccaaggaactgggatatacgcggtccaaacgtcaggttgaatcgtgtctttgagctgaatggtcttctgcacggtgcgtatcctgaggactctgctgaagctggggatgatcgaaggaaaaagagagtggcgacacgggtggacgaatgctgctctaaatagaaggttgtggttacagtagcaagaaaaagaagaaagttg

SEQ ID NO: 181429 - DNA, 929 bp, Zea Mays
gaggatctgaaacttctgctacgcttcggatttgctgtagattgtgtcgagtggagaggggctgaaacttctgctacgctctcgacttgctacagatcgcgtcgagtggagaggagcggcgagcggcgtgggcgtgtttcctagcgatggaggagtgagcggtgatggctggcgctggtagcgtaaaccctagccgccatggcgaaacacggacttgtggaggagaaacacgaaacacggaggtcgagctagagaagggaacgagaaacacgagcctggagacgttttttttcatccccgtggatcaacgtggatagagtgaaaaggcccgggacatttttggcccacacatcatccaaaaggcagcccgggataaatagtgaaaaaaaggcacgggtctcatctcccccgcggtttgggccgggatccctgtggggaatgcagcatccaaaggagcccttagagaaatagtcttcctgttttagttaatcgtggaatgaaatagaattcaagccatacaatttcaatccgtgttgagtgaatggcttaatgctgactaagatatgacgcctccaccaggtggtcagatttatcgtaaacatatacatacaatgtctgtgacgttgtgttgacgtcacatgattgtatttcatgagattgattggggtggacggtggaccaggttttgtaagtagtgcgacggttgaatgacacgcgaggacgacccagtagcaagccaatgtggtgaactctcttcgtaaaaatagttttaatattaaagtgaacatatgacccacacaccagataataattagataggaacatgtactacactttatcttaaccaaaagaccgagaaagatatggattccaaaggatcactgcctctttttagatctcgtcatgtctttcgccctccttcaactaac

SEQ ID NO: 181430 - DNA, 1574 bp, Zea Mays
gatgcgctgccggcacctgggatcgtgcttgatctttgctccaagatttcctgcgcacaagcaccactgttttcttccaaagaggtatcattaggtgcagaattttgggtattttgaatatcaggcaacaatgaatcagctacattagtatcccccggataattcatggtggtactggaaggaaacaagtgaggaaggagattgacttcagcccgtaaacgagcgccgacattgggatggaactcacggaaaggaaaaactccttcatcaaatatgacgtctcttgatatgtagactcgtcctgtactaacatcaaggcatttgtagcctttatgagatgaactatagcccaagaagacgcatcgcttggaacgaaaagcaagtttatgagtgttataaggacgaaggttgggccagcatgcacagccaaatactcgaaggaacttatagtcgggtttcttatgaaagagacgctcgtagggtgtcatgaagtcaatgactttggatggggttcgattaataagatatgctgccgtggcaaaagcttcatcccataattttaaaggtatagatgcatgtgcaagcaaggctagaccaacctcaacaatgtgcttgtgttttcgttcagctgggccattttgttggtgtgcgtgaggacacgatactaggtgtgctactccaatttttgtgaagaaggagctgagtttttggtactctccaccccaatctgtctgtacaacaataattttgctgtcaaacattcgttcaaccatattttggaagtcataaaatttctgaaaaacttcagatttaaaacgaagcaaatagacccaggtgaacttactataatcatcgatgaaagaaacatagtatttatttcggcctaccgaatttgtggcaggacccccatacatcagaaaaaatgagttctagtggcttggatgaagcactagtggacacaggatacggaagctgatggctctttgcctgttgacatgcatcacagacagagcctttatttgactcaactaaaaagggcaaattattgctactaacgactttcttaactatctcaaatgagggatgaccaagacgatagtgccacaagttaggagacgatctggtggcaccaagagcttttttcagatgcgtactcggtatggggtagagaccatttttacatcggccttcaaatagcgtcctcttggtagcttgatccttaacaagaaaatgatttggataaaatgcaaggtatgcatgattatcagaagtaagacggtgcacagatataagatttttatcagcagcaggaacatgaagaacatgattaagtttcaaattggaattaggggtactaataatagcatgaccaatgtgactgatattcatacctgcaccgtttgctgcacggatttgatcttttcccttgtacttctccttcatggagagtttctcgagctctccagtgatgtggtcggtggagccggtatccgtaccagtttgtgtccactccatatgaatgtgtcgcagccgatgcactcctctgattgggataagactcctcatcgagcctg

SEQ ID NO: 181431 - DNA, 1024 bp, Zea Mays
gatgtctaaactggaatattgtaccctatgtgtttgatcttcatgtgtgtttcatgcacttgattctgctaatttcatgtacaattttatgctgtcaacaacatcgtgttatgcttattttgtctcaagtttatgatataaatatcactgttttatgctggaaacatctctttgtacagttataatcttcacagtctgaccagtttatgcaataaacaaccccgtgttatgcatatttgaacatacatttatgctacatacgacaacgttctatgctataaaaaactcgttgtacattcataaatctacataactgttaaatgcttatgataactttcacctacgtttatggcattatgtgtacatatttatgacgctgtctgtgcattgacaatttaacatacgattcacatttacatccagaatataattttctcataaatcttttggtattctactctctaccagatgaatcatcatctccgacatacaccgttcgtttttcgacgttgatgtctcattccactgtggtgctgcacctatgattttgttccttgaaccaggaggccgtcctcgcttacgtccagataggttagccaatcgaattctattatcctccacaattaaacacgtacggctgttgtgaccatcagcgatgccacatttttggcacttcctgctcatcttcttagctcctttcgcacccaatttaagaacttgttgctcactacttttgatcgttcttcccttaggcttggccttatctggtcttgctaagtttacaccttccatatgaaactccagtttctacaaatcaaagatattaagtcagttttcatattcacatattcatcatatactatagcaatgttattacctttctagcttccacatccgtagcactactatcaaccagacacatatcagtgttatgttccaatgttaatatcaacatattacattgatcgtcgttagcattgcattcatttgtattagaccccattacaatttcctgtgaaataac

SEQ ID NO: 181432 - DNA, 419 bp, Zea Mays
cagaggtcgagagaacgaagatatcaaaagttacaagtccttcggcagaggtgacagtgctgaaggcacaaaaagatcttacagttaccccgaagaggaaaaggatggtccacgtactagatgtactggaggaaataaagactacaagctctactccaagaaaaacagccgaagtttcaaaaacgcgaattgaaacaaaacaaactgaagccaaagctgcaaaaagtcatgccgaaaccgaagctgggccctcagagcccgccaagaagaaatccctggaaaaagaagcttcagaacagactctgtcagaacaagctgccactcctactcccgaagcatcttccgaaattgtcgattatattgtacgacatgcttcgggaaaaaggttgtctgaaaaagaaaagcgagaagctcaattt

SEQ ID NO: 181433 - DNA, 756 bp, Zea Mays
ggaggatgttgatatactagaagaagaacgattgaatacggtgattcagtcagcctggtatcagcaaactctgaggcgctatcatgacaaggccatacgacatcgatccttcgcggtgggagacctcgtcctccaccgaattctaacgggggagggacggcacaaactgtcgccactatgggaagggccattcatagtagcagaagtcactcggcctggatcatatcgtcttactcaaatggacgacacagaaattgagaactcatggaatatagaacatctcaggaagttttaccccaagctatatttcaaaagctattgggacggccttgtattctgtaaactgggaaatatatcatcaataaaaagacttcattctcaaaggcactcaaattgtttactgtcaacctgcatgcttacttaactcagggtgaccactataccctactaacggagcaatcgacttaagtcggcgacgacttaagtcggcgacgacttaagtcggcgacgacttaaggcggtgtgacatgctcacgcttacttaactcagggtgaccactataccctaacggagcaatcgacttaagtcggcgacgacttaaggcggtgtgacatgctcacgcttactgaactcagggtgaccactataccctactaacggagcaatcgacttaacttgacgacgacttaaggcggtgtgacatgctcacacttacttaactcagggtgaccactatagcctactaacggagcaat

SEQ ID NO: 181434 - DNA, 565 bp, Zea Mays
caaaaattcattttctaatttaattataaatatcctaaggtatctggactgggcgcatgaaaacatagtaactcgggggcctcggtgcaagtttttccaagacacagaactattctgcaggacggcgggttattttgcataaactgcgggggctctttagcaaactagcgtggccgaaggggtacggatacgcatcagccgttggatctgtatgccacggttgcgattagattataataagacccgaaccagtactcatttagggccctaggattccggatctacggttcggatcagaaggccacatcaccctactggtatgcgccctgatccacacgatcctaatctaacggccagacaccacccctactggatccaatcccatcctcacgattcagatctgacggccctcgactcatcatccccggccagcagagcggcgaccaggcagaacgcggtggtgcacagtgcctccgcggcggcgagcttgccggcgacggccaaaatggcccgctggcgactaatctccccgaccgagacaacctaaatagcgagagcacaatgg

SEQ ID NO: 181435 - DNA, 442 bp, Zea Mays
ttgagtaatccgatatgatcctggccgagtgacctttgatacaatgaatggcccttcccatagtggtgacaactagtgccgtcccttcccccgttagaattcggcgaaggaccaagtctcccactgcaaaggaccagtgtcgcacgactttatcatgatagcgcctcaaggtctactggtacctagccgactgaattactgtgttcaatcgttcttcctctagcacatcaatatcttctagcctagtggcttctgcttcagctatgttttcaaaaaccaacctcggtgccccaaatattaggtcggcgggtagcactgcctctatcctctgacccataaaccatgaagaatggggtatttccatgtagggctcgactaggttgagttctcaagctccaaaccacgtatggcagctctctgatccactttcctgcaagctttt

SEQ ID NO: 181436 - DNA, 352 bp, Zea Mays
gcgggtatctagcttggatcgggatgctggtccttcggttcctgctgttgaggaagtgcctgtgcctgaatttgccgacgctgaccccaatgggtgtgattcatctgtcgctgatcccaataggtgtgatccatctgtcgctgatcccaatgggtgtgatccatttgtcgctgatcccaatgggtgtgctgtctgtgttgctgatgaaaacgaaggggaggaagaagatgaggtccctttgactcggaagaacagtcgacaatatgtagccagtggggaaagtagtggagttccttctcctgctctgtctgctctcattggtctacaagaattgtctctggcgaactttgat

SEQ ID NO: 181437 - DNA, 620 bp, Zea Mays
cgcagatgtggtaagtacatgtttcggtttttacatttgcaagaaaaaagaggaaataaaatagaggtagttatgttggttgaaatggaaatgatattatataggtgtggtggggtatagagggatgatttagaggaaaccgctatagtatgtgaagaaatagggggagagagaatgctgatgtggagggaaagtaagatataatggaggaaatttaggggaaaccgctgaagatagtctaagccttcatccttcagcagcccccaccaccacccgccaaatcggccactagggctctaggctcccgcggttgcgtctccaaatccatcctccaccagcggcctccggtagtccgacactctggcaactgcccagcgcccgagctccctctagcggtccatccagggctagcgtcacctcctgctcgtcaccttgccctgctccctccgctcctctgacctcacacaactccctcctactcgctgccttgcacagacccagggctctccatctccgattctggactgtgggcgttggcgcccccaccacgacacctcttggcacccccataaaccaccggtgtccggtccgacagtccacccccattagccacttacccg

SEQ ID NO: 181438 - DNA, 621 bp, Zea Mays
ccgagacttaaattcggtaaattccaattaaaatcggttatcgaagtaaacggtcgataagacgttaaaccgatttcgatatcgattacgaaattcaataccgattaccgattccgtttttgggaactaccgttggattggataaaaaattcgaaaacggtttctggaaaaccgaaattttttgaaaccgtttccatccctagttttcatcgcgtgtgattcgggctcggctaacaaagatctcaaattctcataaccgccagggaaattgctatctaggagtttgttatggtccacgcggggttggagatttggtcggtgactataaaaccgagcgcccacgatttccttttgccatctaccgattgcatgggcctttagctcctgggcagctgcgtcccgccatcgagagagagagagaccgagtggtggtgctagagttcgattacgccatcatcgagccattagtgggcgccgaggatcgtcgtcgaaacgtgagggtcctgcaagaagcatctacaaatgtggagaacttcagcaaccgagagaatagcgtgatggaattcgtacttcatcgacgggtgcgccgcaggtggagggacctgttgaattaatgtgggc

SEQ ID NO: 181439 - DNA, 678 bp, Zea Mays
gagatagatgtttcaggactctatcagcccatgagtctctaacgccactatctacctacgctacttcggtcagcaatgttgctagcagagctctgtggtctcttagccacacttatcggcagcagctgcacgacaagaggtacagacatcttcctctatgtcttcgtggagaaagccagaccagtgttgttccaggtgaagctggagaagattgcctcaactcccttgtaggtgttgtggcaggtcttaacactgacctggacagcactaccctggatttctcaagggatccatggagaacatgaagaagcacatgccaggattgcagccctcgaagctcagctcgaaggaagtaattcacccgaagcccaagtctttgtcatagctgtgtccccgccccgcaagaggattcgctatggagtcccaggatctatcaccaggctactctagatttataagccatgttgtaataatgaaacttaagaaaaaggaattcgtatccctcactcgaggaggcatgtctgtcagcgaataccgagatcatttcacccaactttctcactatgcaccagaggaagttgacacagatgagaagcgccaagagcaattcttaaaaggtttgatcataccattgaactatcagttacaaagttagagtttccccaatttccagactct

SEQ ID NO: 181440 - DNA, 827 bp, Zea Mays
gtggtggcggactccggttaaacggcggtcgccgtgccatcaccgggttctgccgcgcggcgagctcacctgcaccgtctaaaatccgcgatcctcatccgtcgccggccagtcgcctataaattgagtgcgggcactgcgtcgtcaccgcattccgcaaaatccgcagctaagcacttgactcgagctcaccagaaatacccgcgcagccccaattccctctcttcttcgttcttgctccgccgtgaagaacttcctcgtagccagcgttcctctggtcagtaactctcaaattgctccctgttttagttaatccttgatctcctattgcccttagatgtggcaatttagagtttggccgaagctccttaccggaacgcacctatgcgctgtcaaacaccgccgtaaccccccccccccaccgtcgacccgttcttcggggcttgttctacccaaatcaaagaatgttcgtagactctagtgcacccatgaacctttccccagccttaattcgatcgtcctcgccgtcgtttgctcggaatgcgttcaacctcttacccatccgctcggtcaccgtggaccgattgattcgtagtcccaacaataaaattgatttgggggaaatgatccgtaggagttcaattgtgtttctgtcgctcgggagctccagccgtcgcgtcgtccggccggtctagctcgccggagctcagctcccagcacggttcgtcgctgtggactcagactgagaaaggttagaagcacggggatgtttctgcaaactgtcagtgaaacgttaaacagtcgcctggggttcttaacggataacc

SEQ ID NO: 181441 - DNA, 661 bp, Zea Mays
gaggtaggcgacgatggacgcctgaaggttgaagcaggacaccacgggtagaggctgggggccaagcccctccaacagctgcacaaagaaaggtgggatcggcagagccaacccgctggggagtttggaaacaaagaacacaaactcttcggcggaaaggtcgccgagaggagagaccccaacacaagtcctcccggcaaataccggcgcattccatccaagcaggcggtataccatttcgagcactcactcagtctgggcgcgctcgggatgaagtcacaaggccatggcaaactacggcaacgcaaagcagaaaccttgaaggcaaaggggcatagagagctcgaagatgaaagggcgccgcgagtgggagagaagcaagacatggctgctatctgaggggtgaacccatttttaaaggcaaatttccccgctcgtgccccgaagcgtcacaggcaaggtctcccccgatgcgcaccagggtccccatcctatgacatgggggccaggcctcacatgtcatacaagctggcccaaagcacgaagaaggcaaatcgtcgcacagggagcgtgcaaccgccctgcggttatacgcccttccatcttcgccgcaaccagcggtcaaggaggcgaaccgccgcataaggagcatgcaaccgcc

SEQ ID NO: 181442 - DNA, 440 bp, Zea Mays
tatgtacatggtcttttatgattagggtgcggacactcaaggtagaaagtacctttctccccagccattgtcgtctctcttttggcgaagagagaaaattcccttgccttacctatgcgaggctcgaaagcgacgcgatccgtcctagagccatgaatatgtgttagcaggctacactatcaaaaactatggagaggaaggagtaaggattggagaagcatagaggttgggaaaggaagaagataacatggagaggaatcaactgaaattgtattacttgttttgtttgatccgttcacaagcaacactccacgatacataaacccttcgcagcagcaagacataaccgaccccacacagcagagaccgaggcacacacgcgcgcgacagctacgcccactccggaccgctcacacggcagttggcatgttggacccttg

SEQ ID NO: 181443 - DNA, 351 bp, Zea Mays
aaaacatccagttgaagaacttggcagcgcagggaatcgagtgcctggggcacccggctgacttgggacagtaggggctttgttgggacgaacaattatgggctgcttgaaagggaaagatggtgcacttgaacggttctggttagagggccgaagaataaaccgttgtctctttaccgggccctgattaggccgatcaccactgaatcccttacttttcccagaagttgcatatttggcctccacagataaggctgtgctgacagcctttccataagtaagatcaatacatgcagccatttttcgctgcatgcggtcattcagacctcgcataaaacagttccttttctt

SEQ ID NO: 181444 - DNA, 657 bp, Zea Mays
cttgtcttgctatctaggtggtagtgtaattgtgccaccctttttgccaataataattgttgccggttttgcccataaaaagacccccccttctccaaacaaccttgagttagcaagtgaaccctaaaaaaaattcttgcttgtgttggtattttctaacccttgagtgttttacccttgaagttgcacatgcacaacttgtaaacccccatcacttgaccgctagaccaacccaagtctccttgtgcacttgttgtgtcaaaaaaaattgttgttggtgtctagttgcgtaaaccctatcaaggccatgtttctttccatagatcctgactcgaatcttcatagcatttctactgctcatcctagcagatcttgttttcctacctctccttcgtccgagtttggtaatcatttttcctggtgaatcatgttgtgaccatatccgttgagtctctagatcattcatcaagatctaccatgtcgtcttgtaatctgctccaaccgattctcaagtaccgggtgtcgatcaatctaatctctcatttctagtcttttcgaggctcttcctctaggcatcatgacgtcggttttgtcaaccttatctttaaatggcgtatccatgtggattaatggattttgctattgactttagttctc

SEQ ID NO: 181445 - DNA, 589 bp, Zea Mays
caaggtttttggaaagatttgcacgtttggctactcagcaagtgtttgaactagggcagaagaaaacgcacacgtgttcgacctgttttagcacgctagagcatgcctcagcgctcggccccgcgcgcccgtgcctgcgcctataaagtcgcccaaggccacgaccgtactcccccgctcgctcgcagccccgcccgatcacgagttcgttggagttcttcctgagcacggcgtgcccgcggccgcccgaacctggaccggccactctgtctcacctccatcccatccaacttctcagctagcttccccagagccccgtaaagctttccaagccctcagaccgaacaccatttcgccggaggtgccggattgccatcgccggacttcatttgaccgccaccacgcctagaccgagctgcacggtgagccactcttcaattccttgcacccacagcaccactgacctcccgtgaagctccccaagcactatgattgagctctaccgccgtgagcaggccggagcacgcgccaccaacgagcccgaccgcctgcgtacgcgaccaacccaactccggtcaccaccgtcggc

SEQ ID NO: 181446 - DNA, 281 bp, Zea Mays
cgcgtggcgccgagtaagggtgaaaacagtcggtaatggtcggaaaaatgggaaagtcgtaaacggataacggccggtaaattccggtatatcgaaaacggataaatccgagcaaaataactcgaaattgatcgggaaacggtaacttaatcggaaaagctcacaataaacaaatcctaaccacacagttgttcattcacatccacatacaagtctcattcacaaaagtacacaaaacacaatcttgtccgcatataattggtcatacactcatacatgtc

SEQ ID NO: 181447 - DNA, 526 bp, Zea Mays
tatggccctaggagtggtcgagtgggccctatatcaaaaaacctgtagactagtccatatcatcatattaacgaagaagtcataagtacaatatattaaatgtgtgatgtatgatattacaaacttggcaagaatgttattgaaattgttagattaatgtaattaggcatgtaattgtggctgtgattgctcctgtgattgcggctgtgcggttggcttgcatgccgcccttagctgctatatctatttacgtctatacacaatcaaaagatatcaattattcctactctcatggtatcacacaggagttacgatccgcttccgcacaatactaacctgcgcgcctccaggtccttctcgccaccctagccgctgacctgtccgcccggagtgttgctgagctgatcgccgtgcctgccccttctagttccgatcgacacgctgccaccgatcgtatttcagatcgctcgattcgccgacccttcagccgggcgcgtccatgggtccgactccctgcgcacatcat

SEQ ID NO: 181448 - DNA, 566 bp, Zea Mays
atactccgtagaagaccaaaataagaaaggtgcgcaagaactgttccctttttctagggaaatattgcaatcataaaacagaaacacagctttgctaacgcgtgagcagcaaaaggcaactgcaggtccacaatacctgcccttagatttagggtttgcaatatcctaagaaaatgggaaaaagtatgtgggtttgcggctgtagacgtagagcgcattgcaacgtgagtttggagagcgatgaggaaaataaatgtgtaatttgcagtaagccacgaatggcggaaagcgaacaaaaacatgaaaaacatttctttacctgaaaaagtgacaatggccgaatgtagacgctgacgacggaggaagccgcaagctcgcagtccctcgaaactgggcggaggtggacgtcgacgatggaggaagccatgggcttgctgtcgccctcgaaatggatgcgggagccatagtaagggacgaccagtgggtagagaagggaagcatatgaatctttttttacctggaaaagcggcgtcggagagtgcagcggaagccgcggagtctctgtc

SEQ ID NO: 181449 - DNA, 560 bp, Zea Mays
catgttcgtcgtcggcgtcatcaagtacgccgagcgcacctactccctctactccggcagcgtcgacggcttccgcagcaacatcctggaccccgcggaccccggccccaactacgccaagctcatgaccgagttcgactccaagaagaaggccggcatcagcgtcgagatcaccatagccaacggcgaggccaagctggcgcacgaggagatggagaagcacatgaacacgcgcctgctggacacccgcaagagcgtggaggctcgcgcctacgacttcttcctcatcttccgccgcctcttcgtcaacgtcatcctcagcttcaaggagaggcggctcagccaggccttcttcgtcagagacacagacacagaggagacgacaacctccatccgggaggcgttcgaggtcatcgaggtggagctcaacttcatctacgacatggtgtacaccaaggcgcccgtcgcctacaccacctgcggctgggtcctccgctgcatctgctcctgctgcctcgtcgccgcgctcctcatcttcttcttcctcgacaaacccgccc

SEQ ID NO: 181450 - DNA, 1485 bp, Zea Mays
gatagatctcgcggcgctcgatggcacctggaggctgtgttacacatcggcatcagacgtgcttgtgctgttcgaggcggctgagaggcttccactcctgcaggttaaacaacatgtattcagcgatctgtcctaatttgtcgtttcaattgtatgcctacttatagccaccacctagcaatcaattacagattccagcaaatttgagatcgactgaaaatgtcaataacttgccaatcttcacgtttttaaatgttcatactaagattttttttctcgaacatgtaggagagttacgtatctcatacaacccaaggggcaaacaccgcactaggacctgccacacacactaatacatgaccaataccaaggagggggaatcatgaccataaactagggagctatttagctcccactgtacaccaaagtttagcttcctcttttgtgacaccatcattcagtaaagatgttgtcccttaaccctggagcatacttctgcagcccaaccaactttaggacagagtaccacacagtccttgcaaagatacatgaggtgagcaaatgttgtatgttctccttttcttgatcacacatttgatagctctcaggatgctcaagcccccagcgagctaacctatctgcagttcaacactaattcagagcagctagccgaatgaaaaacttgcatcggggtggagcccaagtcttccacatttctttccacgggtcaaaaccaacagccccaacaaagaaactatgataagcagatttggttgagaattctccggtagaggatggtgaccaaatgtgccggtcttctattctagggtgaagttcaacttctgccatgatatcccatggatggaggtattccatcaaggctgcagctgacagccacccccttgatgtccctcacccaagcattattgtccaaagtatcctgcaacattcatcatactagaaaattattgctaaaaatgcaatacatgtttgttgtgtttgttaggttgagcacttgagacattagagatgatgagtttaagagttttacttttggtacatcaacaagatgctttcagtgtagtggatagttcattttcctcttactgtttataattggtgtgtttgagccatggtatttgagaaatttagggagaagggttggagccttgtgataagggtgtttttttggatatatgcaggtgggccaaatataccagaaatttgagtgcaaagatcgatcagatggtggaattgtgaggaatgttgtaaggtggagcatcgagaacttgctggaggtaaccattctatggccgttgtacctattgggggtgtccattttcctgatgcctgaagactctcatttctttcctttcatatctcccatattaattagaagggtgaggctcctgattgcttctcacggatgtcaatcgtgttggtgatcttgctccaccaaccgagtaccaaatcgcttgcttgcca

SEQ ID NO: 181451 - DNA, 1097 bp, Zea Mays
aaggacttcgctgatgatgtatacagggtaatggactggatgtgcatgcccttcttctgcccgtccaaccactaacacggtgcttaccacgtgggttgtgcatgagatatatagaagcaaatcttcagttggtcgatcgatagtagctcagttgtgtgatttgagaacttgtggggtggtcaagaattttttgagtgcttaaatgcctcttgagcctcgggagtccactggaatctatccactttcttgagcagtttgtagaatggaatgcctctctcgccgagtcgtgagatgaagcgacccagtgctgccatgcagctagtaagcttctggaccttcttctgcgattttggtggttccatcctcagaatggcttcgattttctctaggttggcctcgattccccgttgattgacgaagaacccaagtagcttcccagctgttaccctggacacacatttgtcagggttaagtttccagtggtagcgtctcaggcttttgaagacttgttggtgattgtcgatgaagttccccaggtccatggttttgatcaccacgttgtcaatgtaagcctccacttgcttgccccagtggtcggctaagcacgtttggatagctcgttgataagtcgctctagcgttttgaggccaaacgacatggaggcataatgaacgacgttttctcctggtcctcccttgcaagactaatctggtgatatctcgagtaactgtccaggaaggagagcatggagcagccagcggtagagtcaacaattttatctattctagggggcccgaagggatccttcgggcagtgtttgttgagattggtatagtcaatgcacatgcgccaatcaagtttattatttttgagtacaagaacaggattcacaagccactcggggttcgttacttctctaataaaacctactgcttctaagcgagctaattcagcacgtatggcttctcttttgtcaggcgtaaagcgatgcagcttctgccggatcggctttgcttgaggatacaccttcagtttgtgcccggccagctctccagggactcccggtatgtccacgagttgccatgcaaatacatccc

SEQ ID NO: 181452 - DNA, 713 bp, Zea Mays
gttctcatgcaatccgtcttctctagccttcgtctgatagtgaagttcatgtactcggcaaaatgcttcggcgagcggctctacctcttgacttcggaaagcccagatgtacacgctgagcctaacaatggcgttaggcgtcagctgatgaaggtaaatcctgaatttttccaagacttctgtaatcattccgtgtagaggaaatctcaaccctgctttgaagaagctcttaaaaactacaacttcatcattttctgatttcgggatagtctcttccctgccaaagcgaaccaaccccttctcgacttctctgaagtagcatagcttcgtcatcatagtcatatcagcttcagacacagtcgatttcccaaaatccaaatggctgggcttcgatggcataatgatgttataatcaatctctccttcattagcatcaccttcttcaatatctgcctgctcagcttcagtggtgggtgtatcttcgtcagaagcgccctcagtttcatccaatcctgaccgcctcataacttcagagatcggggcagttttagcagcttcggtttcctcaccgtcgcgtgtaaccctggctgttgagcgtaccctggccatctaatgttaaatttcttgcgttttgacgaagttgaaattttttttatctttgctgaagctccctcttgtcacgaagctagagctaaatgatcctttggttcaga

SEQ ID NO: 181453 - DNA, 535 bp, Zea Mays
gtcagatttaagtcgtaaaaatcaaggagaccacggaaaaaaggagagataggaagagcaagtccgcggataagaaacgacacatagaaaacagattcatgggtgtcctctattggaatagtgactccgcgacagattccgtgacagatccgccaagaacagagttcctttggtggcaaaaccccaacctcaacaaggtggaaaatatcagattcagagataatagacatgtgattaccaacaaacggaagctggctgttgggatcgatgggtgggatgatcgcagcaatgatgctctgcctcttccgcttgggagtcattgcaatctctcggggggaacgagcgggctcagaaattcaggaaagcaaagaagcggctgaggaaaaagtgaagttagggctcggaaataaaaaaggcacgtcagcgcgagtataaatgggtttcttgggtcaggcattatctctaaagtgctagatcaccactcgtaaaagtaaaagcctcagtcgtcactcagacattacctctaaaaaaccag

SEQ ID NO: 181454 - DNA, 330 bp, Zea Mays
cttcgttcattcgacagcttggcttcgtcacatcgacatccgacacctctctctttgttcacaaagagggtgtgcagatcgcctacttgctgctctcatcgacgacatcatcctcagcgcctcgtcctcgactctcatatagcatgtgatgaccaaactcacctctgaattcaccatgagtgatcttgacgacctataccacttcctcgacatctccgtcacccgctctgtagatggcctatttctgtctcagcgacaatatgctgtggaccttctccaggacgccagcatggctgagtgtcactctacagcgactcccgttgacactca

SEQ ID NO: 181455 - DNA, 632 bp, Zea Mays
gcaagtgttcaaggaacactacatcccagatggtgttctatagatgaaataggaagagtttgttcgcttaaagcaaggaggagactcggtgatgcaatacctcgccaaattcaaccatctctcccagtatggtattgagcaagtggacacggacctgaaaaagaaaaatctttcatgagaggtctgaatgatcgactacaatgaaagatggccatttgcctagatctcacttacagcagggatgtgagcacaacactttcagtggaggccaataattcggggcagggaaagacaaaaagatttgggcgtgaagggggtgaaggatcctctcaatgatccgagaagcggtcttagttggtaattcatccttttaacccaaatcgctctttttctcgtccacccacctatcctttcaagcaaccagttttcatccttcccacaccttcccttgctcaaaacaatcagctaaatgcccctagtactcgtttccccgccttacccagttcatctaacagttgcttcaactgtgggaagtctagacatttcatcaaggactatccctatccaaagcaaaataaatccaatttccaaaaggcttctcgaagcacatctcaaggcaagggaaatgtggc

SEQ ID NO: 181456 - DNA, 1434 bp, Zea Mays
ttgtagtatgcagggcaatgggtgaccagcttgagggcgatgaggaagagcacatgaagtaccgagatatggttgtggattacattgtggtatgtgggataactttttgtaattggtgaactgtagttgtcctcatgatgtcatgaattagaggagggctttagattttaattcaacatgctaaaattgttggtgctccatgaaggcattggactatctatgcttttctaatccttcttgtgcacatctgcagaaacaccgtgaggagtttgagccatttatcgaggatgaagttccgtttgaagaatattgcaactctatgctaaaggatgggacttgggctggccacatggagctgcaagccgcttctctgctgacaagaagaaatatatgcattcacatggtgagttagcgatgcaagcctagattttttgtttatttgatttatttgtactagcacacttcatgcagttaagaacaccatgtcttgtatggattatgttgctaacagaacagttgatgctccgtggttctggttatcattgactgcatattgcaaatattattagcagctgtgcttctgatctactatttgatttgcagcttaattcaccacgttggtacataaacaacttttctggccgtgaagctactaacatggttcacttgtaagttagagtatcctttaactgtttgtacaagtcgaatgatggtagcacaaatctaattttataccaatgcaggtcttatcatcatggtgagcattacaacagtgtcaggctgagagaagatccatgtcaaggtcctgcaatgccagttgtcatcaaggttttttgttgtgtgatttgtaaaatggttcagttctgtttgtgtcctggaaaagctctgaaaaatagagctgagggaacaatgacgacactgccacttactttggcctatttccttttgttatcgagttacagactgattccaatatatccaacacaaacaataacgctcaaacaaaagcaaaggaggtgaagaaatcttcacacaggtcaacctatgacgacacatcagttaaattggtcatggctggaactggatgttctgacattgccatagctgagcatgtatgaactatatgattgatcacatttttttgcagttcagttgtgtgtttaatttagattcttgttattagccatttttcttctagtgtcaaatttgctattatcatacaggttctcggagaaatggatggtgatgttgatgctgctattgagtacctgatagcggagcgacttgcagtcagtactgatgatgcggaggtagacctttatataaaccatgcatttaacggtgagtgtgccaaactatcttgacttctgaggctctgtgaatgttgtttttctgagtatgatctttgttccagtagcgtttttgctaaaatat

SEQ ID NO: 181457 - DNA, 511 bp, Zea Mays
ggttgctgtcggtaaggctggaggcgacgcggacaagtgtaggaagtatgcccaggtgtatggcaaaggaggcagcggatgatggaacggcagagggcaacccggtgatgaggtgagaggcacttgaagcaccgtcctttaaaggtctccagagcttgaacaccaaacgacttctccaggcggcgtctctgcttctgtgtgcggcgactctccacgagtgtgaaaccatcacgatccaccagaggcttctgaagcctgggctgaaccaaagagcgcagtggggaagaccgacggacaaaccgtccaccatcaccagaggaattctgcacggaggcctgcaaggtcctagcctgggcgccatgggaaactatgtccccagacgtcaccgagactgaggccgagaccgttcccgcgagcaggatatccttgaacgaagaagggctcccaacatccaacgaatccgacgaagggctggagtctctccacctgagagccttgccgcgaccagaag

SEQ ID NO: 181458 - DNA, 582 bp, Zea Mays
gccctggctggacagttagccacgactcacctgaggccatcctcgggtgggataagcagtcacgactcgtccgaggacaaccccgggtgggataagtagtcacgactcgcccgtggccatcatcaggcgggacaggtagtcaccactcgctcgaggccaacccccgtcgggatacgtagtcacgactcgctcgagaccattctcgggcgggagaggctgtcaagaatcgcccaaggccaagcccggcggtagacgcagtcacgactcgcctgaggccaccctcgagcgggagacataatcacgactcgtctgaggccaagctcgggcgggacaggtagtcacgactcatgaggccaagcccgggaagcagacgcaatcacgactcatccgaggctaagcccaggtagcagacgcagtcatgactcacctaaggccactttggcagaactgtccgcactcgacctcctccacctcttcccgcctctcgctctaaccgcgccacgttccacatgtcgtggcctccatccacctaacaccctccaatctgcctcccgacgcaattcgcggtcccacacacccgac

SEQ ID NO: 181459 - DNA, 514 bp, Zea Mays
caacacagatctaacggctgccatacattccccttcccccagcgaccgaagatgtcagcgctttggtccgcggccgcgctcctcaccggagttggccctccggtgatttgcgacttaatcctaccacccgactagcgccacaccaacaggagaacctagtgatccgaatgaggtacaccatatcagcaacgaggaggcagagaagcggggctgcggcaccagatccttccacgacggagatctcgacttcggtgaagaattgcccgatgactggtggttccccccgataggcgatgcgacgagcgacttcagtggcgccgagcgaatcctcccagtaccccaatttgaccccgggtggcgcggtggtccagggaaagcatggtggcgctagagacttccgcaggcaacgcatgtgcgacttaggtggacgagtgaatgccggggcgagtcaaggcgaagaacggtcgcagcccggttttattctcccacccccgcgtggtcaaagcggaccggc

SEQ ID NO: 181460 - DNA, 285 bp, Zea Mays
tcagatttttacccgaagcatggcgtaagacatagttgggagcttcggaagatgcttcgggaatagggatggcggttttctcagataaaatttcttctacagattctttttctgtttcttttccaatttccatgaattccctcttggcaggctctgaaagcccagtttcggtttccacttggcttttggcaacttcggcctcaatttctgtttttggagcttcgacagctatcttcgaagtagagcttgaagattttattgtttctagcacatctagcacgttaa

SEQ ID NO: 181461 - DNA, 360 bp, Zea Mays
cacaagaccttagcatacttaattgatctccttctcatgacatgctccgaggactccaagatacacaccggacgacactctagagtcagatcctgctgcacagcaatcggttccaacttgatttgatggtccggatcccacaaaaacttcctcaacatagagacatggaataccgggtgtacccctgccatggaatccggcaattgcaagcgataagccaagatgccaacctgggctaagatagagaatagtccaatgtatctcgggctaagcttcccggagacaccgaactgaacaactcctttagtaggtgataccctgagaaggacttgatcccccactgcaaactccaagtcccgc

SEQ ID NO: 181462 - DNA, 593 bp, Zea Mays
gggccgaaaccagcccaggcggcccagctaccagcagaagcacgcccacgcgcgcgcgcccgcggtagttttgcacataggacctcggtttattaactaaatcaaaacagatttgtttactgttcttctgtgtcactgaccaaatgcagaaaagccctccaacatctattccttcacccgacacgtcctcgacgacggcagcgcacggagcagctccggcgagcgcgtagaccggccgataggggctatgactagcgctctccgtcgactaacaccgaattcataccttatttgatgtttcccctaacttaatttcaccaattgcgcactaaaactctctggccacggtgaggttgctcttcgcggtgttcttgaaccgaattggggagaatgcgcaattcggacgtgctggtggacgatcgagggtgggagcggttgctacagcttcacaattatatggcgcaactatccccgccctcaatttataggcttcaagggcggtggctctcaatttgaccgcgatgtgttggcggccggagacggggaagaagcctggcgcgcgcggtcacgtgtctgtcacacccggttttgga

SEQ ID NO: 181463 - DNA, 372 bp, Zea Mays
tggccctaggatacttcccctatgccgagctcgcggccgcgcccaccaagtgttcgatgctggtcctcaactgtggcgcctactctgttcccaacccttctcaagcctcgccagttggattcatccaatccaccccgtcttctccggctccggtccctagcgccgtcgcaagctcactcctccctgcagcggcgccgactcgaggagatggggtggtgctgcagctggcgcaggagattcaggacacgcttgcacgtggccacggtggagtgagtgatctgctacgaaatggtgcggcggtcggtgcccatctggtcgtacggcaactcgatccgctgctcaccatcaccgaaatcatcgccaccggcgcgt

SEQ ID NO: 181464 - DNA, 1062 bp, Zea Mays
gtaagcatctaagaatgacaataggtcgcacccggaggtagaatccatgatttgatctatacgtggaagtgggtacgggtccttgggacaggccttattcaggctagtgtagtcgatgcacatccgaagcttcccattcgccttggggacgatgactcggtttgccagccacactgggtgatgaacctcttcgatgaagccagcgtctagcagcttccggacctcctttcagatgaagtcctgccgttcaacggactgcctgcgaggtttctgactcaccggcctagtgtcggggttgatcttcaaatggtgctcgatcacctcccaggggatcccaggcatctgcgacggctcccatgcgaacacgtcgacttttgcctggaggaaggcgacgagcgcgagttcctatttttcacccagatctcccgctatgtgggtagtttgggtggaatccgcggtaagccggatggctttaacggggacgttgtctacctcggatggttgtacctttagcaccttggggagtgccttagtaccgggggttgaggggttccccccttcgttgtccgggcaagcagtctctgccgccagtgcgtgcagcttctctacggccgcaagcgcggcggcgcggtcgccctgcacggtgaggaccccggttggagatggcatcttgaggaccaaatacccgtaatgggcaatggccatgaaccggtatagagccggcctaccgatgatggcgttgaaggggaggttaaccttcacgacatcgaacacggcgttctccgtgcggaagttctcctcggtcctgaatgtaactgggagagcgatgctcccaaggggatacaccggttgtgggccaactctggagaatgggcgagagggtcccagacgggaccccgggatctgcaactgtttgaatgcagcatggctgatgacgttgaggcctgccccgccgtcaatcaacacatgatgcagccgcatattggcgatgataggggcggtgatgagtggtagcacaccggcccctgtcatgttgtcggggcagtcagatgccccgatgga

SEQ ID NO: 181465 - DNA, 318 bp, Zea Mays
atcaaccgctcccctcgccgccgatgacttcgcgccgggatcgtcgccgccgttaagattcgcactcactggtaaccggatagcactcggggtcgcgtaaatatcctcgtcgtggatagactccggccaccgtaccatgttcaccgcagcggaatccgataacttcaccggtgaccaccgcctctcggccttgtgccgcgtggctctgcctttccaccgcgtcgccgtgactccctatagctgtcccatcgtcgccggggaagttgccacgacggtggacacgaattcactgcgccaaggttcttcttcatctccggc

SEQ ID NO: 181466 - DNA, 714 bp, Zea Mays
aaacacacaattcattgacagatataactataaaggtgtctttagctattgcacaataatttgatagagaaaaaacatgtctcgacaattatcaaacataggccatgcagggattcatgatgcagcatgcatgagctatgaaagagttgagcggtgtccagtgtcgtcttgcgtcatgcacgagggatggttaattccgatccagtacaagaaacagatgagccaatgaaccaaatgcctcgaacaacagccatccactacgtatctgtcgtccatgctttgcatcgaaaggccatcaaccgtctctatctcgttcccaactggtctagctctcgcgaaacagtacacacccaccttcgtatggagctacaataaaatgctcaccaatgactcgtcacaagcgcgcgacggtcttgtagctcctcactcatgaggaagcacttctcctagccgctagcaatgacttgtgacacttcatctctcttttctgccacgactctcgtaacgatggtgttgatcgtgctcatcggcgacagcaacaccatgtgccacgtcgtgcggcatcttgatcacgccccgcccccgtcgctcttttcgccgtcccggacattcctgtcgtgccgaagccgctgatcatgcccatggccacccttccactaatgctcgcatgggagtcgtgtcacagatccatgtggtgcctaacaccgtcgtgct

SEQ ID NO: 181467 - DNA, 719 bp, Zea Mays
ctactttcgcatcaggggtcctaaactgcaagcctagctgttcaattcggacgccgccatgtcagacagatggaaaccgtacgagtgggttagctaaaaagtattatctgaaaaactgcgaggtaggaccatggagcagcaagatggaactatcacaagagcgcagctgaggggggtagtttctctttataacttgtcgtgcatgtgtgcagaccaatagtccgggttcatgggggcggaccccaccgggttgtcatacatgtatgcgttatctagtcataagaaaaggaaacagactcgaccccttagtcttgctctatggatagaacttacagagatacttggtctcggggtaaggtgctcctccagtcgtaggtagatggttccccttgggtcggtgcactcccgttaccttgaagggtccttcccagctgggggagagttgcggaacccctcttggtatggtgtctgccgtggggctaagccccgacccagggttctcacctgtatttgacgcgggagccctcgtctctggctcctgtctgtagttcggacccgcgaggggtccggaagggcctccggaggaaaggcgtgctctagctccgtagaccggggaacacggggtccctctggggttcgcctaattgtcttcatcggagtaggagcctccggtgaagatatctttcaggtccccctcgggcgactggtacccgaggtcc

SEQ ID NO: 181468 - DNA, 616 bp, Zea Mays
gactggtagtgctgctgctgaatgctgatgcaaaattcggcagcggtgaattggtgcctggggtcggtcaggtcaggtggcagatttcagccatggtttgttggaaaggaaggaaatcaatcatcctcttggttcacgtgatctcacaccctctgcggaccagtcagtttatcacgagtggtatgtgcagtcagctcactggatggatcatgtgaaatccgtgacagcttccgcagatctggaaactcgaacggaacggaacggaacgggaaggcgtaactaggggctgctgtagcagcctcttggtaacagtgctactacagctcaggtgtccgtcccttcctcgctgcttcagtgacagctagtacgttttagtaagacagcgaaccaaactgtggcaaactttattactgtcattgcttgccctcgtcaacgttaagcatcgcccttacgtttagtaccacgtgctctctcagatttccgaaacacagccatcgaagtttatggtagtaccaaacataaacaactttgctctcgcgcaagtcaagtctagatatggaccatcgtcctcagtgctatgttttattgcactactatttctaagagaggcactccc

SEQ ID NO: 181469 - DNA, 793 bp, Zea Mays
tctccataatatgccacatgcaaaacctatgtattgtatctggcaaaatagaccgaattgctgatttcatactagcatcttcatctgtaatgataatccttggggcatttcctcccattgctgaaagaaaagtctgaaatacccattcatatgactcaatcttctcatctactataaaagcagctccaaaaaatactgattgcaaatgatggttgacaccaataaaaggtgcaaatttcatatcatactggttcgtgctatatgttgaatcaaaagatactacatcaccaaaatgcctatagttctttcgacttgtagcatcagcccagaaaatgtagaccaactttccttgctcatccacaacaaaatcatagaaaaatgctgaatttgcctctttctttctctccatttgggcaacaaataattcagcatcagcatccttgattctctgcctaagtcctcgataatagttctgaagatcccgcttcatgcatccaatgttgttgattccatcacttacttgaagaagtctatatgcttgtgaggtacctatacttgctttatggcacgtgaacaaggtagtcttgactcgttgactaattgaacggtttgaacgaagaaatgaaattttatcaggagaaaccagcccatgattatgttgctcaaccattgaagcgatgaagtaccttttatctggagccaacttcacatatatatgcgcattacatccacatcttgtctccatgcgcatctttggcttcttttgtgccccatagggatgaactttagaagt

SEQ ID NO: 181470 - DNA, 809 bp, Zea Mays
ctggggtctctatagtgacccgtacaacggaaggacgggacaacgcgccatacctagtgtacgtgtacgcacgttgacaggcgacaaagggctcatgacgacaggagaaaccacgccacgtacgaccaccatgagactgatccatgggatccaccacgcactacaaagacatcagcgatggactcgctacaggagccagagtaacaaacaatgccatatcgggagtacgacaacacatgaccgtacagatgacccacgatgacaacccgggaagagatctccctctctttctctttttctagaagaatacaagtcccattataaggtcctacccctgaggtataaaaggcagggccccccctccttcaggggggcacagaggcacatgagtacactagcacacccattgtaacacaccctactgcaatactatgatcatcactacactagactagggcttcggccaaaaccaatattacctagtgtctcagttctctgcatggatctctgtgatccaccattcggagtgagtctgcacttgcatccccactgaacacaaatcttattgtcatccggtttctgaaaccacaacagttggtgagcaggttggggaccgcaagcgtgccaagcggcgtttttttcactccgatggccagttcaacagcttctgctgggtgtgaaatctttgcccctcagagccgcatcaagtttggctctctcaacctcctcgacaccgccaccagcaaacctgaggttgtcatcgtcggccaccagccaagctctaccctcgacaccaacgacgatgaccc

SEQ ID NO: 181471 - DNA, 802 bp, Zea Mays
ggaagctatgagctcacaaaccaatatttgatgccctcaaatcatctatttgtttttgaagcagtggaggtttccactacattagagacgaaacttgatcggggacaggagcaccgcaggatctctgttgggcagataaaccacaaagaacatcctatgattatgaaaagataagcaaaaaaactagttagccagcaggaacagtaaaagagcgaaagttgattcacctgaagattggagaggaacaagggaagacccaaagcaggaagagttgatgcattgcttgatgaggggagatcagcaggaatgatatcaaaggcatgacttagaggaacttcagtcccatcagcaggcgataggcacctggcgtctggttcactggcctctaaagtaaccagaccagcaagagctatagatagacgtgtcaccacagcctcttcagattggactggtggcgatccaacgtggacatccatggaagcagcagaaggggaacctgccccaacaccctcgggggttgggtcctccgcggcagccacctctagggatggagatccctcaaccacgtccataggagtcgggtgactcagatcagcatcttcgcgaggaagaccgccctctaaggtcgacgaggcacgagaagctacccgggttatctcttgcccggcagaatcatgcggcagaagaccatcttctgggacctctgaacagataatggggttgtcagctttaggaggctctgacaaaagctcttcagggatgatatcttccagcgcttggtcaaaatcagatattgacaacc

SEQ ID NO: 181472 - DNA, 1731 bp, Zea Mays
tatggcgtcacctcttcaaggttggtcaatacatatagcatgatatgtcgccactcttcatgtgtcagggtcttggtggtcgaaccacttactcttccgagttggcctcgaaatatgctgaggttcgattcgttgccaccattattgtaacgaggggatggattatgcatgctcggcagtttgtcaccatagtaagttgttgtgaagtttgacacctcctctagaatgtatgcctctgcaatggaagcctcggttttgcatttatttctacatttctttcgaatactgtttagacatctctcgattggatagcaccaacgtccctgcacgcccccgcattcgtgcctcattggggagatgaagaatcaaatgctgcattggattgaagaagccgggtagaaatatcttctcaagcttacacagtaacacgggtgccaatctttccaagtctgcaatcatggtccgagataactcttttgcacaaagctggtggaagaaataactcaactctgaaagcgctagctagacatgcttaaggacatagcctcgaaccatcacaggaagaatccgttcaatccatatgtggaagtcatgactctttatccctaagactcgcgaagtagataagttcacccccgctactcaggttagctgcataaccatcagggaacatcaacatcttgattcactgaagtacttccttcctctgggccctgcttaggacgaaatcggcattaggccttctccatgtctttccaccactaggcagcttcatctcttggtttggtctatcacataacgctgccagatccactcttgcctttatgttatcctttgacttatcaggaatgtccataattgttgtccaaagtgcctcgacaacattcttttcattgtgcatcatgtcaatgttgtgtggaaggagcaggtcgtcataataggggagccgagtcaagcccgacttatgtgtccacatatgctgctcaccatatcccacagaaccaccttctgtattggccacgagcccatctatccgttgatgaatttcggcaccagtcatcgttgcaggtgggcggtctgtcactacgacacctttcgtaaagttcttgatgtctaggcggaatggatggttaggagggagaaattgtcgatgtttatcgaacgacgaatatttgccaccctttttcaaccaaataaaccaaagagcttccttgcaaactggtcatgggaacttaccgtgaacacaccacgcacagaatagcccatacaccggtaagtcatgcatggagtagtggtaccaaacatgcattttgaagtttgtcttcgtagctcggtcatacgtccataccccttcctcccaagcacgtaccaattcattgatcaaaggctccatgtacacgcccattttattccacgggtgtccgggattatcaactacacgaatatattatgcctttgaaagcacacaccgggggagattgattgggataacaaacatgggccaacatgtgtatggggcagcgctcattccatagggattgaacccatctgtggctagcgcaacacgtacattacgagcctcttcgactttctcacggtgaatggcatcaaagtgtttccatgctccaccatcggatgcgtgcaccatgttgtcaggattgtatcgttttccatttttgtccaatgtcatctgtttcgtggattcctcggtcatgtatagacgctggatcc

SEQ ID NO: 181473 - DNA, 567 bp, Zea Mays
cggagagggactaagcgtcaccgtgattcacgtgaaatccagtttaagtttataggtaggacgtaggagatgcaccatctagctgttaggagctttaaagcgtgtttgacatgattcttctttattactctgacgagtagtaaaagaggcacttcaaaaaatgtatttagcactatcgccttttctcttcatcctcgcaatggatcccctacaacgaatgattgaaagggcagctcatgaggggctactgggccaggtattacccaatggggcaaagtttcgttgttctctttatgcagacgatgcggggtgtttgttagagcagacaaactagatctcaaagttctaaaaagaattctagaagctttcgaatggtgttcaggtctaaagatcaattttgagaaaacagagattttcccaatatattaccctgaatctttatggtcaaatttaatggaagtttttccaggcaagtactcttacttccctggcaagtatctcgggctaccgcttcacttcaggaatattaaaagaatagagtttcaacctctaattgagaaaatcaat

SEQ ID NO: 181474 - DNA, 511 bp, Zea Mays
atttgaaccgcaatacagacatgccaatctatcatgtgtactccaactggtaaaaatagcatacaccatgaagtcatacaccgaccacaaatacgcgactcctttcgaaagctcattcaactcttcaatcaagggttctaacatgacattgagtttctttccaggatggtctgtagcatcccaaaaatcctaatctaggtttgaaaccctaatccacctttttcccctcccttcatcctttaaatccaatacctccactagtttttctttgcatacattttgttttgatcacaaaagcacctcacttagattatatttttctaaacacttagagtatccacaaaattttttgttccaaagaaaaaaaggggcaaaatgggaaatagaaattagaaagtaaaaagaaaaagggaacagctccctcctccccctgctggaccgaatccaggcccaagcccgcgacctcccctctcccacgcgcccgcactcctccgctttcggcccatcttcg

SEQ ID NO: 181475 - DNA, 786 bp, Zea Mays
ccagcgcggaagaagcttctgtacacaacagcttcattatccttcagctcatggataatttcataaccaacaaaactgatcatgatctcctttctcactaatatatccaagcctcttcagcacatccaagtcttcagcttttacaatagatttaccaaattcaatatcgctcggcttgcttgaccgaagaatgttagggttctcttcatcatcaccagcttcagcttaagagccactctcctccacaacatctccttcttcatcaagttggttcctagtctgttccatgtgattataggatcgatgtcgaaggaaatctttagtcgaagctgcgggaaaacacaaacacatgagaagaagcttcggacgattgtcatacgaagtgcagctgatgaagctgaacaaaaccacaagaagtcttcaaaagcttattcgtgaagataaaggaaggagaagagaattttaccctccacatgtatgatagtatgaatgtataggtttaagggcataagtaaatccaccaaagatgtctctcgtacctataaatagatgaacagtgccacacattgaggacacttttttcgcattggggcaggactcacttctctccatacggacttgtattctctctacccctttcattgtagttttaggaagcccaaggtacttgtacaaacctttgtttaatggaaaaaagaaagtatgacataacaacatttcttacatttgtatcgtctgcccccttattttattcacacccaatgttagtcctttttacatttcgtt

SEQ ID NO: 181476 - DNA, 616 bp, Zea Mays
gaagaacaatggttgaaacaggtatccaatgggttgagcgaacattggagaatagtgacgactgcttcgacatgtttcgcatgcggcgtactgtttttcgacgtttgcatgatacgttggtggaaagttatggtctgcttccaagccgtggtgtcagtacaacgaaagctttaggtattttcttgtgggcatgtgggggtccacaatcatttaggcagataaagaataagtttggttactctttggaaactattagtcgcaagtatagtgaagtccttaatgcactatataagatgtcttctgacgtaatcaagcccaaggacccaaatttcatagagattcaccctcgattgcgagagagtagattttggccccatttcaaggattgcataggagcaattgatggaagtcactttcccgtgtctgtcccggccacggagcaagcaaaatatattggtcggcacggttacgcatcacagaatgtaatggccgtttgtgacttcgatatgaggttcacatttgttgtcacgagttggccaggttcagtgcatgacactagagtattacaagatactttgataacttatgcggacaggttctcgcatccaccggaagg

SEQ ID NO: 181477 - DNA, 618 bp, Zea Mays
gatccacatggagctgacggttgagcttctctgcatcttctgctcgggcaatcatctaacggtggtgccgagccaagaaatcatactgagcatctagggtgagcaggtatgcagtgaggtacacgactgaggggtcgtccttaagaccttgctgccctacccatgcacacatcctggccatccaaacgggacggtttctctgaaagggcggaaagaatctgagcggggtgtcggccacttcttcttcatagatctgacataggaccctcaatgccttgcgggcgacgacttggcaggtgtctttgaatctgtgcccagcagcagtgacgctccattccacatggtgcggactagatccaatgtatacagtcacgacacacttctctgtaccatgctcgacgaattcacgaccatcatactttggctggctcctgattctgaggcgaactgtgcatgctctgagcaacctggggaaaccatcttcattctggcaaaagctggtttggcaacggacctccatctgacttttgagagaaggaaagggggaaaacatttttgaaatgaagggatgagagcaagatttttttaagaaaatagttttgactcaaaaacttttgg

SEQ ID NO: 181478 - DNA, 1662 bp, Zea Mays
gaactattaacacaaatattgtgtatgtgtgtgcattacatatttaatacatgcctaatgggataggaataatatgaataagtcgaattacatgctggatttccttgttgttgcatccacatttgaatttgtaactcatttaaagttcaaaatatttaaaaccaatagaaaacagaattataaaagtaaaaaggaaattaacaaaagaaaaaaaaagagaaacatttttcctgggccgattctcaagctgctcggcccagccttacccctttgccctggcttgttgggctgactacaccccgctcggcccacactactcccccttttctttttcttttttttgtcccttacgcgtgggcccggcgcgtcggtcggataagcctccgcgtaccagccgcgcctgcatctcgttcatcatcgctgctcggtgggcccaggtcgtcaggattgttttcgccaacagacaccgaatcccgcccttcgccatggccgacctccccgctccgaccgggatcctggcacccacggactccgccctttgggtgtataagtaccagctctagtggcgtcccgtacccatcgacttggagctggacgagctctggcgagggtcccgccccgcgccaccattgccgttgccgaaagggccgccgccgctctgtattttatggggaagtcacgacgccgccgcaaccggaatcgagtagaaccatcacatcgccacagggctatccatgacgcggtccgacgagttatgatcagctcggctccaatttgcggtatgctaaaccccccctgcccatactcgccatctatctgcaacaccgtaggctatccgggggaaaactagcgacgtgagtagggtaggaggcccatcgtcgatgtgcggtatgttgccggaggccatcaccgatggacctcaaccagggcaccagtgcgatgttcaacggcgggacgtcatggccaaattgggggcgccgccttcttgtgggctgaaggtgggagatgacgtgccagccgttggtttcctcatgaacgcgtaggattagatctgggtagcccttcgcccgtgaccgttagatgtcgatctgatggattggggtgggcctctagtatttaaaatgtggagcgttggatggtgatccgacggcctagatgcagtaccggttcgaaattaatctggaccttatccgcaccgttcacttgcaatcgtgcggcccagatatcgcgataccccttcggccatgcctatttgcgtaagagccctcctggaattttggatctaacccgccgtccacattcattattcactgagtcttagagaacttcggtttaggcccctgacttttccagtatttgacgcccagtccagataattaataaaacagggaaaatcatttagaaaatagtttttagtacatatttaaatgcagattcttgtttaatttgtagaaaattcatataatgtccaaatcagttcattccagtttatataattatataatattattgtttatcacatagtaccctggttcacattaaaatttatattctaattaatcttatatcaaatacataaaaccttagaaaaatcataactccgtcgttttaactccgatttgatccgttcaagttgcgtgagtctcgtacaagcgcgtagat

SEQ ID NO: 181479 - DNA, 1106 bp, Zea Mays
ttttcttggtgcattaaaacctaaatttaaaatttcaaatgcatatttgaattcgattttgaaattggatagaaaatagaaaaaatgtaaaagagaaagtgaaaacaaaaaaagaaaaggaaaactctaccagattcgtcttccgcgctgcagacatcacactctgcgccaaattcccaatagaatctgctgccttggccgccgaggccgttgcaacctcccgttgtgatcttgggtactcagccccaccaacacgaccccgtgctcgcctctataaagcgtccgaccctgaagttcgtaccgccccgtcgtgtattcgggtagtaaagttcgctgccggggtatggggtagtgtctgcgccgccttcgacctcgggcgattgtcggtggtggtccgccctcgcggatggaggtctacgcccggggtactcgtgccatgggaatttgggccttgggtgatcgcgaatgagcggcaatttctcgccgaggttgatctccgccgtgaaacagcagtgcaccgtgggcagccccgcactctccaccactactggtaagactacttcctgtgcgtttgccatcgatttgcttcacgaagatcgcgtcgtgtttatgggttttgcgcctggacgatgtgtcgcgcgcggcggcgatggggctccgtcgcgggtgcttggcggcggcgccgtccgaatgcctgggcaagatgagagctaggccatataaaaccaagggtgtcgatccgaaatcctatggctaggattaaaacccgcctacctattcaagcattgaatgacaaccgttgatcgatagatggagggatgggaggagatcgcggttgtttaaatctggggcattgacacaggatccaacgacatcgggtgggtaccgattcacttagaagaacacctaatctgtgccatcgatttatgatccaacggacgtgaatgcatactggtttgtaactctcagatcaaaccttgtccgctagatggagatccatcggctcaaatacgtccataccttatcaccgcgtgttttgcaaatgagccctcggcttattcaaaaaacaactcgtcatcctgttgttcactgcagtaacctcggaa

SEQ ID NO: 181480 - DNA, 559 bp, Zea Mays
actgactttaatatggagtcttttaagaagtctttaaaagtctaattaaaaaaaataaagagacagactctttgctaagagcccatctctacacaattattcatacatattgtttcttaaatatatttatgatctagtttctcataattgtatcacgaggtctcttaattgtctctgatccttaaaaatcgaaccagtcttaggggttgtacaagccctaacgccgcaacagttctgtagttgtttctatgcagcgcagttgaatgtggcaatagttctgtagttgtttttgtgcagcgcaatttcaacaaaaatcgaaatgacgctacattggggccgtcatcaccgactcacaggcatgcccagatgggaaggccgataggccaaccgtacctcgatgaaatttgcgcaagtgtctatcgcgacagctaacagactatggggaaagaagcttgatttcagacactgagtggcctttcatatgatcactcgttgatttgtaaaatgaaatgcattcattcatcaaaatctgatggaccacatcaatcctcaaaaacca

SEQ ID NO: 181481 - DNA, 887 bp, Zea Mays
gtcgtggccactgcagccaccgcaactccgttgcgcgtcgattgcggtaggacaaactccctaatcctgctcaccgcgccttccattgatcatatccacgcatgccccgcatgccaacatcctctttcccctacaatcccatgcccccgtccctggaggatccaaaggaaaaggagcttgcccctctgccggagaggaaggaattctaatattgcttcagtcgcgggtgcctcgaccaaggtatgccatgcgttctccttccagatttgttaatcctcgtccctagagcagataataaattcatgtcaaaattacaatggggacgagaccttctttcctaggggaagttcctttagaaattaaatacccaaggttctaagatcactgcaaggacaagaatgttcttgtacaagagcaggtcatgcggcttgagagggatgtagtgctctgtagtttggacaactataggaactttactgttaattcgttaatataagtttagaaatgacggaggtgtaaggaattgctacggtgaaatagtccactgcattcgagtccctgaaaaaatccactgttatggaattgccaatacccaagagaagatttgatccactgttatggttctctctctcgagttgctgttgtccctgaaaaaaaactacatggtcttcaagttatgggcttgtttttagctacacgcacctctattgcatatgtgatatgtctctcccttgatttcttcttcgttgtctaccacctggatgacatcaggattcaggaacgtacagtgactctggcccatttgactacttcatcgcaaaaaccttcatttaagcatttacggttcaaataccctcatgatgattttcaagaaaattatatcatcc

SEQ ID NO: 181482 - DNA, 792 bp, Zea Mays
gctgggggcagcaccagcttgtgggtggagcgagtctggagatgcgccgcggaaggaaaatggaataccttgatattccgcttaaggacaacattaaagggtggcgccttgagtggtttattgtggaaaaccacggcaagtccctcctcctcggtcggggagacagctagatgtgcgcactccaagttggattgagtctcctactgccttggaagtaacagaagctagggttctgcttgctgaaatctatctgctgaaggagagaggtctgaccgccgaggctgtggtcgctgactttgtttttaagaatatctagcccttgaaggacagagcatacccagcttacttgtacagtggtgttaccgactcgactcgggttactaataggagaattcctgctgaggatttggtgagccggctagacatgatcttgagaggcaaagtatcaaatgttggtgctcctattgcctattctgcttggaatcttccacctcctaagtcatttttcagtttcgtgtctaatcctctcgctggtgatagtggtctaggtcttagagtgcgaccctctcctgaagatattgaagtgttggttgcttctctttgtgatcttcccaatgatgagaggcaagttcattttgagatgccaacgagtccagatgatgcagaaataaatgttgtactcgatatgttggctggagaatcttctgactcggcccctgctgaaacaatggttgttgtggttataccagagactgtcaacacagtggacacccgaaagcctgagggtactcg

SEQ ID NO: 181483 - DNA, 445 bp, Zea Mays
ggccgctctgcttctgtttgggttctgagggcatgttgtgctatagtgccccctaacatggcaggtttggcactctcttatgccctgacccccactgtatgtgttgtatggattagcaggttccacactatttttagcacatttagccccactgcagacttcctacccttcgtgcgcgacattggcggttcagtcaatgttagatcagcgaggcagtttgcagaacctggattgaggcccgattctggtggtggtgtaggaccagtgggcatcacaacaggttccatattgttgtcagaactttgttgtgttggtgcaatgggaccaatattccgccgtccatctgcatcttgctgcaactcagtatttgttgcttcatccggaccaatctccgctgttcgtagaagctcaatcccaggagttatcatgtcgatgtgcctgatag

SEQ ID NO: 181484 - DNA, 825 bp, Zea Mays
taactagcagatcttaccaacaacaactcttagtacaagatcaactagggtaaggtggtgacaacacttaccttgggaaacccttgtgtggtggcgatacgccgagagaatggaagcaccccctgtttttagttaatgaatggcttctcttattcataagcatatatgttacaatatatatcctcgtgggttgaagtgatgagcacttccttacttacatttccatctaatcaactacctatttctggtaaaaggcctaaatttatatttacatgtttatttcctctatggtcgagcacttctctttgtagaactcttcggccacaacaacagtgtgagcccagttggctcttggccaaaaatgcatcctagactcgactaggattaggtgccaacacatggggggaggatcgaacaagcaatcaaaacattcatgttgtgtttaagatctcaaattgatatctctgtcctcttgtgtttgagagtcgtggtgaaatcccctcatgaaggatgcaatttagcaatgatgccaccagccaaaaacttgtttggtaggttgatatttagctattcttgttcctttgtaatgcaatacatctcatgagactgctcaactatagactttccactagtcatcttgtagtcatggtattgttccatggtgtactacttatcaccagcatttgtgctgccatattcggcttctagagtgtcccacaactctttagcatttgtatgacataagtacacatcctacaggcgatctacaagtgcacaaatcacactacctacaaagagagtgttggcatttgtataagacttttt

SEQ ID NO: 181485 - DNA, 960 bp, Zea Mays
cgtcttctcaagtataaggctattgattagttataatctatttgaccgctacttatgtctacaaattttagctaatttaattccaaccaactattgtgaaacgaaatccatgtaatgaccatttactgctactatgtcatgttttgaggttttttattggcaaaatgaattcacctcatccctggttagcattagaaagttgaagcaaacatcaagtttgtgcttgtttgacacagttcacaagttctgaacctttttgcatccctttaatcacaaatatattcatcactttctgtctttctaaattggttattctgtaagttgaccatgttttatctcaaaagaaaaagaaatacttagtatagtacctcattatattagtaatatattcatcactttttgcctcccactatgactgtctagaggtacctaatgcttatgtattgaagaaatggtatttcaaaaacctattgggttccttttttccctctcctttaacagttcaataatgtacatattagtgacctgcaagcagtaaaaatcacaatattagaagatagcggtagggatcctggcatcacatattacagctacagtttaggtttttgcaacattatagccacatctaccgaagacaagcagcttttatattaatcactttttgcctcccactatgactgtccagaggtacctaatgcttatgtattgaagaaatggtatttcaaaaacctattgggttcctttttccctctcctttaacagttcaatgtacatattagtgacctgcaaggagtaaaaatcacaatattagaagatagcagtagggatcctagcatcacatattactgctacagtttaggttttttacaacattatagctacatctaccaaagacaagcagctcttattgcttaattacttttctgggatgtatccacaattctgaaccttctagctttt

SEQ ID NO: 181486 - DNA, 746 bp, Zea Mays
ctcgtctttccccgctctctggcccatgcgccgaaggcgccccgtcccgttgccaccaccaagcagggcccacctgtcatccctcccctcgcaaatgtctggccgcccagcgtggctcggtgcatgcccacgatgccgggaaaactggcatcaccccccacttctctggtcagaggcgcttcaccccttttctcctcctctgcgcacccccttgccttgctcgactccccatcgctctctctcgcccatgtcgcgctagagcgccgccccggttgcccagcccgagctcgacgccgccatgtccttgcgcctcaatgggaaccgcagtcgcactgtgccttgccgtacttcctcgcgctcagagctccacctccgaccgcgcctcgccatccaccgcccgttcactagacccgatcaccaccgagccaagctccatcctcaccggtgaccccgcgggtgagcatctactccccctctccttccctcgcaccatcttcccctcctccattttccccagccatgaccgccccgtcgagcagccaaacctccatgcctcacgtcgtgcgtgtggccacgccaacgagcttgttggcatgagccctgagtgccgccgcgcgtgcttggctaggggaacatggaccttgacagccagggcccacccatcagcccctcaatactgcccccttctttcccctttctgggtcaccgacaggtcgaccccacccgctcgtgcgatctcgtgcccc

SEQ ID NO: 181487 - DNA, 511 bp, Zea Mays
gagagaaggctcagggactcacgaacggcgtccgaggcagggcgcggacacggttcgacggcggcggagctgcggcgaggcagagagagaacaggtgagcgtggaccgagagaagcagagggggagggagcgaaccgaagggtgtcccgggtcgtgggtgacgaggcgaagctcaccgaggcaacgtacacggcgagggctcgacggcgactgtagaacgggcgcgagaccatggcgaatggtggcagagctccctggttgtgcacgtagtgcgaggcgagtgatgagggctacaagtgtgcgagtgagggaagaggagggtgagtgggtactaggcagctagaaaaaggccgaggtggggacgggcgcgacctcggcgtgtgtcgtgggcgaagagtccacggcgacgcgcgggtcgtgcacgggcggttcggggaggacgagtccaacagacgggacccacgggtaagcgagagcgggcgagtgaacgggcagccaggctgacgagcgg

SEQ ID NO: 181488 - DNA, 1069 bp, Zea Mays
ctcggccgatgaaggcccttcaagggatagggctccgagtgcggctgtcagaaagagaaaagtaggtatggcggctgaagagttggggctgagggcaaccggttattttgttgaggaaatgttggagacgtgtgcggctcccgaggaattgatgtcttcgctcgagctccgggaaacatctgtgcgaatgctgaaggttacagggggtcgatggcctaggaatgatacgataccctaggcagctggcgaagatatttttacgtctcgattagctcgtgacgtaaagatttttccttacagaaggaatattggtgctgttgtgtcggcagtgatggagaaagatcgttaggttggtggacccgtgccgggaagtgaagctggcgtgacctagtgcgaaggccgcgcgcgccgggcgccgtgatgcctccgtcggccgcgcttgctgcagtgccaagaccccctccgcccattgcgcctgctgcagcgccaagaccccctttgccaccgtgcgttgctgagacagcggtgatgggatccggtggagtcgccatggagttgtccgtagacgactacctggtgggcgggtgaccatgttcgatgcccagatggggttgccaccttttggtgagttgttttgtttttccatgggttaaagtgggtccatgtttctgacttggttgtgatttaggggcagagtctggccatctagcggttgcgtcgccagcgtcggctgccagcctggtggtcgcggcgatggaacatgtggtgaagggtgacacggggactttgaaggacccgtggtcgaggttctgcgccagaggcgagatcgcctccactgccgctgctgctggcgtggccgcatcagtcgtgcaacagctgaaatatgtgagtgattagtgctggtaggtgtatggttttccttgctatgttgttcttgaatgttgcgttttttggtgttaggtgacccccttcgctaaccgggttgcctcaggggcgctgacctcggagttcgcttctgagaggcggcgacttgagggaaggattgaacgcctccgcacacaacatacgg

SEQ ID NO: 181489 - DNA, 295 bp, Zea Mays
gggccagcaagacagtaggctgggatatgtatggcaggcacatgaggtgaccagtcacgagatagtcggatcaatcatgcttggagcatgcatatggctgatggagccttgagcgctcgtcagtaccataccagtggcggacaaccttttcctcctccatcttttcgagcaatgggggcctgcctgacagccaggcgacgcgaatgattgcgatgtggcacgcaccatgattgacttctttccaggtcgaggttctagcgttctctgctacaaatgtctgtccatccgattctgt

SEQ ID NO: 181490 - DNA, 665 bp, Zea Mays
ctatccaactatcgctaagaaactattccaacctctcttatttaattctactgccacatcatcactttgcttagttaacatcctaactaatgaaaacaaaatccatctagtttgccctaagatcgtttccgtgctctcttgtttaatcgtgtagtgatacgctgcaatggctcatttccacctcggagatcaacaaaagtgaagacctaaaaacccagtattgaaagaaaagcgccaagcatataatactggaaaaacaatcataataaaaaccaacatatatattccaaaaaatatcaacgcaaatttaaaaacaggaatgcctcaaatcgttacaaaagctatcaggtaaacgaagagttcaatttccatcatacttatgatagtctaatatcttcaaactagcttagataggagaactcagatttcaaaagagtatttgtaaaataaaacagaggaccaagtgaatacggtaagctcatgaaacaacagctcaaatagaatgccatctacacttaatatttgtaggatccacgttttgatattcactaggtgccactgaatgtgaaactgctgcttcatgtcgatgtgaacattgatgaagcatctcttccattacagagtacacaatctgaagctggtcattattgctaccattgctaaac

SEQ ID NO: 181491 - DNA, 717 bp, Zea Mays
aagagtgtctcgatatagcagaaggcgaggaggccaacacccgtgaagcctaccgaaccctaaagatggattatgataagaagttgaagaagctcgcccccacaaagaaaatccaaaagaagaccaagaaccaaggaggccaagctgagcggagggagaaggctcccccagcactagcttccgccaggatagagaatttgtccgtcgtcgaggatatgtccctagctagccttgatgaccttctcaaggaatttagggacactttagaaaaagagttcagtagtacctctgagaacgctcgcgtgtagtacgacttgtagtagctgtatgcttgtaatgtattggtgtaatgaataaaataacttggttgaaaacaattggcatgtgcatactagtaactctcccttctcccaggcagatggcttcggataaaaccacgcctaccacctctgggattggaactaggtttcccctgagagctgaaagagaagccgatagagaggaaagtgagacccacctccccgcacctctagaactaccctaagatttagcccaagttctagccaaccaaacccgactcatcgaggtcctcactcgaagtttggaaaatcaacgtccgaatggtggaagaccacaagacaggatgggagatttcctgaggctcaagcctcccagatttgctggatctagcaatcccctcgatgctgatgattggct

SEQ ID NO: 181492 - DNA, 515 bp, Zea Mays
tcgcgccaatgtcgtgtctcctcgaggccgtcgcagaagactgagaagttaaattttcaaaaccaatgcaacgactcgaggcaccccgcgcatggcccaacgaagccattaagtgcggaggtcacgggtcagtcagtcgcggggacaggtgtggcagtcggcgtgaccatgggtggaccggtagtaattacaccaacaggcgcacagaaacagcgagccaatcgccaaccaaactttggccccacctgcaggctcgtaccctccccagaggcgggcccgagggccactgtcggtaccctgaatcagggataccccttactatagtatgaagacacggtgcccgtacggcgatctctagccgcacggtaaacaacatctgtccccaccacgtggacaactcaaggggcaccacgtgacgagaaaagatgatacatcccaagatgtatcagttggaccagacctccgagaggaagcaccggacccctgtacgcacaacccagaccccccgattatgg

SEQ ID NO: 181493 - DNA, 447 bp, Zea Mays
gtagcatcgcgttttctatgtgcgcgtgcgtgaaagtagtcgtcgtagcagcacgcaaacacacgtacacatggtaatgggagtcggtgcactgatccccattagcttggtaaagctccaccgaacagcctcgcgggttcctctccacgcatatacaggcaacctggttcgaggccgtttccaagtccacacaattcagtaatccaccatacatttctatatgttcaattgtactgctattgccactccacgtgtaatcaccagcctaaaagctcgtttacaactgatgctgatttgtttgtattgatttctttgcttcaaaaattaatattctggtaactattttttggctcgtccatggtgagagaacaggcaatttgagtatgtgctatactctcttctgatagtttttgctaaatatagtagcataacttgctctcttggtaa

SEQ ID NO: 181494 - DNA, 775 bp, Zea Mays
aatacgaccatgtgggataatccacattacgaggcttgcagtagcccatcagctggacaaacgaggaactcctcatcagggatctcccatcgaaacaaggtagctaaagcctttacctgactgacggaaagaggcttatcaaattctctagcacggcgttctagatcatccgcagaaacaggagcctgcccatttttcaaccccagcttcaaacaaatagtgtgagccgctgagttccccctaaggggaggaagtttgcctacacgtcttgatcttcttggcacgaagttgggcgggatagactttctggctttaagctttggagatgaaggaaccggcaacacatttgtgagaggctttacgatcttgttaatgaatgtcatagccacctcctcctcctctgaagttatacgactttgcttggggtgttttcttcgagaatacacttgcaagaccttgcaaggctgctggaccagggcagaagatggctgcataatgtccaaagagttgtgaaggctatcattctgctcaatagaaaaatcatcagaatccactgagatctgagtaaagaatgtgtccagatgagccaagccaccatcctacagagaatcaactcccgaaagggtcaatgagtttttagtgtccagggataaccgactgtccagatcccttcccaactgaatcaaatctgaagacatggatgcagtgacccgagcaggttcagaccccataagagcagaagtcaaagagtcatgagcttcaccaatatcttata

SEQ ID NO: 181495 - DNA, 417 bp, Zea Mays
cgaaatccttgcgcacggcccaattaaccatttcactcggtcggcccagccactcactaccgcgctcgcccactggcacactggcatgtggggcccctggcgcagccgctttccccttccgaagcgtggaccaggcactgtctatctcctacccgcgtgcctcagccgcccacctccgcaacgactgggtctccatggccgacttctgcgcgggtggcgcggatagcgcggtggtgaagcatttttctctccgctgcttgggcccgagtcgtccggtccccctccctaacggaatcgcgcacccaccgtaggaaccatgctgcaaaactcgtctgcgcgctccgttaaacgattctccccaagaatcggactcagtcttggtataagaaccctgggtgccgccatcgtgtgctctcc

SEQ ID NO: 181496 - DNA, 359 bp, Zea Mays
gcccacctcacattatagctttaaagcttaaaactgagttaaagtgctctaaaacttttagagctctaaagtttagaggagcagatccaaacaaacttttagtatcatgtgcaaattatatataaggttcaaaactgtatgcaggcgtgatttctagaatagctaaaagcgtgtatcagcaagttttttgtgcgccttgtgatcgagttttcctttataatcacagacagtttcagaactgatcggtatcctaccacgctcacggctcatccggctcagatggaccaatgacgatcccattaaaattccattctggcaacccatcaggatacacaagcaacgatgtcaggacgattcgc

SEQ ID NO: 181497 - DNA, 567 bp, Zea Mays
gctactactaattttaattttgttccatgattcctacctcttttcttgtagaaaactgttagagatgagaaagaagtccttaaagctgttgagtatgtgcatgaattgatagacaaagaagtagctgcgggaacgagcccgtcaaacatattcgtttgtgggatgagccaaggaggtaaatcaatgagcttaatctgcattttatttagtattctaggccataagatagtaccaatacagatacttctgtttattttcgcaggtgctctagctatagcgagtgctctactctacccaaaaactctgggtggctgtgctgtcttcagtggctcagttccgccgaataaatcattcgccgataaggtgtcacctgaagctagaaaggtaataagctgcagctatgcttatgttttcagaactgcatcttgttgactcttgttacctaaatacgaactcttgtttcagacaccggtgttatggtttcatgggatggcagatggggtggtcctatttgaagcaggacatgctgggtgtgcatttttagaggagcttggcatgtcctgtgaa

SEQ ID NO: 181498 - DNA, 1088 bp, Zea Mays
tcatccttgacttgcaagaagaattgcctgtcaaacgagctaggtattgatccttatacaatgaagtatttgaggcaactgactcacaaattgatgctttaggtgtcaaaaataaattatatttctcctcagcttcacaatgagcactatcaacaacaccaacatgcttaagcaatctagctttaacattccaatttctaaaccttcattaacgaaagcatctccaccagagaatttgttgttatctttgaacagatagcaaacaaaacaatacaacatctttatccatactatactcaagccaattaaactcggaaaaccactttggtaggaagcgacttatgcctccacattcatgttggggaaaatcatccttctttatatttggttgacatggccccaatgcaatataagcccttctaaccgcatcttggttattaataaaatagcttgagaatggagtcctgaatccaggatcatgctcaatgccataaatatcattatcatcactatcattatcctcactcgatgttgtcccattcaagtgcactgattcaaaatcatcattgtcttcaacatcttctattattggaggttcaggctcaactctctcgttctgcgggcgttgcattattagtttcagtctgtccttggaatatcaccaattgcatctctctttcattagaagatggagcagcactatctttcttttttgcagcagctcttgctaaaaaagctctcaaatcagtggtagcattgatcttcctcttcattttcaaatctgcaaataaatcacaatacactcaattcaatgcctagtctaaaacaaattaagacacactcaaatcacaaattagtgaaaccactcaaacagtcaaaccaggacctcaacttcaacttcacaaatcggcggacggctgcctcctgggatgagcctcgaccttgatggcggacggggtgacaccgcgacaggcgctaactgcacggcggcaaccgccagcgtggctctactacagtgctgcacaagccacacgatggagcagcagagggcgccaagccgccaagggcccacggcgatcggcggggcc

SEQ ID NO: 181499 - DNA, 764 bp, Zea Mays
cgcgactcgacggcgtccgcgcagtcttcacgcccggcgaggaggcccggtctgctccacgccgcacgtacagggaagttcttgacgtccagtgcgcggctccacggcggggtcaagtgtccggcgagcaattcgttggcagccctccaccacatttgcccgcgaacaccacccccgcgatctgtgcgcaccagcgatggtccccgagcttttcaacggcaccaagcggcgatgcggatgggattatggcggcggcgcgagttctctgttgtggcggtaatccagcgaaggccaccccggcatgcgcgcagactggaggagggaacagggaggcctcggaattggggaaggaagcttgaggagttctctctgttccggccgctggacgaccaaaagggctgcgaccgcgcgtacatatacccaaggatagcgaggggcctggccacgccgtgagttccgggcggacgcggagaatcgcaacaaacacgagagaaggggaaaatctgttcgctgcgataaggatgaagatgcagctggatgtgggtcccacgatggcagccgatgtatcacagacaaaccggtcccaccgaatggaaatgcaggcgcgacgtgattcttttccccctgggccgagcgcgagtgtattactaggccaggagcttgggtgggctgcgcgggtggaataggagataaatgggccggccagaaggggtagctgggccaagggagtggaaatcggcctaggtgcaggtttctttcttttc

SEQ ID NO: 181500 - DNA, 628 bp, Zea Mays
caaaagtgttgctatgatccctcctattttagaggttggtgtcaaacccttcttctatgacattttctttaagattgatgatatcactgatgagggttggaatgatgagtctataaaccttggcaaaagagcttcggtggacagacaaggtcttgatgacccctcttatgaaaaaactggcaaaaaggctagaaatgtaggagaaaagtctgtcaaagaacagatgaggctcgaaaacattggagatatgatgtctcaaggcaaatcttctggccggggacctaaattaggtgacaacaatgaggatttgaacccgatttctgaagatcctataaatgaagatgaagagtttcatgaaagtgaagatgacctcttaagttctcaagatttggaggaatttgccaaagatgatgagggggttatacctccttgccaaggaaaaatcagcaagtctcctttgggtgctcaagctaaaggttctggaaaaattgaagctgaaaaacaagttgtgagtatggaagtggagcatggtgaaggcattaggagaagcaacagacttgaagctaatgatgatatgaagattgttgataaagctgcggcgagagctatggctaaagatgctttcatg

SEQ ID NO: 181501 - DNA, 573 bp, Zea Mays
caaaagtgaagaggacaatagtattatgtgcccaaccaaacctagtcatattgaatttggaaaatccacagtaaaagcagaggacctggttgtgatgaagaagctaggttattttggtgaaaatgaagatgcactaatttgctttgctggagaggaagtaattctagagccaaaggaagatgaggttgttgtgttcaagagcttattcagggcggggcttcggttccccctttacgatatgatagggaaagttttaaagagatttgagatatatctccatcagctgacctgaatgctattgttaggcttagtgtttacatatgggcatttcgaagccaaggaaaaagtgctaatgccgaagggttctgttgcgtgcacgaacttcattatcagacgaaggccagagctgatggtctgcacaagaacttcgggtgctataattttgcataccgaaaggataccaaggtccccgtgattggctaccgcactaaatggccgaccgggtggactaatgaatggttttacatgaaggatgatgggaagaagagagagaagcttatgagcatggtaatg

SEQ ID NO: 181502 - DNA, 766 bp, Zea Mays
taaactcgcctagttttcatcatattcttgcccgctggaggattgaccatgtttccctttccttgattcacattccccgaagtctgttggaaatttgatgaaatgtccagacttcccacaattaaagcaaccacttgaggaactgggaagggcagggaaacgagcaccaggggcactcggctgattgttctagacaagggtaggagtgggatggatgaacacgggttgtctgaagggatatgtgggtgggcgagaagaagaacgatttgggttgaagggacgaattaccaaccttgttcgcttttcagacccctgaaatggtccttcacccacatatctttttggctttccttgtcccgaatttttggcttcaactgacagtgatgtgcttacaaccgtgttgtaggtgagatccaggcacgtagccattttatgctggagtcgatcattcaatcccctcatgaagcaattctgtgtccacttgatcgatggcatattgggagaggtgattaaacttgttgagatactacattacagaatctcccccttgctttagaggtatgaactcctccagcttcatctgtagcaccccttccgaaacataatgttccatgaatgcttgtttgaactccgcccacgtgacctgatgtcctgcaggctgaatggctgacaaatttgcccaccaagtactagcaggacctctcaactgttgagcggcgaataggggtttctgcgtttcagtacattggatcagtccaaatttttg

SEQ ID NO: 181503 - DNA, 303 bp, Zea Mays
tacttctggacatcagcatatgcatgaagattctggactgagttgttgctgccaaaatctacagatgatgacctgatattgcctctggtatctgatggtggtgacttgaccatgcgtgtgaactctgatgcaggtgatcgcatcctttttgaggcttcaacattttcatcattgatggtatccgaatagtcaaccagtctgcaaacagagcaggggggatattgctcacgttagctgaaagcccatagtaaatcagtcgtggcacagggctgttaggttgtgcgtccaggcagcagcccccag

SEQ ID NO: 181504 - DNA, 508 bp, Zea Mays
atcaagctgaatatgaggccctcttattcggcttggaacttttaaattgtatgggagtaaaacatgtgaaggcattgggtgattctcagctggttgtccaacaagtgttagaagaatatcaatgctttgatggtactctgaatagttaccttgaaaaatgttggagcataatccattcttttgacgaattcagtattcggcatatttctagaggtgagaatcatagagctaacaatttggcacaagatgcatcaggttatcggataaagcgagggagatttcacaacaccgaaaatctgataaccggtgtagggccaattccccaggtcatggaccgtccgcgtcagggcaccggaccgtccggggatactaaaaatgttctcttaattgaatcggctgataatgaagccgatgcaagtgattggaggacacctatacttaattatttacgaaaccccaatgtcaggacagataagaacattcggcgtacagctttcaagtatgtctt

SEQ ID NO: 181505 - DNA, 688 bp, Zea Mays
cccgagattagtaagaagagggatgcaataagtttggtttgcagtttagctgtttttttctaattagttcaaggctaagtttttttcctttaatattacttagcaggtagttaggaaagcatgggcataagatttgagaaggttggggtgagaaaggttatggtaaggagagattccatcccggatggtggatcctagcttttgaagatcttttctggcttctgtccctccttgtcttgatgaggtcgatcgccttcgatctctggtcttgacgtcatcattcgagctaaggacatgtagctaagataattgtgtgtaggaggaactacattaagtaggtcaagatctggtgggatggatggtcattatgaacatgttggttaggttgtttgtttatggccaggttggtctaaggcacaaatttaggttaaaaatggttgtaggagtagggtctaatctacttcaccaatattaactaacatgttttaagtaactcattttagattagatcgtattggattacatgggatctaaattagatggaatcttgactagattggtatgactagattaaactagataagatctaattaatatatcttggactagatcatggttgttactctagagtgggataaatatgctaattagggcaagatgactccataaggataaggtagaatctttt

SEQ ID NO: 181506 - DNA, 948 bp, Zea Mays
gtgggaagggccatttatcgtcaagacgaagtcatctcccagcgcgtacagattaacaacacaatctggcgaagacctggaacattcctggaatatagacaatcttcgcaaattttttgtttgaatcctcagggccatcacgcccttgtaattcacttaacattattattccggcccgcactcttttcctcctagggggtgaggtttttaatgaggcggtgccatgtaatatacaagcaaaaatcccccgcaaaaaactaagccaatgtcgaaaaagaccgcatcgacggtcttcggcattcgaccacaccgaagtcaccgcgaggggcagcgctgactaccctcgcgtgcgacactccgcgcaaaagtcgcctaagggtgctttcttggactctccatgcaaaagtcgcctacgggtgcagccggaatagcacaataagtgcgcaaaatcgaagtcttctccaaaagatcccccgtgcaaaagtcgcctacgggtgcagccgggctagcataacaagcgcgcaaaatcgaaatattttccaaaaggttcggatcaacgaaggctcgcagcttcatataagttacggttacatacatacagcgagggcatcacactttacattggctcaaccttcgtgatgatacccatctccctgtaattgaatagcattatcctcaactcctcaccctcaaaaagataccgcaactccccctcacctacactcgccccaaccggcgaggacaacaattcccgcttgctagccccgtccacatgaagacgaccaccctccacctcactcactctccgcttcgccaccgccctttgccgcctacgcctagcactcggaccaggaagaacttcagcatccatcacacgcggagaagcctccgtcgcagccacatccaaggccgcaaaataattcaagtcctcatccgaagactcttccg

SEQ ID NO: 181507 - DNA, 427 bp, Zea Mays
cttcccttattttcatgcttcgtaaagaagagtttttatgcttcgtgaaaaatcctcccatcgtcgcagagacattaatgcttcgtcaataatagactttcttcctcgatatcagagtacttcataaaaaatgcttcaagcgtcgccataacactgatgcttcgtcaacaatacactttttcctccacttcagagctgataaatatgtatctcttcaaaatttattttgtgccttagcacaatttcactttttcgaagcattctccgaaggttaacattgtacccccttcttgtgccattggtgcaacatgatgtatgatgttatgttatgcaaatgatgtgatgatgttatgctatgcaagatgatatttgtgccgaagatacacacacatccccacaatggaatacacaatctctttgtcgttta

SEQ ID NO: 181508 - DNA, 358 bp, Zea Mays
acgatacggctgatcagcgaagtcttcttgttttggtgcttaggggtggtttgggtggaggatgtttggctgatgcgggtgcggaggtgggagtgggggtggtacgatctgtacctcctggtggtgttggtatgcgtggttaggtggatgctgagcggggccgtggttatatggttgtgggagatgttgatatgtgtgcgcgacaactcttgggttgtcggctggttgcgcccgagacatcctgtccctggtggccttcgtttctgggcaatccctagttgggtgcgcgcagtcttcgctgtgaaccaggcagtaaaatctgcgcggctgctgcgcccgtcctcgtccccgaccacga

SEQ ID NO: 181509 - DNA, 593 bp, Zea Mays
gtatattacatggctccgcctcgttaaaaacctcaccccccccggaggaaaagagtgtgggccggcataataccgtttggtggattacaagggctcctgggccctgagggtttaaacaaaaaatttgcagagattgtcaatattccaggaatgctctaggtcttcgcaggatggcgttgttagcctgcatgcgctgggggacgccttcaacttgacgatgaatggaccctcccactttggctccagcttgccccgtgactctgtccgggtggttcggacgagtacgaggtctccttcgttgaactctcttgggacgactgcgtggtcgcgctaggccttcgtttgagcttggtatttgttgagggcctgcagggcgaatacgcggtctccatcgatgaggtctttggacgttggttcgtctacgtcggggacggctgatgcacttattcggggtgacccatgctttatttcctgcggggtcatggcctccgatccatatagtagacgaaaaggagtgaatccagttgcccggcattcagtcgtgtttagtgcccagactacttcaggtagctggtcggcccatttacccttct

SEQ ID NO: 181510 - DNA, 460 bp, Zea Mays
atttattatagttcaccttgagccccatcgatgttgcaaaagagttaagaacgactctgagaaaaaaataattgtctagggcaagcttccattatcaataatgtgtcatcagcatattgaacgatcggaaaatcttgaccacagttcgcggcgaggggcaacttgagcaggttttgttgacgcgctttattgatgatgctctgaagcagatccgccgcaaggacaaaaaggagaggcgagagggggtctccctgtctaaccccgcgcttgcaatggaaagttttccctgggacgccattaaggaggaccgaggacgtaccagactgaagaatatccctaatccagctcatccacctgggcccaaaacctctatgcgacagcacctgaagaatcagctcatgctcaagtgtatcaaaggccttttcaaaatccaatttgagcacaatgatctctttttttg

SEQ ID NO: 181511 - DNA, 656 bp, Zea Mays
agctgctgcactcgcaggaacaccaggaatggaattcaggccgattgaattggcatcaacagtcccctcactcgcatcagctgtgcacactacaacaaaaggtgcagctgcctttttcccagagtcatggcatatggtgttcaggttaaatgcatcggcatctacatgcccctctctaccaacagtcctgctcactacatcaaaaggtacatcattattttttctagactctgcagccctaggagcagcaactgggtaaatctgtggcatatctgagcaatgaagagaatgcgaattaatattagaattactaccttcattaagttgaaccatagaagccaagtaagaagaaggcccaccggtcctagaaaattcacctctcttttgtgcagtttgcttggcgttcagaataattgtgccttcagcctctgtccacttattatcataaacgaccccatgcgcaacagcagttggtgctgcaacattctccctaaaaactgaagacctattaacagcaactaagcatttttctagcgcatctgagcaatcaagagaagatgtattaatatgaggaataaaactttcagtactttgagccaaagaaccaaagtcagaaggcacaccggtttgacgaatatcacaattctgctgagtag

SEQ ID NO: 181512 - DNA, 765 bp, Zea Mays
aattcatccaacgggagtgacgacacatttcatcgaggtagtcaattcatctggtgggagtcagagttgggatggcgtacgcttatcagggagttctaactcgttcgaggtggttgactctatgtttgcctgccctatctcgcatccccttaaaacatcgttccactcctcttcagctgcacacttcaatttgtctcattcccttcaccttccttctctcgaccatccaaaaccctgcttttctgaaaaagaactttttacctggctagcacaaaatcccttagggccgttgatggcattctagtaccatttcgatgtcatcgacgctcacatcgcatccctggcattgcatggcctaatccatgagagaacgaaggagatagagtggatggtgcctggtgatgaagatgtcccaaggcctctgaatggttacgttgtctcctttctccccttccacgagcgtggcatcacctcgcctccacattgcttcctccaccgtctccttcagtattacaacatcgagcttcaacactccactcccaatgggatccagcatacatggccctttgtgagggatttttttgggattaaactccattttaagttatggcaacatctcttcatagtgtccctctagagaaagaaggagaactctggtgctttcttagcgataccgattggttgcgccaatattcatcttcaagtgtcttgagcctcagagtacatcagtgccttgatagcaaaatctagcaagggctggcacgc

SEQ ID NO: 181513 - DNA, 397 bp, Zea Mays
ctcatcgataggagattgtctaccctgttcaaaaaagataggagaccgtcattaatccagtcaccagagaactaagccatcttttgcaaacgacgtcaacactatcgttctagagctcatatgtcctcactctcctcccacctcgtctccaagaagagatcttcatcgtcgttgccgacggcgtgctctacgacccttcctcccttgtcgtttcaagggtctaccccgccatctccaccgttcttgcagaggtggatcccactgtattacaagttgcccctcgggcctcgccatctccacctccattgatatgcttactcctatctcctcccccacaacagagctcgcccccctccatttacttgtcgtttcatggccgaccacctccctgttgcgc

SEQ ID NO: 181514 - DNA, 346 bp, Zea Mays
acttcggcgactgtcatgcttggaccagggtgtaggcccttctgctccggttcctgatgatgtaccggcagaggcccttcctaaggttgatgccaagggttgtgatcgtgcacgagctgctgtttgcctatttgacgaggatgaagaggaagaagaagaagaaatcccgctgatccgcaagaacaaccggcactatagaggtagcgagggggtagtgatattccttctccagctctatcggctcttgtcagtcttcaggggctttcaatatcagactttgatcaagtactggaggaagtcgtccccgaagacatgctatcagagccacctgccgatgatatcccgg

SEQ ID NO: 181515 - DNA, 679 bp, Zea Mays
gtacataattggtgttggacggttgaccgcctagcaaaacggggtctgccccactcagaggtttgccccttctgtgaccaagccaaggagtcgattaattaccttctggttggctgtgttcttccttgccaagtctggacctcaatttttcagcacctggttataacacaattagcacctgatccttcagtgggtcgtttctggatgttggagaaaattaatcactgcagtgccaaaagaaatgtgtaagggcctcagctccttgatgatcttggtggcgtgggaggtctggaaacaccgaaatgatagtgtgtttgagaatttgagtccaagtactcaggctgtgcttaggtcagtaagcatggaggtggcctctagtgttcagcaggggcatcgaagctcgaagagctcctgctcaggttgctggcccttggattttaagccctgagatcactggttgttttttcttgtagcctgtggcacgaccgtgatctattttctggggtgtttgtgtgtgtgtagtgttcctgtagtccgggtttgggtccttctggactcgtgtactcttttttctaccttaattaaataaccacagctctctgtagttcagaaaaaatacgcgaagtgtcaacagcactggctttctagaactgatttcacgctccccaccttatgccca

SEQ ID NO: 181516 - DNA, 375 bp, Zea Mays
cggaaggagggtgatctgaccacagacgatccggattagaacatgaatacctctttgcgcgatcaaatctgggccatagatacgtgatcgtgcgaatgaggatggatcgcggtcgtttttaatctggaccgtaggttgtcaatccaacgaacccctatgcgtaccggtttagaggatatcagatctaatctgtgtcgtacgtagttgatcgggtggccgggatttaaccataccccttcggccagcgtgtcttgcaaaagagaccctaggttttcatacatttaacccgtcgtccacacctgtggtaaagtaattgcacctggaccgagaaatttgtgaactaaaccctgtgtttgctggtatttatgcccgcag

SEQ ID NO: 181517 - DNA, 1899 bp, Zea Mays
ctaccatgccaaatctgcggcctgtcgaaccacacggcggtcaagtgttggcatcgcatggacgagtcctaccaggaggaacaacccttcgccgcaactgctaccactacttcctacaaggtcgatccctactggtactccgacacgggggctaccgatcacatcactagtgatctggaccgcctagcccttcgtgaacaataccatggtgctgaaaatgttcaagttgataacggggcaggtttgcaaattatgcatattggttcttgttcaattaatactgctactagacctctatccttaaacaatgtcctccatgttcttgaaattgctaaacatctccttttagttcataaattagcccatgataataatgtattttttgagtttcatccatattatttttttatcaaggacataaccatgaggcaagttcttctggaaggcaaaagtgaagccgacctctatcccatcaagctctccgacattgaaaccttcaaacaagcccttcttcatgtcaaggtgtccccagatcagtggcatgctcggttcggccatccctcgaaccaagttgttaggtctattttaagactgaataatcttccgtgctctaaggagtcgagtcccaccatatgtaatgcttgtcaattaggcaagagtcaccaacttccatacaacaatgctattcatcgttctacacgtcctctagaacttgttttctctgatgtttggggtcctgcccccacatccgttggtgggtattcttattatatcagctttatcgatgactacagcaaattcacttggctttacttgctgcgcgatagaactgaggtccagcgtatcttcttgcagtttcaagctcatgtagaacgccttcttgatgctaaaatcaaatgtgttcaatccgattggggtggagagtaccaaaaacttcacaatcaattttttcgttcgcttggtatttctcaccatgtgtcttgtcctcacacccaccaacaaaatggctcggccgagcgcaaacatcgtcacattgttgaaaccgggctctccctcttagctcatgcgtccatgcctataaaattttgggatgaagcttttgtcactgccgcctatcttatcaaccggttgctaacacgtgttattgataatctatgtccgctagagcgtttgttcaaagctccacccaattataacatgcttcgaattttcggttgtgcgtgttggccccatttaagaccttataacaaacacaaactctcctttcgatctaaagggtgtgtgttccttgggtatagttccagccacaaaggttacaagcgccttgacatggattccggtcgtgtgtacatctctcgtgatgtagtttttgatgagagcaaatttccctttgccactgatcctctatctcgtagcgatcacccacaaaccaaccaaactagtccaccagatcgtagcagtgttattttgaacactaacaatatgcatttgtttcctgctaataccatggctgcagctctctccaatgcagatgatcatgtgcgtcttacacctgaatcgacttcaggattcacaccaacattccctgtcgatgcaagtccttcgacagacactatagcccctgcaccccgtgcggacccacccttgggatccccatcggcttctccgctctcagcgcagtgcacgcccgggtctcctcctcacccgacaagggacctagatgtgctgccggctgccgaccacactccggagccatctactgctgcggtccgatcacctgcccatccagtagaacctgctcaaccgactgtcgcgacacctgatgctcctgcccatcggtacgacactcgcctcagcaacaatattaagcagcccaaagttcgcatagatggcaaagtg

SEQ ID NO: 181518 - DNA, 574 bp, Zea Mays
gaaaatcttctgcctacataattattcagaggagaagaaacttgcaatggcatctcttgagtttgaaggatatgctctgatttggtgggagcaacttcttcgtgatcgtgaagaagatggagaggaccctattattacttggcaagagatgaagcgagaaatgagaattcgttttgtgtcgaagcattatcgacgtgacctttttgataaattgcagaatttgaggcatggaagtttctgtgttgaggagtattataagaagatggagaaggtcatgattagagccaatgtgtatgaagacgaagagcaaaccattgcacgtttcatggctgggttacaccgcaacattcagcgtattgttgagtttcagccgtaccaaagtcttattgatttggtacatcaagccaccaaagttgaacgccagttgcaacaaaatgctaagagcaccaagcccttgtcatatggtgcacgaaccatgactggtggaagcaaatcaatctcaaggtttactgttgcatcctcagcgacaaaaggttcaactggaggcttgcgatccaatattcaaggcaattct

SEQ ID NO: 181519 - DNA, 920 bp, Zea Mays
tttgggtctcgccagctcgcccgtcttcctcgcgtggtcaacgttcccgtcgggctcgccacgcgacccgcgccaattcatccccactgtcgtgcgtggccatgacctaggaaactcctgctagcgccatctcccaacgacttcgccgtagatcccgcctgacctccggaccggccaactcggccattaaatctcacccataaagccgtgcgcttctcttctattctgctgttaaccaacgagaggaaccacgagcgagccgccgtagagttgaaggatttccgccgcggttgaacgccgactgaccactagcccccaccaaggaaccaaatcctctgcgcgggagcatcgccgagccatgctgggtacgattaggtgctcgactcggctgattggcgttctgcgtgggggaatttctcgccggattcgaagctccgtcgcgactccattcccttccacggacaggcaacatcgcagcgccgccgcaagtgttgactgtcctgctaggtaagcctagatcgccgtcaccatatacgctaatacacgcttgtgttcgagcttgggttggctggagggcttggcgccggtgatggcctcggccgcggggagtcacgcactccgccgtcttcgtctgtcaggattgaatgcgaaacctggtcgttgatctcggtctgaacgaccgagattgggccacatgcgtagcgattgagggtgcatatctgggccgccaattttggatccaagggcatgtgccgtgtaccggttcactggagtagttcatctaatctgggccttatatcctaaaacggatggcccagaaccgagcacgttgtagccgcgtggtgtttttgcattatgagtcctcggggttttccgtaattaacccgcagtcctgtgtagttcatatttcattgcaaacg

SEQ ID NO: 181520 - DNA, 1085 bp, Zea Mays
attcacataccacgtgattgatttgcatgctctattggagcggtctcgcggtggcctggatggctagatgtcagatttctatttccccgcgcatgcaagcgagcaggtaaaaatgtgactaggttgcagcaacgcgtacaaggttgtagcaacgcgtacaggctagacgactcgtgctcccgtaggcaaccaatcactggctcacacacggtcaacgtatgtggctagcatgaatatggcgagcaaggtaaccaatcacgtggatagcggagttactcgagcttggctagaagaatgcatccaagggtggctcgacatagagagaattttcatctataacttccaagggacgtgcaaatgccttgggaacccctaggacttgaaaagttgcaagcggcggtcggtcgttcatttatggtactagtacactagctcagatgcagctggcccaaaaccatcactgaactggtggtgattgcttatgatcatgcctccgtggaagaggcagtcgatggcatctttagcgtctgagcaagaaaccaccttgatcgcatggacgagtcacgcgaccacaacaacacgggggagaaactacgccaacatcgtgacacagacacccccaactatgtgatagaagaatgatcgctaccgtcgaccaaccaacctaaggtccatgacccatgcacccaccacatggtccctgcgagcagcacaaacagtgtgacaaaaaaacatggccatcgtgaagcttggccgatttgaaaaactcatgaataatgcacctataccacaccatttccctgagatcgacagtttcctagcgatcttcagtagccctgtgtgtagggcaacccctcctctttatccaacgatctacctccgcttgaccagtagcttgcattgtggttgtctcagtccacctgatccagtaaaaaagagaaaggagaaagagtctctaggctaggttcggtctaggacttaccacaatagtaaactacgaagggacaactccaagtcaagccaagaaagaccaatagatgaaaatcgtcaaccaacacaccaccacccacccctgaccaactaag

SEQ ID NO: 181521 - DNA, 1192 bp, Zea Mays
gggagcaacaagtagttggttccataatcgtaggtcatgcatgcatcatatttaaactacactaagtaatcttcccctcttatagagacatggcacgcacaaagactaaccagcggaaggcgaccaggctttagggtgtaccaatagtgggattaatgatcccataggggatctagaggctagagttgaacgtctaacgatggaattgtgccatggacgcagagagcgtgcgcgtgatagtcgctgcatcgttgagtttttagtagaggttgaacgtttgcagtgggagattgtggagcgggatagggctattggctgggctataaattcatgatctatagcctaggattgtgaggcgactgcccgagcccgggtggaagagctaagcgtagccctggaaaatctacaagggtataataatgctctgcacgaggaagtgcacgtgttgtatgaccagctacatccgaacgtttcaccggaagttgcgacgatgggagctagtgcatcaggagcagctggcggaggaccttatggggagttggatctctttggagcccctccttccatgaacatcgtgcatgatcgttctcccgaagctagcagtggagcgggagcagccaaagatgtggatgactagattactatagaagtcctcgacatgaggggaccagtagtgggattaatgatcccataggggatctagaggctagagttgaacgtctaacgatggaattgtgccatggacgcagagagcgtgcgcatgatagtcgctgcatcattgagtttttagtagaggttgaacgtttgcagcgggagattgtggagcgggataggggtattggctgggctataaattcatgatctatagcctaggattgtgaggcggctgcccgagcccgggtggaagagctaagcgtagccctggaaaatctacaagggtataataatgctctgcacgaggaagtgcatgtgctgtatgaccagctacatccgaacgtttcaccggaagttgcgacgatgggagctggtgcatcaggagcagcttgcggaggaccttatggggagttggatctctttggagcccctccttccatgaacaccgtgcatgatcgttctcccgaagctagcagtggagcgggagcagccaaagacgtggatgactagattactatagaagtaggttgtttcctta

SEQ ID NO: 181522 - DNA, 472 bp, Zea Mays
ctcacggtctatatatgatgtaacagccttaatgacttataagtcaagacattcactccatataaacacatggtatgactgctggttttaaagactcacaacatcttccactgaacttctgcccttttattttctcttagacacacgcattaaacgcacagttcatggacgaatagaaccataaagatgtctctggctattgcacaataatctgatagagaagaaaacatgcctcaacaattatcaaacagaggccatgcagggattcatgatgcagcatgcatgaaccatgcatgagttgagcggcatccagtatcgtcttgtgtcatgcacgaggggtggttaattccgatccagctacaaaaaacagatgagctaatgaaccaaatgcctcaaacaacagccattcactacgtatctatcgtccatactttgcatcgaaaggccaccaaccatccctatctcgttccca

SEQ ID NO: 181523 - DNA, 484 bp, Zea Mays
tttgcacatctttataaccttattcctcatgacacgagttagtgtatcaagaatcttgatgggatactcaacataagtcagatcatcttgaatactaaggacctccattggtagctgctcttcgggtaccctgagacactacttcagttgtgacacatgaaagacatcatgaacatccgcaagatgatcaggtaactccaattggtatgcaacttctctcactcgctttaagatcaagaaagatccaatgaagcaaggggacaacttccctttgactttaaatcttctcataccccgaagtggtgacaccttcaaatagacataatctccctccttaaactcgaacagtcttctccgggtatcagcatagcttttctgccttgattgtgtagttcccaatatctcccttatctgatggacttgttcctctgcctcttgtataatctcaggtccaaagaactgtcttcctccagtctgatcccaa

SEQ ID NO: 181524 - DNA, 397 bp, Zea Mays
cgaaacaatttcttttgtttcggcagctgtagaggtcccttcaccaaattcaggtatcacggccagttcaatatagcgtggtcggtgagtcagaaccttcatcttcttgcccttcggctcggctgtgatgaccggagcggcaatcttcctcttttttccttgccctcgcagtgggtagcgataatcagggtatacgaaaccaatagcatcaaataccctgttcaatcttttcttctttcgacccccaaaagctacggacaatgcattatcctcggccttggagtatgccccaagtagctcgtcgctagtagcttcaatacacttcagccagtcatcgttcggctcatcaaacttctccccaaatctgaaggtatattttaattggactaaaccacct

SEQ ID NO: 181525 - DNA, 394 bp, Zea Mays
ctagacatcacaacattcaaaccgacgaagtcttcactagcagccttgccatcatcaccttcactaacagcatccttccctttcacattagcgcttgaatcttcttcatcctccgcatccttaggatacgacccatactctaattcattcaactttaagaccctattaagacgagtgttactatcacggatttccaagctcttcgatagctcagtcttcgacgaatactttccaacaatcttgacagcctcgacctcaacttcgctcacaaaagcgaccacttctcacccgctaaggtctataccgaaggcaagactcacaaccataaattccttctgaaaaacagacttttcagcggcatattccgccttatgacctcaccagctaaccagcc

SEQ ID NO: 181526 - DNA, 572 bp, Zea Mays
tgtccactgttttgtcaatctctggtataaccgcaacagccattatttcagcaggggacgagtcagaagattctccagccaacatatcgagtatagcatttatttctgcatcatctgcacttgctggcatatcaaaatgaacttgcctctcatcattgggaagatcacaaggagaagcaaccaagacctcaatatcttcaggagagggtcgcactctaagacccagaccactatcaccagtaggaggattggacacaaaattaaaaaaggacttaggaggtggcagattccaagcagagtaggcaacaggagcaccaacatttgatactttgcctctcaagatcatgtctagtcggctcaccagatcctcagcaggaattctcctattagtaacctgagtcgagtcggtaacaccactgtacaagtaagctgggtatgctctatccttcaagggctgaatattcttaaaaacaaagtcggcaaccacagcctcgatggtcagacctctctccttcagcagacagatttcagcaagcagaaccctagtttctgttacttccaaggcagtagga

SEQ ID NO: 181527 - DNA, 290 bp, Zea Mays
cgtggatctgtgatccaatggctaacgcggttaaagctggtgagggtgccctctggccgtagatctgtgatcgtacggtggccaacgtgtaccggttcgatgtggcccggatataatctgagccctcaaatgttgatccaacggctgtgattgaagcgtaacccttcgccgtttacgttttctaaaagagaccctatagttttaagtaatcaacccgcagtccactatgactatagcctgagtctattatttcttgcgcagaagcctctacactttcctgtttttgcacg

SEQ ID NO: 181528 - DNA, 317 bp, Zea Mays
ggggactcgaagacatttcttccattgggacacgtggaacacgtcgtgcactgttgaaggtccttttggtaactgtaccttataggctataggtccaccaaaatctctgtttcaaaccttggtacctattgctacctttagggtgaatggagtcccgtactgcaacccaatcgcaattccacatccctttctggaggcaactagtcaaatcttcgaggaacacattcgagaactccctcacatcaggtatatcctttacttctttcacttaaactcctgatgtagacgaatcttattatttcctagaatagcctgac

SEQ ID NO: 181529 - DNA, 489 bp, Zea Mays
agccacattccgcctcgccaggccgctccagtaaccatgtgtctacctctggtgagagtgtcggtgatgatcatgcaaactttgtttttgaacgtgcttcggtggggggaggaggtagtggcttcgagtgcgtggaggacggcgggtccagcgtggaccagacgacggcctcgtggagcgagaggcggagggcgtcgtggggagtcgagcgagtgaggaggaagtcacactagggttcaccgctagcgagtgagcaaggaaggcaacgatggtaggagcagtaagaagacgagcatgggatggaaggattgcagggggacgagaggtgggcatcgcaagcgaaagcggggtggacgcggcggcaacacgacttctatcgcggcggggggcagggatggggcgagcgggggcatggtagcgcgaaggcgtctacaataggctcttaatagagtagtatagattgtttggatggatcccatggttgattgg

SEQ ID NO: 181530 - DNA, 362 bp, Zea Mays
tggaagtatgggagggagaacccactcggacaccctcgggggctgggtctcagctcgcgttacccatccgagccggatcatctccggcaacaccctcgggggctgggtaagcgctagcgccatccatgagggccgagttctctgcaacagccacctctaaggctgaaggaccctcagtcacttccgtgggggcagagcaatccagaccagcctcctgaccctcaagaccgcgctctaaggttgatgaggcacgggacgctgcccgggatgaccccaacccgacatcgggcacatcagcacaaacaaccatcacgcaaccatctgccggctctggcaacagatcttctggaaccatgtcttca

SEQ ID NO: 181531 - DNA, 577 bp, Zea Mays
gggagattttctaagactcaagcctcccacattcgctggatccagcaatccactcgatgctgatgactggctgcgcacaataaaaaggtagttagaagccatcggatgccccgagagccaacgtgttcatctggctgctcatcaactttccgggatggccctatcctggtgggataccttcagcgctgccgtcagagatgctacctgggcagaatttgaagccgctttccgagaacatcatgtgccccaagggatcgttcagctcaaggaagatgaattttgggaactaactcaaggtggaagatctgtcagtgagtatgtgcacaaattcacagaactggctcgctacgcgcctgacgatgtcaacacagaagccaagaagatggctcatttcttgaaagggctaagaccagaactcaaggctatccttgccagccaagatttcctcagcttctcgcacctctcaaacaaggccatacaactggaaagggcaagggaagaggaaaagggtcacctcaagaggaaattccaagtcctccgagctcagcagcaggacaggcaccaaagaattcgatcc

SEQ ID NO: 181532 - DNA, 477 bp, Zea Mays
attgacacaatagcaccaatatttctcttgtaaggaaagattttcagctcacgagccaaacgagacgtaaaatagtcatcgtcggtggcctggggtatagggtccttcctatgccatcgaccccggtaaccttcagcatgcgcaaagatgtttctcggagctcaggtgaagtcataacctcctcgggcccagcgcacgtctccatcaactcctcaacaaaaagcctagaggccttcgaccccatcttttcccctccgtaccttgcacatctattttcctttgtcaagtagctgcgaccacagcctttcgttttgaggtaccctcttcagaccgggttttcacctgttttcctcagtcatccccggcatcagcagagtccccctccgggtaaggaccatagggcaagctattcagtttaaaaacccggttcaacctgacattggaaccacggatatcccaactcctcaacatcccagt

SEQ ID NO: 181533 - DNA, 746 bp, Zea Mays
cgtcgaccaagtctgggtgcgctggtcaggctatgatgctgctctcgatacttgggaggatgaggctgctctgcgccagcgttttcccgcagcagccgcttggaacaactagcttctcatggaggggggattgtcagcatccccaagcagtcgtgcatcgagaagcagaagtcaacggcagatgctactgatctggtgctgggtcgccgcaacaggaagcccaatactaaattcataggagaagattgggtggcgtaatgggtcgtgggccttttaatagcttgtacttaaacattgtgaacagtgaacggtggaaattatactgagaaatatatcgacaactatcttctcttcttattccataggagaagattggatggcgtaatgggccgtgggtcttttaatagcttgtacttaaacattgtgaacagtgaacggtggaaaattatactgagaaatatatcgataactatcttctctttttattccatcttcttcttcctctagaacccttcttctgctgctttccctcgttctccagatccggtgcttgtgggagcataacacgtcgtcctcgtcgtcgttgttgctgctgtcaggaaccgagccatcgcactgctgtccgtccaccggttgcttgctccctcgaattgattgaagtctgcatttctctggtttgcttgctcgcttgcgttgattgaagtccacaacttctctggttgcttgccaacttgactggttgattg

SEQ ID NO: 181534 - DNA, 401 bp, Zea Mays
aactatcatgcttgcacataggttaatcattaaaaaaaacacatagcatgacttacaaaaagatacatgtttatccacatacactaagagagttaatcatggtggatatatcaaatgtaaagctacccattgaatgattcaagatatattccctataaagcaccagtcatgattaaacaaacatcattatgattcatttaacacaggtcatcataaagcatcactactccaaagataggtagcacaacaagctaacttaagagcaatactaaattgcagttatgtacttaaaattcacgggtaccgtcctttggagagcaagttgcagattctcatcaaggtcctttgttgattcaccaatgatgattaaggacctattcaccttatttcacttgagatga

SEQ ID NO: 181535 - DNA, 832 bp, Zea Mays
gatgagcagaaaaagaaaaagagacgtcttcagcgagtatctagtttggaccgggatgttggtccttcggttcctgctgctgaggaagtgcttgtgcctgaatttactgacgctgaccccaatgggtgtgacccatccatcgctgatcccaatgggggtgctccatctgtcgctgatcccaatgggggtgctccatctgtcgctgatcccaatgggtgtgctgtctgtgttgctgatgaaaacgagggggaggaagaagatgaggtccctttgactcggaagaacagtcggcaatatgttgccagtggggagagtagtggagttccttctcctgctctgtctgccctcattggtctacaggggttgtctctggcaaactttgatcagactcttgaagatatggttccagaggatctgttatcagagccagcggatggtgacgcgatggatgtttgtgctgatgtgttcgacgccgggttggggtcatcccgggcagcatcccgcgcctcatcgaccttggagcgcggtcttgagggtcaggaaactgacttgaatcgtcttgctcccatggaattagctgagggaccttcagccttagaggcggctaccgcagagaacttgggcctcgaggatggtgttgacacttatccagcccccgagggtgttgctggggatgattcggctcgggtgggaagcgtaagccgcggcccagcccccgagggtgctgccggagatgatccggctcaagtgggtagcgcaaactatgacccagcccctgagggtgtccgagcggggtctccctcctgtacttccatggatgttcacgcaggat

SEQ ID NO: 181536 - DNA, 640 bp, Zea Mays
tgagcggccaaaatattctgacgaatttcccaaaccttctcagatgtctactaaacccaatcaggacaaaccagagatctctctcccaaagtctcccagcacaaaggggagatacaccgcctgccatataaggcctcatatggtgccatattgatgctagcctggtagttgttgttataagcaaactcagccaaggtgagatgatcctcctagctatccttccaagacagaacacaagcacgcaacatatcttctaaggtttggatagttcgctccgactaaccatcagtctgagggtgaaaagcaacactaagagagagcttggtacccaatgcactgtgaagactctcccagaatttgggatacaaatttggagtcttgatctaaaacaatggacttagggaccccgtgaagccagattacttctttcatatacaagggaaccaactctgaagctgaatttggggtcttcatgggaataaagtgcgcagacttagttaagcgatccactatcacccatatagcatccctgccccgaggaggacgaggtaggcccaccacaaaatccatggtgatatgctcccacttccactccagaatttccaatggcttcaataaacctgtaggcctcttatgctcg

SEQ ID NO: 181537 - DNA, 448 bp, Zea Mays
cgggtgcaggacatccgggtggtgtgtgactttgctgacatgtttccggcagagcttccaggcattccttcggagcacgatgtagcttttgagattaagctgattccgggtacgcagcctattcataaggccccgtatcgaatggccccaaaggagcaggttgaattgaagcggcaattggatgatctactggctaagggtttcattaggcctagcaggtcttcatgggcttccccagtattgtttgttgagaagaaggataaaagcaagcggctatgtgtggattatcgcgctttgaatcaagtgacaatcaagaataaatatccccttccccgtattgaggtcctctttgaacagttgaggggtgcccaggtgttctccaaaattgatttgaactcgggttatcatcaattgaggattcgtgaggaggatattgagaagaccgctt

SEQ ID NO: 181538 - DNA, 386 bp, Zea Mays
aaggaatggggtagtccaagctatctcgactccaggagcacccattgggtcttcagtgctatggccactgacctctaaggtggccgggccagctagaccaacgagaagatcaaaacttgtcaccacaacatcatcagacctgggcattggcgaccccacgtgaacatccatggaagcagtagagagggagtagatcacagcatcctcgggagctagagagccatggcaatctagaagggttacctcttgcccagccagtaggctagtagagggcacgtcgtctgggcactctacatggacgtcaacgaccttgatcttaggaagttcgagcaaaagatccttaggtatagcttcttctagtgcactattaatagaggacatactca

SEQ ID NO: 181539 - DNA, 386 bp, Zea Mays
ccagcggttgagtcaactacctgatctattctagggagcccgaaggggtccttcggacaatgcttgttgagatcagtatagtcaacgcacatgcgccaatcaactttattcttttttagtacaagaataggatttgctagccactcagggtgcagtacctccctaatgaaccctgctgacactaagcaagctaactcaacgcgaatagcttcccttttatcaagcgtgaaacgatgtagcttctgtcgaatcggccttgcttgtggatacactttcaatttgtgctcggccagttctctcgggactcctgacatatccacaggttgccatgcgaatacgtcctggttattttgtaggaaccagacgagcgcactttcctatttgtc

SEQ ID NO: 181540 - DNA, 483 bp, Zea Mays
gcggcgcgaatcggtgtggtggcgcggttaggggctagcagtgagctcgggtcggcgctgggtagatgggagaggcggagcagggcgcgtaggccgcccatttaacgcccgtggactcggcacgagggcggaaggggtcttccatgtcccaccggccatggcggcggaaagtgcgcgaggtaggtgagtcccgcgcggagttcgggtgatgacaatgcgggcccgcacgacagagtcacaggcggagcgcagaggatggcacgtgggcccggggtgtcggtgggtgtccaacgcgcgcgcgtggaagactcagagttgggccgcgtggagttaaagaagaactgggccgggttgaggatttttggcccatgcgtacagtttctcttttcttttatttatattttctgtttttcctttttatttgaattcaaattcaaattcaaccatgtgttaattcttcctcgaattcagagtataattttg

SEQ ID NO: 181541 - DNA, 441 bp, Zea Mays
gctgagtcgcgtattttttgcatgccctgtaggcactgtgtgtctgtcgcgagccacaattgcgcctgttgcgcacgttgcgtggatttatcgtgtaccccaattatcgagccataattgtgcctgttgcgcttattacgaaggcttgctatactgtcgtagccctgatggccgcacacgcattaacgccacatacgctagagcttatactcgcgtggattgtggtgggttgttcaagcccctaaagtcacattatacgcaacttttgtaaacaattttgtttgcctatatattttatttgattgtgttgtgtggcatcatatatttatataaatcgccaaggagccataacaactatatcaagctctatagtgcttgaataatctgggaaactaaattgaaatacaacagaacttggataagttaattctctgctctctc

SEQ ID NO: 181542 - DNA, 1155 bp, Zea Mays
ccagcattttttaaaaatgacttctgtggggtaatggtgtctacacaacgaagtgagagcatgaacagattagtgaagcaatcacatgtagatgcgaacacccctctgcatgagtttgctaaacaaatgatgaaaatgttgcatagcaagaaaatgaaagaatcaaaggaggcattgatgagcaaggtatatcgtgtttgttatcaataatgtatggcatacatgtttatgtaaatacgttgtttaattatgatattaacgtcttatagggacctaggacaacagatacattgtataggttcaaagtgagagtctctagggcatacaccagagctgttatgaatagatttgaggaatcaatgaaatacgccaccgcatacagaatattgaaggacatagacggttgtgataaagattggattgtacaacaaacaaaaagatctaataaaattgtgtggggataacatcaattcaagataacagcggacatagaagctggagagtatacatgcgagtgcaaacagtgggaacatacaggtttgtacatattgtcttgattaaacgaataaaattgcatattatataatttgttgattgtagtacaaattaatgtttatcattaaaaaaataatggttggtcttcatgatttcaggtctattatgtgttcatcttttaagagccttcatgcatctacaagttgaaaagataccttcaaagtatatattgcaaaggtacattgtctcatcaagaaaagatgtaccgtttgaaagaattgataagagcttcaggggaaaggatggagttactaaatcatacagatagaaaatattgctaacgaaaacaataaaagttgttcgccaggcgtgtatgtcaaaagcagggtacgacaaggcaatggatgtgttggatgagctcgatggcgttctatgccgattagagccagacattggatgtaatgagtcatgtgatgttagtgatgatgaggaaaaccaggtaataaaattcaattatttttaatgttaaactatttggaacatatgagtatgtatggtcacatattatttgtaacaggaagaagaaataaataataataatgctggcgatggaatggaagatgacaattcaattacatgccataaaatagtatgtaaaag

SEQ ID NO: 181543 - DNA, 412 bp, Zea Mays
tctttctccacaccggcctcggccactccctcttcccttccccgagctcaattgagccagcgccgccgcgcccttcctccgctccggtgagtcccgccctcccctctccgttgaactctagtccaattgttgtagctcttgagcttcaccatgtcctcgcgagcacaacgcaccacccccttctcctattgcgcccggcagcctcaccggcgatctcccctatcgcggacgcccgccacctcgctgtggaccggcctctccaagcgccctccggccaaattggccctaccaccatgatcccctatccccacccgtgccttgccaccactccgtcgtcacagaacggggaccccaacggagaaccgccgcggacctcaccggcgaccgggctccgaccggttcacccccccgg

SEQ ID NO: 181544 - DNA, 636 bp, Zea Mays
gcactgctggcatcaattgaagggggaaccgaaatgggagagcatatgtcaaggacactcgtttagaggattacatgcaagatcaataccatcttcggcgtgtccatcagtggaagcatcggagactgacagtggatccgctgggctgtcaggaaaaaggccccgtggccgtgattacagtaaagctgagagaaagaaagctggttcttctttgtcccctgagtacttaagccgattacaagaaattactgagaaacaaatacagaggtccatagaaaagggggaaaaaagaaaagagcactgaagaagacagggagatacagaagaagagattggaattggaagcccaaaagttaagcattagacaaagggaactgaaacttgaagaactcaaatcggcagaacaacgtttgcagatgcttttgtccacaaacgaagaagatgtagatcctgaagtttggattgtcatgaaggaacagaaaaaaaaattgcagcagttcatatttacttttgagcaatcctgaacggttctgttcgatgtgcgcttgtgttgttgagacatgttgagacaattttatcttacttcgtttaagaaattgtattatcgagaacagtatttgtttggtcgaaccagtg

SEQ ID NO: 181545 - DNA, 337 bp, Zea Mays
gtgccagcgcatgaaggccgatcataagaggcttgtaggtttattgaagccgttagaaattccagagtggaagtgggagcatatcactatggaattcgtggttggcttacctcattctcctcgaggcagggatgctatatgggttgtagtggatcacttaactaagtctacgcactttattcccatgaagaacacaaattcagcttcagagttggttcccttgtatatgaaagaagtaatcaggcttcacggtgtgcctaagtccattgtttcagatcaggactccaaatttgtattcaaattctgggagagtcttcacagtgctttgggtaccaag

SEQ ID NO: 181546 - DNA, 579 bp, Zea Mays
ataccattgtattgttgttactcttggctgagctggtattctgaaggagttaatcaagattattgagtatatgatatgagacagaagccctcaaaatgagtaatgaagatgtggcacaaggattgggatccttcattggagcctgatgtacttgtttataacttggtgaggattgcctcttgcccttttatttttttctttttacctaatttcctatttgcagtaatattttccttaaaatatatttgtcttgtcccttgatgttgttggtgttcagtgcacatgttctgtcacagcagtggaaaggcgtattttgggtgttctagcaaatgagaattggtggtttaccatctgcagctacaggagcaacatttgggttggacatggaagtaagcttcattttttgtaaacaaaaaactacaaaccgactaaaagctttatgctgcttgcattgcagtcttgctgggttgtgttgttgctacttgttggagcgatactacatctgctaaggaggatgacagagtgtggtgaagtgctgcctggaatacgcatgtagtgtggtgagtggagacatgctgt

SEQ ID NO: 181547 - DNA, 386 bp, Zea Mays
ctttgaaattccagctagcactaatgacgcggagatagatgctgtgcttagcttgctggctggggaatcatccgactctacccacaccgagccgatggccatcacaactaggcaagaatttggtgaagaggtggaaactcggaaacccgaaggtgcccacccaaagcgtccatgccgagtgaaccgcccgactgcacctatcgaggagaaaagaaagaagaggcggcttcggcgactgtcgtgcttggatcaggatgccggcccttctgtaccagttcctgatgatgtcccggtagaggccattcctgaggttgatgccaagggttgtgatcgtgcacaggctggtggctgcctgtttgatgaggacgaagaggaagaagtcccgc

SEQ ID NO: 181548 - DNA, 509 bp, Zea Mays
ccgccggccatcgcgcgggcgcggcggaccaccacggtcgactccggcgaatctgaaattggccggcgacagagctcaactggggaaattgagcatgggagaagatgtctcacctcggggcggagctcggggtggcctggcgcggcttatggcgggcgggacgactgaaatggcgggcgtgggtctccggtgaggtcaagcggcatgggcagaacgcgagagagagcggggctatgcgaaatgggacggggaagtgagtgcaggagcgggcggtgctaaaaaagaagatgggggacgtgggcgggcgacgtggccgaggattccggggaacgtgcgcgggtgcgcgcgtgctggtccacagtggggcgcggggaaggcagagctaacaagggggtgccacggcacagcgagagagagagagtgggcacgcaggggtaacatcttggtgactggcgaagcaggcccgcgaggcagaggggcacgtgggaaaaggcaactggcgccgaaag

SEQ ID NO: 181549 - DNA, 697 bp, Zea Mays
aataagtagttcgagagcttttgagaacgaagcctttttattgatgatgtacttttccaattacaaaatacaatgttgccccgatagcttttgaaatctagctaggggtaaaacttcctgagatgctctatattccatgaattccctatttctgtgtcatccatttgagtaagtcgatatgatcctggccgagtgacttctgctaccatgaatggcccttcccatagtggtgacaatttgtgtcgtccttcccccgttagaattcggcggaggacaagatctcccactgcgaaggatcgatgtcgtatggctttatcatgatagcgcctcagagtttgttggtacctggctgactgaatcactgtattcaattgttcttcttccagtatatcaacatcctctagtctagtggcttcagcttcagctatgttttcgaagatcagccttggtgccccaaacctgagatcatcaggtagtactgcctccgaaccatagaccatgaagaagggagtatttccatgcaaagctcggctaggttgagttcttaagctccagaccacatatggcaactctctgatccacttccctgcgaacttttcattcttgtcgaagactttcttcctgagtgcttccaatatcattccattagccctttctacctgaccgttggctcttgggtgtgctactgatgcatatt

SEQ ID NO: 181550 - DNA, 652 bp, Zea Mays
aaaaactaaccccctcgatgttggggctagggcgaatacaagaaaatagaacactatgaaacactagaaagaaatatattatatttaataaatgtattacaagatggaggttttacatatggagaatggggcatgcccagggctactaatcatagaggttggatagcccagctcttttgttggattcagggcgctagcttcattgtctaaatctagcaacctattatgcatgagctcttatgtctcatcaatctagcagctttccaccatctccatgtctgcccgaactccttccttggattatcaagggagcttagcctccatgttgtcatatctgggctgcattgagaagtctgagtaccgaccctttaggtccacccgaatatccagttacacatagtgccaactcgtgaccctctctatccaactgagtgtggatcttgtccaaaagctctaataaccttgtaagaatctgggcggagatgaggcaggcacatcctactctctccctagcatggggggctctcaatgcccctaagacatgtgtctcacagggccttacatgtgacattgagggcatcacatgctagggtgttttcttcttcctcggatagctatatatgtaggagctcatcctcaagatgtttagcct

SEQ ID NO: 181551 - DNA, 870 bp, Zea Mays
ggaaatcgcaacggccccgaggaatcgcaccggcagcgcgattggggcgggtcgttggtggctgaaaacgggtataaagcttttgcctccctctgtcgttgctccccttcccattgtgcttaaccaccgtgagatcggagtaccgcgccgccgtggagaacttcgttgccagcaccgtaccaccttcggagtgtagcctggatagtctctgtgacgccgccgacggtgcccgtactcaggggggcgcgattgactgtgaccccatgaccaatcgctcgctgtcgtcgggtagacggggatttccgccgtgcgccgtggtcggatcgcccagaagcttaaatcggcggtatggctaccatttgcatattcgtcgtatctccctctccgtttcgcacaagatcgcgctaggattaggactcctcggagcgttcacggttcgtagccggcgtgccgccgcaacagtgccgcatcacggccgggctcgagctggggaagaagccctctgagccgttcatctcagaccaagggtcaagattagaatgaggggcggtgtagtgtgggctgttgatctcactgtggacggctgcgattagatcctggccttccagcgcgggcgtgggatgttagccgtagatctcggatcctaggatcacagaagcataccggttcggtattaggtgatctaatctaggccatagaatttaaatcgtgcggctacgatacaacgataccccttcgggctggcatatttacacttgaaaccctctggttctaataaaataacccgccgtccacaggggcagtgcgttgagtctggggagttttctcagataagcccctgcgcttcacagattttgacgcccagtccag

SEQ ID NO: 181552 - DNA, 468 bp, Zea Mays
cggacgctgaagcgagcgcgcgtgcgggttgggcaaacgccggcgtgccgaccagggtcgaacacgtgtgtgtgttcattctgcccgagttctggcgcgtgtggtcattcatccgagcctgctcttgccttggtcagtgcataaaacctcttctcctccctataagctaccgatcttgtgtgggggtcataggatttgtcctactggtttcaaagatatggagctctcaagtttggtctgtctctgagcccgagcccaaggcaaatcttcggttttgtcgtgtctagggctcgcgtcccgatgccatcttcagacatgtggtagaggggttagttagacacatttttgttaatgggagctttaggattagagctaaggatcaaggtgaacgtgctcagttttggttcaaaggctgaaaattcagaaatctgaatttcagatgtcccattaaacctccacttgaatggc

SEQ ID NO: 181553 - DNA, 485 bp, Zea Mays
cacaacgttcattgctattgcactgttttgctaccaaaaatttgaccatagccgaagcttgcttactgcatcctcaaccgaagctattcattttgctcaagcttcgtaacaagaaagagcttcggcaaagataaaaaaaattcgactttgtcaaaaacaagaaatttaatcatcaaatggccagggtacgctcgacagctagagttactcgtgacacagacgaagacgaagctgctgaaactgctccgatctccgaagttatgaggcagtcgggattgattatgactgaaggcgctgttgacgaagaatcacccgctgctgaaaccgagcaagcagatattgaagagggtgatgctaatgaaggagagattgattatgatgttattatgccatcgaagcccagccatctggattttgggaaatcaactgtgtctgaagctgatatgactatgatgacgaagctaggctacttcaaggaagccgat

SEQ ID NO: 181554 - DNA, 757 bp, Zea Mays
gaatatttagaatgagagatttaggcaagatcaacattcgatacttgagaacgggttatagcagataaccagctaacggggtagagtcgataggggatcccgagattcggatgataaagccaacatgattcacaagaaaaaggattaccagatccaggcaaaaggagaggtaggcaaacaggatcggccaggatgattaacagaaatgctatgaagttttaggagcaaggatttatggaaagaaacatggccttgatagggtttgcgcaactagacaccaacaataattttttttgacacaacaagtgcacaaggaagttttagtttggctagcggttaagctatgggggggtctacaagttgtgcaggtttaacttcaaaggtaaaacactcaagggggctagaaaataccaacacaagtaggatttgtttttttaaggaggtttcacttgctaaactcaaggttgtttggaggggtctttttatgggcaaaacaggcaacaattttttttggcaaagagggttgaacaattacaatacacctagctagcaagacaagacaaacacatagcacgacctaacaagacttaccaattaggcaagagataaggcatttcttatatttcataacatagcaatacaacacattattcaaaatttcttattattgtaataaaggtgagagaagcaggttggtgcacaagagacaattataatgcgacaatcatgatgcatgctcgttctagtcgtcttctca

SEQ ID NO: 181555 - DNA, 1010 bp, Zea Mays
ggatgccggccggtgggcagtggcggctaggggaagggaggaggagggagaagagaaggtggcttgataccatgttagatagaatagaaaaccctaacccttaattagggaaggcatgtgtatacatattcatagagtatgggctgggcatagtgttttgattcatgacctgagtgtcacctagacattgagccaacccactacgacaggttttggccgccatagcccatagctgttctacaccttacttttatcattgcagcatgtaaattagctaggtgggtaatatttggggagttccatgcagaatgggtataggggaggggaagacttggctaatgatttttgtgtatcatgcctgtcctgtgccctgtaggaagagtttggctaaagaattaatgatattgcgaaaaacagagctgtggattgatgcatgataagagtgcttttggtacctgtcttcgatgttgccatcccatgtgacccagttgtagaaactatctaccatagtgacagattctcgtgtgtagttggcatctctaatgtagttggcatgaaatcctggaaggcaggaaacactttacctttttctgtaacattgtgattatttccttgctcgctgtcttggcccacaataatcatttggttcatcaagtgtgtcaggtgacccaaattagcctgagacttttgatgatgggtcattgaaatgatatgttacttgattgaatattaattcatacacaccaatatgctggtccagtaaatgataaccggagaagtcccacttaaagattccttcgtttgctactgcaacaaggttgtgccctcctaaggcctatgtagggatgataacaagaaatttaaaagcttacttcagatgacactgaatgctctaaaaatatgtaacaatatgagtataggatggaagctaccaatctgatctgcttgctagatctgttttaagttttatatggtgcatacttctgctgttttggtcatgttagttcctt

SEQ ID NO: 181556 - DNA, 428 bp, Zea Mays
tgactgcttcgtaccggcgatgttgtttgtgcacttgtatgacttgagtgcaaagctgagacgtatctgtatttgactctggcaggtgatgtaatgattgtcgcggtgcctgcgcctgtgtgacaccatgcttcatcacagtagattgtccaaaccatttctgcatgaccctgttgcggctccataggccctgtccagtctacgatgaaatcaaccaggagatgtgatttgattattgtcctgggctcaaaggtgatgttgtaccctgagagttccaccacccactttgctattctagcagatgcctctagatttctgagcaactccccaaaaccccttttagaagtgactcatactttgtatgcctcgaagtagtgtcttagcttacgaagccatgatgactgcgtatgctattttctcaagcttag

SEQ ID NO: 181557 - DNA, 808 bp, Zea Mays
ggggatttttgcgtgtatattacatggctccgcctcgttaaaaacctcacccctcgggaggaaaagagtgcgggccggaataaaactgtttggtgaattacaagggcgtgttagccctgaggattcaaacaaaaaatttacggagattatcaatattccaggaatgctctgagtcttcgctggatggcgttgttatcctgtacgtgctgggggacgccttcatcttgacaatgaagggaccctcccactttggctccagcttgccccgtgactctgtccgagttgtccggacgagtacgaggtccccttcgttgaattctcttgggacgactgtgtggtcgcgccatgcttttgtttgagcttggtatttgttgagggcctgcagggcaaagacacggtctccgtcgatgaggtccttggaagttggttcgtctacgtcggggacggctgaagtgcttgtccgtggtgacccatgttttatttcctgtggggtcatggcctccgatccatatagcaggcggaaaggagtgaacccagtcgcccggcactcggtcatgttcagcgcccagactgcttcaggtagcaggtcggcccatttacccttcttgtcgtcgagaagcattttcttgatggccgtgaaaattttgccgttggcgcgctccacgacgccgttggattgtgggtgatatactgaggcgaaggcaagcttggtgccaatggagaagcagatgtctttgaagtcctggctgtcaaattgtttgtcgttgtcaactgtgagctcggacgggactccgaatcggcaaacaat

SEQ ID NO: 181558 - DNA, 556 bp, Zea Mays
ataaaaacactcaatttgaatgatttgaagtacaataaattaaaccaaatattgtccttttagatttggatctaccaaaaaccctatcacacagggagacacaagcgcacggcctgaaccacctacccacgccgccgctggccacctgccatggccccagtcgccttcgcaaaagtccccaatcccgtcggcggcctctgcacgtctagccgcagacctcttcgtcagtgcgccaaaatctcctgaactacctacccacctcaaaccctaaccccaagccatcgcagaagagggtgacgaagtaaaacaagcagctgcctcccgacgtcgatccagaggctttggcccgccgacgcacgacggcacgagcagctgatgaacacggccactcaactttcatagtttcatcacgagtaccgcctgagcagcggagccgcgaacagccggacaccatcacatcaaacctccaccgccgtcaatataagcgacagctgcaggagggccgttgaaaccgccagccgttccttcccaccctcctccccgcccccggtccgcc

SEQ ID NO: 181559 - DNA, 1063 bp, Zea Mays
gctcgacacacgataaaatgtaaggtaaaaaatgtaacgtcttattatgcgtgatctgtccagctataggataggagtatttatcgggcaatccgaggttggtggcctaaatacatccctaccctcggttaccagctacattctaggaatataccgtgcaacagtgtaattacaaccgacaaaactgaaggtcaagcacatcaaaacttctaccctactgccacgagaggcggacccagcggaacgacccacttccttggtggccccgaggtgtttccgcttcacctaggtcttcgtcccccacatgccttcgcatacggcagcaggacatcttgccatccctcgcattgtctgcgagggggggggggggggagggagcgttccacgcagtaggccttcgatctcggggcatcttgttcgcctcattccagcctccgcatagttgacttgatgcggagcatcgcatcgagccccattggaggggtcttcgatcgattgtcatcgacctcgagacaaagaagcctctggcgattggttgtcatcgaccccgaaacatcgaagtctctagagatcggttgtcatcgacccagagccaatgaagtctctggttgcgcccgtccatgcactgagacatggttagttatggttctaggaacacaatcaacgaagggtcgattgaggtctggtttaggctccgtcccaataacactgtagacttcactgtttatagagtataatttgaaatgggagatagagatgagtaagatgcttgagatagtgtttgcactatagactgcattatttacatagtatagttttaaacaggagatgtggatgagtaagctaccagagatgccctaacccctcctacgcactagtgacaactacgcccccatccgcgacatataccaccaaagaccactctggctctagtgtccacctctccttccattagcccattactaccctagatggcatggaggtttctccatttgagggctttggggaggacctcactcgctctaccgccctcctaccacaggtgatatcctttgtccctaag

SEQ ID NO: 181560 - DNA, 493 bp, Zea Mays
ccagaaactgctactactactactgttgttcgcccacctgcagaaatctgttttttggacagcaacatacccggattcaaacagcgatatcttttaaaatataattctgaatcgagcgcataagtacccgttggaaaggtatgacaaatctctacatgattctcccactgttccccattaatttcccacgaaaaattcctagaaatccctagaactactgctgttcgctcacctacaaaatttctagacagcacctctaccgattcgcatagataaacatataatcgattggattgcagcacaattaaacaagatacaaacacaaaaatcaccttgaatcctccccctttcctctcttcttcttccctccaccaaaaaccaccgggagacttgcaccaacgcgacgtagatccgagcgggaaaggaatggcaccttggagagaagggcttgaggaggggcggctagggtttgatgggggagaggtgggtggca

SEQ ID NO: 181561 - DNA, 383 bp, Zea Mays
gactggagttgccgggatgactagccatgatggctgacacctaggaaacactcgcgtgaggacgtggcagaacgggtcgtgttgctggcatggttgaggactgtcaggacacgtgtcgaggacgtgggggatgcgcacgcggtgcgatactcacacctgtttggtggttgagcctcaaaaccacccaacgctatggacgtcagattttcgactgggtttggccttaaaacccggcggtggcagttttggtggatactagaggtggcatgtggcgtgatcatggagggtgcatcaaggcgaagcaacttcatgtgaagagcatgtcggtcagatgaaaactctaggagttggaccatttcgccccccggtggagtggataggct

SEQ ID NO: 181562 - DNA, 1108 bp, Zea Mays
aggtaggacttccttcgctggaaagaagtaatgggggttgcttgcctaggttgcatctcctgccccttttgaagaggaccggggtgaggttgctgctgtggtagcacgaggagaacttactgcctctctggagtgaatgcttgagtgaaccaggcaggtcacgaattgaatgggctctcccatggtagatttttctaggacatgacctagccctatgacctgcttgtaggcattgccagcatcggacaggtgccgagcaaagataggcgtagtggtctgacgcatggcagttgaagcatttgccactaagctttctcctgaaaaaactggtgccattcatctcaatttgctgcttgagaaggtcagcctcatgggaatcaaattttttccgccaccagaattttggcttcaccactgaccaaccttcatcatcgaccgctgaagtgcctgacttccccttcgagacacacgacctttggataggacggtgagacatgtctctcggtactaatccaccgatccccccatgccgatgggacaagtcgcagcacacattcaagtcccccggagcattgaagactcgctgaaatcccggtgacccgtccagtccccatttcatcttcttagatgcggggatcctcttctgacaagtctgcttcacaagatctgcctttaggacatgctctgtacgttcaccctcgctgcaaactttgcctgaatccaaatccgcagacaccaccgaactgacacaacaatagtgggtaggacgaacaccatagggctgcaaatcttgaaccaacccgacagaacccaacttaatctgctcatgcaaagccgaatcgaacgccccaggacttaccgcaagaggggcatcaagttccttcccggcattaggtctcgccagcaccaagccctcatccgaagaggcagagtccctcccattgagatgaagccctccggtcgacaaacccaaaaccggagaccaaggcgcaatatgcaggacatttatgtctggatctagggtttggaggctggtgcgggtggctgggttgggggagagggagaggtccatccctcgtcttctggtcagtacatcccttccctcaat

SEQ ID NO: 181563 - DNA, 621 bp, Zea Mays
aattggggagaaacggcgtcgcggtgtactcgggtgaaattgagggcggggattgaggctatacgacgacaagagactctagttttaccgtgctcaaccaatttggaaagagggggcagagatagtgcgaatttaggcatcaatcaactcacggtgtgtgcgaagttcataccccgccgtggaccaccgtgctatttatagccacggcgacccggcagacgatctccggccccggatagctttgctagtgcatgcctaccacgtcggtagaagacacagtaagggaggtcgcggcatgggtgacaccgcggcaaagttactgggtcacggtggccgtcggtgaggtcttcggctagactcagggaacggtgccacgtttgcgccgtttaactccggcgttatctattccctaccgcccacgaacccggacggcggcggcgcgaattttggcgtagaaaggtcgccggcggtgaggacagccgtactggcgatctcatccattatagttactgtaccatggcaaaacttgattcagtcgcctgacagcccaacttggagagagattttctcttaattccctgtgacaacacaagtcaagcattgcagcaaacttgtagagca

SEQ ID NO: 181564 - DNA, 853 bp, Zea Mays
ggcatgcaagaaagtagagttagtaatagctaataagctccagcaatacctctttcctttaagatgttcctgaagcttcttcactgcatcctcgaggactctctctgaggcattacatatcttgttggcaagattaagaacactaaaatcatctgacacagttacccactttagtagatggaaatgctccttgacctcagggtccttgtagatgagctgagcgagggtggtcttgcctagtcctggcattccaacaatgggaacgaccatgagatcacgactgttaacatggccattgaccaatatgttaacaattttcttcctctcatcgtctctagacctggcaacaatattttcaggatcaacgataatggaatccatctcacgcaactccttccgtgccgttgttgcctcgggctcaagcttgttgaatctaaaggtgtccatttcttttataaggtccttgaaggtgtcaacaactctgcgaagcctatagcccatcctgatatggaaggcaacacgattgtgggtagggaagagttttacactggtcataacgccaagctcggcgatgtgcccattcttcttggctcgacggcggagcgcctcgtactcgaagtcgtcgaagacctcgttcgcctcgtacaccgctgtcttgagctgctcgagccatttctccacgccgcggcgagatgcctgcctctcggcgtcggtgatgactttgaggatgggaggcagccagcgcacgagggtctcgtggtgcttctccataccctccatcacgttgtactggtcgaggagagagctggacgccttctccttcaaccgggacaccagtggggcgaccaccagg

SEQ ID NO: 181565 - DNA, 757 bp, Zea Mays
gtggactacgggtgaattagacaatttcccaaggtctctatattaaaaatgcacgtgctgccataatcgtgcacgtgatctgaccactcgatctcgatcctacggtccgaattagatctagctctaatccgaaccggtacgcaacacatacccttggatccgatttccatggtgaagatatttcacccggagcgttatgccgaggatataatcctagccattcgttcagatctgatggcacacgacaccatccccatcctgtggtcagagcacggcggcggcggtgtccgcaccacggtggcgcacgccatggcgcttcagcgcccgactatgcgtgtggctaggtgaaaaacattcctagaaatatggcgaaccaggagatacgatccttaccgaccatgagggtgacgatgatgttgtccatgggaagcagcggctgcgtggcagtagccttgctccgtcgagaaaatcatggctatccgatccaccaagcacccaccgacttaagttcacactcttcacgcctctcggatcctcttccggaccacacaacagggacgctggagttccaccacctcggttagccaatggcggcgatttcctcccccgcgctccactttctgtggtgatggcggtgagttctttgcgatggctgctctagggtgaacgcgatggatggcaggggtgaggagggtgcggcgccattggctttctgcgcgggattgttcggatcgtaacagttcttgggctttgcggc

SEQ ID NO: 181566 - DNA, 733 bp, Zea Mays
cttttcttctcgtctcccttaatgtaaaaccattcactcgtccaaccagtcggccacttggtgtggtagcctatcacgggggcctttgtatcctttcggtatgcgaagttgtagcatccaaaatttttgtgcaggccgtcagaccttgccttcatctggtaatgaagcttaagtacccgacagaacccttcggtgttagcactctttccttggcttcggagagcccagatgtaaacgctgagcctgacaatggcgttcgaggtcagctgatggaggtagatctcaaacttcttcaaaacctcacctatcatctcgtaaagagggaaccgaaggctcgccctaaagaagctcttgaataccacaacttcatcttccttcggctctggaattatttcctctctagcaaagcgaatcaattcatcatcattttctccaaaatatcctagcttcttcattagaattagatcctcagcattaattatggacctcccaaattcaacatggctaggctttgttgggcatataatgttatcgtcatcttcactttcattatcactctcaacttcagccacaacctattcagcttcggcattagaggcacctttggtaatagctccttcctgcacaaccagcctcgaccgcctcatcatttctgagatgggtgctatctcagtcgttttagtttcatctccctcgcgggatacccatgcagtggatcttactctggccattt

SEQ ID NO: 181567 - DNA, 671 bp, Zea Mays
cctacctagaccagcaggtccacgacaggtcgttcaccgttggtgatttggtactaagaagggttatggccacaaaggacaagtgcaagctctccccaccatgggagggaccgttcatcgtcacccaagcgcgattatttactcatactcgtacccattgacatccctacttacgaccctacctagaccagcaggtccgcgacaggtcattcaacgtcggtgatttggtactaagaagggttatggccaaaaaggacaagtgcaagctctccccaccatgggagggaccgttcatcgtcacccaagtcctacacctaggaacctaccgacttagggacagaggtggcaacctcctatccaacgcctcgaacatcgaaaagctaaggaaattctacccttgaatatgtttttcattcctttatgttcgcacgcatgcaaacaaaactgttgtccaagtcaccatgccgaccaggtcatgtattgcaccttgctccaaatcaggactttggtcctggactgcacctagctccgacactaactgagcatgcgaggaattgcgctgaccgtcacatagaaaggcccgtaccaaaactgcgaacgaactaagataaaaccccaaataatccttatggattactcggatgctacatctagtagatgcgtctgcgcac

SEQ ID NO: 181568 - DNA, 537 bp, Zea Mays
ctttgtcagacatggcgccgtcgggggaaggccctgtgtcactgtgtcggccgcctggggagggagatgatacataagtcgtggagtggtaaatggacggctgggattcggtcgaggatgtagttcggccggctccgatatccgtcgttggatcggcaatggatgggtgaggggtcgcggaccggtgatccatccgtgaacggtcgtgattaaaacgtcgacaccgttttgggtagatcgcttccacaccgttgatcttcacgtctagggtcgagatcgagtccatgttactttgaatcgccaccctcggttctggatctatgggttcatataagtatactacggtgatctaatcggggtcgttcaattctgatctggcggctgagattgaagcataccccttcggcccgtacgttttacaaaagagaccccctgctttaaccaaatcaacccgccgtccgtagggttgttcgcctgagtctaggaaagttatagtttgacccctgtactttacagaatttgatgcgcggtccagag

SEQ ID NO: 181569 - DNA, 805 bp, Zea Mays
ctgaattatcctgcaaacaaatataaggaaaaggtgagttagacataactttacatacattatgtcataacaacaaaaatactatctatgtattatgtaccggatcaatgactgcattcataactccaaccatgtagtcgtagtgctgcatatatctcatgacaaagaatccacaatcattagaccccaatttcattgttgggcagttattcatgagttcaatagggtacttcaaaaaagcagggagggctgatcttggtccagcattttgaatggctagattgagcctactcattattaacctggcccatgaaaccttcctatcacccatatccataggtatacaatggtaatttttccagatagtcccacccatctctggtccatatgggttggaatctaacacatgtatgcgtccaatctgaagattaacaacatacaaagccaatgtccagatcgtagcatgggtaccattatctacatgcacacaaaatggaaataacaaatgttgaatacactatggttgatatggatgattagattaaaatttaaatgcagaaaaatgaagtgagagtgtcatgggtgaaggaacagaaattaactgatttgtagtcatccagttgcttgaatgaaggcagtgtattcaataggtaactctccaaaactgaagggtcaaatggacgaggagacttgctatgttgctcctgctcctcaaagttcaatatagcctaataggatagagaagtattatgtaatttccatatatgctatgcatttaaaaaagaggtataaatgtagaagtcat

SEQ ID NO: 181570 - DNA, 1278 bp, Zea Mays
aacattcagccgctgaaggatagagcgtacccagcttacttgtatcgtggcgttactgattcgacccgggttaccaatagaaggattcctgctgtggacctggtaagccggcttgagatgatccttagaggcaaggtgtcgaatgttggtgctcctgttgcgtattaagcctggaatctgcctcctcccaagacgttcatcagttttgtgtcaaatcctcctgccggggatagtggtttgggccttagagtgcggccctcttccgaggaggttgaggctttcgttgcttcgcttggtggaatccccaatgacgagaggcaggttcactttgagatgcctactagcccgagcgacgcagaaataagtgccatgctggataagttggctaaggattcctctgactcggctcctgctgaaacactagctgtagcactcatcctagagtctggaaaaacattggacattcagagacctgatactattcgcccgaaacgtctccaccaagctagtcatccaacttctcctgctgaagggaagaagaagaaaaagagacggcttcggcgagtgtcatccttgaatcaggatgccgacccttctgctcctgctgccggggaagtgccagtgccagtttttgttgaagctgaacccaatgggtgtgacccgactgatgctgaccccaatgggtgtgacccaattgttgttgatcccaatgggtgtggccttgatgatgctgacccaaatgggtgtgacccgattgttgctgatcccaatgggtgtggccttgatgatgctgaccccaatgggtgtactatccgtattattgatgaggatgaggaagaggaggaggaaatccccttaattcggaagaacagtcggcgctacatagccagcggggagagtagtggtgttccttctccagctttgtctgctctcgttggtctgcaggaattgtctctggcaaattttgatcagactcttgaagacatggtccctgaagatatgttgtccgagcccgcggatggtgaaatgatggaagtttgtgctgatgtgcctgatgccgggttagagttatcccgagcagcgtctcgtgcctcgtcgaccttggagcgcggtcttaagagtcgagaggctgatctggattgctatgttcccatggaagtggttgaaagtccttcagccttagaggtggctgttacagagaactcagtccccaaggatgatgcttgcgtttacccagcccctaagggtgttgccggtgatgatctggctcggatgggc

SEQ ID NO: 181571 - DNA, 628 bp, Zea Mays
aaaataaaataagttcatctctgattcttgcgcagagaagacaacgagcaagaagggtttgacgacgatgggtgcagacttgggctgcggcgagatgttgaggacgcagatcgaggccgagttgcttgtcaccgcagtggagctccggcgtcgatggcacgaacggaaatggagaagcagcagcaggcacgcagtgggatggtgagtgcgggcactggatcggctgtatgcagagcacgagagcaagcaacgggaggaaggaaggggctctaaggcagcttttataggccgagtgagggagagaaattagtgccagattgtttgtgatttgaatgccgttgaagcgtcttgatttcgtgggagaacagtagctttcattgccattcacggtggctgtggaaacgacgactcagtaggcgcgattgtggctaacgcggcggaggctgggcatgggcaggtgcaggcacgaactggccaagcggtaacgcgcgtacgagcgatttagtttccactggtaacggcaagcatcaattccattaatggcagtccgaccatggctgtagtgaagacacgccgcgcggcgtggagcgcgagatggcagctgggcgacggcaacgggtgggcgcgg

SEQ ID NO: 181572 - DNA, 545 bp, Zea Mays
ctgaaaaacacctctgacattgtaagcgaaatatttcttttttcgaagtactcccgatttgagttgactattttgctactagggtatagtgatcaccctaaatcatgtgagcgtgagcatgtcgcaccgacttaaggcgtttctgacttaagccgattgctccattagtagggcatagtgatcaccctaagtcaagtaagcatgagcatgtcgcatcgacttaaggtgtttccgacttaagccgattgctccgttagtagggcatagtgatcaccctaagtcaagtaagcgtgagcatgtcacaccgacttaaggcgtttctgacttaagccgattgctccattagtagggcatagtgatcaccctaagtcaagtaggcgtgagcatgtcgcaccaacttaaggtgttcccgacttaagccgattgctccgttagtagggtatagtgatcaccctaagtcaagtaggcatgagcatgtcgcaccgacttaaggcgttcctgacttaagtcgatttctctgttagtagggtatagtgatcacccta

SEQ ID NO: 181573 - DNA, 731 bp, Zea Mays
caaacaatcagatcattattactgtgggtttaaaacaagtggcatttgaatttatccgaaagtacaaacaaagagctaattcttatcggaagcctatagccgactgaatttagctaactttcaccggctggacgtacgacggaagtaaataactttcaccgactgaatttttccgcatatcacgtataattaatcttattctggtttgacaacaccgtagttatagctatgataattctgtagcatatattcgttacgcattttctccatgaataggcatttcatacaacaagttgcttccatccagaagcaatgcacagaaaatgcatacgggcacaatgctcgacaattttcgcaacaacacagtttataaaatcacaactaccatcattatatctcagaagtcaatcgttaatacctaattttccatacaaccaaaattgcatcaaaacgaagcatgtagacaacaagctaagttatatccagtataattggtgaagttgaaaatagatttctttcctactaactatttaatgttggcattgcaaaattaggtgattctaacttagtacaagtgaaattaaggacccacctgaggcagccgacgatggaggtgatgttggcagtgatgttccgaatcgaatatcctcgacgacacgacacacctaggccatggagtcacggcccttgctgcacgtcaggcatggctacaatttcttgtatatcttata

SEQ ID NO: 181574 - DNA, 539 bp, Zea Mays
gaccgagcaggacaagattgtctctttcaagcacgctgctaaacttaaccagaacttgacccaggtgcgaccgctggatatcgcgcaccccaagccgtctgtgctccacaagatattctctaaccacatccctcaccgccgggaaagtaatctcatggtcaggtaaaggttgaatgctgataatagcccagtcctcatgcaatggcgggaggcgcctagtaactgacctggccataatttcccggtgaaggaccaccgaggcactgaagcccggcgggagaaagggttcaggatcaacatgcctatacgccaccggagcaggaaccgaggatcgccaaccagcgggcgaagacggagcaggttggggttttggtgaggtgacgccgaaagaaagcgtcagggactgaaggggtgccgattcagcgaccgccttctcatccggtggcaccgcagcaacccccgcgctcgccgaccacggcgaggtgccgaggccaccaatggcggtgtagcagcgttcacgcgtgaaaccaagctaaaac

SEQ ID NO: 181575 - DNA, 584 bp, Zea Mays
gggaaacgtctgtgctcaatctgtcccgaaagcaggggatagggaaacatcagtcctctgtcttgaattcgttgccacggagccgcgggaccggatccaaaaatggttatttgcaattttgcacgatgtatcacgatcgcttcagtaccactgacgtgtcaccttgggttttgtcagatgtaggatgcgcttaaaacccactcgtagatctaggatgcccctaaaacccactcgtagattcacacatgcagtcttggtgttaaattattttgggtgcagtgtgcagatcagcagatgttcaagccacttgtctactacaagttgcgtgagcaagctctggtcgctcacagcgtgtttggtttgcatcacaaaaccattccatggcatgtgctgctgtttggtttaagctgcggaatcaatcagtctttcatggagttgttctgcgtagagacccccctattggctattcctaaggaacaaacacattcctccaaaaagttcaggtaacaccatgcctcaccggtacatgcagttttggatggatatccaaactaaatgggatgtttattggctttttatgctta

SEQ ID NO: 181576 - DNA, 830 bp, Zea Mays
ctgaccttcaatagcttctctaggcgttctgaaaccttcaaaaattatgtttctttcttttctaggtttgttccccttggcgctcttcttggaactatattccaaagcaggatataagcactacataacaacatcaactaaccatgtgtcaatgtgaacaatgtattgaaacataaggatctacgttgtatggttacagtacaaaaagtttctaaccagatttgtacgctgacctaggccatggcgcccaaattagccaaatcccacccgagaccgacataattgggtaagattcgactcaaatatagggagggggaagagggcgcccatcttggttgaaaaggaatagcagcagacatgttaacacagtagcattgctctgccatcgaaaatactattttacactataaacaatactactatttacaaagtgaagctgaataagaggtgagatagaaggttggacagtgctgatgatagcctaattaagatgaatactcatactcccagtgtagtgtcatttgggttttgtatttatgtaatgtgtctgtagtaagagtgcatgttcagaaagggttgttcacctaatatctaccaatatagaatgagatattccactcaatagcttatcatattgcctagatcatacaccatacaggagaaatgctaaacaacatttgaagattttagttgtgtgtggtgaaaagcaaagaaaaaagttgatgtgagtactgatgaagactaacaatactacagatgacacaaccaacatgctattacagaaaacaacacacaaatgagatctgtgcgtacctggtataccagacgat

SEQ ID NO: 181577 - DNA, 396 bp, Zea Mays
gtcaccggcggccaccgtgactcagtgaattctcgccgcgctgtcacacatgcttcgatttccctcactgtgcatctcctctacgtggtaggcatgcgcttgccatgctatctgcagccgcagatcattagccggctcgctgtggctataaaaggcaccacggaccatggcgaggtgcttacctcttcaccagtgagctcagtcgaagtccaaattcgcggaattctctccacctttcccaaaattggtagtgcacagtgaaaatctagtcctttacgaccgtgtagcctcaatctccaccccaatttcacacagagccgccgcgacaccagtttttccccttcctctgtcaccggcaagccaaagttcgccacgctccatggccaaaccactgtg

SEQ ID NO: 181578 - DNA, 577 bp, Zea Mays
tggcggtgtagctgttgacctcgccattcttcgaccaccgggcgtgccgagttgattactcttggaataggaagttgccgcgacctcgggccgtggaagaaccattggagtcgtcgagaatccgcaacagtggtgcgtcgctgccataccctctgcacgccgttgtggacagttcatccgcggtcaccaaactgaggtgagaaccatcgccaagcttacatttgcctctacgattgcagtgcacctagaatggtaggaaatagcgctgttatgggtgggcaattgctcgtcgtcgtgcgccgccaccgtggtgccgctctgcatcgtgggtagattccatgtaaattggaaccaccgaagtgatgtctctacgttattcggtagacgctctgctccccgtatcttgagccaggggtagaaatcatggctctgggccgcgattgggcgttccccggtggtgctccacggtggggaggaggtctttgccgccgtcgggcacatcatggggagaagacgcggctagcgccttcgatcccgatcgtacggctcggaatgaatggggaataccccctttggg

SEQ ID NO: 181579 - DNA, 583 bp, Zea Mays
aagtcatcgaaaactgcttttcatcagccggtactgtagccatcccaaattctacgatccattagctactgcacctcactagttgccttgttcatcatcagcccatatatctccaatccggcaatcgtcccaagtagtaactgtatcaggatctctccatatccctctctacagagggagcttccagcacaccaaaccctacctgtgtctgtgtgtgcctgcctctctttatcatcaggagcttccactattccacaccttcctctatctcctgcccggccccctcgccacctccaccgatccagcgccatccgggtacgtccatggcgtccaccaccagcgatagcctcccctcctctccctccatccccaccaccgacggagccgccgaccaagagttctcctcctcccactaccaccaccacagcagcagcagcagcctcttcttcccgccgccgtcgtcctcctcctcctcccagctgcccagcctatacctcgactcctccttccacggcctcctccccactacatcttcccccgcggcggccacgtcgtccccttcccctcctccaccaccggtgcc

SEQ ID NO: 181580 - DNA, 814 bp, Zea Mays
ccattaacccatctgtattttctccgccattaatggctgccgtcgcgattctacttcaccggacgtcccttccccctttctaggctataaataatgtgcccatgacccctgagtccgtgctcgacctccttcttcgctttccccatgccccattcctgctgctagcataatccatgcaccgtcgcttgccaaccatcgttgctgggccaattcgacgccgtcgagcctccctcgctgccagcaacagcttacccagcatctcctcgcctctgttctactcgcctgccgctgctcgctgtcgtcgccgtcattgctgctgcatcgcttgacgtcgccggtgctccccaccgaagagcctcgtcgcattcctacacgttcttctccgcgcctgctgctgccgtcgcgccatcgccatacctaacaccgtcatcatcacgagaaagatccgtccctgcgcctagctcgtccgcaccgctaaaaccgtcgatccgctccatgtatcgtggccacgtgctgaaggtagaagacgagatctattttttgttagctacccttcgatttttatagttatcatcgtttagatccatgcgacgtttatattttctttaactgaataattgtatataaaatgaaataggaatggttttgttagtttcataattatgtgttaaataattttaaatagtatttttaaacagttcacataatttagtaaattaattgatttatgctgctataatcattttatacatagatttctaaatatgaaattaaaaagaattgtagaccatcctttcgtaaatgaaaacattag

SEQ ID NO: 181581 - DNA, 638 bp, Zea Mays
attcctttcatatatgatatattcaagttcttaacatatatgatgccttctatttgttgtaggacaatggtgccacaaactatgatgaagtagatccagatgggctaaatgcagatgagctgagcttctttgacatgtagagttgtctactttggtgctgttggagactgttatccattggaagctgcgacgacatacgtgtttcttatttggacggttagggttgttggttgctggtggtgtccatttggttgctagtggcctgtacattgatgcttgtttgtttctccaaataggacgtgtgaacattgatgcattgttgcttgtttgtttctatgagatgatgttaaatcttaatatcttatgatttatgtgatcatttgtttgcatgtagattatgcatggctataattgttgtgtcaagctaactctctgaagtgttactagtctatgttcctattttgtgttatccattcccgatcgtaaatttttttttcatattacggagccaaatgttctactaccgagtttttccaccgctcccggccgctttcaagcctaagaggctatttagcatacgcagctaaatcatctaaggattatctaaaatgatatataaactcaaaatgagaccgctc

SEQ ID NO: 181582 - DNA, 298 bp, Zea Mays
agatcatcagatttagatgataatacaacaaatacttcaagatcggtccttagattgaagcaagcaaatgttgctgctagcgttccaaagtcttctgcccaatatcaaagagaaattgatttagatgaattgccttatgacccagttgatcggaagagaattacagagtacactaaaaatcctaagaagcaagatgagattaggagaagatatttaactagaggaccttatagaccaccacctaattttgagtatccatatagagacattggaagtgaccgtcgaagatttaattcag

SEQ ID NO: 181583 - DNA, 405 bp, Zea Mays
cgaaaaaatcgaagaactccatacagaagcctacgggagcggcttgatcaactaaagcgtgcagcttcatcacacaaaagtatggttacatacatacagcgagggcatcacacattacattggctcaaccttcgggatgatacccatctccctatagttgaacaacattatcctcaattcctcacccgcaaatagacttcgtagctccccctcacccacactcgccccagccagcgaggacaacaattcccgtttgccagtccctttcacacgaagacaaccaccctccatctcaccacgatgacgcctatcacttcacgacaactcacccactctccgtttcgtcaccgcccttcgccgcctacgtccagcactcgcacctggaagatcctcagcacccatcac

SEQ ID NO: 181584 - DNA, 719 bp, Zea Mays
tgcgggcggccgaagtccggcgaggacgatcttggttctccggtgaagtgctgccgggtccgagagcttgggaagcttcacaagctattagcgaagctaactgagcgactggcgcggcttgtaagcaactggagtgggcaggccacggtggccgaggctcgggtggcaatggcgggcggaagagagcttgctggagctgaggaggggcgtctagccggcgagggtgagcacggggccaggtgaggcacgcccggggaggctttataggcgcgggcgagcacgactgagggcagggctctgacaagtgctcagggcgtgcgcgggcgaacgccagtgcacactctggcgcctagcacggcgttgagcacgaggcagcgcagagagaggtcgagttcaagcgcggattggctccaaatctttgagattatggccatgatcccgttgagagatctcttcctctgacattcctttgttgtttgtgtgtggaggcttgcatgttttgctgactggatcaagagataaagaggggagaaatcgggtttgtctcactgccgcgcacagagagaagatcacgggtttgacgtgtccaaggcacgcgtcccgatgccatcttctgatatgaggtagagggattagttaggcacaattttgtcaatgaggtcattaggaattgagctagggatcaaggtgaacacgctcggtctttggatcaagggctg

SEQ ID NO: 181585 - DNA, 756 bp, Zea Mays
ttttgccactccactaatttaattcccgtaattgttctacgaaaagataaattaaggtttgtatcagacaaacttgtgcaaccaagggcgacttattacgcactacattaaaaaggttagggaatcgctcactaagagattggctggttaaccatttatccttccaaaatctggtagcttgcccatccctcacttggaagtggccccatctaagaaattgatccttaatagccattagacctgaccagaagtgggaatcacccggtcttctggatatttgagtacgggatttatctcctagatatttatttttgagtaattgttgccacatctcatcctcattaagtagtttgtataaccatttgctgagtaagcaaatatttttaacagccaggttagagacacctaaacctcctagcactttgggttgacaaacaacatgccacctagctagcctatacttcattttactgctccccctgccaaaaaaatctggaccgaatggtatctagtttcttcaagacgcccaccggtaactcaaagaaagacatcatgaagataggtagactgcttaatacagaattaagcaagaccaaccgtccacctgaagataaaaatttggccttccatgtactaagcctcttttcaaaccgatcaataacacaccctgccagtcactatttctcaaccttcgatgaatcattggaattccaagatatttgaaagacaatgttccaattccacaactaaatagat

SEQ ID NO: 181586 - DNA, 710 bp, Zea Mays
taaagatctctgccactcccgtaacttttgagatgtacaaagtctgcatccttctgactttctcagcatccaatgactagtgtggacagtgaccatgcatttctgtagcccgcagcgtgtggtgtttaagtgtaactgattcagtgtagcgcgttctctttcgttggatggacactttctggtcagtccaaactgtagcctgccacctactagttcgtcctcacattcctgcatgaatctgaattgttccatgaactactagttgagttcatgggctgccttggattctgtacagacttcacagaatttgctaattgctgaactttgggatctaaatttctacactctcgattttttaaagtaagataagataatttgtcgcatgaaaacttactttcactgacatgttgccattgaactcagagctcactgtcaatttatggatttcattcaattgtctaaaactaaatcgagtttcagggtaaggtgaggaaaaaattgatgcgtaaggaacgtatgaattgaagatctgcaaactcattcaattgtcgcatggctggctgatcagatcaatgccataggaatgtccacgcccacgactccacgaggcaacaagggtgtgtccgatggcaatgacatgtggtgggccaagtcgacgcgcggccagaacatgccgccggcgtaccatggattggattctggcacacgac

SEQ ID NO: 181587 - DNA, 369 bp, Zea Mays
cgtccgagtatgattgtgcgactgggattaaatctccccaggaacgtctctggcggttggatctgttttatgcggcctagattaggtgagcaccaggattgggctaagggcgtggggatcgtccgattgggatcggagggccgtaagcgaatgctgatttgtaagcaggccgatctaatctgggccgcctgtgtgtaaacgaacggccagatttgagaatacctcttcggtcgtggctttttagtaaagagaccccgtagatgttagatatcaatccgcagtctagggctactgtgctctgtgtcttggagttcttgcaccgaggaccctcctgttctcagattttgaggcccagtccagaacattata

SEQ ID NO: 181588 - DNA, 1140 bp, Zea Mays
atccaatatctagtcatcggtgacttgcactaccatcaccattgatgaggaaactcgtagtaggggttataagcaatcgagagatggagggaggctctcatgtctcttgttggggtggaagtggagcttagaagctgagaggtggagtcctagctaagtcttgatttagtgggggctccggcctcctggtcctcgtcggcgctcctcctcctattcatccttgtgggctcgtttccgtctgaaggcctccggtcgtctccaagtcgatatcctctctccgtcctctcgtcctgaggcgaccctctcccttttatagatcgggagaaggatcggccaacggtgactcctctaggaaggagccataaggtaggggtaaaattagtgttttacctcgggtaagtccatgtgtactcgcggggcctagggctgcctggctatcgcgtatttatcgtagtggatgacgcgggggcggcgatggtcctagttgcatcattccggctatgtcgagacctggcttctgtagcctagggctctgtgcagtccgtcgtgtagtgccctgcgggaggtatgcgcattcaggcctagtccgataggccataagtgtgtcgcagtccgtgggcgcgcgagccattaatgcacagtagtccgagggtttgtaggtcatgagtgctatgcggcctgaggggtccttaggtcatgagtggaaagtggactggtggtcacgctgtggctcgatgttaggcgtggttaatgcggccagccatttacggcaggtcagtccgaggccgggcgcgggatccactcgagtggttccctttcgacacgctcgtcctccttgtcaggctccggcacacccagccccaggctcggtgccgcgggtttgaccgggggtgggtccttctagagttggtgtgcctgtctcttctaactaactaacggacccaacgatctggggccctttcctaagcgcgttcactgactggtgggtccagggaccggggaccatttccccaacaatagcccccgagccctaaaggggagagtgtctccctttgggggctgataacgggtcggacatgtgtcgggttggacattgtcttattcctttttgtcgcttgtcgttgtcgaatgtaaccagca

SEQ ID NO: 181589 - DNA, 481 bp, Zea Mays
ggcggagtgcacccgccctaagtcctgagatgaggaggggcttaggcgtttcgcttgattgatggagagaaggggcagtacacaagaacacacgaggatttagagtctgattggtggttagaccgctgcttccgtgcgcctgctgctgcaattactgccggcccgcctatgaccacaccaactgccgtgcctattcccacggctgactgacccgtgaccgtcgtacttaacggcactgtttggccatgcgcggggctgcctcgagtcgctacactggttctgaaaaaattaccttttcagaatccgtgacagtcccgagaagacaaggcattggcgcaggcggcggtgcggcttctttgcacacggtaaccggcgcgccggttaaatgacatgtgggcctaggcccctgagttggaccgccagttgtggcggagctgagggggcgctcagccgtggggcgtttgcacgcttctcgcgcggc

SEQ ID NO: 181590 - DNA, 1069 bp, Zea Mays
acctagtagtgtttggtcatgaaatcactcgacccgtgagtttcgtgaggttgcacatcatcagtttatcaccatcccatgaattttggtagaaacaatgatacattcttcatgcatatagtaatattagcttgtgataaagcatttggtgataaatcaatctattctattttacgaaccaaacaaaaaaaggtgcgagaagaaaatgaatcacctcgtttatcaatacaaacacaccctagataaggcttggcttgttgcatggttttgatttacagatgaaattacatttaagcaaaatattgttttaatgtcaacacatcccaataaaaagctcgatggcaatattattttaaaaaatactgataagaagacatacatgatacgactcttgtgtcaaaggacctagttaccctcccatagtagtctagatctgttgtacatgacagaggatgattttattttagtatgaaaatgtatattggtggcacactataaataggtatatagtaccactactacagggttgagcactcgtgcacctagagtctatcgctttcggatagcagagcattcaaaggtcgcttcatagaacatccttcgtgggtcttgtgtggagtctccaaatgtactatggtttgtaagctcaataatgtactcttttgaccctaacatctcaaagttgcgagtgaaaggcaagaagataaattatgtgtttcatttacaatgattcatcacgtagaagttaaattgtccatcaatatctattggtttcacttcatccccctttcaccttcgagccctttgaaggtagtagggaggatgaaccttgtcttaatagtgttgccctgttatggtttcttgtagggactttgacacgtacccaacatttggcacccaccaccggtgaacccacttaccaccactattatgcctccacaaaggcgtgggattaatgttgttggctctactatatggatctcgaaggccgaggaataacacacaaaagctactcatcggcctgaagtcacgcgccgaagacatgagaaaagaaaaactctaaaacaac

SEQ ID NO: 181591 - DNA, 707 bp, Zea Mays
atgaaatgctagtggtcgcatcaggccagaaaggaaggaagccttcgaccaaggaggccatcaaccatttcgaaaaactattggaggccccatgcccaaaccaccgctacccggtctgataagcctgcaaggactgtgggtgcttaggaaattcctgagcaaataggtgcaatccagaaaggggtctgaaccctagagggatggcgagcaggagagaaggggcctcactttccccgacgaaactagatgcatgctaatcttcggtgagcccgactactacacataaaagaggcactagaagcttgaacgacgtgaggtattccaagttcggcaagcggctccggccctcctcgactggttcgaccacgccattaccttcgatcgcttcgaccatcccgagcacatcccctggtctagacgatacctgcttattgtcaatcccatcatcggatcggtgtgactatcaaaagtgctaatgcattggggcagtgggctcaatattctctaccctaccacgcttgacaccatgggcctagatcgggatcacctccaaccgaccgagggacctttctagggcatcaagtcaaggaggcaagcgatctcgctcaggcaaatcgatatgcatgtaaccttcaggacactagccaatttcaggaccgagacattaaccttcaaagtagttgggttctaagggacctatcacgcca

SEQ ID NO: 181592 - DNA, 630 bp, Zea Mays
atatccctcaacatcataatgacccgaaaaagatggtgtagtaaatttaatcttagcataagggtcgtcaggagcacgattgttattaccttgttggcggtgtggcataccttctgtgttttgatgaagacggcgacgtaggcgcaaatctctggtggccgcttcatcatagttaccttctgcatcaaacaccgcatcatcgggacgacgtggacgaggaggtggtggtggcggtgcttgttgttgcgtctccaacatagcaagtctgtcgacgatctcggacaatcgtcgatccagcctctcgtaagtcttgccaaggtccatgtcaatgaaggcatcatgcactgacttgtggaccgtctcctccatttgctccttcaggagcttgttgtttgcctcaagatcttggcggctaacacattcattgaagtctgtagggatccttgcttcttcttcgtcgcctgccatcgaaacacaaaaacaggaaacaaacggtgaaggttatccctaataatttcactacacgctcctctcaggtggaacacaggaacacgctctattgtatcttaccaagctcttacaagtgtctgacgaaatacaaagcaaaggatggtacaatcggaggctggt

SEQ ID NO: 181593 - DNA, 386 bp, Zea Mays
ccacagcccaaccaaacagaccctaagactaactccaacggagcagccaaacggccagccaaagccaatatggctgtcgtggtgctactgtagcgcctagaaacaggttccaacaacacagccaaaaggagcagctattttagaggggatgagagagaaaagctagattggctggttcagagccggcagccattttctccccttcatctctgacaatccggacccacttctgaggcttctggccactcgccctgggaaccagctattttagctgctccgttggatacgacggacgtatggatggccagctaaattactgtggcaagccaacagcctgaatgtctgtccgttttggctagtgtctgttggagacagcctaatgcttg

SEQ ID NO: 181594 - DNA, 648 bp, Zea Mays
gatgattatatgggcacgttgaatgtgtgttccaaaacaatgcaaagaagctgatgaaggatgcaataaactatgcgagaattcaggctacaaatctgtattttcaaaatcatcaagaataagcaggccccttgaacaaaaaaggaagggtcctcaaagaaatatttgactgaggaacaatatcatgaggttagtattcaatttgttttactctttttgttaattgttgtgattggtataattgtaaccttgtgtgtgcaggtgatggttccatagatggcgcccgtgccttatgcgtactttgcttggtgccgacactgggcttttgaaggcttctagaaagcgtcggtgcatcacatggaatgtcgaggcaccaaccgtaaccacaaatttggtggcgacgacatgctccaaaaagctgaaagaatgttaagtttgatctagctctgtcgatcaccaaatagtatgattgcttatgaatgttttttgtttatacaggaagcgacgcgtgtccaaaagcctagtgacattgaggtgtaccaggaggcccacaaaggactggaccctaacaacaccgaccagctttgtagccagacgaccacggatccgctggtgagttttggctcaaaattataagcattcaaagta

SEQ ID NO: 181595 - DNA, 317 bp, Zea Mays
gacgagaagtgtctcggttgaggttggaacagatgggaagagagctaggtgaaacatcaacttctactcaggaacaaggcggagatgtctgaaggaattaacagcagtctcgtggtgatcagaatcgtggaaaccaacagcgaggcatgagaggtgatccttgctagtatggtgattcaggtaatcatgcaatccccaaactaccttttccaaaattctcggagagcgatcgtgtggtatggttggaccagtgcagagaatattttacaatctaccgtgtgcctaagtctatctgggttttggtggcctctctgaat

SEQ ID NO: 181596 - DNA, 528 bp, Zea Mays
ataaaaatccaacagggtcatgagttccgaagtagatgctacatccacaagagaatcaatcattggtattgggaactcaaccttcaggcatgccttgttgaggtatgtgaaatctatgtgcatcctccacttgccatttgatttttttaatcatgattgtgttggtaagccattctaggtatgcaacttctcttatcacgctagcaccaagtagcctttggactctggcttttgcacctttagccttgtcatcaaacatcttacaaagcttatgctttcttggtctgttgcttggatcaacatttagtgcatgcttgacgatgcttctatcaactccgcataagtcatttgctgaccaagcaaagtcatccttattatgaaacaggaatcttttaaggtctaactcttgttttgaagatagttgcgagccaaagaaaaccctttggtctgccacatcttcatagagcaagattggcttcgactgatctatcgcagatgctttttctttgacttgcttctctgatgttt

SEQ ID NO: 181597 - DNA, 423 bp, Zea Mays
cacggggttcagtttgtaaaatccatggctcttctataattactttaccactaggttggacggcgggtcaattagtaaatactacggagcctcttttgaataaatcccgaggcgaaggggtacacgcattcttggaccgttggatccacccctggcggcacagattagatctattcacttgatgaagcggtatgcacagggccattggatcaagatccgacggttagaattttattaaagtgcacctaatctccaccacatgacctaaaacggatggctccgatctaattccgaaggggttgcctctgatccactcctaaccgttcgatccatgatcgatgatcacgatctgacccgaccgaaacaatatgtttgacctaatcctcgccgcacatcgcgcaatcaatggaccaggcacgccac

SEQ ID NO: 181598 - DNA, 719 bp, Zea Mays
cgaggagcttgaggagagcctagggatgttagaacaagcgacggagaaacttgaactgacctgagttgagctagccgcggtgagggtgttcttgtggtgtttttgagcagattgggggaagttcaaaattcgagctcactggtgatcgactgggagcaatactgggtggtgtggtgcatgataatgttgtggagctgacggtggcttcaatttatagggagcgagagcggtggccaggaattggaacgatgacgcgcggcggtcggaagaagggggagctcactgggcagtgaattcgtgtcctacgccgtggcagtcactccagcgatcaacggggagctaaagtaagtcacggcgatgtggtggagatgcttagacatgcggcacaaggccggaaagcgacggtcaccggcgtgcttatcgggttccaccacgacaaactctgtacggtggtcggatttgtttaccggccggacttatccacggcgacgtgactctgagcgtcatttgatcaacccgagcatgaatcaagacgccggcaacacgaatcgcggcggagaggtcgtcggcggtgagactgctgcgctggcgatctgatccccaagtctggcactgtaccatggtgaattgcattcagtcggtctgacagagtaacttcagggcaaattttctctagatttcgcatgacaactttatcatccctctgcactaaagttgta

SEQ ID NO: 181599 - DNA, 598 bp, Zea Mays
gaaagaaagagataatataaaatataaaacaaaatttacaaatacacaaacttaaccatactggtatgattaaaatctatttctaatttgagtacaaattcaaagtcatacttgaaattcaaattgggaattgaaaataggagaagaagaaaattaaaggaaaagagaaaggaattctaacctaaatgggctacagctaccaaatcggcccatccttgatttgcaccgcgcagcccgtcttcgctggtgacactggtctctgggacccaccactcggcctctctcgcgcttgcccttccttatcgcatggtgatgaccattcaggcccacacgtcaggtgcgtgctcctgttcttctccccgcgcgaatcgcgcgtgcgctaacagacggcggatttttgccgcgcgccgccggactccgtcaacagtccggccgattcggccgcagctgttgcgcccatgccctcctcggattggctccctgtagtcgatataaatcaggaccgcctggtcgtgtgctcgtcgggttacagagagggtagagagagagtagagctcgcgggagtcgcgttctttgccaccgggtcgccgcaaccgcg

SEQ ID NO: 181600 - DNA, 794 bp, Zea Mays
acctgatcgaaccggtatggccccattctaatccaagttgttcatccagggaccgacggccaggttgtcatctccagcctcactataggaaccgagcagcaggaccctgccgacggcgacgaggttcaccggtgccacgacacgaaggttcctacgccccaattctagcctcgacgttgctaaactatgcggaggacatgacaagtatgatgaagtttgactcaccggtcgctaggtagcgtagacccgaacccatagagatgagtagcaccacggtggagaacgtattctagcgagcaattccacggtcttcaatggcctcttccgcgcactcgagccacaacgaccttcaccgcgtcccggttcagagtcctggccagttcttgaaggtaagccgatggcaaatgcgaggaagtggctacatcggtggagtttccgaccacgagctccgaagaagaggtgctacagtggcggcgacgtgttcctttatatatccctaggctaggtaggtctccaggcggatgagatttgaccgggcacgcaggatccggcagattcggcagagattggcgcggttgttacgtggatcttgtcgacgtagctgggagagatggagcagatgaactgggcccacattgcggtgacaagagtcgcccgcggtgacaagagaatggtagatgttctagccccacgcattagtggttcatccccacgcgcgcggaatccgaagggaagggatgggccgcgcggtggtgatctaaagtgggccgagagatgaggatccgacctagtga

SEQ ID NO: 181601 - DNA, 1009 bp, Zea Mays
ggggaggtgagcgagtctcatgtcgcctcgaccgttccaggaccggactgttggtggaggttgtcgccgacttgatcctggtcgcacgtctgcgtgccggtgcaccatgatctcggtcgtactcttctcggcgccttatttcattttcatgtcggtgatcacgcaaagcgctgatgttgcttcgtgcgtcttgtcaactgttgatggcgtgacgtagatcatttggcaggtaggcgagaggtagaagatgattggctgcctaagtgcgtactcgccgatatccctccgcgtctcgggttcgcgggaggccattggctatctgcgctaggacccttccaaccttgcttagcgtgtttagtgcccgagcaaagtcagggtataggttctgggtgaggatcgggttctctcgccggagactggcgtcttgttctgcttgcacccgcttgcgctcttgagcttggcgacaatcgcggcggtgggagttgcgtcgttatcgatgcgttctttcgtcaggggtctcccccattttcgaagcttcgtcccgagagacgggctgagccagatctcactctccagcctcgtggtgtcgtcgtacattttgacgcctgtttcgccgtcgtcgtgcatcgcgctgggaggctcttccccagcacaattggttcgtcgtcggagataggtgacgattcctgtctcccttgaatgaagaggatgtctgggaagaaaggtgtgggtgcagcggtgcgctccttctcgttctctcttgaggacggagcaatcgagacggcagtccgcagcgcttccttgcctcggtttggagtgtttgtctccttttgctgggtaatccatgtccactccttagtggacgaggtggacaatggagttcatcgagttggggaggccatgattgaccgaccttctaccctctgggggatcctgagcttagcctcgcgcgggaccatgcttcgtcgcgccattggcggggtttttgttggcgcggttcatggtttcg

SEQ ID NO: 181602 - DNA, 357 bp, Zea Mays
gttgggacataatttgctgttttttatgctaccgtaaacggagaagcaaggggctccaatgtttttccagtaaaacttcgtgtaaagtgttactttctttgaaagagtcaaggctcagcctatatccttgcccagtacagcagcccatatatatccagtgatttccaatgtccacgtgctaaacttgtggccatcctttgatcccagacctgacaagactgagtgctggtacatgaggggaatcaaagtcgcatccctagtcatacgctctccatgatttgtgaatctatgcatactgtgtggttgtggatactgtttagtggaagatagaggtgaaagcagcatggtaaattccca

SEQ ID NO: 181603 - DNA, 799 bp, Zea Mays
agtccaccttcgcgcctccgcggctcaaactgttagcccacttccgtcgccgagcttgggagcccccagctcgagctcttcttcaccaacgccggcgcctcggagctttgaatcggccgagagcgccgcccgtagcctctgcgcgtgcgcatctgcgttcgactgtgacggaggggtctgcggggatcgccggtatacgccgcttcgggattgaaacctgccgtggcggatcgtaggcggaccgctgtccaatttcttaccggcgcttcttctttgccgcggaaccctgcatcaccgtggccagtcaccatcgcggcacgaatgccggtgagtaccctaaacccgtgtccgcaatagcacatgcatcgtgtagtggggattagattgggttatggggcacctgggtgcgttatacgcgagctccggcgggcagaccgtcgtgtggcttgtgcgccgccatgcgcgaattggggtcttggggaagacggcggctgggatcgtgcgggccgttagattgttcaattgtcgctcggattcggtgtaggataccgtttcggagttatggaatcgtaaccgtagggatggaatccaaaggtcagacgcggatcgcggttcataaagccttggtcgtcgatctcagatcttgcaatccttaacgcgtaccggctcaggcaagtggcagtttaatctggaccgcacgacgtagatcggacggcccgtgatgcttcataccctttcgcgaatgcatatttttataagagcccctgcgttttctagaaaataacccgccgtccaccgt

SEQ ID NO: 181604 - DNA, 336 bp, Zea Mays
tatggtgaggaagaatttcgtgttgggtggtaatgcatatgaagattgagtttgacttctctccttccttgatgaggttgatcttgtccttttcgggtcttagtctcattgattcaaggttgcgttggcctaatgcactaatttagggttaagtgcatgaggggagaaaggttcataggagtaggatccagtttatttcactagtgttaaattgttaagtgattgtccttaggttagctcaacttaaggttagactttgttaggttagattgttatgactagatagactagacaagatctcattaattagatcatggatgttactttagggtgaga

SEQ ID NO: 181605 - DNA, 987 bp, Zea Mays
ttgttacgcaaaaattgaaggaaaacacctctgaagatgctctgtcagaacaactgaagaagaccctgatggtacagtagcaaaaagatcttctgatttagtgtatctcgccgccggtgaccttacgccgtgattgacgtcagtcgtcgcgattcgtgtgccctggtttgcggataacggctggtggtgaaagatctcaacgcagggaaggattggagccttatcaccggactattcactgtgccacttgccgcgcgattgactaaggtgtcctcgccggagtttgtcgtctttcgtagccacgccacgtacttagaagagctaccacgtcgtagtagataaccgtaggttgtctgtccgtcacctgagatattaccctggtgaacgccacggtagtttgcgccggtgactcacccctctcttcaactgtcggtctccccctttcaaaattcagggccaccaccctcaaacactataaattcatggtgctgctagctccgcaaggttgtcacaaagccagagcatccacccctaccctcgattagccaccatagctggagaattttgttcttccccccaaatctgttgtccgcgccaccgtgagacatcgcgttgtggccagtcgtctctaggtccgcccttgctctccttggccatgttttagcacccacacatgcttgtgatactcatcggctcaacccattgtgcttgaccccactcaatcgactagaacaccttgatttgtatgcagtgttcgccgtcaccgtggtcgaatgattccagggcaggattagttcaattgaggcttgttctaggttcgcctcgggtcggtaatgctaacccattagttaatttaggcaggcgacaccggtcatggtcggtctgagcaacaagatggccggcagcgggcgtgacgttgtagggttcattttggagaagaaacagaaaacagagggccttagtgtaaatgtcagagacacacgtgaa

SEQ ID NO: 181606 - DNA, 509 bp, Zea Mays
cgaggtcggtggatgcaccaaggcgtcctcaccttctatgaaagcgatggttgtgcaagtcggtgggctagtgtataaaggttgcttgttctcatggagggtttcatcataacgaacggtcggctcaaagatgtcaattacaaaaacccttggacttggagggaccatccaccgtccggacgccatcttcgttggggcgtccaccatttcgttatctcatcggagaacatggtttagctcaaggccattgaatttgtcctcaagtcgtcgtaccttcttgtagtacgctgccatcctaggatcacggcactccgaatccttcattacctgccctacgacaagctggaagtctccccggacgtcgaggcatcagatgcctagctcaactacgatatgtagaccgtttacgaggacctcatatcctgccacattgttggaggcttggaggcggagttgaacgacatattgtagttgatctcccgaaggcgagatgaagacgaggccaccgc

SEQ ID NO: 181607 - DNA, 523 bp, Zea Mays
gaagagcagggcctcagtgcaagattccccaagactcagaatgcttcggccaggactgcgggttgttttctcaaaagggcaagttctcttatgtaaaatactcagtgcgaaggggtatgagggcatatgagccgcacgatctaaaatagagcgcttggattaaatcttcattcgacgcgaatcggtacatgtgaccgttagatcgacgatgggcgacccgcgatgaaacacacctgcgatttccccgggtccctacgatcgcgcacggacacaccggattcaccttggccgaatcgatatcccagatatgatctccaccattgcccttccgatcaacggtgccagggtttcttctcttcctacgataggatgcgacagcggggtactcatccatggcggagggcggagggcatggccagcggctcccaaaacggccctaaggctccccccgagggcttatcagccataaacccatgctcccgcacacctgcttcgtatccgcccctacgcgatgcaacctgct

SEQ ID NO: 181608 - DNA, 1037 bp, Zea Mays
gagttcctgggctaccttctaccattctatgttcacactgctatgtcgcctttccgcagtttgaggtggggaagaggaatgcgaatgaagatgctttgcgcagtgcgtcgaagacaagcagcgactgtgacttggtggaagaatttattgcttgcggggtgtggccattggcgcatggctgggggtggacaaggtgaaaccacgctcgatgcctttaaattggaaggtgttgagtctagccttcaccattaatctgcgtggccggaatggtgcaaccttcgttagagagacagtggttgaggcagtaaaaattgttggtaaatattcagcgaagactgagacaccaaaaatttaggatatacatggttcaaatgttagactaaatcgtgtatttgagctgaacaacgtccggtacggaccgtatcttgaggaaggatcctcttatgttggggatgtagaggggtggaaaaagaaaggtggaatcagacatggtggggtgaatgaaggatgctccgagggtaaggctgagatgccgccggtgacaaagaggaggaaagtggaagcaagagcaaaggggccgtcgagggcacctaggatgacggaggtgtccgacgggtttgctaaggagctggacgagacacacgctgagctgggagaggtcatatcttcgcccgctttgcggaaagcatttgctcggatgctgaaagtgatggggtgagtggtgtagggatgatcgcattcttatggctttcggcgaggacgattctacgtcttttcaggcttggtatctctgagtttttccttatgggaggaatgttggcgttgttgtaacagttgtgatagacagggaccgtcgggagtcttaaaagaagcggaaggctccgctgcagctggagaaccgatgtccagagatgtgaggactgcggctgcctctgtggtgatgcctccgcccgtggctttggttactgtggctatggggatgcccctgcctggcagggctagacaggatacgatgccgatgggtactgaggtgggcg

SEQ ID NO: 181609 - DNA, 456 bp, Zea Mays
gccaccgccttcggggggtcctccgccttcggcgcaggggctggcaaggagccttcaccggacacagtggacacatgcccagcggaggagccctcaacggcttccgagcgcagggccgggtcgacctcagccctcgggcagcaccgggttgacctcggcctcgggccgcgtgccattcagatccccaaggtcttcgacatcctcggcacgcgccatctgcagcaacagcacactcattcagcaaacccacacgtacccacattcaaccacacgaaacaaaaaacaagccttacctgctctctcgcccgatcagactgctccctaaccgcctcccggccatgaggaccccacatccgatcgaagagtgcccccgcggaatcctttaccacagggtcttcgaccttaaaaatttcgcgctcaaagttttcatcggactggtcgaagacctcatagtgt

SEQ ID NO: 181610 - DNA, 682 bp, Zea Mays
tttttttccttaccatgcaatgtttgaactgattcctatgggctagtggtttgtattcctctttgtagaagacgagagactgggcaaggaaccacacatacattcattatcatcagtatatataggcacagatcctatctgtgtgcaacagagggacttggtgcgttgcgcaaaaagtgcggcgatttagcagctgaagactgcgtcgtgcggtagtggccattatgatctatttatctgtacatatccgttaacaccccccctagtcttagccggaggagtcccgatgcaaagactggaccggaagttgcagaacgtcgacgaaggaaggcctttggtcatcacatcggcaaactggtgcccactcgggatgtggagaacgcgaagatcaccgagggcgacatgtttcgaacaaaatggatatccagctcgatgtgtttggttcgcatgtgatgtacggggttgctggacatgtaaaccgccgagacgtttgtggcctaccgcttgctcgaccatgaaaccagcaatttgctgaagaagacgtagtacctgaaagtggaacggtgggtatccgggcagccgtcccagtcggcgtccgtgtaggcggtgatggaggttgtcaaggatgcccgaagatgtaggccgagagatgtcgtcccccgaaggtaacgcaagatccttt

SEQ ID NO: 181611 - DNA, 727 bp, Zea Mays
catcataggagggtgcaacatcatcatcatcactatcactctcatcacaagattgtaccttggatggcttagccatcaagcatgtcgatggagagtcaaagagagataggttgttgttgttgagggcgatgcttgcaagagctttcttcttagtgttcttgcactcatcatcactatcatcatcctcatcggtggaggcatcactatcccatgtgatacaataggattgccccttcttcttcttaatgttcaagttcttctccttcttttctttcttcttcttgctcttcttgtcatcatcactctcattgtcattgtcactgttgaaaggacaatcagcaatgaagtgatccttgcttttgcacttgaagaatctccttggttcttgcttgttcttggagatgaacttcttcttgccttgaccgtagccctttttcttcatgaatctaccaaatcagcgcacaaaaagagctaactcttcatcatcttcatcacttgggcatgcctcatcttcactttcttctttctttgccttgcccttgctcttggatgatgtagctttgagtgccacactcttcgtcttcttctcatcggtgtcttcatcttcatcattgatgtcttgggtgatgatctcaccaaggacttgattgggcttcttcacactcaagtcttccctcaagagaagcgtcctcaagatagcaaatcttggaggcaagcacttcaagaa

SEQ ID NO: 181612 - DNA, 579 bp, Zea Mays
cgccatcggtccgccgcggacagcatccgctctgtggcctgagctcgacaccgcgcaagcgctggtacgaatccccttcccgtcctcactgagtacgtttattcgtgttgcgtgtctcggttggtcagttggagctcgggttagtggggacaccgctcgccagcgtttactccgccgcggtgcggagggcgccgccatgctttggtgctggtcggtgaggaagagggctgcaagacgttgatctggcaacggacgactgcgattagaggagagcataccgttttcgttgatagattccgggccgtaggatcgtatcggatggctcagagtaacacatgcttcataaatctgaatcattgatccacgatccgacggtcgggatgtggggcggctttaatctaatctatagcgttgaggtgagatcggacggccgaaaccccgcgatacccctttgcagaaccccgttttcaaaagagcccctgcttttaccttaaatagaacccgccgtcccggggtactgttctttgtgtctcggggtttttaccttgacgcccctgtactttacagaaaatgaggcca

SEQ ID NO: 181613 - DNA, 321 bp, Zea Mays
gttgagccttaggtccttgcttaagtccatacagagacttgttgagcttgcagacccagtcggggtgagcggagtcaacaaatccagcaggctggctgtaataagttgtctcagtaagggtgcgagaaaaaagcattttgacatctagctgatagactggctaagaatgggacaagcagactgcaccaatcaccattagactgaaggtctcatcataatcgacgctcgggcgctgggtgaatcctcggagaacccaatgagccctgtacctgtccagatagaaatccacttatgggtctaaacccacttgctagccagcac

SEQ ID NO: 181614 - DNA, 427 bp, Zea Mays
cagcgataacttttaaaatataattccgaatcgagcgcataagtacttattggaaaggtaagacaaatccctacatgattctcataatgattaacactaactactcacgaaacatcctcagaaactgctaacactgctgctgttcgtccacctgaaaaaatctgtttttttggacagccacatacccggattcaaatgacgatatcttttaatttataactccgaattgagcgcataaatacctgttggaaaggtatgccaaagttctacatggttcccaaactgattccccttaactccccacgaaaaaacccaaaaactgctagaattactgctgttcgtccgccacctaaaattctggacagcccctctacccaatcgcatacgccacatctaatcaattggattgcagcacaaatgaacaaga

SEQ ID NO: 181615 - DNA, 468 bp, Zea Mays
ggccccttgtgcccatgcggctgtctaacatatagcaggataaatgtctatatgctgtgtcattgagctatttgatagatcctaatatgtagtattaaattgtaagtaccaaaggtaaacgtcacagctggttagggtatctttggttccaggaaaggaagaatatacttcagaagcattttctttcttgcccattggcaaggttggggaatggtgggcaagagaaacaaatattcccttgctggaaaatgttggagggtgcacacctagttatctcgaatgtccaacaacattcaatgcatagaaacatgtcttgtgtttagggatgcaatatccagtgtgtacttttgggctagtacttcagtttatttgcatcccatttttatttcttggaatccagattagttcaatttgaggagtttttttatcaactcaattacccagaaagaaacaaaacttgcatcccat

SEQ ID NO: 181616 - DNA, 630 bp, Zea Mays
tgggtggtatgcactggcaagaaatgagcagtcttggtcaatctgtccataataacccaaatggaatcatggtgcttggaggtattgggcaatcctacgataaagtccatgcaaatgtcctcccatttccaagatggtatgggaaggggttgcaaagggtctgctgccttcaaatgactagctttgatcccctggcaggtgtcacactcggatatgtacttggcaatttccctcttcattcttgtccacgaatataaagatctgaggtcatgatacattttgttgctacctgggtgcatggagaatttggaaaggtgagcttcatccaatatcttctttctgagctcaaggtccttgggaacaaccaatcgatctccaaaccatagaattcccttgctgtcctcacggaagcacttgtatttctctgccttctgcttgatcatttctttgataacctgaacacccttatcctcaatctgtgccctgactatttgctcttgcaatgtgggctctaccgagatataacttaaggcacctgaaggaacaacttccaggttcaaattgcacaactcatcacacagggtggtaattcttgcatccatgctcatacaattgcactgggcctttctg

SEQ ID NO: 181617 - DNA, 340 bp, Zea Mays
ctttgggccaccaccgttctatatcatcagaagacggtttgcatgtctaaatcactgccatcttggcccctccagctctgacgaattatcatccgtttggccgcttcatttctctccccgcttcggtgctgcctgctggccgaccgccgaagcgacaaccgaggccaccgatcagttgactcccgtctcctcgtcgcagggtctcctcacacgagcacacgaacatcgagccctccccgcaggagcataagacgcttcgcttggtaaggaaaccctaccctacttggacgagcttctctcaacgactcaacctttctttcctggatggattagcagttca

SEQ ID NO: 181618 - DNA, 498 bp, Zea Mays
cgtcacttgggctgaaatatctgtttctggcccatcttcccctttccgcgccttcactgcgcctgctgggctgaaaagcaccccgccggcccacttgcgcccccttttctttttctttttcacggtgtcacttgccagtgggcccggatcgtcagtttcgtccccttcaaacaaaccgcggaccttgcggcgtgaccgcgactcctcgggcaaatccgcgcacctgggtcgatctccacgcaccaaatccgcctccgcttctttgggaatctgttgcaacgacgcgcgccgcccgctacgggatcctcgacttggaaatcgccctccccgatgtcgttctcaactgagttcgttgcaaccagccgaaatccgcacgtgatggtgttgccgccttcctcgcggactctaccttcctgcagcataaaacccgccgcgatcccttgccccatccaacccaagcccctagccagctccatcgcgtgggaaccgcgggtatcg

SEQ ID NO: 181619 - DNA, 1069 bp, Zea Mays
tcttaggactataactttgttaaagggtgtcgatcatgttattgcacaaaattggaagttattggctctgtaaattcccctgtcagaagcactgatggagcattccatggtacagtaacccgagtggatcagaacgccagcgtagcttgctcaccgccggtgaccctccctgcgctaagattcgcgccgccaccgtctcaattcgtgctctggatgtcgtgataaacgctcggagcacaccgccgtggataagcccgaccattaaagtatcccggccaccgtacaaagttcaccgcggtggaaccagataacctcgccggtgcactgccccccttccggccttatgccacgtgtcctaactgcgccaccacatcgccatgactccctctagcctctccgttgatcgccggaatgaccgccacggtagaagccacctagcgcttgcgccagtaccttcttctacctccgaccgccgcgcgtcgtcgcccaaatccacggccaccgctcgcgggctctataaattgaccgtgcccccagctccgccatgtacccaagcacctaccgcacccacctgcatcccaaatccctcactagcaagcacgaatttcggattctccctaatccggttctaaaacaccgtgaactcaaccccgccgtggtcagcccaactcgggttagctcttcccctctgctcccttgtttaagcattcttatgcgtctgcgatgcttgccgacccacacaatcgagctaggagccctttggtcgccgggaccgcgactgtcttgccgcgatgttcacggtcaccgtggccagagcaatccttgtcaccatttgtgaaattgggttggggaaaaggctcgggatggattcaattaggtgttagtcgctcgggaaccctagccattgccccattcggccagtacagtggctcaccggagcgcggctgcgttcgccgtcgtcgtggaccgcgtgatgtgaaggaatagaagaccgaggacattttcgcaaactgtcagcgactgtgttaaacagtggaaggacccgtccccagttagtgaaaacaccgag

SEQ ID NO: 181620 - DNA, 348 bp, Zea Mays
atcagatttccaggttgctcggtgagtttatcgagtgttttttctcctacagtccacaaaaccacataaaaaatttaggttagaccttatcccagcacccttttgagcctcgcactttctttcaataatctgcattgttgaatttgtgtgctttcatgtcatttgttgctggttgtattgtgttattccaccattcaaaccctagcgcgccgccaccatattccgtttgatcacgccacaaaccgagtcaacgccgcttccttatttttctccttcggttacgtaaaaaaaacagaaaaaaacaaaccgagtcaacgccgcttccttgtttttctccttcggttacgt

SEQ ID NO: 181621 - DNA, 752 bp, Zea Mays
atccgatctacatctgacggcctagattagactcatctaaaatcgaaacagtacgaagtgcggtccgtccgatcagcgatctacgacatagattgaaataactgtgatggaatcctagacacacgattcagatcagatggatcagaatcgtcgcaggacgcacacacttgctaggcgctatcgtggtcgttcacgcgacaatcaacagccacaatacttcttctctcccacgcgaacacccgagcacccaggaacacgcgcatggcggcgaccctgccggagggaactcaatccggcgctccacaaccccaaactcaaattaaacggcgcaacatgaaattggggacatggtttagcggtgtagatggttctcaccggaaatatcggagtgattcctcccggccacggcactaggcggactcgcggcaaacttgaagctccgatgacgaatcacgcgagctccagttagaaatcaccagtggagaccccccccgaggagatcccgcgcacactgacgatgccaaccgttcgctcaccgggatcccgacgccaccataggagaatctccccgtggcggctctctctttctctttctcggttcacggaaaaaagggcagggagatagaggatgcgcggcgctgccccgcgattatatagggtcaacgaaatcggtagtgggacgcgctgctcctgggagaatcgcggagttagttgagcgcggtcgtcagcagcgcaaaccacggtgattccgt

SEQ ID NO: 181622 - DNA, 1163 bp, Zea Mays
ctgcgggcagacagagctgagaaccggagaggtgaaagccaaagtgaccggtcggagcggagaaggatcaccagaaggaataaggggtccggtctgaatcgctggcacaactggagcctaaagcggaggaggtggagcagactgaactgggggaactgagacaccagaatgttgtagcataagagccatgaatgccctactctcagcccgatcctggagaagttgctgctgaagtgaatcctgtctgtcctgtatggtctaaaacatcgtgagcatcctctcagacaaccgggtctgctcggctgccaggtgagcctgctgctgagtgagagactggagaatcgaagcaatagcagggtcaatagccggaggggcagcaggggcagcactaaaactcccagcctcgtgatcatgtgagcgtggaggcataggaggtggaggaggaaccccaaaatcaacatcatcatcatcatcatcaactgctgtatcctgagtgtcgaactgatgaagagctgcatcctcggcctgagagtcaaaaacaggagcagaagctggcacaggagcctcaggcgcaggacggtaggatccaaacacaaggcgtgaggcctcaagcgtgccttgaaactgtggaggccgaatcagttgcgcaaagatgtggaacaagtagtgagcataaggcaactgtcgacgagcacgaatgtcatccaaaacggtgtcctcgatctcacaaataaggaaatccacgacgtcaaactcagagtgggagaccagggcaccaaggagccagagctgaatatgtgtggtagcctccctgtatcccatcctcggcagaagagtccgtctgataagctcaaataagtacttggctgttgtagtaaagtctgccggtgaacgtcgcgacccatctgtgaagggcgggcgaaacagagccgcgacgtgagctatacccggagccacaccgctgtgagggcgacgaggagggtcagaggtgccgtagcagaggctgtgaagtcgagtcgtcgactcgggaaatccaaagagctggtgaatctgagtggcagtaatggtgacatcatctcgctcaaaacgaaacctcatccagtgatgatccgggtctatccatacagacgcgtagaagactcggacccactcctcaacatacc

SEQ ID NO: 181623 - DNA, 792 bp, Zea Mays
ctactagctcccctgctgcatgcctcgcgcgcgtcctgtgatgtactgcgtgcgcgcggcgtgtagcgtgtcctcgatcggtcccctcgtcgtcccggccccgcggagtaggagaggagagatccatgatcgctgccgcgggttggatcggaggggacaccggacactcgctagtcgctgccgaatccgaatgcattcataattgcccacgccacggaggtgacgcggtgccattccctgctctctggctctctgctcggccgggagcgctagctagctcatcggcgtcactttttttttctctctctatcggttgtgagacagtgttttggatgaaatttgaggctggccgggccactctctgcatgcgtcgacgagctagagtcgtctgtgagtgactgacaaaggaacgaagcgaatgggggacgacacaaggcactgttacgcatcagcgatcatcatctcatgccgtatgcatgggcatcaacgatcatgtccctcttatcgttagcaattagcaacgcacatatggtatcctaagagagcacgtaacatcaaaggagtacgcaaatgggatcctaattcatttgcaacattatcaatcgtacgatggcatcagaatccatgcattatttcctgcacaacttcacgatcccaacagacacacagacagaggtagtcttgtttttcaggtattttcgtttcaatcaatcagccaggtagggtggtatgatcaatgataatgtcgacgaaaccaaacgacctgaccatctcttactgtcaggatttatt

SEQ ID NO: 181624 - DNA, 665 bp, Zea Mays
cggccgggcaactcctcggtaagaaaaccacctcgcacctgcttggcatgccatcattagcgaggcatgtatagccatagttgaagccgattgctagcttgtcatagcagggtgcggcgccaccatcactccagagttgactagagaacgaatgcagggcagagagttgggggatcgctgatggcgtttatgccaccgtcgatatgtccgcgttgctccatagtgcgcgccatggacagagccctgtgctcgactacagtagaaattggtagggagggtgagttcgtaacatcgtcgattgggcgaggaatgaaggaatttggagatggaggtcgggttagccggaatcgccgcgcgctggtggagagccgccgcgggcctctgctccacctcccctggtcgtcggaggtggaagagtgtacgcgcgccgtcggattgccagcgagcggtggcgattaagtgtgtagcagcgtttcagctagagcaatcgtggttggatctcgggcgttgacttcggatcctacggtcacagatgcaaaccggttcacataatgcgccatctaatccgggccctcggttctggatctagcggctcacatccaaccataccccttcgtgactacggttttgcataagaaccctcaccctttacgtaaatagaaccc

SEQ ID NO: 181625 - DNA, 663 bp, Zea Mays
aaaagatgctatcctcatggatttcatggagttgacagatttggtaggcctctctatattgaacgagttggctcagtggatctcagtaagctcatgcaagtgactactattgatcgatatgtaaaatatcatatatcagaacaagagaaaactatatctttgagatatcctgtttgctcacttgtggctaaaaagcacatagcatcgacaacagccatatttgatgtgaaaggactggtgcgtcatagctaaatgaagcacttcccttcaatgttttatatattccagtttataagaaaatagttgcctgaatgttcatttattcttcattctctaatactgtgacccaagtttcatgttagaagcagatagtattatagaatataaatgctttgacttattactgtcttgtaagttttatagggctttgctgacattttcattttatgtctagacatgtgttcacatacatgaaactaatatatatctacctggaactatcagacattttatatgttcgtttttaagttccctatctgacatataatgaagttatttgattatctgtatgacatcatatgttttgtcttgactgctgttattcaggggttgaataacttttcaaaatctgcaagagagatgtttgcagaaatccaaaagatc

SEQ ID NO: 181626 - DNA, 458 bp, Zea Mays
gggccacaaaactcgacgcgcggtggttctagagggaaccagtggaggcacatggcgtcacagtgaagggtgcatcaaggcagagcaactttgtgtggagcgcatggtcatcggaccgaaaacctaggagttggtctattttgccttgacagagaggatagactctatgtaaataggggtactgttggggatggatttgggtggagatagactctttggatcactgcatatgccctcacggtgtaggtcctggtcgtgatccgagtttattctcatttgagttcattatgagaaaaccccaacaaaatatcgctcttaggttttctgatccacgctttgatgtttagtttgtttgggttcgtacttcacaagtaaccatcttctacactgcacaaactatctatgaagtttgagatcactctgggcaatttttagtgccaggcactaccgcccttgag

SEQ ID NO: 181627 - DNA, 476 bp, Zea Mays
gcgattcttgaattgggcccaccatttttctgtcactggtgcgtgataacttaaaccgcctgtaaaactttgtgcgcagagctattttgcaccagtgaaaattaatctagcttaatcaactattactcttgccaaagctaaatgaagcgggtagtaatcggacacagccacacagggtgtgtaggagacaacacgccggccacagtagcacagtttacgttcgtggactggtgcaagacatacagatcaggatcactttgatcccaaggaatacaacaccttttccagacttattggtgcaatagcgaattctgaagcactggcacctctatcaccctttgaagcaggacttcatattagtgtgggcagcctcttcaacgcaagctgcatatccaaaaattccggtgccttccaatcccatgatgcactcagtgcatcaccgctaatcgtgtagtctagcacatgcggcatcctcc

SEQ ID NO: 181628 - DNA, 1536 bp, Zea Mays
gtgctaccaagtacccatgcccattagttatacacgagtaccatgcgtgctaccaagtacccatgcccattagttagttaccgaacgcccgaatccttcggcttgttccaaggattttcgtttgggatcgcgtgctttgtttcaaggaacagaacttgcattgttgctaacaacaactgcgttccactgccaggatgtccaacgtgaccgtgtgcgtgcggttccgaccgctgagccacaaggagaggaaggccaacggcgacaacgtctgcttcaagaggctggactcggagtcttttgttctcaaggtctggaccgtggactggaccctctccagtctactgcttcctttaggctttgctgttcctgttcttagataaatgcatacggcggatgttctgttcacgcgctgtttctggcgggattcattcttccgcagctggtgggattcactgctctgttcctgtattatacaccgcaactttctagatcgattatactgaattggttgacggttatacagttaccgccgttctgaacattaacctgcttaagcatcgccctgcacaatcatgatgtagggagtagggaatagggactgtgagcacgagcggagtcaggaactagtgaatggaggatcaaaaacacacgctctctgtttgttctgcgttagctgcattcatcatccttttccctgtggccttgttggtgtcccatttcaattcttctgcttctaatgtgttgttaaactcttggattaggatgagagggaagaggatgtcgtattcagtttcgacaaggtgttctatgaagatgcccaacagtctgacgtctacaacttccttgcagtccccattgtttcaggttacatttttcccccctatttccttctagatctgttcttcgagatagtcaaagctgtttcttatcactacactcttatcacgactaaattacctaatagccgtttttcatatcatggaaacagatgccatcaatggaataaatgggactataattacttacggtcaggtatctattgcttcatacacatacactctggaccctgattgaccagttgagacagttgtacacttgttttactgcacaggatgtatatgtgtatacactttgtttctctctctcaaagcaatggccatcgcattgcaagtttccagtttactgtagacagtcatagtttgcagtgcagctatgatcaatgtcttagcgatcaacttttaaccatactgatatttatttcgaatttgcttgtgtctagaccggggcaggaaagacgtacagcatggaggtaaattaaatatcctcgagctttaatttatgggataattattgatggtgtctcttcagtctcgaccttacacatttatgtatttttgaatgtaatatagggcccaagcatattgcattgcaatgaacagaaaactggactagtacagcgagttgtggatgagctttttatatgtttaggatcatcagcaagcacgtggactgtgaagttgtcaatggtaacatacc

SEQ ID NO: 181629 - DNA, 1322 bp, Zea Mays
cttcctgagatgctctatattccatgaattccctatttatgtgccatccatttgagtaagtcgatatgatcctggccgagtgacttctgctaccatgaatggcccttcccatagtggcgacaatttgtgtcgtccttcccccgttagaattcgacgaaggaccaagtctcccactgcaaaggatcgatgtcgtatggccttatcatgatagcgcctcaaggtttgctggtacctagctgactgaatcactgtattcaatcgttcttcttccaatatatcaatatcctccagtctagtagcttctgcctcagctatgttttcgaagatcagccttggtgccccaaacctgagatcggcaggtagcactgcctccgaaccatagaccatgaagaagggagtgtttccatgcaaagctcggctaggttgagttcttaggctccaaaccacatacgacaactctctgatccactttcctgcgaacttttcattcttgtcgaagactttcttcctgagtgcttccaatatcattccattagccctttctacctgaccgttggctcttgggtgtgctaatgacacatatttgatctggatgcttctttgttcgcagaaatcaaagatttctgagctagtgaaattggatcccaagtcagttataatgttattcggtattctgaacctgaatattatatcttgtatgaattccactgccttagctgaagtcacagaagcgatgggtttgtactctatccatttagtgaatttgtcaatggcaaccagcacgtgagtgtatcctccctgagctttcttgaagggtccaatcatgtccagtccccagcacgcaaatggccatgttacgggtatggtttgcagttgttgtgctggtaaatgctgctactttgataagtattggaaagcttcacacctctggattaacttggctacatcactctttactgtcggccagtagaaaccagacctgaagaccttcccaaccagagtcctggatgttgcgtgtatcccgcactgtccggtgtggatctcatctagcagttgcttcccagtagccgaaagaatgcacttcatgaggactcctgttgcgccccttctgtatagtgcctccccaatgagggtgtagtgagatgactgccttgcgatgcgttctgctgcagctttgtcatccggttcctcttcattctttatatatctgatgattggctccctccagtcattagaatctgactctggctggctcagaacattgcactcttctgcccaatctaaggaaatactcgggcgtggtacttcttggatgaaaaccc

SEQ ID NO: 181630 - DNA, 289 bp, Zea Mays
cactccaacaactacactgtgtgcttggtttccttcagttagttccacctgcaacaggaaccatgcatggtagttatagtggggttggtacgtaattaaaatgccaagttgatttatatataagttaaagtaaaatgccaaagttgaagcattgttttaaatctgttttatatatgtggagcgtcctttcctctcggttctaaagaatgatggccgaattccagctgcaccctatttgatttgtataaattagtaaccaagaaggaactaattaatcccttttctcttt

SEQ ID NO: 181631 - DNA, 429 bp, Zea Mays
gtgctacccacttgagccggatcatctccggcagtaccctcgggggctgggcagtggcttgcgtttcccacccgagccgagccatccccggcaacatcctcgggggctgggcaagtgtcaacaccatccttgaggaccaagttctccgcagtagccgcctctaaggctgagggtccctcaattacttccatgggagcaagacgatccaagtcagtttcctgaccctcgagactgcgctctaaggtcgacgaggcgcgggacgctgcccgggatgatcccaacccggcgtcgagcacatcagcacaaacctccatcacaccatcatccgctggctctgatagcaggtcttctggaaccatatcttcaagagtctgatcaaagtttgccagggacaactcttgtagaccaatgagggcagacagagcagga

SEQ ID NO: 181632 - DNA, 676 bp, Zea Mays
aacggcgtgaaaacgacgtttgaacgataaacagtgccataggaggtttggaatttgaattgaggcacgaaatgacatggaattgagctgatacttcacgaataggtttgcataggtgtatatgagtgaagagtgtgcttggtttgaatttaggtgaagaaaaagatatttgagcactcggctcgaaaacgatcgctcaaaacggggaattgagtgaaattgaagccaggaatctcggattggcgtgaaatttggcaaatatgttactggaagtgttgtaaaggtgcctgaaaaatttgggttcaattggagcatttttggctggtttgggcatttcaccgagcacgtggagggcgaggaattagggttatagggaaatgaccatttgaggtataaaaaccctcccaaaggagctagaaacctacagggatactcaatggggacaattgaacacattccaccacatggatgcacaagatttcacaggatttggaatttgggcaaaaggggtggaatggagtgctcactgtcacacagacagagagcaggagagaaagagatagagggagagaagtgctgctcaccaagcgagggagaggacaagcccaggcacacaatcgccggagagtcgccggtgggggggggaggtcgccggcggaggagagggagacgccag

SEQ ID NO: 181633 - DNA, 726 bp, Zea Mays
gctacatgtacagcaagggcaacaaaaaaattgcattagtatattcacttactggttgaatgtaagaagtgatagcacctgtcatgtggtcataatactttatgtatctcattacgtaaaagccacagccgttggaccctgttttcattgttgggcaatttggtggcatatcgattgggaaattaccaaatttaggaaggatgctttggggcagacatgttgtaaatctttgctcaacctactcattataacactagcccatgggaattttcttccacacatccatttgggcataatgatagtccttccatgtagtgccaccgagatctataccatacggattcgaatctaaaatgtggatgcatcgattctggaggttgattacgtatagtgtccaatgccccctactaatcataggtaccattatctgtttatgaaaaaatatgtaaatgagttacatggtgttgtttcacaggcatggtgactaaatgtacagttaatatgacatgtgtttaaaaaagatgagtatgaaattgtaaatatgaacaatgctcaatactgttttgcattgatccaaattgaccaacgagggtagtgtgttgtgtaagcaattctatagcacggtttggtcaaacgcctgaggtgtcttactatgacgttcctgctcctcaaagtttagtagggcctaagtacaatatatagagtgtgtcagtatgtttagcaggg

SEQ ID NO: 181634 - DNA, 639 bp, Zea Mays
agggaaccaactctgaagctgaatttgtgggctttatgggaataaagtgcacagacttagtcaagcgatccactaccacccatatagcatccctgcctcgaggagaacgaggtaagcccaccacaaaatccatggtgatatgctcccacttctactctggaatttccaatggcttcaataaacctacaggcctcttatgctcggtcttcacgcgctgacatacttcacaggcggccacatacttagaaacatcaaccttcatcctcttccaccaaaagtttttcttcaaatctctgtacattttggtttcgccagggtgaacggtgtaaggcgttttatgagcttctctaaagatattcatcttcacctttgatttctgaggcacacaaagatggcccctgaaacgaaccaaatcattctcatcaatggtgaactcacggggtttaccatcgccgaccctctttcgagcttccttgtaacacccagtttgtaatatataataaaagaggagaaaagtcatttcctatattttatgtgtgtgttgaatctacttgtcatcacatgtgaataccatattcaaacaacaaataaataataaaaagatataccactaaattatgcatcatgctggatttattt

SEQ ID NO: 181635 - DNA, 695 bp, Zea Mays
gtccacaatgacatcagttagctaggtaaaaccttagatagatgggttttctctgctctctataatctgtctttgctcaaccttttcgtcccttccattcttccatacccatacagatgtcagaccttggaatgtcaactacaagtgatgtcactaagtgcaaagaatgtggtgtgttggcaagtcaaaacaacactataaataaaacagccgatgaacagacaaccaagacacataaggatgcacaaccaaaccaacagacaagtgaacttggaacatgttgttgttgttgtgagtactatggaattccttgtcgccagatcagtacaaacgaaagtgaaactacaaaacagaagaaccggattttgttttctggcataaaaagacaatggtctcctcaagaacaactaatagcagagtctctcatacctaatgcacagtcagttgatgaattgcaaagtattccaaaaagaaaacatcacaaggatgcccagccccaagaagaaacacatgagtgttacattgatggatggactattacttgcacacagtttcagcctcgtcgtcacatcagatccaagaaacaaaaagggaaacatggaaaaagtcaagaaataacttcaagaaaaacttgctatcaatgtggacgtgaaggtcattacttccgtaattgtccagagaagagttcactacag

SEQ ID NO: 181636 - DNA, 708 bp, Zea Mays
attacaattagccggcccaacaagttgctccctctacacaacccaacttaactcagcgctgacatctagggctcccgcgtcagccatccgcacgctatcacggtctcgctggtgggtgggccttgtctaggcaaccatctggtctcgctggtgggtgggtccagtaactcaggggcactaaccaccctacgattgtggtgtggcttggggcagaatcaccggtgattatggcccggccgttggctgagctctgaccggtatatgactccttcccccccctcgagcctcgcatcctcctcaaccaaccacgccgtcgctagagaaatcccggtgtggagtgagggagatctcgtcactgcggagaagggagagattaccgccgccgacgcgctcgtggtgcgctactagttggactccgtcgcgggcgccgaaccttcctaaagccttcctaggtggttgcgtggtgacctcgggtgcggaggtgacctgggatctcgggaatttatcaccggaattggaaaagctgctgtgctcgggcgctgccgtgggcagggattgcagcgctttgattcagggtattaacactacctttgcattcgctaattcattaggatcgtgtaggtagtcttgagtttgcttttggggtagtgaatcgtcagctagcgctcgccgatggtcggccaccgcgagagaaatggcaccgccgcg

SEQ ID NO: 181637 - DNA, 465 bp, Zea Mays
aatctcggtcacggtttgggtaactacgaatttggcttgacggagcatgttcaagggaggaagaggggcacggaggacatgaatctcaccagcagggacgacgaatcgacagtggtccacggcgtggggcgaagtagcggcggtggcgagcgaatacggccaccgagaccgttcttctctccacgcaccgaccccaacgcgatctggcgacaccagagagcgagcagacaccggcaacgcagcgctcaacagggtcttcactccaaacgaattcaggcgggggtggcaaggctagcagtggcggcgcggctcctgcagtctcccagttagctgggtaccgtggggaggagacgaagggcagggtttgccgcatggttttatagtcatcccaaggttggtttagcgaatgaacgagacgcccggactccgcgcaaggattgcagccgatcccgacgaaatcggcgg

SEQ ID NO: 181638 - DNA, 474 bp, Zea Mays
cggaatgatactggaggcactcaggaaaagagtcttcgataagaatgaaaaattcgcaggaaagtggataagagagctgccttatgttgtttggagcctgagaactcaacctaacagagccctgcatggaaacactcctttcttcatggtctatgggtcggaggcagtgctgcctgctgatctcaaattcggggcgccaagattgatcttcgaaagcataacagaagccgaggccaccagactggaggatattgatgtacttgaggaagaacgactgaatgcagtgatccaatctgcacggtaccagcagactctgaggcgctatcacgacaaggctgtgcggcaacgttccttttcaataggggacctcgtcctccgccgaattctaacgggggagggacggcacaagttgtcacccttatgggaagggcctttcatagtatcagaggtcactcggcccggatcgtatcgtct

SEQ ID NO: 181639 - DNA, 878 bp, Zea Mays
ggagccaagtggcaagttggcatagtcttggccatgaccacttgaggtctggccatgggagactgtgggatctccctcttccacaacaccggcttctgtaccatcgtcctagtgaggcggggtttcagggcctctcccttcgcgcatactacatagtgcatgattcccttctggtcagcgatgcaggagagggacccaaaaaggaaatcctctcccacggtggacagtgttggacgacggccatggagttgtcaaaaatcgacatcgacccctacctggcgctctagctatcggtattaagtaccggcaacacactacgggggtggccccgtagcacttttgtgaggaaggcgatgacgatcgcaactcgatggtacgtgtagaacacatcggagacacaagtgattgtttaggttcgggtcacccggtggcgtaacagcctacgtcctgtggttttctgtctatgtgcgaatgagttctctagaatacggggactatggaggaaaaagatgagttctatggggtgtctaccttgttttcatagggccctctcctcagccttattgtcgactgagttgaggttacaaacaaactaccatgagtccacgatctccatgatccgcttgttctgccactcgtcgcgttgggctatggtcaaatgagtcgtccgttgatttccacacacaacacgtacaggacgcgactggattctcgcatatgcatgcctacaccttcctcggaatccaatgtctcccgtttgaccgaggcccatcggggggcttctgggtggcccatcaacagcctttcggatggcccatgaatgtcttcggaccgtggtgacctaagggatatctatccccaatagccactccgctgga

SEQ ID NO: 181640 - DNA, 528 bp, Zea Mays
aacaaacgcgcgcgcagcgaaattagccaggaaacactcgccagccgatcagaaatggggacggggtcaaaaccgatgccatcgccgaagaaacgcaggaggcgggggtacctaagcagtggtcgctcttggcgtagccgatgacggccccgtcctcgtcctcctgcgaggcgccgaggcccgcgcaggtgagtgagagcaccgccgagtccatggcggcgcacggtagggtttagccgcctggccggtgcgcgcagttgaagctgaccacggtcggacggatgcggagcgaaggcgacggaggggaagttagaaggatagatgcgcaacggaggatcggagcagagagtgacccgagtggggaacagggagaggcagcgagatcggttgctgggtgcagatgagaatggggaattttcccgccgccgcgcgctatttcggggaggattttcccgcgcttttgttccgcttcgctttttttcccctcccgctgtttataggccggcccatttagaagcctaaaatttg

SEQ ID NO: 181641 - DNA, 533 bp, Zea Mays
ttcgtatacagtttacaaaaccttccatttcatgcagtacatcattattacttatactttgtgaatatcgactggttccagcatttataaattcatccatatttctaataacaagtatggcacaacattacatttgtcataaaatatggaatcatctactccccactagatgaatcattgtctgtgacaccaccgcgatgttttttgaagtgcatgtctcattccaatttggagcattaaatgaacccttgttcctagaacctatgggtcgccctctctttcgaccagtaaggctggccaaccgaagcctattctcctccacagataggcaagtgcgactattgtgaccatcagcaatgccacacctttgacactttctgttctttttcttgtctccttttgcccccaacttaataactctttttcgttatcactgattgttctgccctttggcttcgcgttatctggtcttctcaagcttactccactcacattaaaatctagcttctacaattaagaaaaaaatatgatat

SEQ ID NO: 181642 - DNA, 689 bp, Zea Mays
tgtgggtccgtggtgtcagggctaccttcaacctccagcaccgaaatcgtcgcgtggatccccgcggtattcgcgtcaacaaaagccgcgtccgggctagatcgagcgggtctccgtgcgggcttctcgggatccctggcggctctctctactccccttcggactctctccagtgcataaaatacaaccgtgttgccgccgccatgacacatctcaatcgctcgccgctcgtcttctctcctccgcggctcaaattgctagcccacttccgtcgccgagcttgggagcctccagctcgagctcttcttcacctctctgccgccacaactagtgcccaataggaacatccgtcgtgcgcctatacgatggggaaatctccgccgccgacggcaattgcgacgtccaacctccgcactgcaccgtgcgtagctgggaggccttgccgaagctctccgcacatatctggggcgccttcgtggggaggtttgcatcggcgcaggggaaattgtccgtcgacctgggagttcgccgtcgggtcaaggtttgtcgcggccagggtctcctacttcgcgagtgcaggtaacgcttctcccgttgaatcaaggtactaatagcaccgggtaatagccattgatgccgggtttgggtctcggcatgggctggaatgcctcgtcggtgtgggctctcac

SEQ ID NO: 181643 - DNA, 629 bp, Zea Mays
tctaggtataaagttcacagaaaaatttggattcaaaataaatattcaaaaaaaggaaaaagaaatcaggaaaagaaaaggcaaaaagaaaaagagaaactacatgtactgggccgccacacgtgtttggcccatttggcctttcctttttcccctgcgcatggcccatctccacttcagaacgcggcccagctgctctagctcgttacgtgcagactcactgatttgtgggccttgcccgtcagcacacactgcgcgcacgtctcccttcatcccaatggcacatgggcccactccgttagattccccaaaccgtgcggccacgctccctcctcgtcgtctcaatggctcgcgggctcgctcgtcatcctaagaattccacgctcgcgttgctcatgcgtctcactggttgtgggctcacgcggtcagcgcacacgctcacccagtgcacctgacccgtggggccgagtcgtcagccgtgaactcacccacctcgccgctaatggcggacgcgcgccgggaaattgggggaaggtcgttgaagactgggtcaccctgctcctcgggctataaaagctctaccatcgtaaccctctcctcatccgcatgcgctgacatcctctgcccta

SEQ ID NO: 181644 - DNA, 469 bp, Zea Mays
gctggttggttttgattctgacatgtttgatgttagagagaaagaattgggtgaatttatgattcggactctggtgattcaaaaagaatcaggatttatttggaattttatcaatgtttacggggctgctcaaaatgatcataaacagaaattcctgagtgaattgtcctctttttgttccaattgctctcatccaatgttgattggtggcgactttaacattcttagaaaagagtcagataagaacaagcctggtggtaccaataagtggagttccttatttaattctattattgatgttcatgatctgattgaattggatcttagtggtaggctttttacctggtctaataatagaaatccccacacttatgagaagttggacatatttcttgttagcccagagtgggatctgcattataataatgtgaatgttgctggtcttagtagatccttttctgatcatgtg

SEQ ID NO: 181645 - DNA, 504 bp, Zea Mays
cggcgacgaagggtggtgtcgaagcatagcgttggtgaggtttcgcgaagtggtaggcaccgtcggatggggatggagtgggaccgtcttagagtagatcggtttggtaaacgagagttgatgtcttcgccgattgggacgagcattggtgagggggatctacggaatctttttgagggtgaggaattgaaaataatgttgttcaattatagggaggcaggcatcatcccgaaggttgagccgatgtagtatgtggtgccctcgcgttgtccggcggtaatggagggcgtagttgtctttatttgtgcggtgggtctagtgaccattcgctgagtgtatgtaactgcaacttgtattataatgtggcctgatggccttctttgagtgagatacttcgtatcacacacttgttgtgctaattcggctgcacccttaggcgacttttgcacgaggtgtccttttagtaaaaaacttcgtatcgcgcacttgttgtgctaatccggc

SEQ ID NO: 181646 - DNA, 940 bp, Zea Mays
agaaaaccgagggtttctttagcaaaacggccgcgtgaaggggtatcgggtctccttagccatcagatccacgatcaacgaccgagattagatcgatgggcgagcgagcgtagctgacaagtggggcgaggatgtcagcaacctgaggtcagcagggctaactggctgagtccatatgcagatcacgagcgagggcgcggatccgagcgatcagatccgaaacagacgactgggattagctctgatctaattaaacctgggccacccgatctcggatgaatgcccgagatcccatcggcaagcacgggccgggtgactggtgtactcatggcaccgctcgtctccacggcgaggtttcgtcggaggcgagggcacgaccatggctagggtctagggcactggggaagggttcgggcgcacttggggtgacacggcggactcaaacataggcacgacaccagcgtggcggcaccagagggtgcagtccgcaagggagctgtccaacagcggcgtagacccgctccagcgagcaattgcgcgaatgacagggcaacacatggggaattaagggaatgggggagtttctcacttcaggtggagactctggagcgcttgagcaacgacgaggacgtagggagacctcgggctgactacggtggagctccgactgcaaggtgaagaagctagtgagcacagaccgggcaaaccagaggtgttgggggcgaacaaggagctcactgaggcaacatgcacgacagaaactcaacgtcgaccacagaacgagcggtagaccatggcgagcttcacaggcgcacgtgcaaagcgagagatagggcgagggtgctcaggtgagggcgcaactgagcgggggagggcgagtgagtgtgtgcgggctccaaacaaggctcgggcgcgtggggggcgtggccgggaaacacac

SEQ ID NO: 181647 - DNA, 350 bp, Zea Mays
tcaagtggcgcaggcccgataaagctctcacttgaagaggtatctcacctgaacatttcagtctttctctatttatagaacttaacactaactgacgctttccattgcagataaaaaaagaacttgaatcgggtaaatacgaacgtatgttgcaatatttggatcagctcacacatatatttataagctgtgatgagcataagtcaccatcagtacctgcgtatcgtgccaatattagatgtgggaacttaagtagtgcaagtactgggaagcgcagcattgacgagacctcttccagccatgttcggcagaagagctcgaaagttcatttggctcagtcattacaaaat

SEQ ID NO: 181648 - DNA, 604 bp, Zea Mays
cgaaacattagattattgctgtacgtactggaggatggaattgtccagctcaagaagaaaagaaagcgactgtgggaggagagggagaggtgagaaaagaatggtagcataggctagcatagcagagtgggtgtgggaggagggagagggaaaaaggagaccttgtagctactgtctgaccctagcatttgcgtgtggtgtgtggagaactgaagatgagatgacctgagatgaaaacaacccgatggcaggcctgagcatgcatgggctatgcatgctagtgcatgagcatgagagaatccaatcatcatcgtcatctgtcggtcggtcagtcagtcagtcactggccgtatgcatgcagctagccgctgttttgctgtcactcagctatctccacatcgatggggacgccatggatctgatgctacgacatacagtgctctctcttttctctctctctccctctctttaatttctttagcgggatggtcagtcatggaaaggaaaaggaggaggaagaggagtcagccgaaacgacgtcttcggtccatgcttaaatcgctgcctgcactgtcatctatcagactatctatcattcattcgc

SEQ ID NO: 181649 - DNA, 1284 bp, Zea Mays
tggaggacactttggaaagtagcatacataaaaggtaaacaataagtaggccttaaaggaaacttatgtaggctcgcaaactgggataagccattcttcttcatgaagaccgctaacatatgataatgatatgtcttgggactacgcaagctgtcaacaggaaccaaaatcccaacagtgacagttgcattagatccttctagagtatctcaattctcaattagctttaaaatacagtactacatcacttcataaggtaagagtccatagaaccacacctagctagaagatctaaaatgactgatcacatataagcatgcactacagatatacattgcatggatgtagtctagactctagagactgaagtgttgtgaagtgggtcccagataacagagacagtaatcactttagcatgatgcgccacaaacccaaaacaagcataggcgcaatagatgcaacatataaacaggaataggccttagctaaactgacgaaactgcaagggaaaaataaagatagatccttactgtgaatgccctttgcctaagataaggcttgttgtcatcactgtgccatccaatagaagctcccttgcaccaactgcatagcgaacatggtttaagtgggagcacgttgtgtcaaggactataagaacgttcagatgtgatgttccacttttaaggaatgtgcatgtagtgttgataaaatgataaaactgcatatagcttatgcagtacacatgcaaggtatgtaatctcattatacaaattaatcatcacatagtaaagaaaactatcgcaataatggccaaatttatcaacatggtaccaaatcattcacgctactagcccaacactgaatactgttcagccactagtataattatataaatctgacaagcccggtcgatcattggtatgggcaccacatggaaacactctacagcagctgttaatcccgtgagaaacattgtgaatttgatcaacacaataagggtatgattggataccatgaggtaactgttagctagctaattttagctcaaaatagctctaatgcatccaaacaggaaggtagatatatggagtatttttttagttacttcaactagttctttgccaactagctggacaatcatagctaatttttatccaaaccggtaactagccatgtatatccaaacagacccttaaggtagctgaacaaagcacccatactcacacgtcacaccgcactcggcagtctgcagagaaacgctgagagcactaatttgatgctggc

SEQ ID NO: 181650 - DNA, 567 bp, Zea Mays
gggaatttactccttgtccctctattggattcgtcggtctttatggtagaggacttcggcattcttggtgcactttgcccggggaccagattgaggagcactcaatcagtcaaacactaaagttttgggtgcccccaagatgggtgttgtggcatccaatagggatattgtgcttgtaccgtaggtgttccccacatttggttaggttatacggtgggtatacttgtggatacaagggtgcatagctaggtggaggtgcccattatgctggtgtcatcgattgtggatttgggaccagctgaacaacatccctggccgatttaattggccttacctcatgaaacaaaccattttccttcgcctgcctctctaaggctggagaatgagatcactttgctagacgatcacatggaacaaccttttgttgacatatttagaaagaagttgaacaaaagtagacctgattttaatcagtcgactaggtgctttggctatgctttgtttccacgtacctatctcgggttgtcgtggcttgaaggtgcgtggtcatggctacagacatctttg

SEQ ID NO: 181651 - DNA, 273 bp, Zea Mays
accacggtgtacgacgacatggcggtgagggagaactccgatccgcaattaaccattcacacgccgaatcaccaagcctgaagaccccacgaaccggcccccggagtcgccgtccatcccaataccacgcgcacgaagaagatccgcaccgccggtctctaactctctttccgtctacggttcccgttggtggtggctgggttctcggctagatggataagggagcgggagcggctgggttatataggggcggggcgattcaatcggccgaga

SEQ ID NO: 181652 - DNA, 314 bp, Zea Mays
ctagagctgagcgcgaaggagacgaagccgaagctgtggaaactgttcccatctcggaagcaatgaggcgatctgggctggtgacatcggaagacacccctgctgccgaagcagaacaagcagatattgaagagactgattctgaaggtgatcacagtatcgttgtaccaagcaagcctagccacctggacttcgggaagtcaaccatctctaaggctgatttttctaagatggtgaagtcgggctactttagcgaagatgagaaaaagttgattcgctttggtggagaagagactaccccgaagccacagaaa

SEQ ID NO: 181653 - DNA, 615 bp, Zea Mays
gcccgtgaatttgagatggcgcggtggcggccggagagaagggggtgcactggcgcaagcaattggtggcgtttactgtggcaagctcaccggcgatgatcgggtgggctaaggtgactcactgcggcgtggttaaagcatcaaggcacgtggcgcaaggtcgcgagatggctagctccggcaagtctatcagaagcgaccgtgactcaggtgggtacggcggccggagtagaatagtggccggagttcatccacggtgcgatatttcttacccttcctcgtgatccatctgcgctgggcacgaatcaccatggctggcacgaatccgggcgcacggtcgtcgacggcgaggttcagtggattgggatattttcagtgcactgtaccattggatcctcaatcagtcagcctgacagcgcaacttgcagggagatttgctcccaatttcatgtagtgactcgacctgttctctgtgtcaaagttgtagccctatgatccagctataaccttgctatagcgaccatggccaaatacatactggatcatagccaaatcctagcccaaaggtcgcccaacttcactgttatacaacatttagtctttgcattatgtgac

SEQ ID NO: 181654 - DNA, 326 bp, Zea Mays
aattcgtggttggagggaggagttcatgtcgtaggagtgtggcggccacgtcgtgcactgaggctcgtcttgcagaacttgaacacgagttgtaagaactccattctaggtacccgataccccactctgatttgtcataatgtagatagaattggaaataatccaaaaatgtccattacatatgtgcattgtagagaaattaattgcttaatatggaggaggctgtacaaaattataattgaattactgtaatagattagaatgagacctaaaatgtacatgtttctttgaatatacttcttgtcccgcaacctgaaattgagaac

SEQ ID NO: 181655 - DNA, 509 bp, Zea Mays
ggtagggatgggcggagttggaactcaggcgagcaattccgcgacacagagggccaaattcgaagcgcggttgaatgatacacgatcatgaagtaaggatgggcacgtggaagggcatcataccggcgatgcgggggcagaccgtcccgtccacgagttagggcggaaatccgtggcgggcgacccttgacggcgagcgattgtcgtcgattcacgaccccaacgcacgacagtgacctcgcacatgtaatactcctccaggcgacctgcccgggtcgcatgccaggcccagatatgtgccgccggtgagctgcccatgcgacagtcgcgacctcacccggtggcactcattccctcccctggttccgtgaagattgggctatcgcacgcaggcgaactacggaagtgaatcaccccgaagggagggcaccgggtctaatatcgcggccgacgcggactcaaggagggtcaacgaacgaactcccgcagatgcggggaattctgttgac

SEQ ID NO: 181656 - DNA, 587 bp, Zea Mays
ggtaaaaaaaatttgaatcaggtcacaccgtgatgaatgagcaacacagcactagacgcggcgtggtccaacgtcgtctctgcaccgggccaaaaaggtcccctgcaaatgaatgtagcatggcgccagggaacgagagagatctgacaaaacattcaagtgggcacagtaacatcacacagatgctacacagaacatacctttatttcattgtgctgttgccatcttttttgccccctccctctctctctcacacacatctgtgcacaagagaagagcggacaaagcaagagcgataggacgacatcaatgaggggacagacgcagaccaatatggaccactgctaaaatgattttgcaatccattgctttatgattgggctgctgctttctagccatatccgtttcgaccattttatccttcccttttgctacgtttcgaccattttatggtttacgtagttttactgcttagttcagatttgtgcaaaatcatacggatttggatcctaacacaaactatacaaaaaaggagttcaaatcctagcaaacaggtggtgcagtgtgatgtacatactcctaacaag

SEQ ID NO: 181657 - DNA, 817 bp, Zea Mays
catcttaagtcgttgccgacttaaaccgattgctccattagcagggcatagtggtcaccccgagttaagtaagcgcgagcatgttgcaccgtcttaagtcgttgtcgacttaaaccgattgctccattagcagggcatagtagtcaccccgagttaagtaagcgcgagcatgttgtaccgtcttaagtcattgccgacttaagctgattgctccgttagcagggcatagtggtcaccccgagttaagtaagcgcgagcatgttgcaccgtcttaagtcgttgccgacttaagctgattgctccgttagtagggcatagtggtcaccccgagttaagtaagcgcgagcatgttgcaccgtcttaagtcgttgccgacttaagccgattgctccgttagtagggcatagtggtcaccccgagttaagtaagaatgcaggtcgaccatgaacaatatgggtatccttgaggtctctttattgatgatatatttctagtttacagagtacattgtcatcccgatagcttttgaaatacagctaggggtaaaacttcctgaggtgctctatgttccatgagtttccaatttccgtgccatccatctgagtgagacgatatgatctcggccgagtgacttctgctactatgaatggtccttcccatagaggtgacaacttatgtcgtccctcccccgttagaattcagcggaggacgagatctcccactgcaaaggatcgacgtcgcatggccttatcgtggtaacacctcaaagtttgctggtaccgtgctgattgaattactgtgttaagtcgttcttctt

SEQ ID NO: 181658 - DNA, 638 bp, Zea Mays
caagtgaccaaggattgggtgttgttttgcttcaacagggaagacccttggcttacttgagcaaggcattgggagtcaagaacaaacaactttctatctataaaaaaggagtttttagccttgatgatggctgtggataagtggaggcattatctatagagagatgagtttgagattcacacataccacaaggcattaagttttcggggacaataggagaacagagaaaaactatggccaaaatgataggaaggcacttcaaagtgatctataagcaaggcaaggagaacatagtagcagatgctctatccagggtgggccccttgatggttatgacaatgataagtgaagttcaacctcaatggatgcatgaggtcttgaactcttattttattgatcctgaggcacaacagatgctagtgagactcagtctgcacagtcctgataaccaaggctaccagctacataagggagtcataaaaaagggagagcttatttgtattggcaacaattctgctttgaggaccaaattggtctcggctatgcatgatagtgcattggggggtcattcagggggtctaggcaaattactagcgcttgaaaaagctattttattggaaagggttaaagggacattt

SEQ ID NO: 181659 - DNA, 534 bp, Zea Mays
aatggaccaaatatcatcatgatgatatgacggccacactcccttcacgaagttgctttgctttgatgcaccctcaaagatgactctatgtgccgccttcgaaaccgcgttgttgagtattaaggtcaaacccgcaaaaccgtcgttgggtggttttgaggctcagtcacgaaacctccacatgtagcatactccatacatgtctcccacatcttggacatgtgtcccaccgatcctcaatcacattggcaacatgatccacacgaccatgtcctcacacctgatgatgtccccatgtgtcagctaccgtacctgaccaccagcttctctagtcccttagtcaagacccagcgctcgcccttcatcgctctcgatccattgatatgagcccacatgaccttcactttgaccatcgaccatcgcctctagactacacttgtgtatcacaagccaagagttatgttgcacacacactcatgccctggttagtccacatgactcaacccaagatgcttctttgttaacaatctcatc

SEQ ID NO: 181660 - DNA, 2572 bp, Zea Mays
tccaggttcgtgacaatttccaccgtcatcccttttgcgaaaaaaaagtccttatacttctttctaatctaacccgcgatccaaacatctttatctttatatttcatctctacttcattaaagtacagagaacacaccatttttaagaacagagaccacatttttaagaacagataagttatacaagtacatattttatttttttactggactgtctagccgtctgctgctgatagtgtctgtttgagcagattttcagaattcaatccatatggtgtggataagcacggcgccaaatgcatactcatcactgaaattgcatgtctgccttatattttgtgataagggaatattaaataacatgttacatgattattatctcataaactgcaattgtgtgaatagatgctccatatgtccaaactccaaagtactaaagcacatgaaccacacttgaaatacataacaagatgaaaattctattcacaaactaaatatattgatccaaaccatttgtaacttactttggaaaagtccagcagaaggaacagcgtcaagaaaggtttctacagccccaagcacatacctgaaaataaccaaataagtttctaaggcgcggaagagtgactcctgcatgaatgcaccctacctacaggtagaaaaatattcaaaacatttgcagttccgttgagtgttatcaaacataattcatgtactcttctgtcatggacacgcttcatatggccctgaacccaggtaagaaggaccatgctgatgcccaatggccatgccacaagggtatggatagaaaagggaatgggacttttgatctatttcttgcttacaaccgaaacagacacatccccatctacatatcttcaacaatgcttttatttcatcccctatgcaggttttgttcaggagcaccttctggttcagattttggagcaatttattgggaaaagaggagtaacagaggatcaaggatctgtgtctgaagttggagacttgtttaatagagatttttgcaaggaatgggtggaagtttagcaataggatagggtcttaagttcaatagatctaagtgcgatgtctaaatttcagtacctttgctcactgtcttgcatgacagtctgtggctttactgatctctttggttgaatgctgttaagcagaaactgagttttttcattttatcaatggaataaatatcccttaatccaaaaatctatatatagatgagatgactttacctttaagaacctatctctaaaattaacgaaatactctttccatcccagaatatagataaaactagttttggcattcacataggtgctataagcagtctactgtaaaagaaatacccctcctatctccatgctcacaaaccaattgggcaacatgcaatttttttaaagaaaaaacttttatcgctgccatgtgtgtgtggcatgcacattttcatttctttaatttgatgacaagaaaattaaattggaaggaatcactgccatgcacagacgctggcaaacatgcagctcacttgtccatgcagtgggggcagttaatgattatgggatggagggagtaaataactgctcaacccaatataatctaatctccaacagaactaactcatccttggcctgttgttaatagtacgtcagtacctagtgtgaacagcacagcccagccttaggggaggcggtttggcactgttctttattatgggtcctaataggctggaatggcatcttctcacagtttcctaattggtttcccatctatctataaactatactaattcaatcgcagagttgagtggatccttataaaatacccaacaggtggagctgccctgcattccaattgttgacaggccaaatatacaacaacaagaataaagcctttttagtcctaaacaacttggggtaggctagagatggaacccaaacaaaagccaaaagggaggataaagaaaaggtaaaaatgaggtattagtagcagtaaaaatagtacatctggactaaaagacttgatcatggtttggacatgtgttctgatttccacatgctcttatccaaagatgattctttgggtgtattccaatcttcaagtctatttactgccacctcccatgtcaggctgggtttcatctccaaaatattggctggcttttttacgttggcggtgagcagcatgtcacacccccttcccctcctccctccctccctccctctatattgaaacaaaaagaggcataacagttgactactttatactcctttactcactacatactaatacatactatttatcacatgctgactagaagaggagttcacggtgatacctacgcagcaggtgcagaaagggtgcattaacatcataatggcattgtaccagaaaaatgaaaatgacaacctcaattagtggctgtaatgggctaatggcgtgcacttacatggatccagccactgcattcccgaggaagaagcataatcctatactaactccaacttcaggaccaagtgcacggcctataagataatatggcccaccaccctat

SEQ ID NO: 181661 - DNA, 277 bp, Zea Mays
acgcccagtggggcgatatttcaccgtcggatgaagattgtgcggctgcaatcgcaagcaatgacgtggacatcgcggttgcactcctttgcgcccgcgtttaatatatagaaatgggtcttgccaagcaaggcctaaaatggtcccgactcctgttgtcggcaggcccaggtcaagctagactctgggaattgggaagggctcattcgattatcccggattcaaaccccggagcgattttcacctagaatggttatcaaatttgtacaataattga

SEQ ID NO: 181662 - DNA, 949 bp, Zea Mays
ttacaagataataacaataaataaataatattattacagagagtggaagcatgattcatgtagacttttgttgacattttaaatctggagttcaaccaagaatttgaatttagtttgaataattatagaaaaaaaaagagagaagaaaataggaaattcatgcacttgggccgaaattcctcagccggcccaattacactgcaccccgcgccagcccactctacgttcttcccttctctttttcttgtgtggcgcttacatgtgggtccgcttcgtctatcgttctcctccgctcggacttgttgccgcctgccggcaacagtgcccgcggaaaccgcgcagggttgttacagccggccagagctccgtgcgaatcccctccatccccgggcctatatagcttagtgccgctagaccctatccaaacacaacgcctctcgtgccgcatccttcacaagcacctcaccctcggggtggacatcgggcagggatcgagtgcagaccgtgggtcatcgtcgtccgacgtctgcagcgatgttgtgtggacatacgatcgtctgtggtcttcacgagttcacctcgatggtcctcgtcgacatcccgtgcaagaacgatgattgggttgaccggaatcactcgtcggggcgtaccgccaccgtgtggccgctggtcaccatgggcaagggtctgtgctgcatgtgtaccggtagggcatccatcctccagtccctctatgtctcatctatgcataacattcatcagatcggagcttcgggcttaggatcgatgggcggcacggtctggccatggcctccgccgtgcgggtcttagtgccgccgcgtcctgccttgtggggatgaaagccctcaggccgttggattagcaagcgacgatcaagattagaagagcaaataacccttcaacactttgaatccgggccgttgatcga

SEQ ID NO: 181663 - DNA, 767 bp, Zea Mays
tgataccaacagacgacatacaacaacgccctgcactgacctaaacctttagattggggatctacgactccgcaactccatacgctccgatctcgtccgatcagatcagacggctcgaatccgtcccagcgaatcgttatgcgcccaaaaatcacagccgtccatcgaatcacccacggcctagatctaatcttctacctctcgcgccggagcatggcggcgccaccctcggattgcagcgaaactcgccggagaggcccaaaacctatgaacgaatgccctagcttccaatctgcccgcttctatgcgatacatggatgacaatgaataggatcgagcaatcgtaccagagcaattcgtcgcgcagagtactggtcacagacgagcggcggatggcagtgctacgacaagaaattaccgcagcagtaccgtcctgatcctccaattacttccccaagagctcccgcgacgacccactggccgaccagaggcactaacgaaggcgaggcgacggcggcgaccccaaataccacgactcccgatctctcgcggcggtggttatgctctatgcgtcaataggtcatggggcgcggcttcggatggctttatacccgggaagttccacggtcgcagggggaatgagctaacccacgcatcgagatccgcggaagtgggcgcggcgcaacggcatggcgaaggtggtggacgtcgcgactgtttggctgacaagcgggccccaacggtcagcgaccccggacatgggcgtg

SEQ ID NO: 181664 - DNA, 527 bp, Zea Mays
cgaatactgatcaagggatcacgatccaacgactcatattaacctatacgaaacaacgagctccatcaaatcctggccacccatcccacactctacggctcgcattacttcccaaacagtacgctacgacgctcaccggatcaaaggtcgatggctaccgagcttcttctccaaccagcgacaggccacgacggcgcagccctgcccacgacgcgtcctcaccggcgaggtacccgacaagcggacaagagtgcaaaacccccaatccgaaagcccctacacgatgaagagaggatggcgagcacaacggaagtggtcttaccggcggtggtgagtccgatcgacggacccaggcggaggggtgattaccgacacacgattttggcagcgcagggcgcaattccggacaagcgaagcaacaatagtattccatgtggcatggcgagcttcaccggcccgattctgactactcgacatcgccgtaggcttcgaagccaccacggtggcacccgctctctctctctttg

SEQ ID NO: 181665 - DNA, 345 bp, Zea Mays
ggagggttctggaccgcccgattagagattcacggcccagatcggccccggccgaaggggtatcctatttctaatcgtagccgtccacgcgatgatcaacggtcgcggaagcatcgtctcctacccagcccgagccacccaactggcctcagcgcacggcagcggagtcaccggagtccatgaatccgaccaacccgagcgccagactcaaattcgttcggccctcgcgaaattgacgatgcccagagcctgattcacccatcaattgctaccgccatccatcgtaggacccggcccacagtgcaccgcgccagcatcacccgctaccccgaattgacacacgag

SEQ ID NO: 181666 - DNA, 761 bp, Zea Mays
aaagcactcaattacatgttcattcagatggtagccaactgttcatgtacttgatgttggagtggcaatcgtagcctcgtaggcttcctttggcgaccgttcctcagagagtcactggccttcctcttggacaagcccacgaccatgactccatgagtagctgctttagatctgagggaccgacaatgatagccaatctagatggggacgaaggtagcggaagaagaagcgatggaggcgcagacacagctagtgctgccgcaacaggattacatgaatgaggaggctggggcctaggccggtaggccctggggcattgcggcgctatgcaatgggggtgacagagtgtcaaggcgagggcgtgaggcactgcggctctaggtttcatagatagctagtaggttgggctgccaatcatgtttattgggccataaaatgaacttttggtttgtttaataatattatgtcgggtcttagaaatccatgggttaaagggtatgggtactaggatctcatacccgtacctgtgtacccgctgggtttagcttatcgcccattaaggaacttgtgggtttacccgttgcctaatagggtcattgccatctccagttccagcgttcctgattatttgctcaaattcttgtgttcctgattatttttcagttcccacaatagatatagtcgtctctcatctgcagttgatgtacacaaacaacactctacagggatacatagtttggtctcagcagaagcagccgcaa

SEQ ID NO: 181667 - DNA, 349 bp, Zea Mays
tcaccattcttccaaagagtggggacaaaagcaggatccgtgacaaattctggaacattattgatcatgtcatgaaaggggaggtcatggatgttattctttttatgatgcgccagttaaatgatctgaatatggacaagaaccagaatctagcatatgcaccatatattatggctttgattaaagccaaaaccagattcgaaggacggtgtgaaactgctcacaccccattcaggccattcaaaaatgaaattggttttcttaccaggcctctcacaccgtttcctgataatgaggaagctcagggacatgcttttgatgatcagcctgcagcgcatcctgctcagca

SEQ ID NO: 181668 - DNA, 404 bp, Zea Mays
tctgctatttctgtttccctaatacttctgctatttctggctacagaaactttttttgggtgtagtgctgatctttctggttttaaatgttgtgttgaaaacgcctacataaattctctgctatcatgtttcaaacggtgatgtattgttttcttggatcatcacatttttttctgatcattcaggatttattccaaaggacaggcctggtcacagctttgcaggccgatgaaggctacttctctatagagctacaaggagcacgcagaccgtacagccgtacacacactggcgctggctggcaaccccgtcaagccatctccgaccccgagtgcctaacggaggcgacgacgtagcatgctgactttcgtggcttgccctgcccctccttcctgcatgtccag

SEQ ID NO: 181669 - DNA, 515 bp, Zea Mays
aacatcactaaaccacgttcgaaccgtacatacaatacaaaaatatctctagcagacacgacagaacacccccgaatgcgccctcggacatatcctcgtggagacctcatcaccagagtctctatagtggcccatacactggaaagtacgagacaataccccataccagacgtatacctacgcacgcttgatagtgacgcaaggggcatgacgaaagatgaagcagtactaaacacaaccctcaacctcgctgtaagtccaccttgcgaggcccgccaggtaccgcaacatcgacatcgaacaagctacaagaactcgtataccatatggacaagatggaacgccatactagggcacgacaacgcatgatcctactagcgatgttaggagaactacgccatccaaaggcaacagaccgagccccctcccagtagaatacaaatccccactttaaatccaccattgagctataaaagggacaggaaaactttctttcgaaaacacaagcacaccag

SEQ ID NO: 181670 - DNA, 378 bp, Zea Mays
gtgggagatgagaaatgcggattgatttggttgctttggtcgattaagccgtttcggcagcgcgagttcgcggcatactggtttcgtacccaagggcttgatcgtcgatggtgccgttgaattcgtgctctcatgcccgtggaagcagccgaagtgatggatatatgatacgcggcaactggcatgtgattttcggtctggggattgagagcgacgtttatggtcttggaaggatttggtggcatcggcttcctgtgttatcaatttattatcgtcatctgtggatagcaacgggggaagagcgcgactggttcctagagattcaatgtctgttggaaatagtcaacggtaaatagttgtagtatgattttgtgaaag

SEQ ID NO: 181671 - DNA, 297 bp, Zea Mays
gagacatacacacacattatctatttcaagcaattgtgtgcatggtgaagggatcatgacacctaaccggggcgaggttcaattaggcaacttaaaaatctaagtcttaaactaaggcctctaattttcacctagtcaaaacctatacaagaaagtaatctatctagatgtgcaactatggttttgctaagtgtgttgctatctctactgcaaaagagttatgcaacctatgtttaaatcctatcactagcctagcaagctcaactaggaaagtaagcacccaacctaggtaagcaa

SEQ ID NO: 181672 - DNA, 572 bp, Zea Mays
ccaaactcttgcacgttcgtccgtctgtatctgtcttcagccgtccagcgcttcagccgtccagactccagcgctgccgccatccagcgcttcagctgtccagcgccgccgccgtccagcgcttcagtcgtccagcgtcgtcgccgtccctttctctctcccttgctccctcctccagtcctcctccacacctacaagccagctacgaagaggaagctaggagcgcagccatttcctcgccatgtcggaatcccagcagcagcagcaaggcaagttagcagatcccacgtttctttgcttcttcattactagatgcttagatacttattgatatgtgaaatgtgaagtagatattagataggttaacaaatttggctggttattggattgtaaattagaatttttttatttcatagataacccatcaagtgttgcctctgcttcaataacacaatcaacaacagcaactatcaagtcagatgatcctgcatggaagcattgttattgtccagatttaaagaagaagcattcactaaagtgcaactattgtgacaagttgatcaatgctggaa

SEQ ID NO: 181673 - DNA, 604 bp, Zea Mays
cttcccccagcgcttacaggctcacaacgccaaatggcgaggacctagagcactcctggaacatcgacaaccttcgcaaattttttgtttgacccattcagacctgatttcgcccttgtaattcgccgcaaacaatcttgtaccggcccgcactcttttcctcccggggggtgaggtttttaacgaggcggagccatgtaatatatgtgacaaaaatcccccgcaaaaacatgtgtcgaaaaaagaccacgacgacggtcttcggcattcgaccaattcgaagtcaccgcgaggctaagcgctagccaccctcgcgtgcgacaaatccgcgcagaagtcgcctaagggtgcagccggactaagcacaacaagtgcgaaaaaacccgaagtctatcgcaaagactccgcgcagaagccgcccaagggcacagccgaactagtacaacaaaagcagaaacaatagcatcaaaccatccgtgctaagaacgactataatcacaacagcacagcataaccaaccataccagacaaagatacacgacgtcctcgcaggcacaggcacgcgagggcacacaacttcatcgtacaaacctttacacatata

SEQ ID NO: 181674 - DNA, 406 bp, Zea Mays
tggacagttcagtgtgcaccggacactccaatgtgtaatgttcggtgcaccggttaggcgcgcgtggatctgtcattgtgcggccctatccggtggttcagtgaacagtgactgtgcagtatccggtgtgcaccgaacagtcgttgtacactatctggtgtgcccatgaagcattttaaaaaagttttcctcgcccgagcctggagcagtctctcatttccccagtgccagtctctgtttctggcttctccctctcgaccgccgcctctgcctcatcgctgcccatcgccaccgtcctatcgacggtgaccaaccctagctgttgctactcccctctcctctctctggtgagcagaccccagctttttccctctctctatctctctatgtctctacagggcagctc

SEQ ID NO: 181675 - DNA, 760 bp, Zea Mays
aaacccctcaatatatatggattgggtagaactgaacatgacctttaggagccaaaaacacaagtgaccaacacatgcgtcatctaccatgtagcaaggcaagtagtagttctgaattatgatcactcctctctctttttttgttcgatcaaagcatgcatactcctatatgtatatagcactagtgaacttgcaggtgcgaatccgatgattagacagctgagaacttgttgcttgcattgcttgcaagatatgtatgctgtggctacaacacgagtgccgaatggttgggtcttaattttgcttcaagggtggaactgctgtccatcttttcatggccgcctcttgcttgcttgcatgcatgatcggccggctgtgggctggatatattcactctcccatccatatgctccacatacaactcaaactaaaccaaacccaaaatagtatcttgttgatgaggtcttcttcttttttcctatgtacttcttgacatttttttcttgcaaataaataaaagacctctcgatctctgtccatctcttctctctttctctctggaattagttgcaggtttttgttggcatgcctaaccaccaccactcccctcatgcgatgccatggtcccttggaagattcatgggccacgcttgcacatatatgcatacatacacacatgcatgcatgagtgcaaagctccaagccatcctttatggcgatttggttggggacccacgcaggacacggatgcccacagcct

SEQ ID NO: 181676 - DNA, 1019 bp, Zea Mays
ggtcagtagataagctccgacgagtaaaaaaaatcttggcgatggaccaacttgcgctcggttgcggctaagcttgtcgtacccctcccccgccggccgctcggataactctcaccgtcgtcgagctgtcgccgttacgtgccacgtgtttgtgcgctggtcctcgtcgttgtgactcactgggtgcatgtccggtgatcaccggaggaagcgccacggtgaaagccacccaccccttgctcctgtgtccatattccctccggccgccagcacgaccttgcgaaattggacaccaccgtcgatgggatctataaattgagtgcgccacaatctccgtagggcagtaagctatccagccaccacgaatcagccgcaaccattcgctagaatccacgaattttgaattcgccccaaatcagtctccgccgccgtgacgaacagctcgttgcggccagctcgattccggttagctcgcgtccctctgtttcttgttctagcatcctcatgtgcccttgatgctcaccaaaccgtccaattaaactagaagcccaccaatcgctgggaactcgaactaatatccatggttttcgctgtcctcgtgggcagaacgaaatagatcaccaatcatgcaattgacttaggggacatactccttaggggtagaatcaggtgtgaaccaaagattagcgtcggtcttcgccctctccggccggtatagctcgccggatttcggcttcccgtgcggagctttgtcgtggaccggacgcggtgaaggaatagaacgtgaagggtttttctgcaatcggtcagtgactcgcgtaaacagtacatgtgcccacttgcggttatccaaaaaggactgggtctttctgcgaaattgccaacgcgggcgtgggcgcgccccggtttcatgtgctgttgggcctcctagtttgaaatcggcccaatactgtttctatttttcctttttctttttcagcagaactttgaaaaaactgtagaaaatggtaggaaaatca

SEQ ID NO: 181677 - DNA, 675 bp, Zea Mays
gttggcaccggaatttgagcctgtgttaggcaggatcgaatctctggcgtccggtggtctgacgtcgatgcacgtggtcggcgacttcttgcagcgccggatcgtgccgctgcaggcaagggcacgcttgagctgctggttttctggcacgaacgaccccaaccgagtccaacgcggcccaggcaccgacctatcttgggaggagctagaactcttggtgaaggggatcattggtgagtatttcattgctgagtccttgatccttcccgaagacatttccccgctttgtgacgatccagggttgaggacaacgatcttggattcgctgccgacccttgacgaaagcggcgtagcggttcgccaggatggcggccgggacccccgtcgcgggattcagatccccgacataccgggcggaggctctcggcccgccgatgccgactccagatttcacccggcaactctcagtccctcgggcaagggcaagggagctgcgagcagttcctccgcccctggtggttccgggaggtcggagggagagaggcggcaccgactgcgtcgtgccgacagatctttcgttggggacccgccccttgattcagacctctctcagaagcgccaggaaacaactggtaggctcggggaggctggctccccggcccagggctcgcaggg

SEQ ID NO: 181678 - DNA, 564 bp, Zea Mays
tcgaagtaccggcagggaagttactcggattcattgtcagccaccgagggattgaagctaacccggaaaaggtcgaggccattatgagaatggaagcgccgcgatcacagaaaaaggtacagaggcttactggatgcatggcagccctaagcaggttcatatcaagactaggggagaaagacatgctcttctacaaattgctcaaaaaggtggacaagtttcagtggatcacagaggcgcaggaagctctagaggcactgaattttttttgactacaccaccagtgctcaagccgccacaacgagctacgccgaatcagtcggcgaagatttgctgttatacatctcctgcacgactctcgtggtaagcaccgcgttagtagtcgagcggatggaggaaggacatgcgtacccggtgcaacatccaatctacttcatcagtgaagtcctcgggccctcaaagataaggtatcctcaagtccagaagttgttgtatgcggtacttctaaccgcacgcaaactccgacactactttgacgaccacaaagtcatagtagtcacagga

SEQ ID NO: 181679 - DNA, 702 bp, Zea Mays
caaagtaccaaaagtactagagaaataataggagagcagggagcgagttctggcactatagagtgtgtccagaggatcatgacatcaagagcctaatgcacaaagggttttatagtggtttggactgtagagtgagtaataccctacgtcctaatgttgatcatgaattatggaatacaatgggttacaaataactccaccatcatgaactcctaacccaattataggacaccaatgcggttgagggctaccctttcactaactgtaactaccacagtaggattgaattctattgtgggatctttctaggcttataaaaaatgagaggacaaggccaaacacctagaggaagagccctagctcgtaaagtattcctagatgtaagaagacatcttaacatgggatgtatgtaacacgatagtgaaggctctccaaaccatgggtctcagggatattgagatgaggtcccatgctagggactgtgtgggggcaccttccttggttttgcatagatagccacaaggctatcagatattggggacaaatttcatacctagctgacccaagagggtcgataactagtccttgtgctatcgttggacattctactgaccctgaagggctggtgctcagagctctcacaagaacctctttatggagacacgatgcccgagctctcccctatccactgaggatgaagtc

SEQ ID NO: 181680 - DNA, 422 bp, Zea Mays
tatggttgtgtaggctaaagggaaagagttagactggcataaccaagggccatattaaacctaaagaacatagttataccagtacatacctcacaaaatcgcagaacgctgagcactagggctttgacggcagcatgccatgctctcacgtgtgcccccatccatcattggcagtgcacacaaaacatggattcaaaactaacagggtcgtatggaagggaaggtaatgcagctatgtctctacgagaaagaaggcagcaagagcggcaatagaaccgatgagaaagctgcaagcacactgattctgaagtgtctacagagcctaagaacagaagtatgtaccaatgtcttgtaatatgagttcctaggtatttcatgttagtcaatctgatcctccaaacattttggagtgtaggattcag

SEQ ID NO: 181681 - DNA, 304 bp, Zea Mays
ggtgatacgttgcaggatcgggcgaggggcaacttgttgttgttccgcctgcggtggcgaccatggtgtctgccgcggtgcttggggtgaagggtagcgctctcagcgttggcggcgagatttcggtggtcactgtcgtcaaggacgaagcgggcactgtgtcccgccggctgagggaggcgtcgcagcagctgagtcaagtaagttgagctggacttcggtgtttaccgttttcatggggattgtggtctcatgtgtgtctgttaggcggccgacttcgccgaccgtgtggcgtcgggggccc

SEQ ID NO: 181682 - DNA, 357 bp, Zea Mays
gcaggagtcgatcgcgttaagtgattgcgatatacatattgtgtctcggagtgctataataatgagttagcagacttgttagatggttttgggttaagttcgaggtcacgatgaattgcttgttgtagtctaaatgcgtgtggttattgtcacgggtaaaaatttagtagtgctcatgtggtgtctaagttaaaaggtgaactagtgggtgaaaagcgcttcgatatacatatatgtcggatttgattatcgtggagaatgcgttgttaattggttgtagtaattttagtgcactaaatgaactgaataaaatttgcatgtcgacttgttggttctaattgattgtcttaactcgaa

SEQ ID NO: 181683 - DNA, 535 bp, Zea Mays
aacagaggtagctacatagagcacaccccacaacgttgaactgggaataccagttaaccagggaagctccacactgacgccccatgaccacaaaaaaaaacggtccctccactaaactaaagactaactcaccaaagctccacgttgatagcatcaacctgacaaagttcaaatatcatcaaccagaaagcttcactcgattaaacaacctaacagagctagaaacaagctaagcacaacaaaaaagaaccctcatatgacatccatatcagcagcaccaactccacgcctgggataaaaagaagggacatcttccacttcagatcactccaatgtcactgcaattttcctcaaccgaatgatgttccccagtatatcttccaacatcgcctgttcccttgtcttgagtagcacgctccagctctgcaagaaagacatggtctcatatatgatcgctgtcgtattgttagggaattctttcataatcgccatcttatttctgttacaccaaagggaccaaaccagcccggcaaca

SEQ ID NO: 181684 - DNA, 810 bp, Zea Mays
ggttatttaacctcgtgttgaacctttgttcactgatcattatacactattcaagaatgttatcatactgaatttcctgttcaacacttagcaaactcattagacctttaaatgtgttgttatccaaatcaccaaaactcacaaaagggatgaatgcactttcataccaaaacaatactgtagcagagtatattgagcagtttgacattttaatgcatcagttgctagcacatgaaggacagttaaccccagctatgatcactgctcggtttgtggatgggctaaaggatgaaattaagtcagttgtggtgattcaacgtccagttgatttggacactgcctgttctctagccatgttgcaagaggatgtgttgatgcacactggaaagagggaaaataggagggtggagataagtgggtattcaaggccaccgggaaaacctaattcagtgggagtaaattcagtagcagtccctgtaagtcgtgggtttccaccatatggggaacatcgtaagacaacagctagtggacataaggcagaagagaataaacttgctgcactaaaatcctatagaagagctaagggtttatgttttaaatgtggagagaagtggggctacaaccacagttgttccagcagtgttcccttgcatttggtcgaagaaatgtgggcgatagctgtcaatgatgaggtaaatgaagatgagaaagaggagattgaggaacaaactgaggcatcaactgaagagggagtcctggctatctctgttgctgctgtcagtggaagtgagggcaataaaacaattcgac

SEQ ID NO: 181685 - DNA, 308 bp, Zea Mays
catcattgaggcgataaaatgtcatgcgttggtgaggcaccaactcccatccttctcggcgctctcccaggaagactacagctagttacgccgcccatccttcagtagcacgcaagagaaggcagtagtaacgaggatttgcaatgtctagtactttactattagtggcgctctcgcagtgacagtactttactattgtcttctcttgccttcttgtacgcactaatctttttaatttgcatcctccatcaaaagttgtgttctggtgtcataccatcatctgagaaaataattcgatgcaacccgag

SEQ ID NO: 181686 - DNA, 629 bp, Zea Mays
gttttccccatactcaggctaacctagggaaggtctgcgggttggaatctagaaattatagggtttattttagaagatgtgcgcggcaaaggggtacgaataaaccccaactgttcgatcaaggggaaacagccctgattagattagatttcatccaaccggtatgccacaacagccgttggatcactcgtctacgttccggatttaaaagactaggatctaatttagtccgcccgatacacgatggacaccacggattagctctgctgtcgtctgaaccggtaagttatactagacgttagatcagggatcagcggccgccatctcacggagcctgacccatcccagccacccgatcctgactggtgggtcccgatcacatctaaggttttttgcatccggaacctaatctggccgtccgatagcagatcaccggtgtcccagtcatcccctacctcccgccagcacaccgagcggcgcctctatcacctcaacggagtaagccccaccagagctagcaacgtcatcttatgtgccatacggttctaacgagcacgaccgaggaccgaccaccaagaaaccgccagccaatccgtatgaatcagcccaccaaggctccactgcgccca

SEQ ID NO: 181687 - DNA, 471 bp, Zea Mays
gcgaggcacctcgttgttgccgcatcagtttaaaatattaccttctgtcttctgcagcggccccaaggaggcgcactacaggcgcgcgcgacggttcactctttccgcacccgaagtccggcgcacaaactgtatgacttgtggacccgggccccccgtgtcatagactgggtttgtcttctgcaacagccccaaggaggcgcactacaggcgcgtgcggcggttcgttccttctgcacccgaaatccgactcgcaaagtgtatgacctgtggacccaggcccccgtgtcatagtctgggctgcctggatctaggtgcccgtcgcacgtgatctcctgcggcgattgaggggcgcgcggaagggtttccttgagcgaggactctggtttccttgaaaaagggttcacccccgcgtgcaacagttaccctttcgcaatctcttccaatcgactacgcccttttgccttcgtg

SEQ ID NO: 181688 - DNA, 603 bp, Zea Mays
cggtcagacagactgaatgagatcctgatggtacagtgtctgcataaatatatcaggttcagcccccccctcgccgccggtgatcttgcactaggattcacgctggtgtcacaattcacgcccaattaaacgtagataacgatccccgggtgaaaagatcccgccgtggatgaacttggagcacagtagctgctctgtcgctcatccacttgccagcgacgtggtcgtgcgaccatcattgtcgtgctgccgtccctcgcgtttaagccacaccgtcagccatcttaccacgtcgcaattgatcacaatacacatcccttctattgcctaaggccttgccacggtaacagccacggtcaccgcgcctgtgactcagtccctctctccggccaccaccgtgtcatgccaaattcaagagccactgccctcgggtcctataaattgagcgtgccatcgactcctctacatagtcacgcacccaatacaccagcccgtgcctcggatcatccaccagagcgccccaatttgagatttcccccaaatcggtcaagaacaccgcgtgtgtgagctcgccacggttagcccttcacaggtccgatcacg

SEQ ID NO: 181689 - DNA, 635 bp, Zea Mays
agaatattcagccattgaaagacagggcctatccagcttatctgtatcgagggctagccgactcaactcgggttactaacagaaaaattccctctgcagacttggtgagccgattagagatgatccttaggggcaaagtgtcaaatgttggtgctccagtggcatactcggcctggaacctacctcctcccaaagccttcaccctttttgtgtcgaatccacctgttgctgatggcagtttgggccttagagtgcgaccctctgctgatgaagttagtgccttggttgcttcgcttggggagattcctgatgatgaacggcaagtccattttgaggtgcccttgaaccctagtgatgcggagataagtgctatgcttgatctgctagctgaggattcttccgacgctgctcctgctggggcgttggtagtggtacccctcccagaggctgatacgactttggatgctcagaagcctgtcagtactcgcccaaggcgcccttgtcgagccaaccagcctgatccttctgctgatgaacagaagaagaaaagaagacgcctccggcgagtatccagttttgatcaggacgctggtacctcggttcctgctactgaagaagtgcctgcgactggattt

SEQ ID NO: 181690 - DNA, 336 bp, Zea Mays
gacgtggttggctcctcaccaggtcggagctccatcgccgatcagtgctgctgccagaacctctggtgagaatctttcccccccttgccacttttgctttgctcgtccgtgccggtagtactccgtaggctcagattctggggttctggcaatctatgggtcggtcgccgtgcaggcgtggtcctggggcgggtgcagcgtcaccactcggcaagtctgaggtagaagaaaacgccgtgaccgtagatgagcgcggacgactgtgattagctagcagatctggccatcgtttgtgtagcggacgtctcagatcagatcggggatagcgttgattct

SEQ ID NO: 181691 - DNA, 792 bp, Zea Mays
ggtagcttctatgcatttttcctcgcccatagcatgttggtttcaagcggtgcaacgtcggtatgtagaactaaggtggccattgttctgtaagttgttggaccgcttcggcaaggatcaacatcagttcttgcttaggcaactgtttcagtaaggcaaactggagtggtagctgaatgtattgcttgtttctctacactaatggatcagttgtttgcatatgagtcagtgtatgatcctctgtattttactactcagtttattgatggattaagggatgatattcgagttgtggttatgggtcagagacctggggatttagatacaacatgtacaattgcgttattacaggaggaagtttttgaaccaaccaagcgcaaagagtttcattggttgagttccaatccctagagtaaacaagatgtgaagggacctttccctttaccatccgcaccttctgttgagaagtctggtgttgtcaacacaaatcgacgaccaacacaaccacctaaaacttttgaagaacgaatgtcggccttgcatgcattccggcgagcgaaggggttgtgtgattgctatgcagaaaagtggcatagaggccatacttgtgacacaattgtgctattgcaatctatacattatgtctgggaactcttccctatggaggaaacatcatctcctactccttctgaggtacctcctgaagaacaactgttcttcgtagtgctatctgcagctgtgactggagctcgagctaagcgagtcatgcaattgtggggcaaggtgcaacag

SEQ ID NO: 181692 - DNA, 477 bp, Zea Mays
ggctaactaagcacaagggtatcataagttgtgcaagtaagaccatccttctcaccgaccgccaaggaaaagcagtttcctgtcaggcccaaccgctcgccaatgatccaatgatgtttaatctggcagcagaaaacatatcgataatagaagaattcatggatgtatttccggaagagttgcctggaatgccacctgaaagaggagtggaattctatatagatctcattcctggcactgtgcccatcgcaaagagaccataccgcatggcccccacagagttagcagaattaaaactctagattgcagagctgcaacaaaaagggtacattcgtcccagttcgtctccctagggagcacccgtccttttcgtcaccaaaaaggatggaagtatgaggatgtgtattgattacaggtccttggatgaagttacaatcaagaataagtacccactcccttggatcgacgatctcttcg

SEQ ID NO: 181693 - DNA, 1025 bp, Zea Mays
tttattttgaatctctaaattcaaaatgcctaacccgcctaactctttaggttggcaaattacatcccatcttgccaacctatattttttcttatggccatcaccttgccaaaaaacgtgatatgaaataatctatcttctctagcaccccttttggtacttcaaagaaagacatcataaaaatcggaagactggttagaacagaattaattaacactaaccgccctcccatggacataagctttcctttccaactacttagctttctctcgaatttggtttccactgttttccaatcaccattagccagcctgcgatggtgcatagggattccaatatatctgaaaggcatgcctccacttttatagctaaacaatcttgtgtacctcccttcctcctctttggccttcccatagtagaagacctcacccttgtggaaatttattttcagacccaacagctgctcaaaggcacataatatgagtttcatatccgttgccttgtccaagttgtgctccataaacaagattgtatcatctgcgtattgtagaatggaaagccctccatctaccaagtgcagtaccaaacctctacttgctcgttcacctttgctctattaatcaaagtggcaagcatatctgctaccaaattaaagattataggtgacaacgggtcatcctgtctcacccctctttgagtctggaaaaacggacccatttgatcattaactttaaccgccacatgacccccttccataaaagtcttaatccaactacaccatgtatctgagaatcctttcatacaaaggacttgctggacgaagctccacttcaccttatcgtacgctttctcaaagtcaattttgaaaatgaccccatctcttttcttggtgtgaagctcatgcaaggtttcatgtaggaccaccacaccctccattatatttcttcctggaagaaaagccgtctacgatgggttgattacattttgcgcaacgactgtgatcctcttagtcgccactcttgtga

SEQ ID NO: 181694 - DNA, 624 bp, Zea Mays
tgagcttcttatcacatgtgttccaagtgactcttgcagctgctcccagaaatgtgctacaaatggtgcccctctgtctgacacgatagtccttggtattccatgcaaatgcactatttggtcaatatatatctctgcatacttttctgccctgtgggtggtatgtactggcaagaaatgagctgtcttggttagcatgtccacaatgacccaaatcgaatcgtggtgccgggaggtgttgggtaaacccacaataaaatccatgctgaggtcctcccatttccaagatggcaggggaagaggctgtaatgtacctactaccttcaaatgactagccttgattctttggcaagtgtctcattcagatacatacttagcaattttccacttcattctggtccaccaatacaaagatctgagatcatgatacatcttgttactgccggggtgcatggaaaatttggaaagatgagcttcatccaatattttctgcctaagttctagattcttaggaacaaccaagcggtcttcaaaccatagaactcccttgctgtcctcacaaaagcatttgtacttatccaccttttgttcgagcatctccttaatgacttgaacacccttgtc

SEQ ID NO: 181695 - DNA, 465 bp, Zea Mays
ctctaggaaggggacactagagatgtcaggaagggtgtcgagtgtgttcctgagatagtttggtattggacatcacacttgtttctgaggaggggctctcacaggctcctcaatcactccattttttacaacaggggtggcagatttaggtggattgagcttgacaagtttgggggtggccgaaggtttctctgagggtttctgaccactgcactcaccaaccttaccaaaataagtgtgaatcatctaggccccttagtggtgttttggtaattaatgacaactgattgtggactaacaattcttggagaaattgtaggattggacctcaggaaacagcaaagtctttgagacttataaccattgattgtggatcaagtgaaggcaaaggtaaaatgtaggttttgtctttgtcggtcagcaagtgtttagagaagaaattgactggattattaggatagacat

SEQ ID NO: 181696 - DNA, 1803 bp, Zea Mays
tatatatatatatattattgtgtttgttgttctttgacaaaaaatgacaccgctccatttctttgcaatgttcattgcatcgttctcctggcagttgtgagccccttttctgggacggtttctgcagaactgggacaagaaaaaggaggcgacagcaacgggcgaagattcgcgtttttgcagtgggcgcttgtgtgttgtgttctggactggaggaagtggctggtgcatcgaagacgaagatatcattaacgtcgtggtcaatgcgcgcgtagtctgtggctgattgaggggagcaactggatggaggaggaggtgaggaagaggataatggcgctggcgcggccggggtgggtgggtgtgggtgagtgggcacggctgtgccccccgtttacttttggtgcgttggagagcgtcgggcgatgtgtacgtctgcgtcgctgtttgcctcggccctacggcgtagtgtctctgtccaccaaaaaaaaaaatagcacacaattttatgtccactcaaactcaagttgttttaattttgggccaaaagtgtaaaaaaaactattatcaatatatatggctttacataaatgtgtaataagaatatgtctcgtggcagatgtagttattatgataaatattagtatttttttctatataaatttagtctagtcttacttggtcttgttctgtaattgtattctttgcttgggattgtatccatccatgacctatatatgcatctatgtggtacggattgatgatggatcatgacaaaactacactactgggagggtaacgtgggagggagtgggacaggacatggtgagagatggcagccaggtcgcgccggccgtgagatgcgcataagacttttttagttatctttttttttcccgtgcctagatctttaattatatacaggattgctaatcactccatgatttattcctgcacacgatgctttgaagaagcctgatcgatcgatcgatcgagagagagtattcagtcgcatttgtgatttgtctaccgaaccatttgaatatttctgttcactctttcacctcacctgtccagactccagagtccagagtcgtacgtggttcgcttacaccgtttgcgaagaccaagaccatacttgtgtgtgtgtacggaaataataatactacaagatagatgatgacaaaaggagagagagagagagagaaatcggcggcgtgcatgtagacccggtctttggaaagtacatgcagcatctcgcgttgcttcctgccttcacacttggacgccggaggtgggtcgttgcatcaaatcagacggcgtaatcacttgattggtgtagtaagtaagttcgtcgagattaatttaacgcatgacgtggcatccgtcacatgagcagcaagagccagttggatgaaaggcgagatggtttcggtgatgcaaatgcaatgcatggcatggcgctatatggatgggtggtgtgtgtgtgtgcgtccagacgctgacgggttcttgtcgttgccttgggagtgcctattgttttcagtgacgtgtcgctctcgcgttgcgtacgcactgcactgtactacgctgggagcgtagaggagacgagaatgatgctctgtttgcttgggaggaggaggaggaggaggcgacaggaggatgatgacgaagacgactcgtgtgatccgccgtcgtatcgtactatcgtgcgagcaccaagagttgccggacgaatgaatggttttgctgcccatgcacacagcacaccgcactctctctctttatacgcattattattgttcg

SEQ ID NO: 181697 - DNA, 657 bp, Zea Mays
ctccttccactcatgccctactggtcctaggtccaagtctcactcatgaactacgggtcctaggtctaagtccacgacaccctacatccctgcacgatgacaagagggaaggctagcggacaggctacaaaggcgaaaggtcgacatagggaataaagtggacaaaaatcagtaatgatgacgcacgaacttcccttgcctgcacgaatcaaatccacccccgcaatcttagaaatacagcagaggacccacacatgcaagggaatcaacacacaaccagttttcatcatgggtgaaaagcttgtttacgttgcgctcccttctaggagaagccatatgtaaaccccctccttggtctataaaaggaggggtcaaccttaacggagggagagaggagaaaaaaaatgagagatccgatatcggaaaaaacgagaaccacgaaacatctgacagggcatcgaagatagctccttagagaagtaagacaccacatatggagactagggatctctccctctctctcatctgcttgtaacccctactacgagcaactaggtatcggtagcgcgagcaaccgaaaacaagagtagggacatttttcctgatccaatataattcttacacccactgagcacaccatctggcctaaaacgtgca

SEQ ID NO: 181698 - DNA, 603 bp, Zea Mays
atatatggagaataatatgaggatgtgtgaaaacttccttcggctagcttgtttgtgtgacatcaagctctttttgctcttgtatggttatttggcaagtattcatagtatggaatttgttttctccacaaaacacacagtaaaatttcttctactgagtactattgttgaatcttccaccgaagccttcgcctatctgactcctcttcgttctggtggacggaagttgccatgcgaagactgttgtgatcttagtacttgggatgaatcctattagtggttctgctgtacttgaaatttatcttcattctggcttgggttgtgtacacttcgaacattttcggggtgaaatcttcctctgaagcctctcacggttcctatacacctctgtgcttcttctattcgctagcgaaaatcattgtctgccctgatgtattcatccattttttcaacatcttctctaggaattgaggaggtttcttgacaaagtattgggcccctagacttggatgaagcccattgatcattgctttagtgacgatttcatttggtacagttggtgcttgagcctggagccaaaggagtcttcaaccataagcctga

SEQ ID NO: 181699 - DNA, 486 bp, Zea Mays
ttggtgcgttgtcgtgggcaggctctggccatggctgatttgtgggattagtggcaccagcgaattcgccctcgcaccctcttcacgtagtacctagctaggcttgagttagtgcgcctgggcctcggactgctgcacgccggtaagctcgccgccatggatgtgtgctttgccgccgcgtccgacctcggggaagaaaggaagcaccagcgccgtagatttttcatagtgtggccaagattagatccatggaagggggtgcctctaccgttggttttctgatgaacggtggtgattaggtctagctataccttttcggggtttcaatccgtgtcgtccgcatctgatcgaacggatgtgttgcgattgggtattcatagaattcagaccctaggatttagatctggcggccacagtcttgtaccggtttgtttaaagccatgatctaatccacgccgtcaccttttaatcggacggctctgtgca

SEQ ID NO: 181700 - DNA, 513 bp, Zea Mays
gggacagccgagagaagagggtagaaaactctgaacgagaaactatcgaatctgtctgctcctacctctctgttccctgcttctcccttccttctactaccccaagtagctaacacacgttcccttgtcaacagcaacacctcactaccagcccaggaggccaggcccaagcgaaagagaaggccaaatccgaacgtcgttggacccaactgagtgtagtgctgacatatataaatagaggaagagtttggtgtagggtttctatggagaaaaactggtaaacacttctactgttaaacatctcaccgcctctgcctgttttgctgcctatccctgctctgttcttctactcttcctactgttcaatagtcttgttccatagttactgttaacaaagtggtatcagaggtccgattctgttcttccagtgccaattccctaatccatcggtcgactgggcaacggattaggtcaggatcgatctcgagtgaatcagtgagctgctgattcctt

SEQ ID NO: 181701 - DNA, 444 bp, Zea Mays
gcggaccataaatgagctattggacatcgcaacgaccaacgggtcaggagaagatacagtgggagaaatttttaatcatcgcaagcagaaggccaagcgtgacaaagagtccgacggggatcacggacggtggcccaataagagaaagaaagaaaggctgagacacgatgagatgctagtggcagtgacaagttagaagggaaataaaccaccaatagagggtcagagtgtgggttgctgagaaaattcctaggtgggggagcaccacccgagaaaggaacagaacccaggcagggcagcaagcgagagaaggcaagggttgccttgccagacgagactgggtgcctgctgatcttcgaagggttggagtactacgcgccgagaagatatcggaagtcggaacgacgcgaaatattctagactcgacaagcatctccgattgtc

SEQ ID NO: 181702 - DNA, 318 bp, Zea Mays
ctcgtctgctctgggcaccatggccggtgggtggtcggatggagatgacgccttgtgcaccgttcgatcttgggccgacggtggtgatttgatcccaaggtacccttttcgtcaaatgaatatggaccgtagatcgtcgatcggtgggtggcgtgtggtttagagctcataaaatccttgtggtcggattttgatccgatggccacaatcccgtaccaattcggggtctgatccgagccgttggatctaatccgagtggctcaggttttaggataccccttcgccgagcaaaagtgcaaaagaacccctggagttttg

SEQ ID NO: 181703 - DNA, 534 bp, Zea Mays
gcaatttgaatcactcaatttggaccgtgcgattgactagtctgtatttactagtctgtatttactttatccttgttacctaaggattgactagtctgtatttactttatccttgttgagatctaaaccgtgcgatcaagaacagatagttgatatcaacgccgggggggccttgcggttgcagcactggtgttggccaggatcggcgagaagaacatggcgaacacactggtggggttccaaccacgagaccgggaccatagatgggagaacggtggaggggaaagctccgagcgggtcagggtaactccggcgaagaatcccggtcgcggggaggggcgataaggcgcgataaggctcggactagctccgacaagggtaggggagtgccatgggccaacacaggggcacgagacgaggctgaattggctagtcaccgagcggggcgcggcaaaccaacgcggataaacttcgacaaggctgaattggctaaggtgaggcgcgaataaggaaaacaagcatgggaacaggttt

SEQ ID NO: 181704 - DNA, 677 bp, Zea Mays
cagattggtcctctcatcagagagctctgtgtcaccgaagtcctccgatggcggagttggaggatgtttcctcttatcacccctggtgttcctcctacccttaccgtctttctttcccgccatcggagtttctagaagaggagaagaggataggaggaaacaagaagtatgtgcaagtgaaggagtttgcggcacacagttggtctatttaaagaaatgaaacagtacctctttgtattccggtcgtacaacaaacagtcgccagccttcaagagtcgtttggattccaagaaattgcatgcttctgtcaccctttagcgtaacacaacaccaacacctcaaacaactattatgtggacaagacaacgtacacacgcattgggcacacccattgagtgcacatattagattttctagaaaacacaatatatgaaatatcaacgacagtcctacaatatgacaaactcaagatcgatagaagtttactggtcaaacctgagtcaaccagacctatatcagttgaattcagtcggtagccttagcaagcctggcgagacatgccctgactagagttcagtcagccaggccttagtcggttgacccttagtcggccaaaccaccctcaagacaaagttagttggctagatcaacggctgaaaacacaacggtcagcagta

SEQ ID NO: 181705 - DNA, 646 bp, Zea Mays
aagataattgtcctttcgagaacatctcgagagcagtgcccgggttctgtgggtagtggactggagtcctttgatctctttcggctctaagcagcaattgaaccaaaagtacccatataatacagctgtaaccatctttccctactttatttgtgacatagtcagcttttataatatgcatttgagttttgtttttcaggttagctgtgcccattttacactgatatgaacgcaattatgcagtatattcgttgcttgttcaccatcagctccaatcttcacctcaatttgggagattgttaactattcccaagaatgtgtacctttgcttttcactgcatgtctatacctcagtctggagaaacatatatatagaatgtctcatcatgtggtggttctgaaactctcttacactgttcttgtgcaaaatcgaaggctctgctgttcttcaaggtatttctgaattttgacaacattaatgatcatgccctctgttagttcaagtcttcaacatggccctctgttagcatcttgaagtaattatgaagttccatggtcaattgatgtcatgctacagaaaactaaaatctgaggtataacacatccaaaacagaggtcagaaaccttgcattgacgtccaaagaga

SEQ ID NO: 181706 - DNA, 402 bp, Zea Mays
cgttccaaccacccggtcggaatccactcgcattggagtataaagaggaccgaacccccttgtcgtcagccatcacgagccggatttcgccattgttgactcggtgtggaggggagagaaaaccgagggtctccacccaaatcggcgccgccgccgtgctttccgcctctctgcaaccgggtggtgtaccacaggggtgcgagggtgtcgtatgcggccacagatgtgttcccagcaagtggttgatgccagggggagagaagaagcgttaaccattgattgggtgattgatagtgtagattaaacggtagcgtaccccttcgtcactctgatccgaaccgtagatctaaccacggacgctagcgaaagatctaggatattttaaatcctaaccgctggtcg

SEQ ID NO: 181707 - DNA, 790 bp, Zea Mays
aaacatagccttagtcctgaaatgtgctagagaaacttttttttacatcagtctgggcattctatgtcgttctctgcagtagatttacaagttcttaaattgacacattttggaggaccgtcagtatctgttttctgtcctttttttcctgagatgttcaggtgttacagtgccctttagttctcagcattgccacaagaatgttttcaaaatttgtgtatgtactgaggaggtaggtaataaacattttgcatccatctgctatgtggctagtcaggacaaactaggtttgacaaatatgggcataaggctttgttgtttgctttggctcatttctgcatccactcctataaggccatccccgcaattgtagtttagctcctgggcttttggctcgtacagacctctgtacgtgatgtttctgtaaccgaagattcctctgaggcatacgtgtctcacaaacaaattgtcaattcccagatgacttcggagctcatttgccattgcgatacagtacaagtagaacttgagatgcaattcacaaattttttcccccagcgacaagctccgtcattcttcattgcttatttacttcatctattctgaacagtatgtgttgcccaagttcattatgcactggaatttacgggtgatactgcttcgagctgaaatgggccctcacagtcgggtgttatgtcagtcgccattcagtagcatgtgcagatgaactgtcgtcaaagcatggcaagcctataaccagattaccagaagtccagcactagattaccat

SEQ ID NO: 181708 - DNA, 994 bp, Zea Mays
aaaaagaattaaaaaccagttgggccacctcccctcaattctggcccacctcctctttctcccccgtgcggcccagattactccaccgcgtgcgcctgcgttgcttcctcgcgcgccgacagcggggcccgcccgtcagtctctcgcccgcttgcgctgactctgtttctctgtcacacggggcccgcgcaccagccgcagtaccgcccacctccgttttccacgcgcgccacccgttcctccgcgcatgccgcgtcgtgactgcaagctccggagtccgttgatgccgtcacgcctacaaatattggagccgacctcgcccgctggttcacctattaccccgccaccagttctccacgcctttcgatgcgctaccgcatcccttgcagagaagttgaagccgccgccggtgaaactcaccaccgcgtgttgcctgccctcggtattgggccaggaagatcaccttcacctgggaaagccgtcagtgccctcgatttgagtcgaacaccgccaagactcgtgcaattgctcgccggacttcggagtccgccgtgcgccgtggggagctaggttcgcctcttcgattcacggtgagtagagttctacgcaacatcctattgttaccgcttcttgctgccgcgtccggattagagtttaggggcggaaatcgccgtaacgcgtgctccggcgatggcgccgccgtccctggtcggggcaccgccggtgtttgagccgtggctggggcggagtggatggaccgtcggatcggttctggacggcggagattagaacctggaatacctcttcgtttgattaaatcgtagccacccagatccgatcggacgaatctgacagactcgggttgtaatcaaagcaacgccgtaggatcttgatccggtggacgaagttgcgtaccgcttcgcggacggcgagatttaatcctacgcactagaatcagatcggacgaccaaaaaccttagatacctcttcgcgg

SEQ ID NO: 181709 - DNA, 693 bp, Zea Mays
cgtagaaccattcctgcatccaggcccccgaccatcttttctgaaatgtgggaactgggtagctcgcctcagagcgaggcacgaagctgtaacaactgaagttgttgtgatattgctccttttcgatagccttcgtctcataagacagctcatggatgttgtagaaacattttgcatttggttccagtccctggctcctcatggcccatataaagatccccaccttgatgatagcttcgggagtaagttgatgaaggtaaatttcaaaggttttcaggacttcgaccagcaatttatccagagggaactaaagccctgccttcataaagcttctgtaaactaccacttcgtcagcttcaggcagagggacattactttcccctccagccctcacaattgagatatcacgaaagtacctccccctcattgcatcaatatgcccttgtttaatagttgatttcccgaagacaacatggcttggtctccagggctgatcttcggcatcttcattcccactttctacatcgaaactttcactatcgctggagttctcagatatcctagccaacatcttgtttgcaatcttttctgcattggtttttccatggcttcataaaacctggacagtgccaaatcaacaatcttcttctcatcagccattaagttgatggttgttgaaatgctgaagcttgc

SEQ ID NO: 181710 - DNA, 344 bp, Zea Mays
attgatatccgccttgacctggggataaagcctcccctggacacccccgagtcctcctacctcctccctgcccagaaacgcgccgccgccaccacccatatcgtgttcgcagaaagggagagagaacttcggaccgccgccgtccgactcgtaggtagcgtcgctcgggcacccgcggggcgttccagggctgcggcggggcacctgaaaacctcggcaaccaccaatttcgcgctgggcatcgctgcgccagagcaattgctcgccgtcgtcatcgcgctgtcgcacctccgcctatccctgcggccagaaggctcccagagacaatttgcggtatggactcc

SEQ ID NO: 181711 - DNA, 486 bp, Zea Mays
actggttcttcatctacgtcattgaccctgccaccgtcgtgccgccgcgttgctccacgacgccggtgagtccttctccgaccagtcctccatagagcatttttcatccattctactttcccgttctttgtttctgtgattccttcgcctgtagccggccatggcgcgtagcggtgtgccctcccctgcctacgtgcgcagcggccgccgtgccccactggcatggtcgtgcgcatccctccggcgagggccgttgcacccgcctgatggccgacggcacttcccagccccgtgcccccgtctcgccgttgttgcgccgccgtctattgttgcagccgcttgccgcggcctgcccgcgctgctccagcacgccaccagacatggccaccgacgagttcgctcagccggtgccgcctccttccttgtgttgtgtcgccccatactgcaagttgaagaaaagaaaactgcctctgcttcgttcgttca

SEQ ID NO: 181712 - DNA, 379 bp, Zea Mays
aaaacactcaagcacacacgtattcgtttgaaaaggaaaagaaataaaaaaaggtggaatcgctcgtccactggtcgttcggcctaagactaaccggtagtcgttcttcatatcactagcatgcaggcccacctgtcactccctcatatccctctctctcatttgcatgccggaccctcatatgttatctaaaatctctcccagcggacgcatgccgctcggcttctagtgcaccgctgcggcaaccattctttgaacgtcgcttgcgctgcttgcacaacaccgccaacgcctcctcgactgccgacgactctccctctccccgcccgcaatcacatggccaacagcttcttccccggccattgatggtgccgaactt

SEQ ID NO: 181713 - DNA, 728 bp, Zea Mays
cagagacctgaccaacgccggtaacctcgccgcggcaagccgagagcgaacggagaggagcggcgctacgagagtccaacctccgcccacccatcgtgacctgggaacgtccgctttgtgactcggtttgttcaccccgtctaattccctcgatttgtccagtagaatagcacccgtcggaccttagctcggtcggcttcccgcagtcgtgtgtggctagcacgacgcgccgtggaccgtgatccacgcttgatggtggcagaaattgatggggggaattgggttcggagagttattaattaggcgagggccaagtgaattggaaaatggcgcatgggttggccggattcgaaaccccggtggccttgccgcctcgctgtggggggcgccaccgtgtgttagtaccgaggggaagaagacggaccggatgccatcaatcggctcacggacagttccgattacattgcgcgtacctttttgcgcgattaaagctgggaccatgggattggaatcgaacgagcaagagtagataatggttatttgaatccgagccgttgatatgcgatcaagcggtatccgggcgcgctaggttcagatcctagacgatttaatctgggactgtcgtggctgatcggatggtgaggattcgccaatactgtttcggtaggaaatcttactaaagaaaccttggaaactttaggaattaacccgcagtccaaccacggtgc

SEQ ID NO: 181714 - DNA, 1009 bp, Zea Mays
gaggatttggattattttgcgacattggatgtggctgcggcggaggcttctccgcatgtgatgggtgctgaagttcccggtccgagtgctgggcgtaggcggtgaagggcggtggcgaagcgtagagtgagtgaggtggagggtggtcgtcttcgtgtggacagggctggcaagcgggaattattgtcctcgccagttggggtgagtgtaggtgagggggagttgcgaagcctctttgagggtgaggaactgaggataatgctgtttaactacagggagatgggtatcatcccgaaggttgaaccaatataaggtgtgatgccctcgctgtatgtgtgtaactataaatggtatgatgatttgtatgatgaggctgtgtgcgttcgctgatccggccgtgcccgtggggaaattgtgcacttgatctagcgtgtttattatgtcggtccggctgcacctgtagtcgctatttgcgcggatagtcttttgagggagacttcgattttgagcacttgttgtgctagtccggctgcacccttaggcgacttttgcatggatagtcttttggggaagacctcgatttttgcgcacttgttgtgctagtccggctgcacccttaggcgacttttgcacggatagtcttttggggtagaatttgattttgcgcacttgttgtgctagtccggctgcacccttgggcgacttttgctcggatttatgaggaagacctcggttttgcgcacttgttgtgctagtccggctgcacccttatgcgacttttgcacggattgtcgcacgcgagggtagccagcgctgcccctcgcggtgacttcgttgtggtcgaatgccgaagaccgtcgatgcggtcttttttcgacgttgtaatttttgcgggggattttttgcgtgtatattacatggctccgcctcattaaaaacctcaccccccgggaggaaaagagtgcgggccggaataaagctgttttgcgaattacaaggccgagctggc

SEQ ID NO: 181715 - DNA, 660 bp, Zea Mays
cgtgtactgaggtggatctagatcactcccaacgatcgtagcttggttgggacgtggctacagcgttgcttactctcattcttgtccttatgcaggcgtgctttgcacaattcttaaacggcaggttcctagcctagacggccgcctgcccagggctttggtccggcacttgcctgagtggtggggtgggcacggggaggattgatggaacacctaaaatggcgagtgcttgtattgaatgagcaggcttgagctcactgtagcacattatgaaacctttgcatgtctgccctgcatctgccattcagttcagtcaactctttctacactgattacacagtagatcaagaatctgaagacattgcaattacttcgggggggggggggggggggggggggtgtttggttaggtttgcgtcgttctgctgtgcaggcaggcatgggcagctgtaataaatctgcacaagtacagcaagctgtgggctgtggcccgaggtgggggactgtatctgcgtctcttatctttatatcgtccttgtgtgggaaggctcttatatgatctcttctatcaggtgaagatggggaaagccgagtgaacagttgatgggaaggagttggacagtgcgcaggtatatttgattttttgctactctgtgagaa

SEQ ID NO: 181716 - DNA, 1318 bp, Zea Mays
ccacgagaaaagagggagcagggaaagaaatcgcctccacgtccacggtgacgccggatcgcgcgtcaaatttctttgccgcggatttggtgctgcaaattttctagaattttttcgttttgtagggggcattattggcacggtatcttagtcctgggcttatattatctgcattttcgtttcccccgattttttcgactcaatttcttaacggatttgggaatcgcggctagggggctctgcattgccggatttgctcgatttcgtgggcgcattgcagctttgcattgcataacgatctttgccttggtcgcccacgttcgcgattctgtctgagcttcctcacccgggctcgtgcatttctccgaacatctccaggtgtctgttgcacaagctctcgcttgttgctccaatttcacgcgttctgcatgcatgtattccccgaaggtggtgccattctggggctgttgcaaagttctctggtcaaaaccaatggattccgtcgagcaatcggttccacggtgctaagagattgttgtccattggccatccccatgaatttctgaagggggagaagaattgctgttgcatttcccgggcaggtgcattggcatggtcgcagtagtgtaggaagcagaaaagatgaggcactgttggagtgcatggctcctggccctgtgcctcgtctctgtccagctcctcgctccattggtatgcgagcgattgctcgttgcagcacagaacctgtcaccgccagccttgacaccgccccttgtcaaagaagtagacgatgtggtaagcttatttttgtttattttatagaatttttatgcggagttggtatattttaattctactcgcgacagtgtcttcttatggtggagatgttggcatggtagtggactagtggtgacacgttttagttatgtgcacaatgtagttctttaattctgttacaacttacaaatgagaattcagagcaaggcatagtaatgtgcacaatgtagttctttaattatgttacaaatgagaatttagagcaaggcatgcgtcactgcgtcagatgccctgtttgtagaaatgcagagggtgtcaaggttgctcaatggaacctatgctttatggagtatatagatcacagtgatgaatatgtccaatttccttatcttgggcatgcatggtgcctgaaagaggaactatcatatcactgaagtttgatgggtattttcaaacttgtccgtgattttgctgattcttgtttcatattgccgttgaacacctgcagcaccttaatttaattgtcgacaagatgaagttt

SEQ ID NO: 181717 - DNA, 803 bp, Zea Mays
gctgtggctcgctcgccccaaagcacgacatcaacagtaggcccagtatccctgtttgagtgtagaacagtaaatctacaaataaattgctcatcgcatcgtgctaggtgtggacatcgcaaagaaacaaaagccataaactgtatatctagagtgctatttcatattgcaaactatgtgcgaggtacgtagaacactaaatgctaggcttcaaaattgctgcttgtttaaatggtcgatggcagctgaagctgtttagtaatcttctatgtgagcacagtgtgcatggtaggcccatgtactaaaagaaagtgtgtcccggcaatggataatattaggcatggaggattgaatgagcagggaaaagggtctctttctaaggtacattgcaacgaagtatggtcggttggagacataggtagtttagaaccagttttggtctgcaaggaagatggcatttttcatttcccacaatggccaatctgtttgcagcataacccctgcatgagttgtgaatatagtcctgctaagtttttggatgcaaaatgacccctgcgtgatctaatgacgttcttagtgcctagatgcattttccttttatctatttccttgagcatatggacaattttgctaacgcagagaataaaaagcggtagcccccacacggatggtaatatgtggttcaggttgcaggctgttcacaagttccttcctatgttatggcaaataaaactggaccacatacacataagtggcaaccaaaaggaatgtatagcaggcaagaatgcataggataccttgca

SEQ ID NO: 181718 - DNA, 1801 bp, Zea Mays
ttttagttttttttacagggccacaggtttttctggctcggccctgttcctaaactagtcctaaaatgggtacccgtgtttcgtgttgtatgatatgatatgatatccgctcgacaatgatcaggtgataaatgagattttctaggattcacacaaattctcctggagcaaatcgcgcgctcggggtttcaatggacgtctaaagtaaggttgggccttccacggccctgcggttcatattgtataacagacatatttaattaagaaaaattgggcctttcggctagagatatagagtaaatcatgaaaaacacatgaaacaaaaagaaaactatacctataaaacaaaccataacagctcataaatcagtaacttttgtataagtcgaataaagtttgtgctcctaatatagggaaataatatgcaaacttgctgaaaagcgtttgttcagctgcttgctgggtcaaactactctcgcccttagacggaccgaatcctgctcaacttgggccgaagtaagtgaagaaaatatcagaaaaaaataaagtaaaatcaattggacttgtctattttttttaaaaaaaaaacggcaggagagttgccgaaatttttattagaaggttgatctaattgaagaaaaattgtgctgacttgccgaggcaggcccatccaccaatcatcgatccataattaggtccctgataaatgaattaagaggaggtagaactactttttttttcttcttcacccgttctaacttgtctgagttctgtagcaactagcaaggaaccagaacaacaaagagtcgtcgcaatatgattttggcttctgtgaattcaattctaataacttctctaaattgttctagctactgtaggtcagtgcgcgtcatagcttgagttaatagacgcacagggtcgtcaatcctcttgccaacagtactcgatatactccatgcattcacaaaaaaaaagatgcaagttcaggttatttggttgagacaaacgatttaaagttcaggttaccggcagcacggcacgggcggcggcccctcctgacgtgtgagcaaccgcgcactatcatagtagggatgatgagcagctagcagcaagcatgctcccggcgcagctcctgcccccggagagatctcgtctcgtcgcgccgtccgacgaccctgtgattgaaccattaaaatctcccgtgctttagggggggggggggggggggggggggggtgcaaaggcccggcgcaaaaagagggcttcttttgatggagcagaatggaaagaagagaagccaagaaaaggaagccccctgcgctggcatccctcccctgaccctccctcatgccatgttgtgcgcaggcaggcggatccatggacggatgcggcgcggtggtgagtggcatgtgatgggcgacagcttttgcgcgggcgcgccggcccccacgggtggtgacctgacctgacccctcccggcatgcgttgaacatgtctgctgagaatgaaagacaccagcgcatggggtgggggggttctttcagggttcgttcaaagttgcaggcatcttcgttcgtcggtcgcttcttctccgttccgctccgctccgttccgttcgtctcgctttcctcgctcgctctgcctctgacgaacacatgccaccgcccacccgctgaccgctccgccaaagcggcccgctgcagcgggagatggagagaaagctctgagggtcaagactcgggaggagaggactggcagaagaatctcatattgatgcagggcgctgatgctttgaggaaat

SEQ ID NO: 181719 - DNA, 300 bp, Zea Mays
tacaagtgaccggatcactccaattcaaatggagttccatgattcgaacaacaaagctcgaaacgctttgttctcgtgtctctcgcttagtgagtttgagcgagttggacatctgactacgactcatcagatctgatctaccgtcgagagattccatgagggcaacgatcatgtgaagaccagactgtttgagacgtacatgcgagagtacgagaacttcacacagttggctggagagaccattgattccatgttctccaggttccagtcaattgtgaacaagatgcatgccaacaaggc

SEQ ID NO: 181720 - DNA, 300 bp, Zea Mays
taatgaatcacaatgttagaaattggaatgttcttaattggaacattagaggtttgaatgatgaaggcaaagcccatgcaatgcggcaaaaaattgaagaaagtggttgttccgtcttctgcatccaagaaacaaaaatgaaggactttacccctcattctttcaaacgtttcgcccctagcgcttcaccaaatttgcctttagcgcctctagaggtgcctcggggggtattatgatgggttcgaataattctttgcttcagggctcgatccaagaggttaatcttttctctattacggt

SEQ ID NO: 181721 - DNA, 311 bp, Zea Mays
cggagcttgtcttcgccgaagaagatcatcggcagcgagttcgggcgatcgcaaccaggtgttcgacctggggttgtcggcgtaggttgcgcggacggcgcgcgtgatcctgctagtcttgggccggatcagactaaatgcggtccaatattgtttaggttttcttcttttcattttgctgacaacttgtaaaatacgctaaaaattataggaaaatgcaaagatggggaaaccagttttcctgggtacataaaatcacaaattttcgataaaaaccaatgttaggatatttgcaacagataataaatttt

SEQ ID NO: 181722 - DNA, 969 bp, Zea Mays
tattccatgtctggagactgagatagctttatctcggtggtgtccggtagtgaactcttctcaggacagttacaaaggtaatgatcttcatgtccacatagataacaagcttttcttgcagttatttcttgacttttccatgtttccatttttgtttcttggacctgatgcgacgacgaggctgaaactgtgtgtaggtgatagtccatccatcaatgtaacactcatgtgcttctttttggagctaggcatccttgtgatgtttcctttttggaatacctggcaattcatcgactaacagtgcattaggtattcgagaatctgctattaattgttcttggggagaccattgtctttttatgccagaaaacaaaatccggttcttctgttttgtagtttcacttttgtttgtactgatctggtgacaaggaattccatagtacgcacaacaacaacatgttccaagatcacttgtctgttggtgtgcatccttttgtgtctgttggtcagctgtttcattttgattgacgtttcgacttgccaacacttgctggtatgaggaggtgagttgagatgttttttgtattattagagcttgtgcatgtaacagcttctctaagtcaactatcgagggtgatgttgtggttgatgtcatatggttatcagtagtctactcatgtgctataaattctgctaaatcaacttgttggagtctagctaccacttgagaggttgcttgcagaaactgtgcatgcgccttcttgaactgttccatctgagacttagctggaggagttgccaacacaatgtattctttgcactaagtaacatcacttgtagttgacattccaagttttgacatctatatggatatagcaaggaaggaagggacgaaaatattgagctaggacagactataaagagtagagagaacccaactatcaaaggttttacctagtaaaatgatgt

SEQ ID NO: 181723 - DNA, 400 bp, Zea Mays
ccggagtgaagttaacagaagaaccccactgagccaccgggtgaggcagacgcggagctccaaactgagacggcatgggagtagtcggtgcaggagtaggcgcagcccgatactgaggaaaaccctgcatcgccacgaactgagaagtccccggcacatagaactgttgcggagggagtggaactgcaacttgctgctgagcgcttgacatcatgttgacagtgccctgagaagaggaggaagtcactggctcccatctgagcttcccattaggattcctcctacacaccacatccttgtgatcctgactgcagatagaacacctgccactccactgacactcagcacggcgatgcgcatcaccacaacgaaaacacaccagccccagcccaggcttagg

SEQ ID NO: 181724 - DNA, 406 bp, Zea Mays
gactgtctgcaagttgatctttcgacattgcagataggccatgttcaagcttcggatatcctatgttgtccattatttcccgacatgcatttatctctttattgtcaggaagacagtaaagaaagtcatcttcgtcatttccaccatataccaaggaccctcgggggtattttagatccttggcgtagtgttgaacttcggcaatctgctattctgatagttgctttcccaaagcatgtcgaacaatatagtccaaatcaccctgagaagatgcttcgggaacaggcgccaagggttcctctggaaggctctcctctgtaagattttctagaacagcttccgaaggtatcgcttcagcatgggcagaggtgctggcagtaatcatctctcgaacatcttcaatttt

SEQ ID NO: 181725 - DNA, 566 bp, Zea Mays
taacaactttggatgttataacttcgtgtaccggtccgacttgaggtgtcctgtgccaacatttcggaaaaaaatggtcgggctcgtggatgaagcaatggttttatgttaaaatgatttgagtgagagagaggatgtgaaggtgtaatccaacgccccatacgatcacgcttcggcattaggagaccctctactgcgggtggtaacaaagctcaagcatgtctgatggccttcaatacactatgcagctacattggcaccagggatttggtttaggagcacattactttcaaggtgtggccccttgttaacgattgggagataccgaaggaaaccattgctggttccagtgaaggcggcctagtttatctgaaatacacctatcgttatagaagtcagtttggcaagccggatgatgaatggcttgaagccgttgaggtgaccagtgatgaattgttgggggcttattcgaaggcagaggatgaagccatgagtactgcctttggtgctcgtggaaagagaaggttgaatagagtttttgatgtaatgggatttatctatcctga

SEQ ID NO: 181726 - DNA, 552 bp, Zea Mays
attggtactctttggtaaaaataatattgtaccaaagttcaagctatgaataggtaatgtactaacatggaaattcctggacagagccattatatattattttataacattccagaagacttgataaaactctagaggaaaactgtcgagtactcgggaaccgggtacccgaagtaggcccttcaaaaatggctaactctgccgaccaactctacgagacggactggatgaccaactctctggtgatgaccaactctccgatgatgaccaactctcatatgatgaccaactctcagatgatgaccaactctccgatgatgactaactcttcggtgatgatcaactttccggtgatgaccaatctcagatgatgaccaactctgccgatcaactccacgagacggaccgaatgaccaactctgcgataatgaccaactctttaatgatgaccaactcttcgatgatgaccaactctctagtgatgaccaactctcggatgatgaccaactccgccgaccaaccctgcgagacgaaccagatgaccaactctcc

SEQ ID NO: 181727 - DNA, 278 bp, Zea Mays
gctacttgtaatggctgggctatagaatagtattactatgtgacctttgatgcatactcaagtgagaatctaagtagtaattagaatagtacatgccagtgacagcgcatcgtcgatcagagagaaaaggtttacctactacatcattcttctagttaacctgtcgacagactaacataccattccagagtccagacaacagtatgatattgcccagaaccaaccataaggaggacaggttcacataatgcagcagttctaggccaaccagaagcatc

SEQ ID NO: 181728 - DNA, 758 bp, Zea Mays
atattaatttctgattttcaatgctctctggattgggcctcaaattccagaaagcgcagggatgctggcgcaaaagatcccaagacacgccgcacagcgtagaggactgcgggttgattgcgtagaacccaggggctctttaataactttgctagggtcgaaagggtattctcagatcctagccacccgattacatacctgcggcccagattagatctcgatttacatgaatcggtacacaatcctagccactggatctagatcatgcggcccacagctcgccacaactcgggttcaccggatccgcctagatcgcatccaacggtcccagttttactgtgtgaaacggtatgcgcagggcaatcgcgcccgcccgatagggatcggacggccaggagccgttcaccttccccgaactaatctaaggcgttaatctatgatcggacggcgcccaatcaacgtccagctcacacatctatccctccctcacggtcaacgccggcggacccgtgcttcctcccaacggtggcgccatggccggtgcacaccaagtaggtgatcccccggcacaatcttcaaattaaatggcgaaatacagagcggagaccaaagtggggccatggggacggtactcaccctcggttgcgcggcccagagcttggaccgtggagagaagccgaccgcgatggtgtctgcacgctggtgaagatccttcgagtctccagttggcaattcggcgcggcgggggcacaagctcc

SEQ ID NO: 181729 - DNA, 346 bp, Zea Mays
tgttgaggtgcagatttttcaaatgaatgctttcgtcgcggagtccagtccacacgcatgcgtgcaaagacgtggggcttattataatttgatgccagctgcatgcattacttgcccgggatgccgcgtgatctaagtttagtttgcttgacttgctaaagaaaccaatgaacacgccaagatatcataccaagaaaggagcagccgatggacctcgtacagtcagatcatttcttcagagattttgccgactccattaccagatttttgcagccaattcttcaaagtatccagcatcttctccaacttctggtcttttggcttgagcatcatgtcccacctctgc

SEQ ID NO: 181730 - DNA, 886 bp, Zea Mays
ggccacgctcctgcgagcgtacaccggccaatttactcaatgaccggcgccctatttcggcagaaaccgaattcaagacctaaggatcgcttcccctcacttaatttcacaaacggtgatctaaccggctctgtccacggtgacagcgggcatcgcggatattcacacgcgttcccggcgatcctagggattctatcccaattgggctggtcggggagtatcaggggcacacaagaatgtggaaacaagatagcagggagcatgaacagacctagaggtcgctgaccatggtgaggtcaatctgagcggtgttcttgagtgagttgggggaaatgagaaattggagctctctggtgaacaattggaggcgagacttggtggcttggtgcatgattatcctacgaacccgacggtgcactcaatttatagagtccacgagcggtggccggtgaatttggattgagacacgcggcggccggagaagacaggagttactagcgcgagagcttagtggcattgaccgtggcaacctcaccggcgacgagccagtgctaccgagcggtttctagtgactcaccgtgacagggtaaagcgtctaggcacgtagcccgaccggataatggcgaacgctggtgatgccagcgcgactaactacggcaagacacgacggcgatgagaacagtggtcggagtttatctccagcgtgatactttacaccgaggagtgcttatctgagtttggtcgggcgtgaatcgcgacgctggcgcgaatccgggcacacatgtcaccggcggcgaggttctctgacctgatccatcctgtgcactgtaccatcgtgaaatgcacttcagagctcctgacagcccaacttgtagcgtccagaaca

SEQ ID NO: 181731 - DNA, 877 bp, Zea Mays
ttacatatatgacactaaacacgaagtgcaaaataggctgggcatgtttgagaatgagcctgatgtccatgatcgcccggatccagaggtgacccgtttattacttaacatgctagatgagcataacaagctggtcgcggcatttcgctttgctaaaaacgtttagatgaagaaggcgaccaaaatgtgacgttgcgattgttaggctgtaacacacgtcatgacgcacaatacaacttaccggccaatggtgagctcgctgctgtaatagtgggtgattgcttaccttcacaatacaagtacgatgtcctcgtgcacgctagagagggtggactcaaacacgtttcgtgcttgtacccgtcctacatggccctgcagtacctgctgcttttcccttacggtgatcatggatatcaccttggaataaaatacactgacgtgggagaaggcgatgccacatgccgcaagtatgttacgatgcttgaatttgttagacatcgttcacactataggctcaacgaaccgaacccattcacttgctatggtaggctgagcaaccagctagttgtcgatgcgtattctacgatcgaggcatctcgattgcaattcatagcggaccaccaaaaaaattgcgttgtgaatccgtacaggggataaccgatgccattggcaggggtctcaccagtgcagattcagttggtggaagagtgatcgtgcctgcatcttttacgggtggccgaaggtaccatgtaatgaactaccaagacgcgatggccatctgcagagtgtacggcccaccagatctcttcgtcaccttcacatgcaaccctaaatggaaggagatagtcgatgtgcttcacttcgagcctggtcagca

SEQ ID NO: 181732 - DNA, 650 bp, Zea Mays
tcaggccattttctgagtttatgtccaaccctcatgctagtgatgatagcctgggtcttagagtgcgatgctctcctaaggacattgaggctctgattgccccgcttcggagtcttctagaggatgaaaggtagactcattttgagatgccagctagcactgacaacgcggagatagatgttgtgcttagtttgctggctagggaatcatttgactcgacccatgccgagccaatggctatcacagctgtgcaagaacttggtgaggcggtatagacttggaaacctgaaagtgcccacccaaagcgtccacaccgagtgagccacccgactgcacctgttgaggaaaaaaggaagaaaaggcggcttcggcgactgtcatgcttggatcagggtgcaggtccttctactccggttcatgatgaggtactggaagaggccattcctaaggttgatgccaagggttgtgatcattcacaagctgttgtttgcatatttgatgaagacaaagaggaagaagaagaagaagaagtcccgctgaaccgcaagaacaatcggcactatagaggtagcgaggggggtagtgatattccttctctggctcggtcggctcttgtcagtcttcagggactttcaatatcagattttgat

SEQ ID NO: 181733 - DNA, 767 bp, Zea Mays
ggaaaaaatacgggaaatatggacggtaacaggaacggaatcagtaagagttgtttcccgaccgaattaacggttcccgtattttatccggaataatcccgtattcccgtgtgtatcccgcttgcgcttggcccaaatgcgtgtgtggcccaaatgtgtacagtgtgcttggcccaacaaatgtaactctagctggctagcgcttgccgtcacggacgtggtgcatcagtgcatgtgccgtgcggacgtggtgcatcagtgcatgtgacgtggcttctctctcctcctctgcgtgcggcattgccgattgcggctggacggcgaacgggctggttgctgagcgcctgagcggagtagaggaagcgattgctgctagccgattgctgctgcggatggctctgctgttaggcacttgggcatactactctctgctgttcggcactggtagttctaattcctaaactgaataactgatattgttagtctataagtaatagtcgtgatatgttggtctattgggcacttggtctgcaatttttcgtgttaccgattcccgatcgtaatcgactcgttcccgattgaaaatgttccgttcccgatatctcgtaatatcggtttcgtttgtccgtccaacatttccgttcccgtttccgatttcggcaaaaaatacagtaaaggtaatggtttgagcattttcccgaccgttcccgatcgttttcaagcctacgtgcgccccgccttggctccgcccgtgggggacgacgcgg

SEQ ID NO: 181734 - DNA, 429 bp, Zea Mays
agatttaacattttatcatgtgaaatgaagaccactttccctccttgcaacaaaagtgttcgaaaatagaacatggatctgacaacttggataggagctagcaagctaaaacagcagtcatgaaccaaatgctagcacttggtccgacatgcttaactttgttatggaaaaatgtggtagtgaaccaaacttatttcagtaactcagtaagaggccacaatacacaaacagaatatatcaagcaaaaatggttcagtttgtgggcttatctcagaaagtaataaatttctgctatttagcctcatggcagagtaaggttagctttcaaaagttgataacttcattgctgcaaattataatgatgcagaaatataatgtcgtaacgcatagtaaggcgaggcatggcgactgactaccgccttacgctta

SEQ ID NO: 181735 - DNA, 540 bp, Zea Mays
gttagttcagttggtggaaggacccaaactgatagattttgccctagtgcaaaggttcaaataagggggatagagttccccactgatttaatagttatgggtaaccaggatacaactatagatgtcatcctagggatgaattggttaaccaagtaccaagcctgtcttagccgtgacaagagaacattgaagctagtgtccttatcaggagaagaagtgttagtggagttggtcttgtcaggaccaaggaaagggagttgtcaccaagtcaccgcctgtattgaggagattaaaccatcagaagctatcaatgtagtatcagaattcccaggtgtgtttcccgaggagttaccaggtatgccacctgaaaggaaggttgaatttgccatagagcttatactaggcaccacccctatttccaagagagcctatcgagtgtccggaccggaattggtggaactcaagaagcagattgatgagttgttggagaaaggttatatcagactgagtacctcaccttgggcagcctcagtgttgttt

SEQ ID NO: 181736 - DNA, 548 bp, Zea Mays
tggcaggatcacatgcaggcatgtaaaacttcagaggtataattgaagtgggtgtgtggaaggtctggaattacaagccatatgcaatatatgtgatcgacagactttgttaacttacaagacaagaggaaatatcaactatcaatcagatacaacaacagaagataaaagcaccaagctgtgccagtcacggatttacagctgaaagatctgttacaattacttcctattctaacagcccctctttgatcaccccatttgatttaggtagaaattatacgcttcaagttctctaattttctcgccaataatatcttggtaaactcatctgcaacttaaactcgtgaaaaaacaaagtcaattttcagtatttttcttaacatgcattctttaacaagaccacaaccttttactggaagatcacacacgatctcaagtgctccggtcccaaacttcaactctcataggtgcttcacatctacaaacaaattgatcactttatatcattacatgtgtttatctcataccaacacggcaacacatatccc

SEQ ID NO: 181737 - DNA, 752 bp, Zea Mays
tcctcgagatttgtaagaaagaggatgcaacaagtttggtttgtagtctatgtttcaatttctaaggggttttaataccaaaagattttttttgttctagtttataatacaaattagcatgtgattacgaaaacatgggtataagtatatccactttattatgtagggtaaaagatatttttaaagcatatgtaggtttgggtaagaaggagtagggtaagaaaagactccatccaagatttgtggatcttgattcctctagcgatccaacttgatccttgaagacttgagttgatgcttatctctctttttttgacgtggttggtcttctttgacatttcttcttggagttgccatccgagttaagtacatatagttaggataaccggggtacacgaggtaggtaagtttgaaccaagttgtattttgctttcggaacaaatggactaggcagcctgtgatgtaggttatattgttgtttacagacgagttggtataagacattaatttaggttaggttgtgtttgttgaagcagtgtctaacccatatcactagattaactaacctgttaataacttacttttgattggatcatattggattagatggtgatctagattagattggttataactagattagactatatgatctaattaatttgcattagatcatggttgtcaaattagggtggataagtatgcttagacggatccataaagataagatagaatcttttgaggccagttag

SEQ ID NO: 181738 - DNA, 1350 bp, Zea Mays
ttcaccccccctctaggtgctctcactaggcaaattcccccctcgacgccacgattaccctccatagcaaggccacaacaacggcgcaacgataggcaaaggccatgggagaggcccacaacacaaaagaaagctctactttgttttccatggataatacatagggcactcgaccagagaatgcctagtgacaaaggaagccaaggatcgcatggctagagcagtcctcgtaaataaccaaagagccatagcccacacctaccatctccatcaataccaccatcattattatgacaacaaacacccgcaccacccccaacatcaacataactacaaccaaatattcccctagcaacaatggctgcagcaccaagatagattatcactaccactccccgccgccaccccaagcaaaaccaacaaccccctctgcccacaaaacaacaagaagagttcgccaacacaccattcagggggccatctacatgatcataggagggtccagttcagacttcgagaacaagcgatagaaagaagatcaataccggagggtcaatcacgtcggtgtcactggctcagtgtccaaacgaagtggtcccatgtcccctcactttcgatgcaaggtacatcgaccttcgtagcacgcccatgcagatgcactggcaataaactacaacatcgcatgatgatacttaggatgggacttgcataaggtcctcgtcgacaacgacagtcaggctaacatcatattcttacatgccttcgattgcatgggcatcaaccatagcctgctccagacagctgacaactcattatatggtttcagagggaagggatcgtttacgttgggcaaaatagagctaccactttcctttggcaccgccaccaatgcgagggccaagcgagcaaccttcgaagtagtcgatgtggtctacccttacaatgccataatgagaagacgatcaataaacaaactcaaagtagctatccacgaactctacctatgcatgaatatctcaggccctcaaggcgcaataatgatatacagagaccatcaaaccgcccctaatatagaaagggacttcgtcccaaggcaggacaacatgcattgtctcaccaccgaaagggaaagccctaccaaccctcgcaccgaaaaggcagaagcaataaaggctcagattcagagcaatgaagaggccaagaaagtcccactagaagcttcagtgcctaaccagacaatactaataggcgaagacctcaatagaacaaaggaggacaagtggttatcttgtcggagtcttaacaatgacgtcttcgcttggtcagccttatacctcattggtgttagcc

SEQ ID NO: 181739 - DNA, 570 bp, Zea Mays
tagacttgtaataattctaggagcatgtaacaatagacaacctgtacaaacaatgtgcttgacatatcacaaaacataatgatgtaaaaacacagttcaatatgatgaggtctgagatatagagattaagttttgttgcccttttctgcttctgcaagcacttcaaaaacgataagcatcttttctatgaaccatatggttataatggaaatttgttgtattgcggcatatggttcttagagagcacgacagccacatcgaagatctgtttggtggtcgcggagaagggcacgtctttgtcgacccccatgttacgacaatatagccatcactcgtttcttaaattatgtcagcaattttgttcaccttgctctttatagacataaacaatctagacaataactaatcaagaaaacacacctccgagtaagtataacatactgtctaattctataagtattttaccttcagaaaccttagtcaaactcagtgatccaagatctgtcaccttttaagttgccattcatcgttgtttttgctaccttaccgaagtatgatagtgtataaaat

SEQ ID NO: 181740 - DNA, 608 bp, Zea Mays
tgggatgccaaatccgccaattattgacgcacagaggcagagcagagctagcgagggtgataggcagtagtggcgcacagtgcagtggccgcaatgcattgcatgcactggctcacattttcaccaggtgaacctgataggcactgcactaaacactactcctacagcatgtgccattcagttactgcagcagcagttgctgccgcatatcatgcttcacatcttcccctcatttccttcgccccctatgcctacctgctgtctgtcctcttgcctttgaggaatacgcaataatatagttgctcaaatgtaaggtcagatggagatgggatgaggctgcagcagccagcagccagcagcttcttgtttgtcatgtgggttaattctggtcccctgggagggcatgtggggggagggattccttgttacctgcagttacagctctagcacctcccactgaataaaatagaggagggagccatgtgacccaggcctctaattattgttttgctggtgtagcctcaagatgtgtgtgcaatctctggctctaggtctccatgtttaaaaggttctcaagtgggcaatgctattgccttgttcatggtggc

SEQ ID NO: 181741 - DNA, 460 bp, Zea Mays
attaaaagatatcgatgagcgagctattcgttggatcttaggtcgggcaggtttgactgaggacggcaaacttttgcatccagaattggtaggcaaagtttcgacaaaaattcaagaatatgcagaaaagagaaagaagggcgaatttaagcctcggagggagaatgacatactaactgcagcgctaggcaatcctgaacacactggacgggctcggggaatctcttctaagatttcctggagagaggcgtttccagagtatgcggcgtcatataggaaacacgagaagtcgaaaaggacccttgaagagactattgatgaaagggtacaaaaggttattaatgacgtgatgaagaaaatgaagaaaacagaatgcatatcatgtgaactcaagccaggccacatgagtccacctctagtccctagcagcgtaggatctgtgcaagacttcgtatcgggc

SEQ ID NO: 181742 - DNA, 455 bp, Zea Mays
accaagtgagaaccaacaagtcaacttaccaatttttatctgagttattttgtacgctagaatcaccacacacaattaacaaacacatccaccacaataatcggacctggtacatatatgtttatcgatgcgctcttcacacaataatttgctttttaaattagacatcacatgagcaccactaattttacccgcgaccataaccatacacatttagaccacaacaagcaattcatcgtgattacgagcttaaccgaaccatctaactagagcaacgacatagcccgctaaataacatacacgtcggtttgcctgtcactacatacattacaacctctttataaacacacatattcataagtattttcgcacactgaccaaatcatacgaatcgtaaaccactaatctccaaatcgcaatcaccacacatttacttcccaaatcatgaacgcata

SEQ ID NO: 181743 - DNA, 287 bp, Zea Mays
tagtaagaaggatcaacattgtagggccaaatagccaacacctaccatccaagtagctaaaggaccagtggtcgatgagtaaccagaagatcaccctcttcaatggcatctgcaactgcttgtatagtccgatcgagtagagcagatgatgttatgcttcttgaagcagccaaggagaaatcgagttcaagcttaatcacatgtggcttgctcttcccatcagttcaagtgatgcaaagcatggtgataatgactcaagtgacgggatcaaaagattccatccaaac

SEQ ID NO: 181744 - DNA, 603 bp, Zea Mays
gcgatgaacatgccaagtgaagtcaaaggggtgctggcccagatagctgatggcctcccatgaactccggacgcggaaggctacctgcggctgcttactcgagcagctaatcaccttctgcccatcgctcgtcctctgagcgacctacgccacgccatcaacaaccgacgagacgcacggagctccatcaacgcttcgcgggaccgacgacacaaaagtgagataaggcgccgggaggagtatgaccgggatcatggtgtcgcggcccgaagtcgcgccacctgagttgagtcggctgtggcctccactagtggcccgatctggggacggttgagacgacacactaccagctcccctcctcgggaccgacctcacgaacgccggcaggaagacacatgcggggtctctacgcttactccgcgtctccgggccattgagtggccccacaacttcaaagtctccaacgtcgacaagtacgagcccaagaaggacccggggggctggttggccatctacacaaccgccgcccgggccgctggggcgaaggaagacataatgatagtgtatttgcccatcgtcctagggcaagacgcactgcagtgg

SEQ ID NO: 181745 - DNA, 395 bp, Zea Mays
aatcatatagccggccctggagcaatgcgctttgcgagtaagctatcacttcatggatctcgcacttaaatcctcctttaatcaatctctttattctctcctttaggtccatgagataatagctaagacaataattacctttgggcaaggccgcaggagcaagtacgcttcttgttggaacatggctcatggccttgatggggagtagttggtttgtccaaaaaaatgaaagctccagctaaatccgacagacagacatcagtgtaggctctgtccgtaaaagggcctgatcttgctgctccttacagctcacatgagctgaatagaggcaagccaatgaaccatgccaagcgttcggtttctaggaagaaaaaacgagatattctgaaaagatc

SEQ ID NO: 181746 - DNA, 806 bp, Zea Mays
gtagcactgcctccgaaccatagaccatgaagaagggggtgtttccatgcagagctcgactgggttgagttcttaggctccaaaccacataaggcaactctctgatccactttcctgcgaacttttcattcttgtcgaagactttcttcctgagtgcttccagtatcattccattagccctttccacctgaccgttagctcttgggtgtgctactgatgcatatttgatctggatgctccgttgctcgcagaaatcaaagaattcagagctagtgaagttggatcccaggtcggttatgacgctaatcggtatcccaaatctgaatattatctcttgtatgaattccactgccttagctgaagttagagaagcaatgggtttgtattctatccatttggtgaatttatcgatggcgaccagcacgtgagtatagcctccctgagctttcttgaagggtccaatcatgtccaatccccaacacgcaaatgaccatgttataggtatggtctgcagctgctatgctggtaaatgttgttgctttgacaaaaattggcaagcttcacatctctgaactaactcggctgcatcactctttgccgttggccaatagaaaccggacctgaagactttcccaaccaaagttctggatgctgcgtgtattccacactgtccggcatgaatctcatctagtagctgtctcccagtagtcgaggaaatgcactttatgaggactcatgttgcaccccttctgtacagtgcgccccctatgagggtgtagtgggccgactgtcttgcgatgcgttct

SEQ ID NO: 181747 - DNA, 339 bp, Zea Mays
gggagatcaagcatcaggtttctctactgacaatgtctgcaatcaaggcaataacaaacctattgtcataatgttttttggatgcttagctaagcaattcaaaggtatgtttttaaatagttcaaagcaatgtctacattatttacatagacaaacaatctaataggtgtgttatttgttacataggccaatcatatctaagcggcactgcagcaactacatggtacttcaatccagacattcccgaggcacaggaatactacatcaagtaagacatactaattagaaaattaagaactttaagacactgcgtacttttgatttccccctccacacacg

SEQ ID NO: 181748 - DNA, 563 bp, Zea Mays
ttttctcataattgaaccatagctcgccactgcgttgaggtaatgtaccatcgtaaggtattgtcgggaaaaagattcctaggcccttggggctcaccggtcagagaaagcacatgaggtaagaacctccaaactaccggggaccatccgttaacgaggggtaggggaatcgtctacccaagaagcacccgtccccgaatagaccatgaggcatcgagcccgaggtcatgcatggcggagctacaaagggggctaggcgaaccgaaaggaaaccacccgagtaaattcctcgcctggcccgagactgacccgctataaacggtcgaccgcattaagtacatctgacactgagtcgtaatagagagccgatccgcctcccactcatgacctgcacaaccctttggtcagcagcgcattcatgacctacgagaccctcggcctgtggagcactcatgacttatcaagcctaggtctgagtgcatggaccatccactgggctcgctacacgatgagccacgtcgaggcctaggctatggagccacgtcgaggcctaggctatggag

SEQ ID NO: 181749 - DNA, 620 bp, Zea Mays
ccgggtgtgacaaacgttcccattgacaaagtgtggtatcgttcaaattgaaggtgcgatgagcttcagttactcaacaagactcatggacgacgatcgggaaggtgggcaaagggttaagacactgggtcgacatggagacggcttgcagcgacattcactgacgacaaagtgatgttcttaaggggtcactacagtagagttcgatcgaccaggtcagtgagcaaccgaagatcaaagggattctagaacaagaactagagaatcataaactcacatgagaagctctggccacggtgaggcccattacggcggcgcccatgaccgatttcagagaattccaaaatttgtgagctatggtggatggcagaatgtggttggggtgtgttgggttcgtaacaagggggtagagcagggagagtcttcaatttaaagggatcggcccggctactcatgaatttggacgaagttgagctcacggcggtgacgagatatttctaccatggcaacttcaccatggtgcacgatgggttaacggcccaaagcagtaaccgactacttgacatggttacagatacgtggtgaaatgaccacggcatggcgcaaacgcgagagacggc

SEQ ID NO: 181750 - DNA, 931 bp, Zea Mays
gcttccgcttacaaattggtgctgacactaattctttctccttgtgggcttgtcaaagcaactatttctttagcacattgtatcaccccatgtcaacttttcaaccagtcatatccaagaatcacatcaataacgttggatcctaggaccagtaggttgactagaaaatctattcattgaatcttgagactaacatgggggcataagtatgtggtcttcattgcacctcccagtgtactaataagtaacatctcctttaagaggatattttggtatgttatatttttccacgaatggctcacttagaaatgaatgtgatgctccagaatcaaacaaaactgaagcaggtatggagttgatgagatacataccaagtgctacatttggtgcgtcctgagctgattttgcggtgatatggttaactcttcccttgttctggttttgataacttttaccctgagtgttattacaaataggtgtactctggtctaactgttggttgttgtttttctgaggtgtctgagtgttgcacttgcaattattggcatagtgcctagtttctccgcacttgaagcacccattgggttgaactggggtgatcggactattattcatggccgatgtgttcacggcgtttccttgacgattctgtggatatccgcctgacccttgtccttgctaataatttgttctctactgattgctcctctagcattgctgtcctgaccgttgcatatgttgttgattgtttccaccctaacttgcaaagagaaactgagaaccttgagaattgttgtcatgacgagtgtttctgctggaatgtccctgaaacttccttttatgatcaaataacaccttacttttgctttccaagccaattgctttattgagcagagtctgaaagtttgaaaaattatggctctgcagctga

SEQ ID NO: 181751 - DNA, 553 bp, Zea Mays
aaaaaatattatccacaagaataagagtgaacggtgcagcaaattatcaccgtagcaacgcttgaggagagggggaggggaggaggaagaagcttctggcggctgacgtgcatcacagcgatggacgaagcacctatgggggcacccaggccagcgaggcagcgtttgaggcggcgatggggacgggagaaggaagttcatggcggtcgagttgcgtcgctgcgaatggacaaagcacctaggggagcaccagggccagcgaggccgcgtttgcggcgggggacgaaggcacccggacgatgtgtgaggactggtttcgtcgagcggaatctcgaagcttccgggagagactgaagcaccatggaaggttggctggctaggagatcccggtgaccatcaaagctagatccaacggttgagttttttcgcactgacgtggataccttcaggaaagccgttttgaaccagctttgtaatatagtaaataataatgtatctcggggtaatttaatctgaaaacatatagttttctatgcacaacatggcattgaac

SEQ ID NO: 181752 - DNA, 336 bp, Zea Mays
gcgaagtccgtttcaacagaaaagaaaatcccaccagtcatcggctctgggcgctattggtcgttcacctcctgccgcaaccacctaaccgcgtcgcacgccgccatggccgcgcggaatccgctagctcggctgaccgtccctgcggactataaagccaatgtggccatgggactcgttcgctccataccctcgcacactccccgttcctcgcgccatcatcggagagagagagtgccgtcgccgtggttattttgatgcgcttgcgattggtcggggcacggagtcttgtggcgttcgcgggctccgccagggcttgtggaagccggatagggc

SEQ ID NO: 181753 - DNA, 976 bp, Zea Mays
tagtagtatagatttcttgcttacatgcgttaacaactaacgcaagagctttatcctcgctatatcatgtctcccccgcttccttctcgctacatcctacctcctcccactctcaccacaaaccagacaagtcttatctcttatttgcatgtgtaacaagcaccacgagcgctctcttctcctttctacatcctacctcccccgcttctcgctacaaacccagataagttaaaccttatctcttgcttgcatgcataataaccaccatgaccccatcctcctccgcttctcgctacaaacccagataagatagaccttatcttttgcttgcatgcataataaccaccatgatcccttcctcccctgcttctcgtgctacaaacctagataagatagaccttaccttttgcttgcatgcataataaccaccatgatcccttcctccccgacttcttgctacaaacctagataagatagaccttaccttttgcttgcatgcataataaccaccatgatcccttcctcccccgcttctcgctacaaacccagataagatagaccttacctttttcttgcatgcataataaccaccatgatcccttcctccccccgcttctcgctacaaacctagataagataaaccttatcttttgcttgcatgcataataaccaccgtgaccctttcctcccccttgttgtcgtgttatattaaccttaacctcccatctcttttccgtctttatctccccactcgaattcttcggcaccactatagaggatatactacataccagagtcgtcatagaggatatcgagcatgctatcatgtaggcctctgactcgccgtcatgctatctcgtaggcctctggctcaccgtcatgccccacgcgcctcgctgcctatgtattattcgtttttctataattattgttacttaaattttatcaaatagttatatgttgtcgcaacacatag

SEQ ID NO: 181754 - DNA, 597 bp, Zea Mays
gtcttgttctgcccaaaccaaagtatgtccatggaccctggtgaacccgtgaacctttacccagcctcaatttggccatccccatcgctatccgatcggaacatgttcatcctcttgtccatccgctctgtcaccgtggccaggacattgtagtgcgccgttggtgaaattgatggaggggaaatggtcggggtggatctaattgtgtccctgtcgcttgagagctccagccatggcgtcatctggccggaataggctcgccggagtgcggcgagggctgttcctcgtcgtggactttgctctgcgaaagtatagaacgtggagggccttagtgtaaaccgtcagcgactcactgaaacagtagaagaacctgtctccagatagataaaaccccgaggccctttttgcaaagccgccagggcgcggacgcgcgcgcgggcgttttcccctctggactgggccgcctgggctgaaaccagcccattactattgaagccttttcctttttctttttcagcagagctttggaaatctgttaaaaattgtagaaaaatcctaaaattgtgaaaccaattttcctaggcttgttattttccc

SEQ ID NO: 181755 - DNA, 770 bp, Zea Mays
taagaaaccagaacatgacaacataattaaaacaatattttccctccttccacatgaagggatcgaaggtgacgaggagggagaaataaataagaaaattaatgctaaagctactaggcatgggatgaagatacataagtgaatcaagttttcagcttacaaaaggtcatgcatcatcatatttatgttattacgcatgaagaagatcgagaatataatgacataggaaaccttcaaaatgaggtacattctaaggtctcttaagttgactcaagggcttaaatatgattaatattaggatattctttagtataaagattgtgcagacataggtttgcatgggtcatcaacacctgtagtaatgtcattgtacacctatttatagggtcgaggttacatatatcagaacttagaattacaagaatgccacccctccttcgtgcatgtattttcctcctccttcgtagcctttgttacatgtatcacaactcaggattacaagaatgtccacacctatttatatgagcaattgtgtctttttgtagggattgagtgttgtgcatgtattttcctcctgcttcgtagcctttgttgtcatgtcagaaggaggttacaaaccctttcattcttcatctctacccccttttcagtctgtcgttcactattgtggagccaaaccaagtcgtcgattcatatgatctactcgaagaagccttcatgaaaatggacagagataaaaattatcatcaagtgtggaccttctgccaaag

SEQ ID NO: 181756 - DNA, 287 bp, Zea Mays
tggagatatagtagaactaattaagtgatggaagcaaggaatatgcatctcccagcaaaataattttctcagaacaatagaagtgactcatcattcagtacaccaactgtgaaagcagacgacttacctgttcagcataactagaaaaggatgacgggaaattaagaaccacaagctccaaaaacctaaaagccattaactggatctccacagatagatgggtcgttccattcagaatattagccatcagcaaaaacagtgtactccgcacagatatagtgttatcc

SEQ ID NO: 181757 - DNA, 484 bp, Zea Mays
agctgctgctgacttgcgtcaccgaagtctgaccaccacgtcctgtctacacgaaggctgaaataggaggagaggaggacgatatctacgagtggagtagagagctcaagaggttgcggtctaagtagagagctcgagaggctgcaagaaaggagtcgagtgtgtcactctatgcttctgtgaaaatgagtacagaggaggctgcgaagaagacagaaattgatggtagtggtttaggagggattacaaagagtgagatgatgagtcaaatgagaagtatgatccaagagctcatggggttagggttgattggtgctaaggccaatacatgtacatctgagttgaagttggaacttgtgcctaatgctgtgaagttagaaggtagtaagaattacctaagctggtctagaagagtgcgtgtactcctaggaggcaagggagtggagcattatttggaggagacatgtgttgagccgattgataa

SEQ ID NO: 181758 - DNA, 835 bp, Zea Mays
ggctacacatacctctcagttggattggagcacaagatccacggtccacctgccgagctcgccaattatactgggccgaccttccatgcattgggcttttctgtcagcccatctaccgcaattcgttcagacgttcacggcccatcctggtgtccgtcctcttccagggggagaaattccggggagacgggagcggcgaggttggcgcgcgccgatacggcggcggaattccggcgaccggctcaacgatccatagctttctttttgtaatctgctccgccagccgaagcaccgggcgttgtcgctcaacctaaccatggcgtcaacctcctctccccaccggaagttgctccactccgtaaacctctctctgccccgcacccgataaacccctcccatttccgatctcaattccaaactacacctcctaacagaattttccgcgcctctgtttcagctggtgtactgggcggtgcagcgctgccggatgtcggagttgccgtgccggctcacggtctccctcaagcgccccgccgaacccgccagctccccgccgctgcgcgtctccggtaacaaagtctgcggcggcgttccatccttaattccgattattacgttgccgtgtaacattagtttaacgcaaacatttggtggactatcgcagtttcggacacgggggtggggagcaaactggaggagttcctggagctcgacgccctggcgcgtgagattcccgtagagagatggggtatgtgatcactgtgatgctcacctgctcgtccagatcaatgcgattagtgattacgacttgacattcgtttataataatgttaat

SEQ ID NO: 181759 - DNA, 386 bp, Zea Mays
atcttgagtgcatagatgcagtccgtgttcttcttcttggcccaaaccacctgccatttcatcatcatctcacctcggtgaataaccacagttcccatgattcaggcggccacatgccatgacacacccgtgcagtaagcgagtagcggtaaggtcctaaccttggagtacaagccgacagagtggtcggcgatgaactgctcctgcggcacggagaaggcgatcacctcagcgacgatgggggaggaagagacagtgataggctgtgttgtgtgattctccacgcccccatcacgtcctcctcaccgtcccgacctaaaaccacaaaatcactgcacaaaagatgaacttcagatcaaatccccacggcaatcccagcgctccac

SEQ ID NO: 181760 - DNA, 470 bp, Zea Mays
caagtttgtttcagtttttcaatttatcaacaacaacaaatgcacttacgggtgttagggaaaattagaagttacacatactctggttacttggttggactacaacctgacctcaatgcaagtactggtacttctgagtggcaatctgatctcaatccttgtcttggacaaagtgcatctgatgatcgtgttcaaggtatcatagtgcaatcatgagcttcgtttgatgctggcctctattggaataacatacctagtcggttgtgctcaatatttgacaggaccattggcctgctaattccttgggatcctggcagagtggcgttagacctccagatgctacatgcctggtgttacaacctgtcaacggtgtgtcacctttccttctatccaagtgcaagagaaagaaaggctttgtccgtcgatgctgcatttgtgtttgcatcacaaaggattctctaggtagttca

SEQ ID NO: 181761 - DNA, 483 bp, Zea Mays
caccgtggaagctccggtgaccccggttgcgccacgctgtagcttgttactgtgcggtagtaatcgtggcccccttaggagtattatccttgcaccgttgcaccggtgaacgccacggtcacagccacccgtattcttccctatctccggccgccagcacgccgtaatcaaattgagagccaccgcccccggagcctataaattaagtgcaccatcggcttcgttatgtattcaagcagctagcgcacgcacccgtacctcagatcctccaccagagagctccaatttctcatttcccaaactcactcaagaacaccgctcggattggcctcaccatggtcagcgacctctaggtctgttcatgccccctgctatcttgtttcaacattcttgtgtgcccctgatactccctgaccaacccaattaagctagagtccctaggatcgccgggaacacgtgtgaatatccgcgatacccgctgtc

SEQ ID NO: 181762 - DNA, 674 bp, Zea Mays
ctcgattttctcctcttcggaatttcttcatcttctttcaccattctagcagcctatctgctcagaacgctgacaatcctttttcttttttgcccttcggcacccttgttcaatcactcataatctggatattcgaagttcagggcatccatcacccgattcaaccttcgcttcggtcttgtgccgaaggctgcaatcatcagctgatcttcttttttagtgtaatttcccaaaatttcgttgcacatggtttctatcatttctaaccattcttgacatggccctttgaattgtttctcgaatttgaacttataaggtagtcgcacaagttctttcttctcctttgtcccctttagcttcggcatgttccattcactcagcgtcgggaacaccctataggccagatattcttggactagatctctggtcccgatctgctcggctaccacccggaattctgcaacagcttgttggcatggtgaccctggctccatacgacacagcggcctagtcagcccgaagcttaagctcagagggctcagtactagcgtcttgagcttctccctcttcttctcatcggccttcacataaaaccactcatttttccaaccagttggccacttggtctgatagctaaccaccagagtcttcatatctttgtggtaggcgaagtt

SEQ ID NO: 181763 - DNA, 594 bp, Zea Mays
gcaaactacagtgatgctggaaacatcgtggagcaaactcttggtgccattaggatggtttgtcctactagctagcaaacacttatttttgttttgtctattcatttactatcatcaccagtaacttcctgatatatatcctgcttacctggtttatctgtccatgtttatctgaaggttgtttcattcaatggcgttcataagaaaggtgtgccggtcttctctgtaagaaggtgatgtaaatgcccttggactcggttctgtaatggcaatcttattttcaagttatggcttggctgtttggtatggatctaagctgatagtcgagcgaggttacaatggtggcatggtcatttctgttatcatgtctgtcatgatcggagcaatgtaagttttctgttatcatttaaaattttcttaaacgaacaatggcaatgacaatgacaataagtgagcaatatatgtttctgtgtggacgagcctcgactccatcacatgacagtgactgtatctatcttctgcctattcaaatgtaaagtgtactatttgcgcttccaaggaaaacatctgcttaacttctaataccaaataccc

SEQ ID NO: 181764 - DNA, 854 bp, Zea Mays
actgcctctgacccatagaccatgaagaaaggagtgtttccatgcagagctcggctaggttgagttcttaggctccaaacgacgtagggcagttcccttatccattttcctgcgaacttttcatttttatcgaagacctttttcctgagtgcctccaatatcatctcgttagctcgttcaacctgcctgttggctcttgggtgtgctaccgaagcatacttgatctgaatgctcttttgctcgcagaaatcgaagaactctgaacttgtgaagttggatcctaggttagttatgatactgttcggtattccgaatctgaatattatgtcttgtatgaattccacggccttggctgaggttaaagaagcaatgggtttgaagtctatccatttagtgaatttgtcgattgctaccagtacatgagtgtatcctccttgagctttcttgaaaggtccaatcatatccagtccccagcatgcgaatggccaagttactggtatggtctgcagttgctctgctggtagatgttgttgctttgacaagtactggcaagctttgcacctctgaactaactcggctgcatcgcttttcgctgttggccaatagaatcccgacctgaagatcttcccgactagtgtcttggatgctgcgtgtattccacattgcccggcatggacctcatctagaagttgcttccccgtagatgagagaatgcatttcatgaggacaccagatgcgcctcttctgtatagtgtctccccaatgagtgtgtagtgagctgactgtctaacgatgcgctcggctgtatttttgtcatctggttcctattcattctttatatatctgatgatcgg

SEQ ID NO: 181765 - DNA, 767 bp, Zea Mays
gtattttgtcaccatgacaagacaatcaaacatttattcttccaatgcaattttaccagttctgtatggtcagtcatccaaacgacttccaatttttaccctccgagtagtgttgttaatatgtttggtaactggctacaagggatagataacaagcataggattctcagttgggtgggagcgatggccttgatatggtcgctttagctatgtagagatgatttggtttttaatggtaaaagttcttctcctctgccagtcatttactggtgtacttctttgctccgtttgtggctaccattatggtgtatggaaaatagagagttgtttatggaggtgtgtacacgattggagcagatggtgagggatatttttatccggctggtcagacgacacagaggttggctgtagagcagcaaaagaggaagaatgacgaggagaagaagcgagctcgcgagaaaaaggtggcttgcaatgctctcgagaggcgccaccgagcgcgagagagggagggggtgccactggagccattcccaagcacgatctccgccgccgccgacgatgatgacgacgatgaggggatggagatccggcttggcttcagtcccaacgttaggctctggtccgaaccatcctcaatgggtctgtacgttggtccggacgcgccggtgctcgggctcgagatgttagcacctttgcctgagatgcggacgcctgttgtgccggagtctatccccacagtcgaggaggaggaggttgtggagcgg

SEQ ID NO: 181766 - DNA, 547 bp, Zea Mays
gtgatgatctacttggagcatactctaaggccgaagataatgctttgtccgcagcatttggaggtcggggtaagaaaagattaaataaggtattcgatgctattggcttcgtatatcctgattaccgctattcgctgcgagggcaagggaagagaaagactgccgcttcggccaccacaattgtgccgaagggcaaaaagttgaaggttttgacccacccgccacgatacattgaaccgaacaaagtacctgaacttggcgaagggccctcttcaactgccgaaacaaggaaaactgcttcgattatgcagagtgttgaagagctgactgtaaatgctgaaggtgcctacagtcgggccagctgaagcaaaagatgataaggccgaagagccacaggtggagaaggtagtacaaaagctagaaatcctgagtccaggagtagaggcaaaactatcgaagatgcaaaaggcttctgccgcaactcccaagaggagaatggctaacatgctggatgctgtgctggagactacaaaggcttcgagccctg

SEQ ID NO: 181767 - DNA, 439 bp, Zea Mays
ttcaaaaaaattagcaggctccaaatttggctattcttgagatcgaataattctaaatttggtgaaactttcatgagtaacttgataaatggagatatacgtgatgaagaaatcgaaattttcactgacgatcgaaacttaggacaaatctctcaacatgacacgaaatagacaacaggggtgtcacaccaccacatagagataaacatcgtgaagtcatgagccacaagccacccactttttccagctccctagatccactacaagctaatgactggttagaaaaatgatcaacattgaccaatgcaccgacatagagaaggtactatatgcttcgagtcgcctcaccatccccgttgcagactgttgggatgctcattacgcagcacatgctactgttgacaccatttcttgggcagaattctccaccaacttttgc

SEQ ID NO: 181768 - DNA, 615 bp, Zea Mays
ctctatggcacgcgtgcgccgctcggccctgtgtcttccccgcgccgccgcgcctagtgccggtcgagctacgcctggcccctcgcgcgaccccgctggcccctcgcctctctctgagctagaaaccgacaccggctcttcctctccctccccactaccctctccttcaagccggtaacggccatggttatggccaacgccattaatggcgttttgacgaccaccaccgtctctccctctccctgactctccctctccctccctataaagccaatgttgagcccatggaaccggccttctgcagccgatatcgctcctccctctcctctctttttcctcgccgagccacgcacgtcgttcacctcccgagctcaccgttcgccggagtctctccccgaccgcgccctacctagctgcgccgctcgtcggagtcgcgccctacccagtcggcccctgcttcccgtctgccaccgtccatcccactccccccctcaccgagccccttcctacgcacgagaccgagcccaaggtagaagatgaagcttttttacattttagcccctacgcttgagtaaaattaattccgaaatattcaattcagaaactattaaaaag

SEQ ID NO: 181769 - DNA, 425 bp, Zea Mays
cttctggagctaggggctgacctttcgggctcacatctgagattttatatgtcttgtcaggaaacttgttcaatcccctatcacctcttttccggtcgctctgtgtccttttccttgacctctcggtggttttatcggtaggtaccggtgcgtcttcgtcttggttcagccccggtgcgtcttggtaatgtgccacaacttcatcaagtatcgcacaatattgagacaagatctcctattcatgtgtaatagacattgtgaaatcaactaattaggtatacacatacgaaactaaagatgtgtactttacctcacactcttgtggatgataatccgggtcacgatgcaattgacgccgagcggcccgatctatgctaggacaggggtcggtaggcgtttcatatccttcatcacttgaatgttct

SEQ ID NO: 181770 - DNA, 1114 bp, Zea Mays
attagaaaagcttgagactgggtttctacatacatgaatttataataaggaaaactttatatcagttatctgaatgaaacatctgagatgcaaagtaggttgttcctctttaagattggcacatgctcagctggtgtcaatggtggccccatcaatcttaaataaaatacagttcattttctattcaaaataaaaatgactggccaacatactgcaactgcaattcatttgatggccccccatttcacattctagatcataattgacaactgaatcagctttcattcacatgtcaagtgcactgcacacaaccaacctggcaagatagtgaataactcaacctatcctagagtatcctctactggccatggatgccattaaatcataattgttgatctaatcacaatcttggctacaaagcccatctgcccttgactgcctattagacaaaaggcctcccacaggaattagtccggaacttattgttcacatagtaaggttgcagctactcaaagaattcttcgttattcaagtggctgcaataacttatccaagggggtgtgatctgtatgtctgatgagggctattaaaccatccaaagttttatatacctctttccttttcttgtgccttgtgtctttagccaaaaactcatgtacctcatttcctacctgaatcaagctactaccaggtgttttctcaactccgcaatcacgcattgttctgcgagcatccatcacactgtcccaccttccctctagggcactacaatttgaaaccaacacttgataactagaattaaaaggttccatttcaactatctttgtgctgacatactctgacaactctgcatcaccatgcgtaatgcaagaactaagcaaagttacccaaatgacaaccccaggcttaagaggcatgctttcaataaatcgaactgcctcttgtaacttaccagctcgaccaagtaggtccactatgcatccatagtgctccattcttggaacaatgcgacagtactcaaccatttgattaaagatgctccaaccttcttgcaacaaacctccatgagcacaagcaccaagtgcagcaacaaagactgtatcatccagtgtga

SEQ ID NO: 181771 - DNA, 980 bp, Zea Mays
gatctgatctagctgtgaccgaggtcacaactggattgtaatcagcatcaaggccattgcagatatgcgccaccacttcttcatcatctagggccttgccgacagcagccatttcatctgcaaaacctttcatcttggcagcataatctgtgatcgacatggtacctttcttcgtagtggcaagggcaagcctcacattcattgtcttggcgcgagtctgcgcagagtacattttctccacggccgaccatgcttgtgccgccgtctgggcagcgacgatctgcgcctgaacttccttcccaatgtttgagagaatgagtccgaggatctgttgatccagagcataccatgtctcaaacgcagggttcggattggtgacggctgtgccgtccgccgccttctcgacgacctcagcatcagggggctcggtcttgccgttgatgtgcccctcgtagcgagcaccacggatgacggcgaggatctgcgctttccatatcgcatgattggtcttggataacttttcggtcacctggaaaacgaagaagggattggtggcgatgcttgaacccgtcgccatggaacactaggctctgattaccatgtgagaatttcagaggtgcttggaaggtggaaacgccggagacagacgtgttgcgtgttgatttttctgagtggctggaaaaggcccaaccgtggcttacatagaggatgggaggagatgattgaggagataaaatagaaacaaactatttctttcttttacaattcctaactaccatatctcctggccttttctatctttggtttacatattctaacaacatgtacatcgatccttgcagtcccatcagcatcgtgacagccatagatgatagatagatacatacacataaaccgacggcacccagtcgacgggggaggaggaaacacgggtagcgtgcgtagccgtagcccgtagacggcagctgtgtgggtctctc

SEQ ID NO: 181772 - DNA, 439 bp, Zea Mays
gagaaccaccaagtcacagagaacagagagaaatcgagagaaggagagaggtttagagtgagagagttgagccgccacaagcttcatgggtcggagcctctgccgtgtcctcggtcgggatcttggagttccatcacgttacagggaggttgtaacaccctcgccctgggatttggggggctggtgttcccagggtactcgtcgcgcgcgtgctctgtcgtgaagccgtcgtgcgccatgggcagatatctaagctgcgtgattcacagtgagtcctccccatttctattcaccttgttcccagcatagcattgaaccgcttgggtatgtgtttggggtgctgatgcaccagggcacgtaacgccggtaatggttccaccgtgggtggggcggcggcgccgtcgtgtgtcgatgttgaatgggggggaaagcctctggc

SEQ ID NO: 181773 - DNA, 917 bp, Zea Mays
cagagatctggatgtgttgccacagaaatttggaagaaatccggccataaactatggctgtcaggcttactaatgaagcagtgccatggtacagtgtccaaaatagaccaggccgccagcgcggcaacctcaccgccggcgacctccctatgcaaagattcgtgccatcaccggcgtgactcgtggccaaatcaactggatagcacttggagatcatcgccgtggataactccggccagtaaagtattccggccaccgtacaagcgttcaccgcggcggaattggataagtacaccgatgaccgccgcttctcggccttgcaccgcgtgtccatgcacttccaccgcatcgccgtgacctcctctcgctccccgttgatcgccggagtaattgccatggcatcagacacgaattcactgcgccagtgaacttcccctttctctgaccgccgcgcgtctcgcccaaattcatggccaccgctcactaagggtataaattgaccccgccgcgagcttcgtaaggcagtgaagtatccagccaccgctaattagccacgatcgttcgtcagagctcgagaatttcttgtttcccccaaactggtctccgccaccgcgaaaaacagctcaaccgcggccagcccaactcaggttagttctagtctctctattgcttgttctagtgtccctagaccctcctcaagctctataaccccttcaattgaactggaccaccacccatcgtcgggaacacgagcaagtgtccataacctttgctgtcctcgtgggcagagcagaatgggtcaccaatcgtgcaattaacttaggggaaatgctcggagggggtctgatttggtgtctgtcgctcgagagcgccagtccttgtgtaatccggccggtctaacctcgccggtgatcgga

SEQ ID NO: 181774 - DNA, 780 bp, Zea Mays
gttgattgccggagcttgatgggtagcgggtgcgggacccgtgctggtcgtggcggtgagtatggttcggacgggattgggttggagaacttggtgttggtgcaaaacgaggacgtggagatgcaggaggctggacgtgttcttcctcctcaagctcctccgcttgaggactcaatcatgcagagagtcgtggctctgcagaaggagattgtgacagtggaatctgtcttggcggcccggcgggtggcgaaggatttgcaggacctttgcgttgagtccaggaatgctgcaggagtgcttagcttagtacagccgtgggaagctgacgatgacactctgagggtcttgctttccaatttagtgcttgaggaagatggggtggatggaaaaggaccagcacttgttctgtgttctgttttcttaccacagttactggagcttcaaagaccagcttcatccgttctcctttccactgcattgggtctctgcaagcgccacccagctgcagcactggaagctgtactctttccactggttcttagaaagggcggcctaaatgttccccagtgtgatgtgttaacacgtattatcaaggaatgcatgcatccactgcaagttactgctttctgccataggctgctttcaggaaaggagcaagagaggaaaccaatctgtatgcctcagcatatggagaatatcggtactcatttggtgtggacggaatctctgtttgcactattttacaacattcttagtcaagatatttacttgacaccaagc

SEQ ID NO: 181775 - DNA, 589 bp, Zea Mays
ttcatcgttggtgtaggttagagtagattgaaaatataagttatgcgacatgttattgttgaagataagatgtacaaataatcagtttggtgttccactcgtctagtcgatagttgttataaatatttgcgccaaaacttggtcataagagtgtagtgggcatgtggtgttggttggatgtgataagtagattagaagtgtgggtctgtcgaagcactgtgatgtcgatcgtgtatatcgaagtacattgtagtggtaattgcgttaagttaatcagtagtgtctcgagtgcacgccacaacatggttgtatgcgagataagataatataaggtgcgctcgacatgaatgttcgatcgatataagtagaaattgttttggcttaactagagaggtggtgacatgccaaagtagtcaccgcttcctctacatttataagtcgagtcgtgtcgatgcgcattatgtgttccttaaattgtgcttcacatatagtgtatgatggtgtttatgacttgaatagatgtcttcgagtgaactaataggttcctaaggaaattaggtgtaaggtgtttatagtgacgctttatccc

SEQ ID NO: 181776 - DNA, 770 bp, Zea Mays
ccactttcctatcggctttcgacctcggttgtctacaagaagcgacgacgacctcacctccatttcgtcgcacggtcaggacggtgacggtagcagcttcattcttccccatcggtgacgacagcatcttccttcttccccatcgtatgaacaggcgacgggcgacgagacggaaggtacgaagcttcgttcttccccatcatagtggcttattgtatcgcattccacttccccacttgtacattgacatggatctaggtaggcgcggagctaggagatggcattgattttagtgagtttattatatgtttctgttaagttgaatcatgtacttttaaaacatttctcacatgacgataatgtggatgattttcatcgggtcaacaagatagggacccaatagatcgtggttcaataggtgattttcatcgggggaacttctgatgcaaaatgtgccttctggtcatcgggggaattcatcctagtgcaccttgttctggtatgagagcttgatgcaaaatgtggcttgttccaataggcacacaacatatgttggttcaaccggtttcaattgctctgaagttccatcaaatgtctgtttgtaccacttaattattgttattcatacatgggcgagttcatcgaggatgagaacacaaggtacactaggaccatatgtcgccatttcttcaaccaacaattccttgctgcctcagcagtcattcaggtgaaccaagaagatgttgggtcctctcgacatcgtggctctg

SEQ ID NO: 181777 - DNA, 619 bp, Zea Mays
atttttcttagttgagttgttggatgaagtatagtgacattggttaaccaagtattgtgttgttgtgctatcagtgctctttgtggagcttttggcatttcttcaatgaactgtgccgcgcagaatgttattggcttcttgttggctttattgctccattagttctgcagactttctcccttttgtggggtgcaaagaatgttagattacatgattatattttcatgatggcaagaacaaggtttaggaagattaggagtttcaatagaactacttgtttcgtggtgctttgaggtgaggtgtttgatcttcttatacattcatctggtgtggatgtttcaccatttaattaaaatgaattgttgaagttggtaagggttgtgcttagtgcatattacccctttataaaagagtgttgttttaagacattgatgttgatgtatagctgcatctaaattcgatggtgtgaaattgtagtgttgatgacatctatgacttgctttgagcttctttgcatgttatttcatgcttgatgtcaggttgtgtagctttcttagacacttagtccaaggtagaagttcttatgttaattaagaccaaatggacccatgttttgaat

SEQ ID NO: 181778 - DNA, 811 bp, Zea Mays
tgcttctgcagcatgcacgaacttctgtacgagacgaaggccacagggaaagaacaatatcacaacaactttggttgttatggatttatggcccgtcccaacgcaaattacccagtgccaacatttcggaaaaggtggccaggaaattggatggaggaatggttttatgtgaagaacgacttggtggcgagggaggatatcaaggaggttattatgcgtccaatttggtcccgcttcagcctccgaaggccgaagattgaaattgacgaagccgccgaagcaagtcagaaagcatttggtactgtctgcttctttattggtacgagagatttaattcaagagcacatagcatttagagtatggccgcttgtagagagctgggagatgccgaaggagaccatcaccgaatctagtgaaggtgaactggtccggctgaagtacacattcatatatggggataaattcgatgaaccaaacaatgactggctaaaatgtatcgaagctacaagcgatgaactgcttggatcatattccaaggcggaagacaatgcattatccacagccttcggaggccaaggaaaaaagaggttgaacagagtttttgatgccattggtttcgtttaccccgactaccgctatccgctgcgaggacggggaaagaagaggaaaactgctgcttcggccacttcagatgagcctgcgccgaagggcaaaaagttgaaggtccttacccaccggccacgctatattgaaccggtcgtggtacctgagtttggcggggagtcttcttcagctgctgacccgaaagaac

SEQ ID NO: 181779 - DNA, 504 bp, Zea Mays
tgcttgggtgagcaaattcctcgctagagttaggacccaagcaccacgccgccatgtaccgtggtcagcgtcaccgcctcatctaaagcacaggtgagtgggtactgtcgattcgccatgatctcctctgtctatagcatcatcggaatcggtgttttaccgaccgagagcgaggagagggtgagaagtgaccatggcatcgccgtcgacatgtggggccactgttggtgttgttggaataagaaggagaaatcgggttcgttcgattcacaacaggcgggtaggattagatctggggtggtaaacatcgtgcggcattgatgctctgatggtcggtcacgattatatcctggcataccggtttggtatgtggagtactagccatccgatggggatcaaaaggacgtagttcgatcttgcgtgaattaaatctcgactgcagatcgctaatccattggctgaaatcacacaccgattgggttaaagtgtagatctaatttgtgc

SEQ ID NO: 181780 - DNA, 786 bp, Zea Mays
gtgtttctagtagtctaaatggcccaactaaaacctgcaaagacaaaataagcaatttaactggtgaaggcccttgccctatagccccacaccagaaaaatgatcaactagtcttggacacgtatcaaggttaaacaccaccttaataatgccccaacttagtttagccagtaaacacccaaagaaggtgattcatcgattctggccccccacgaacacaacatctgtcactaactttccacccattttgatgatcccagccagcctactcataacccccatcagatataaacctataaagagatttattagagaagtggcttttattttccaagccccaaaacataatacctatagaatccatctccaaataaaccacattcaaatcctctagcatctccttccataactcaaactctctcaaggagagggctcttcaaagtctacatgccattctccttgtccccaaaaaaattatccagtgtacaatcaatgcctctgactaacatgtacaactcttaatcagatatccttaggggaagattgtgaaagcatcgatctttccaaaactgatagctaaaaccaacttcaactttgaaaatagcaccccacttgaaaagttgtttcacttcaagtagaccctaccaaaactgagaactccccttaactgaagatgcaaataaatgacatccttccatgtacttcctgataattatttcaatccacttaacaaataactattattcataattcttatactgatagtccaaactcccttaattcttg

SEQ ID NO: 181781 - DNA, 1092 bp, Zea Mays
gctccgctggttctagagctaccagtattggtagggacacctggtgctgcttcaactcccggaaggcttgttccgccccttcggtccaagagaaaggcccggacttccgcaggagcttgaagaaaggtagcgctctcttagccagcctcgaaatgaagcaactaagggcggctaatgaccccataagcttctagacgtccttgatacggactggaggcctcatcgcctcgattgctttgattttcactgagtttgcttcaatgccccggtacgaaaccaggaaccctagcaacttcccagcggagacaccaaagacgcatttgtccgggttcagcttcgtacgggttgcccgcagcttgtcgaagaccaaggttaagtcttccactagggtcgaccctctcttagtcttgaccacaatgtcatcgacgtagacttccactttgtccctaatcaggtccccgaaagtcttactcatcgcccgcacaaatgttggcagggcgtttttcagatcgtaaggcataacaacatagcagtaaagcccatccactgttacgaaagcggtatgcttcctatcttccctagacatctggatttgatggaaactagagtaagcatctaagaatgacaataggtcgcacccggaggtagaatccacgatttggtctatacgtggaagtgggtacgggtccttagggcaggccttattcaggctggtgtagtcgatgcacatccaaagcttcccattcgccttggggacaatgactgggttggccagccacaccgggtgatgaacctcttcgatgaagccagcgtctagcagcttctggacctcctttcggatgaagtcatgccgctccacggactgcctgcgaggtttctgtctcactggcctggtgtcggggttgatcttcagatggtgctcgatcacttccctggggatcccaggcatctgcgacggctcccatgcgaacacgtcggcatttgcctggaggaaggcgacgagcgcgagttcctatttttcacccagatctcccgcaatgcgagtagtctgggtggaatccgcagtaagccggatggctttaacagtgacgc

SEQ ID NO: 181782 - DNA, 289 bp, Zea Mays
gttgattttaatgaaaccgaggggctattttgcagttttggctcggcgaaggggtaagctcaattctgggccgcccgatcctatacctacggcccagattagatcataactcgagcgaaccggtacgcagcgtggctcctcagatccagatctgacggtgcacaacacgccatcacccttaatcgccagctccgtccgatcaactgccaacgctccagatcgactctagtgaaccggtacgcacagatccgatctagaccgcacgtctctaatccaacgtccaggctct

SEQ ID NO: 181783 - DNA, 634 bp, Zea Mays
tattccacacaagctctatcttacttccaccaatatgaagggtttcctagagtgggatggtgccctccatgtgaatctttttggtgctggaggcacctctttgtgagattggtgggagtacaacaaaatatagatatggtggagaggaaggagtagatccatgtcatggtgtgaggggaatgttcacatatgccttaggataaatggggtcaccccctccctctaaatgttattgatcgaggctatccttcatgttgccatatgtagaagtttatagtcaagttgcggccttctgcttcctcatctctacctaggtcaatctaggatggttcatgcacactcttgccttggccctcccgtgaggtttgggggacttcagcaactattgttgcttaagaatcccctaatggcttcttcgttagtttcctcttcttccttccactcggtggccaccttcttccctaaatccaaaaccaaggggtttgactttcctcacatggcctagggtccatgattcatgctcatgtagatcctttttttatgtcatggagacttggatggagggtgaagtgcctcatctatgatttttatagccacattgacgtgatttcttcctactttttggcctccatat

SEQ ID NO: 181784 - DNA, 918 bp, Zea Mays
gctgctgtgttctgtatgcgttgacttatcttaaccttttgatgtaaccattagttgagtattgcttaatggcaagtaatgcgtacaaatttggccgtgacaattactgtcatgtgatcatgtttctgttggttttaacgactaaatcttaatatgaagtagttctctcatatcagttctgctacttaacttgatttggcttgctggcttggtagccctagaaaacctactgtctgctttcattgactgtatgactgtacttgttgtttccttcatgttaaatactttagtgttaggatcaacaaacaagtacttgattttacagtggtaaaacaaatcgagaactgactataagaagttgtgttcagttaattaattaagttgcagtagaatgtcctgacgctagttcgatccatcatgcgcatctagctatgtcccccgacgcatgtttatgcaattattctcttgcgagccgtcacatcccgccatcaacctctgacctgaccagccactagaaacggtggtggtgtgctgtctaaccgtgatcctgttaacccatgactcgcttgggtcaagatccagaacgctacaaaacgtggtgttccgtggtccacggcgaggattgtcccgctgcggcatcaagcatcacgtagtggactcggccgagtcgaaagcgaatgatcagtctttgttggctcacggggacgggaccagattttgaatctgcttggattcaactatgaaattcgaggaaaaaacattgtattatatcatactagtaaattggtcacatcctgcccgactctttcaccgatatgtttttatattttaaaaatgttgttttatatatatatctctactacttattaaggctgcaataatagtcggtcattccgcgttctgcccattccgtgttct

SEQ ID NO: 181785 - DNA, 315 bp, Zea Mays
cacagattcaaagacacctgccaagtcgtcgctcgcaaggcattgaggaccctgtgtcagatctatgaagaagaagtggccgacacaccgctcagattctttccgccctttcagagagaccgtcctatttggatggccaggatgcgtgcattggaaggtcagcagctgcttgaggacgaccccacagtcgtgtacctcactgcatacctgctcaccctggatgcccagtatgatttcttggctcggcaccaccgtcagatgattgcccgagcagaagatgcagagaagtgcaaccgtcagctgcatgtggatctc

SEQ ID NO: 181786 - DNA, 784 bp, Zea Mays
cttcaggtgcaatgcacctcgccgtcggtgacccttgcactcggattcatgtcggcgctgtgatttgcgctcggtgacacgcggataacgcatctgggtgaaaagatctttgccatggatgaggtcggggcactgtggctgccctgtgccgtacccccttgcgtcgcgacgtggccacgcggccgtcgcggtgaggatcgcattaacttgagcacaccactctactgaccttgttactacgccgcagtaggtcgcggtagatagcctctatgtcactggggactgagctcagtgagtgccacattgagcggtctacggtgactccttccctttcttaccgtcagctcttctccacccaaattcgtcgtactcgcgatcgctctctataaattgatgccctagtgagcttcgctaggttattacgtgctcaatgcaccagttctcacctccgatcatccaccaccgtgccccaatttgagatttcccccaaatcagttctccgcgccgccgtgagccacagcgtcgtggaccaccgtctctaggtccgctcttgctctccttaccctcgtttcagcacccttgtatgctagggatgcttgttgtcccaaccaactaaactagatcacactagatcgctgggaacacctcgggttgtcctcggtttctgtcgtcttcgtggacagagggatttcgggccagaatcgtgcaattgatggagagattagggtcgccaggggtaggaataggtgtcaaccgagttagggcatcagtcgttgcacatccc

SEQ ID NO: 181787 - DNA, 1000 bp, Zea Mays
gtagtagcgccatgtgtagagcaaatagataagatgtgtagattcagtcataatgaagcttgcttatgattctgcaatttcataattgtggttgcactataaatgttgtttttcccctgatctacgtaattgttggcttctaagtaaaggaaaaaggcattatgggactctttggtggcttgcattagcctgtatctaggcttctgcagtgtacttcgcctgtttggttgtggaaatctttatgcaggcttaaacaatgttcaaagtactagctagtacattgattaggcgatgtagatttacacaagccgatgaacaaaaaaagtggagaaattctcatctctttctaccagtactagaaacataagttctctactaaaacatggatgtgactgcatataacacaatgtaaggaaccaaacacaattgtattagtgcacaatgattacataaatcaatttacaatatctctgacaacaacgaatgaataattaaactaaatctagcgatggttagggtttaggggttggacctttctgacttttgtgcctccttgtgttcaccatcaaggtcgtctgcgatgacccaaatccagcgatggttagggattaggggttggcgagagaaatgtggatggggcgtgttaggtggaaggagcgagagaaatgtggatggcaatgagatagagcggaatgcatcgagtgaagttggcgacgacgtagctcatcgacgcgatgagaggtaagggggcggaggtgaggtacctggtcgaggggcaggtcgtcgacggcggatgtgtcccagcggcggcggtgaggtacctggtcgagggggcaggtcgtcgacagcggtcgtgtccaggcggcgacgattagggttggagaaaatagtgggggagaaagaagaggagtgggggagatagaggataagcgacgtctattttagtgacgacggcgaaacatgttttttggcacccaatgtgtttggcccaatctgaatt

SEQ ID NO: 181788 - DNA, 740 bp, Zea Mays
aaaagaaaagaaaatggagaaagaagctgtgcgggccggctaacctcatttcggcccattacaccccctgacctattcctgcggcccagctcgtgccgcactctcgtgctgtgtatgacacatgggccccataggtcactcccctgcgccttcttcctcgcgcgcatccggcagggagatatcgacaggtcgtcgggatcctgcgcgagcgcaacagaatccgcgggcgtcggggctttgagctacctccgtcgttcgcgtgccctcgataaaccgctcattgacctccgccgctcacgttgattcggcgcgagcagttcaccaatctatcgcggatctcgtggcgtgctccgattcggaatttgggtgtcgttagggaaggcttgtgccgcggatcacgggaagagtccgggtccttgcaacgtccgcgtctctttcccctgcatataagtagcggagccatctcgccttctcatgccgcggctacaccccgtgctcccatcgctggcatagggaggaaatcggaccaccactcccacatctcacgctcgtcgtgatttggagtcgcggggaactaccagacaacgtggatctcgggcgcgtgaatccttggtcggggaaacctcgcgagcttaggcaatcgctcgttggagttcgaccttcaccctgatccaccccacgtcgcggtcagacctcaccgttgttcaatcaccgggaaaaacccctctgttgaatttgct

SEQ ID NO: 181789 - DNA, 286 bp, Zea Mays
tcggcggcggtcggggctccctgtgctatgctctcaccgagatcgggttcccagcaatggggaaaagggatggggaacccgcgattgttttatagggctagggcaagtccgccgaggatattagggtgacgcggattccacggcgagtccgttgagaggcttgcgcgcggcacttgcaacaacctggcgaggatcacgggagggagacgatcccgccaactcggccccgcctgtcagcgttaccgagcgcacgcgtagagaccgacataggtggcccacctgtcgg

SEQ ID NO: 181790 - DNA, 306 bp, Zea Mays
ttgaaaacttcgaaagcctctggcaagctaagcacggacagccctccgttttcgttgtcggcatgtcaaccctctcctcctcctctttctcccgtgcactccatcagcagtgcttcctcgctctaaaaatgggagccgggcactgaggcggaagagcaaggcgcccttcatccattagccagccaaggtaaggagggaaccacccatcctcctcttccacttcaagcatcatcagtgtcgatccgacgttcccagtcaagaatcaatttcgacgatcactattttggtccactgcaaaattgtaaa

SEQ ID NO: 181791 - DNA, 472 bp, Zea Mays
attcatcttttggggtggctctgttcaaatctctaaagtccacacagatcctgatcttccctgtgttcttcttctcaactagtactatattggagacccactccgcatacctgcatggccttatgaaatttgctttcaacagccgatcaacttcttccttaactctgtcatggatgtcgtggttaaatcgtctaggtggctgcttttgtggcctaaacccatgcttaattggtagcctacggtcaaccaactccctactcagccctggcatctcagtataatcccatgcaaaacagtctctaaattctctaagtaaatcacataccttttgcctctgaccagctattaatttagcacttacaaatgttggccttggcaccttaccgtctccaatgtcgacttcctctagttcatcaacagatgagaacccctgtcctaactttccaaggtcatcaaaatcatccaccacctc

SEQ ID NO: 181792 - DNA, 570 bp, Zea Mays
cgaggtttcaaaaatgaatggtcattccagggcccaaactacgccgtggccgaccatccagaacttggagaagtcgtcgagaacgcgcaagccccctacctggcatgccaactataggtgtattgaactagttccaacaagtaaatttatttgtacgtgttccgtggtccggatggtatgcccaataggcacgagatttatactagttcaggtagaacgtatctacatccagtcttcggcggcttgcgctacttacaccttcgttgctcaatgctcgtagtaggggttgtaagcgggcgagagagggaggagctcccaagtctcttatacttggttagacctaatgactatgaatgtggtgctctctaccaagccttggctgtcgtggtggttcgctccttgatttcggtctctatggtcctctgggtctggtcgttcggacgtctgttggccgacctccccctttatataggctaaggtgggggtcggctaccagtagcttctcaaggaaggagctatggtgcgatggtaaaatagggcgttctaccttagtaaagtcgtgcttgtttg

SEQ ID NO: 181793 - DNA, 610 bp, Zea Mays
ggctgtggcagcttcggcaactttcttcgtaggagcaggagtcaaggcttttgtggtctccatgacagcgtctagcatgctagccattctccttctcttgggagttgtggcgggagcctttgtcacctttggcaattctgcctctactggtgggctctgaatttttggcatcatcactgttttttccaattctggctctctggccgcatcatctttggcttaggctagcccgattataagcaccttcgacactacaatcgatccttcagcgctctgagtggagggagcaacttgttttgcttcgacagtggaagaggtcccatcaccaaattcaggcactatgaccgtttcaatatatcgaggtcggtgggtcaaaacctttattttcttgcccttcggcacagcagtggtggccgaagcggcagtttccctcttttttccttgtcttcttaaggggtagcagtaatcaggatatatgaagccaattgcatcaaaaaccatgttcaatcttttcttgccccgacccccgaaggctgaggacaaggcatcatcttcggccctggtatatgtcccaagcaattcgtcgctagtagcttcaatgcatttcaac

SEQ ID NO: 181794 - DNA, 687 bp, Zea Mays
tgcatgttagaccatactggaaagaaggaagcacctgagcaacaaacagggagcaagtagaagttcagtcttttcctcctccgtcgtccccttccatgatccactgtcccctcccctcccctccggtgctcgttcttgccaccttaacactcaaaaagcatcggcaagaatgggatggcatctcgttcccaacgatttcatgctccttttttttttaatctgatttagcggggctctggcgaacgatgtaaaatctatttgttttggtgctccaattcgatggttgcatagaaaattttatgccctagttaaacggtaatctgatgatcagatctcacgttatttggcagaggcaggcaggtaacaacatccttacctctaaaatcgaaaaaaagatcgagtcgatcgaccttgcaaaaaaggacaaatagcataaacatttaaatacaatatactttctaattgcatccacaataatatattttaaatcaaatatttaaaaatattcagttttgaattgtggggccccccaaaaagaaggatcccctccaaaaataagcgtatgctgctatgtgcagagcacacacggtattctttagtaaaaggcgaaagaatagttcgctctgtgcgcactgcgcagctgcgtgcttcaactaggtagccttcctgctccttttattcatctca

SEQ ID NO: 181795 - DNA, 720 bp, Zea Mays
ctcgcaccacaaagacataaaacattccctagtgtgatgaccatccaaaccacatttctggcaaaaaaccctacgcaccaaatcattctcggattttagaatgggaggcgaggggggttttgaggatacatggctgaccggcatcaccgggagtggagacaggaatgtcttctttgatatcaggttttccggatccggacttcaaacgccagctgaggttccgattcttcccccacgactgagaaccttgcggcacctccttcggaccccatcgatccaagttagggtttcgattcttcgaatccatcggagccgacacacctgagcgacccggaagaggccactcctcaccaagcgaaggcggacgaagcggagaggagatccaccccccacagaagctttcgcgcgatgaactcgaaagagaccagaggcgagaaagacgcgaagcaagatggggaaaagagtgcgaacctaagaaatctactggaaaccctaaccgcgtacctgaaagaagccgtccagagcaagccacgccgctctcctgtagctgtgggccgcacgcaaacgcaaccacgcgcacgggacgcggaggagacggcccagaagccacgtctccaacagtacgggccgacaggggacgatggatggcggaaggagaagcatggcgtcgcccgccttttttctttttcctcatccccccttccgcttcccttgcagaag

SEQ ID NO: 181796 - DNA, 479 bp, Zea Mays
atctgcccatggcagctgtgacaaacttgtagctggttggtagctctataactttgctacagagcttggtatgagttaccattgaaaattgagagaaaattcagctccaagattgcctgtcaggcgctctgaatcagttctcgatggtacagtaactgaaacggatgagatctccagcgcgactgtcctcaccgccgacgactcgctccaccgtgattcgtgctgccgacatcatgattcgtgcccagggtggatggatagcgtcgcggggtgaaacatcttcgccgccggtgagctggacgccactccggctagccgcggtacctctcccctttctcaccgcccctcggattagaatctcaccgccgttgtgccttcgccgttgtccgccacgtgtccaagccttgccatcgcaccaccacgattcactttagctccccgttgctcaccggaatagctgccacggcgttgaacacgta

SEQ ID NO: 181797 - DNA, 985 bp, Zea Mays
ggaacaaatcctagctctataccatgtgggaaaccctaaccctagaatagggtggggtgatgtattaatagtttaggagtgttgggccaggcccattacagagggggcgagagggtaattacataggggagagccccaaaccgtaataaccctaataggtattctaacatttgagtttgcccaagtttacaaagtttctattccatactgctgacactgcatttagcacccccctttgattgtgttccaatagtctttataaaacctcccagtgaaaccatcaggccctagggccttatcagaaggaaggtttctgatggtatcccatacttcctgatctgaacaaggggaatccaaatccgagaggtcatgatatggtagtccaagagcctctagatcaatagttctctctgtgaattcagactgtccaatgaggttgttgtagaattggtccaccagagctgttttttcaggatggttaatacagatattttctctatctcagcctggtcaccaaatttttcttttttcggtatctggcatgcatatgaaaaaatttagtgtccgcatccccttcctttagccatgagattcttgatcttaaccttgtcattgttcttctaaaggaggctaacatcaaggactgcttcttgagtttattccttagccataattcagcaggtgtaagagccctatgatcctgggcaatctcaaatttatgcaatagcttctttgccaaagaaagctaggaagccacatgcccgacctgcctgtcactccaactctgtaatcttgtagctgtctccttaattttcctatccaaggtcagaaaaggacaactggaaggctcaacagcgttccatgcagcctgacaacttcctgaaaaccttccatcctggtccaaaaggattcaaagtggaacctcttcttgccaagagtattgtccttaacacctaaaagcagaggcagtgatctgaatcctgag

SEQ ID NO: 181798 - DNA, 680 bp, Zea Mays
aaggctagctagggacatgtcctcgacgtcggacaagttctctatcctggagggaggtagtgctggaggggcttccttcttccgctcagtctggcatccttggatcttggtcttctttcggattttcttcgtgggggcgagcttctttagcttcttatcgtaatccatctccagggttcgataggcttcacgagtgttggcctcttcaccttctgccattttgagactttcttggagggatgccttctccttcttaagttctttgacctgtttctctaagctttccacccgggagtttaggtgggtgcagtgggaggaaaggtcatcatagtggttatcgagggtgtggagatatccggccatgtagatgatggtggggtcatcctcagtaggatctcttcctgacagggcctgaagtcttttcctccaggtaggggtatttttgttgctaggtgggaagtaacgaaggggggtttcaaagacctctctgctgtagttttggcatagcagtcggagggcttttcgggcaatattttggcaagtgtctgggaagcaatgtccggtgaaggtgacttggaaaggaggttggtttgggtggcttcggctttctcccaggtagactgccatagagcacttctcagttccgttctcgcggtattctttccagacgtactccggct

SEQ ID NO: 181799 - DNA, 477 bp, Zea Mays
tgactgtgtttgacaaagtttcaataaagctaccattccagtcccccagatgctcgtcaagcaagcaggaaaagtgttgataattacttgccgtacaaccagggtgtggccgagcactagtgcttttgaggagacaaaaggtccactccatgaacgaacaaaaaaaaaaccacgagaaaggcttcttctcgttggtcgacggtactagtaccgctgctcctgctctttgttctagcagtaacctggccacaaatattgtgcacacaaacaaatacacaaagcccattgttgacgagacgaccgatcgaaagcggcgaaggagagagcctattgttttatggaaccaaggaaggaaggaaggaaagcgaggtagctagctagcaaagatgatggatggtttttgcatcgtgttgtcgtgtgctcgtgcaaggtctcctcggttgcatgcatgcgactgtctgcccccactgtttcgag

SEQ ID NO: 181800 - DNA, 773 bp, Zea Mays
caacggactcagtcatgggcacgacaccgacgcagaagcaccggagggcaccggtctgcggcagagtggcccggcaacgacgctagcctactctggcgatcgattgcgtgagcaacaaggctatgggaatgggaaatcaggggcatggggaggcgagttacctcgagagacagctctggagcgcttgagcgatggcgagaatacagcggggccccgggtcgacggcggcggcaacatggctgcacgtcgaggagtctggtgagcgcgagtagaggggaatagaggcggtgggggaaaagcaagcggtgtcttgagttgctggcgaggaggcggagctcaccgaggcaacgaacgttgtagaggctcgacggtggccgcggaacggtcccgaggtcacggcggacggcgatggtgctccaccagcgcgcacgcggtgctagagaggtgcgagaggtctgcagaggagcggtactgtaacacccctggtgttactatcactaaaacttgagcatcacatcatgagcattggcatatcacatgtttgttacatctagggtgctttcactaggtaaaaatttcaaataagttgtactgatatggcttgatgtgtggttaaccctagggtgaggtgcttaaccctagatttgggcttatggatataagagaagcccaagcctgtgaaaacttcaaaagatatgagaaatgatcataagatatcacctttgatggactttagtgaaaccaaaaccctaaagtgctaaaaaccctgaaaa

SEQ ID NO: 181801 - DNA, 272 bp, Zea Mays
ccgatacttcacgaaaacgtttatatgggagaatatgagtgaagtgtgtgcttggtttgaatttaggcgaagaaagtgaaatttgggcactcggctcggtaacgatcgctcgaaacggggaatttggtgaaattaaagcctggaataacggatgggcgtgaaatttggcgaatatgttactggaggtattgtgaaggtgcctgaaaaatttgggttcaattggagcatttttggctggtttgggcatttcaccgaacacgtggtgtgcggag

SEQ ID NO: 181802 - DNA, 401 bp, Zea Mays
gggagttcggtggctgacgttttcaggtcagtaccgctgaatgtttcttttaggcgaggtttgacgggggtgaaccttgaggcttggtttagattggtgtcgctggtggtggcagttcaggttaatagtgcgaaagatgtgggtgagtgggatttacaccagaataagaagttctcggttatttccatgtatctggcgcttatgtccaatggtcttataagacaaaataatcctctctggaaattgaagttaccgcttaaaattaaggtttttctgtggtatcttggtaggggggtcatcctgactaaagataacttgacgcgtaggaactggaaggggaataagctttgtgtgttttgctctaatagtgaaatgattagacacttgttctttgagtgtca

SEQ ID NO: 181803 - DNA, 964 bp, Zea Mays
taagaaaactctgccaaggaaagacacttgtcccaatcctttccgtagtgtagtgcacatgcccgcaacatgtcttccaaaatctgattcaccctttctggctggccatcggtttggggatggtatgctgagctccgtatcacatgggtcccaagtgattcctgcaattgttcccaaaatcgtgccacaaacggcgctcctcggtctgagactatagtccttggtatcccatgcaaacgaactatctagtcgatgtaaatttccgcatacttctccgtccggtgggtggtatgtactggcaagaaatgagcggtcttggtcaatctgtccacaataacccaaattgaatcatggagcctggaggtgttgggcaaccccacgataaagtccatgcaaatgtcctcccatttccaagatggtatgggaaggggttgtagaggacctgctaccttcaaatgactagctttgatcctttggcaggtgtcacactcagatatatacttggcaatttccctcttcattctggtccaccagtacaaagatctgagatcatggtacatcttgttgctaccagggtgcatggagaacttggaaaggtgagcttcatccagtatcttctttctgagctcagggtccttgggaacaaccaatcgatctccaaaccataaaattcctttactgtcctgatggaagcacttgtatttttctgccttctgcttgagcatgtctttgataacctgaacacctttatccccaatctgtgcctggactatttgctcttgcaatgtgggctccaccgagatataatttaattcaccggaagtaacaacttccaggttcagcttgcacaattcatcacacagggtggtaacccttgcatccatgctcatacaattgcactaggcctttctgctcaaggcatctgccacaacatttgctttgcccggatggtagtgcacctcca

SEQ ID NO: 181804 - DNA, 1129 bp, Zea Mays
gtcattttctgggaagtgcaggggtgttggtgcaaaagatcctaagacacatatcactctgcgcagaggaccgcgggttgaatctctaaacctataaggggttttctgcaaggtggatacgcgaaagggtatcggccgagcacggccgttagatccgcaatcgtcggtccagattagaccgaggtacacttgaacccgagatcgcccacatacgttggatcccaatcctacggtccacggcacactatccatccccttcccccacggccgcacgattatttatcaatggctacgattgatgaaccgaacggaggcctcaagatctaatcctagccgttcacgggcagatcgacggctggtagtgttttccccaatccacagctagcgacggcggcgccgcccacgattcacggcgaacctcgccggtgaaatcccaatcaagtgttccagtgccctaaactccatcccgacaggtgctacgcacgatgggggctaattcaaatacatgggaggagctcataccgtgaatgacgcgatgtagcgccctgcccacggcgcacggcggattaccaactccggcgaggaatttcacccgcgccgaacgcccacagacgcaacgcctttgctcaccacgcccgctacagcctccgcgaccacccggagcttccacgaggcgaatggggccgaggaacgccgatttcgagtagtggctggatcttgcgccgcgctacggctgaaacagttgacggcgaaggcttgtgggggcgaaaggctcaaagggggcgcgcgagatagaggcaggggaagagcgggtcccaggaagagcctttatgggcggccggtcgtgaatggagaggattccggaacgcgaccgccatccacggagttggttgacggggttggagacgaagtccgcgcgcgtgggaggagcccctggccagtgggcccaaccgctcagcgaaacatccgaagctcaggtgcgccgcagcctatgacgcgcgggtcccgcgcgtaagtgatacacgcgcggtggagctgaacgggctgcgcgctgtgaaagtgttgactgggccgaaatgaggggaggggcccaaacagaatagattttgctttcccttttctttttatc

SEQ ID NO: 181805 - DNA, 375 bp, Zea Mays
tacggcgggcagccatttgtggaagtcttcgctaagaattattgtctgcactggcagaagagaaaaataggtgataagatagcccaatttggatcgtgcactttcacgctaaggactgggaagacctcggctgaagttgtcgagttagttccttgtgctaggaataagtggggcaattggtgggacttttggttttatgtagctcccggggatatcgaagggttaccgagtttgccccctgccattctgtgttcacattgttatgtggcatttccacaatttgaagtggcagaagaagatgatgacgaagggggccttcgatatgcggcccgcctgagtagcggacgcgccctggtcgaggaattcattgcctac

SEQ ID NO: 181806 - DNA, 475 bp, Zea Mays
ggtgagtgcggacctgagagcggctagccccgacagggtgattcacggcggcgcagatgatcaatttgggggaaacccaaattcttcggctatggtggctaatcggatatgagagttagtgtcctgggttcgtaataacttggcgaagtagagtggggcatcaatttatagaagctttaggcggtggctccgaatttgggaggagagtggagcttatctccctggtgaggcaatcacgaggctcactatggagcgcatgcgttcaccttgcgaccgtcactatctcgaggatgccacgatcacggcaatgtggtgaatcaggtgactacgtgtcccttgttgcgctcacggcgagcaccggcgacaatattttaccgaccgcgcgggaagtgggtacggcggtgactcagccctagccaagaccttcttccccgagatctttttaaccctcatggttatctactctttatcggca

SEQ ID NO: 181807 - DNA, 555 bp, Zea Mays
aaattgtcaatgtctccacatgttgctatggtgttgcctcagctcgccttatgaacgtctcgacgttttgggtgagatggtacaggtcaccacacttcgtcttacggccctacaacccaaggccattatctctaggtcattgtaaatgcattgttgtcaaatggtagatcccgaccatacacatgagtaactgaattaacgagacacatagagcatctaatatagagttcgatttgttgaagactgcatgcagaaacatggaggtgttcgtgatgcagcttctccgacattatagatggggatctattataggattcgtagttagatttcttaattcgtgttgttggtatctggtctagtgacgtgtgacatggcagttttttctatcttgttttataatatgcagttgtagcttctatggaggcaaaggtcgggtagtttttcccattatctaaaaaatagagtttgatttgttgtgggcaaagatgaagcttcctgttttatataatatacattgtttgttgtagaaaaaatgactcttatatccagcgtgcg

SEQ ID NO: 181808 - DNA, 785 bp, Zea Mays
tgcctatcctcatatgacgcttagcattggtatttgtagattgatgaacattctagtcgtgtgaattgctcgccatagtcattgcgccaccgaggtgccactaacgcgcgtggtagggaccataccatgcttctactctcaataataaggctctggatagcttcgctagagtctcgacattgtgatacatcgaaccaccatgggattagggccctggatccctagattaccttctccggtgaagatcgtcgccgcggaggcttaggcaccgccatggtcaggtgcgcgagcatgggtgatgcgtccacgatcgtcagatccgatagggtcggtccagattgaaatcacgaatacctcttcgtgttagttagctccgactgctggatttttttatcaacggttgtgatagcttaccacttcgggatgacccccatctaatctaatcccttgattctagatcaggcggttgatgtgaacccatacccctttcagtcaccatcttttgcatgagagcccttatgctatttataaaacaacccaccgtccagtctaagtagtaaagtcattgcggttgagtccatttttacgaaaccgaccctcaggtctttgtattaatgcccgctgtccagagactaatgtgtttcataaattcattctgaaaaatcatttctactataaaaacaattcataaatgcttagaaaatccataactttctcgttttaacttcgttccccctttccagttgcgttaacttcataaaaatatttcctacgcactaacaaca

SEQ ID NO: 181809 - DNA, 597 bp, Zea Mays
ttggatgtacgtgttatgtcttgttaccaccacgtgagcggactaaattgactactcaacatgttgagtgtgtttttcttggatacagtcctgaacacaaaggttatcgttgttatgatccatctactcatcgtattcgtatttctagggatgcgagttttaatgaaaattgccccttcttttaaaaccagtccactcacgcctcatatgtccgacagagtccacctcaatcatgtgtcttccctccattcctaatttttcatctgcaccatcatcttctatatccacacctgatatcctcattcccataacaccacctccatgttaccttcaccttactcttccaaaccacctgtcatccaaatctacatttgtcgttcccgctctattcccacggctagtcctgatactgatcatgttccagattcttatactaacaatattgagtctcatgttgtttttaatcagggatatcgtcttcgttatcgtaggaccattgaacctccagatcgctatggttttccgcgagctggtgtggcaattgttgaaccatccacttatcaggaggcttctgggattcctgagtggcagcttgct

SEQ ID NO: 181810 - DNA, 511 bp, Zea Mays
gtcgaaaggatcatgggaatcgtggctaccattggccgagtactcctacaacaatagttaccaaagcagcataaagatggcaccatttgaagcattgtacggaagaaggtgtagaacgcatctcaattgggtcgaagccagagaacgaagattctatggcaacgacttaattgctgaagccgaagaaaaggttcgaattattcgtcagaacatggaaacatcgcagtatcgcaagaagagttatgctgaccaaagacgaagaccactgacatttcaagtcggagattttttgtatcttaaggtatcaccaatgaaaaggcgtgcaaagatttagggcaaagaagaatcttgctccaagatatgtaggaccttatcaggttatcgaacggaagggagaagtggtctacaaaattcaattgcctgaggacatgagcacgacatttcccatgtttcacgtatatcaactaaagaaatgtctcagaatacctgaggagaaagtagaagtcaagga

SEQ ID NO: 181811 - DNA, 468 bp, Zea Mays
atggtttgaagatcgggtgtcaggtgggttgtggtctgaatttggttcagtcatctgaatttcagataaaagtgtcaagtttggagctccttggtggtcaatccctttatttttaggttgtagtttctgtagaaaccttggagaccaatgttgggggagtaattcctagtgagggacatacccttgaaactgcttagaaatgagagaaaacactgcacaaagttgtgctgtcagataaaagagtattgactgttgtgcagtagcctaagtctgaaatatgtgtgtctggttaaactttggagctttgtggtgcttgatctatatggttttggactaaagttattatggaaagttttaagaccatatgttagtgaataagttcctttaagtgtgttgggcgtaaccctacacaaaaagtggtgtaaatactgcccaaagtgggactgtcagtcacacaaactgaatttc

SEQ ID NO: 181812 - DNA, 436 bp, Zea Mays
gtcgccctcaaagcgataaataacaaggagtcactccccgacaaggtggcgcaaattgaggcagccgacctcaataaagatgagatggcgcttgtgatcaaggggcgcaaggacttctccaataaaggaaaatcaagggggaagcgtgcctgcttcaagtgtggtaagttaggtcattttattgcacaatatcccgataatgaaaatgactaggaacaagacaagaaagggaacacgataaaattctactagaagaagaagggtgaggcgcacattggcatggagtaagactcggattgatcatcctccgaatctgatgatgaaatacttgccgcctctgccttcaataagtcaacactcttccccaacaaacgtcacacatgtctcatggataaggaggagttatttactcatggtactcctaagtatacttctt

SEQ ID NO: 181813 - DNA, 577 bp, Zea Mays
ctaagatgaggagggggcctaagcgtttgcctgtttggtgaatttcggattaacataagaggactcgagggattatagttgttcaggccgctgggagcgtaataccctacctccactatatgtatgttgtattgagtgtgtcccttgtaacgctgtgtgccttcccttttatagtttaaggaaggcacatacaaggatgctgagccccgacatgtgggcccaggagcataatggaagaaatacattatgtgaataattattgctgacagcacaccaagatctttactggacgctgtgttgctccctctgtcttagtaacgcatgagtaatcagcgggagtcatgatgactgcagtccatgcagcattgataggcagtaacccttttcttggaaacgcacgagtaatggtgagtcattaccctcactatggtaacgtgtgagtaactgcacggcccacgcaacgtggactgtgtgcgccgcctatcattggaatggacagacgcacgtcttatccgtaatgaatgcaaagacgcgcgtagcccagaggctttatgccaggctctgcccgttggcttac

SEQ ID NO: 181814 - DNA, 501 bp, Zea Mays
ctcaaattttaatttaggcaatccttggataaggtcaagtgacctagcctcctatgccacttccaaagagaagaggaagatcctgccaacaaacatcgagaagggccagaagaatgtgaaaaattagcactgaaaactcgaccaaaaggggaaatctggcaaataagatccccacgggcatccaaaacccgagacaagccctttttaaagcgcacttcatagtcatcctcaaggagttgcgaaactgaaagcagattgaaatgcagattcgagaccaaagcaacatccttgagaataaagctctcgttcacccgaatggtgccacgagaaacaaccttacctcttgacttatccccgaatgtgatgtattccttaccaatcatgtggtcgaggctggagaaccattttgagtttccggtcatgtggcacgaacaaccggaatccatgagccacgtgttctctaggcctctgtcctgcatcaataataagacacggggtgag

SEQ ID NO: 181815 - DNA, 689 bp, Zea Mays
ctggtcaacaagaccctttgaagaaacaacagaatatatggtctgacccctgtcacgtgccagcgcaagagagccccttgccagtcaagccaacaacaagctccattctagaacaaccctcgccaacatgtttgatgggggccgattgtgccatgtgatcatgttggccccatgcccttggtgggtctcgtgccgccatgtgtccttggggtcctgctgggcactagaccccttaggagggctctagactctcctaggaggactccctcaagctcacgctctgccaactactgtatggggctcgggaccctttgttcatgggctccgagaggcccggcctattgcgaggtctagagatgccacatgtccggtcaaaggtcagctcctgatgcaccatgtgcccggtcgcccacgccaaggctggtcaaagagttggtggagttagaagacgtgttgcatccatccaatggaacatgcacgactatggcagcatcattcccacttcctggctatcaaggcccaagttctgtggcatggcaccagtgcgacactatggcggtgtggacgacatgcaccacgacctaccgcgtccctgtagcgacgtgtgcataaacctaccatgtacctactttcttgtagcttatgccacggtatgtatgtcaatgatcatccgagatgtgcaccacaac

SEQ ID NO: 181816 - DNA, 815 bp, Zea Mays
agtatgtgtttaagcttgtccattgcacatgtttgacgtaccatccaagtgttgacggagtgttccattattgacgtactcaatcagaattaggcgttcatcctcgtattccacatacccaagaaactttaccaagttcaaatgctcgacctttgacagcatctggatctcacttctgaactcttcagatagatgcccaccatgcatctgccaaatccagatgttgcatcaaaactttttcttgatttgattgctgcaagtaactcggtggagtaaatatgtacaacatttcttctattgaaggaatattcacctacaaaccttagtagccctctttacagctatgatggatccatccctgagtttcgccttatacaccgtgccaaaattacctaaaccaattttgttttgttcactaaagtttgaagtagcctggcaaatttcctaaaacgagaactgctcttgccaggactttgtttggctgctgtcacctctctgcctggatatattatgtatattattgcttgtgctacttgtcgatgacattctggagactgcaggaaacaattggaaaccatcttaattggactcagattttatttaatagttgagcagtttgattaagaacacatcctcacaaagtatattcagcattgagcagctatgtatgtcttgttttgggccacatatggccatatgggcgctattgagttttgtaacttgcgtaaagcttaacgatcgaccgcaaaagcatgtgaatagaaatgtcagcaatgctaggttgttcttatcagattgggttggtggctgtatgg

SEQ ID NO: 181817 - DNA, 583 bp, Zea Mays
cctaaatattctttgaattgttgcacatatttgatttggtttgaatttgaaacttgaattgaaaaccctagagaaaataaatagaaaaggcaatagaaattccaggaaaatagaaaagtccaattcagcccaggtcggcccatttagcccagcccgccctctgtgtttgacaggcgggtcccgcctgttggtgccaaccagcgcgctcactcctctccctctctctctgcctcgtgggacatagctgtcggcgccgtcccccccccctcgtgccctctttctctctgacccgccgtccccacctgtcagtccatctctaacctctcgcccacgatctcctcgccgtggacgcgcccatgaccacatgttctccgaccacgtccgagcccccgcgccctgctcgcccacctcccctctctcatttgtgccctctgcctagctccctcgccctctctttcgctctgcccgcatgaaccgagagctccgccaccgcccgccaacgcccaccgcctgttccgtggccgctgttgcgcccgtgccctgtccagtgccacagtgagcttcgccttaccatcagctactc

SEQ ID NO: 181818 - DNA, 406 bp, Zea Mays
gacggactcttctgccgaggatgggatatagggaggctaccacacatattcagctctggctccttggtgccctggtctctcactctgagtttgacgtcgtggatttccttatttatgagatcgaggacaccattttggatgggattcgtgctcgtcgacagttgccatatgctcactacttgtgccacatttttgcgcagctgattcagcctcctcggtttcagggcacacttgaggcctcacgccttgtctttggatcctaccgtcctgcgcctgaggctcctgtgccagcttctgctcctatttttgactctcaggccgaggatgctgctcttcgtcagttcgacactcaggatacaacagttgatgatgatgatgatgatgatgattttggggttcctcctcc

SEQ ID NO: 181819 - DNA, 596 bp, Zea Mays
ccgccttcagcaggttcgtcgtagccaccactttgttgagccggttttgattcgggtttcatggcacctgtgcactggattgggaacgcgccggtgatgccgtcgttgtgcgctctacgccgccatgggtgaccagcggattgggggaagaatgcgtgctgctgttggattctaatcaacggtggagattaggcaggagagtaactcttcgtgaaatagatctgggtcgtgtaccttggatcgtgcgtacaagaacggatcgggatcactttaaatctggactgtggatggtcaatccaatggaaccctttagcataccgtttagggcgggtgtgggcgttgatctgcctcgtccgtttttaatctaacggctggcatagcataccgcttcgctttaatggaggatctaattgcgaccgcaaaactcagatccaacggccagtagttgtccatacccattgaccgtgcgcaatttgttaaagagtccctggtttataggatttcaacccgcgctctaccactgtgtaaaagtaattcggtataggcccctggtttttataaagtgcaccctgtgctttccggaaattgtgtccgca

SEQ ID NO: 181820 - DNA, 794 bp, Zea Mays
ggctcttcttttgtgttgttttcctgattctgcaaagacgtcccctctattgacttctgagatgtcaccctttgtttgtctaactcccctttctctgaatctacaatgttgccttcatttgtttgtgtccccatctccttctgtacaacatggaaattattcctcttttagtctaagattgtcatactattctttttcattatggttccttcctagtatagaactgtaaaataccaggtgtttcatcactgcatccattcaacttaatggcttcagaagtaacataaaatcccctaaccgcactattatgaccttctcctgattctaaactattctctattcctcccacagcttggccaacacaatgaggactactgcatgtgacatctgtgataatggttgctctcgagaatgtacttgtgacatgtgtttgatacatcataatgcatagtagcggaaatgatgtctgttttcttcttcgaggtttgtcaagtatgacatatttggatctgaatacttcctttcaactggtatgcttgcacagctacacttcatttcagctcttgcttactcaaattcatgatcatctcatctgttacaccgaactaaatctttaactgcaattactatgttgctctctttgcacaggttacattcgaaagggacctgggatattgccgtacatttattaaccgaaaaactttgttacttacggatttttgtttggtaaccgacctgcatacactacattgctcgctccaatacaacaccaattctttgggtatctgcatcag

SEQ ID NO: 181821 - DNA, 376 bp, Zea Mays
gggtatgcatgaagacatggacaagcaaccagaatggagagaagtgcctgaatatggtcaaacaactgcaggggcaccagtggctcaagaagaggaaaaagaacactttatgacagctgggtgtgatcctgatggagatgagccgataggagcaaatgaagaatggagatacttcaaatttgttgatggtaaaaatgttcaaccagtgaatccagtggatgttcagacaagaaggagggcaagggctattccagaatttgatttagaaagtgtccctgatgatgaggccggtttggtagatgattatgttgtgccccatacaacatatgaccatgagaatccagtaatcaaagagggagacacatttgaagacaag

SEQ ID NO: 181822 - DNA, 776 bp, Zea Mays
gttggcgtctagaggagaagggtggtgctccggcgtcacgcgatggcaaggtcgtggtgatggcctccttctatgagtgcggctttgggcttcccttgcacatccttcgtgcgagggttgttcttttattatgggctagagttgcaaaacattaatccaaacatgatcctccacataacgtgcttcatgacgctatctgaggcctacctcggcatgagccccactggaagctatgggcgcttctgtccagcccgcaggcaactctggccaagccaaccaatcctttgtcggttcgttctacatctagctccggggttctcataaattcttttacctctcgatccctctttcatcctccatccatgattacgaaggtgagtggttctatccccggaaccccagagggagcgtgtctccattcaccaaccggatcccgatgagcaagcccaagtggacttatggcacgaagaagaaactcaagccgaagatcaagctagtgctggatatgattgctctacagtgtagacatggtctttccggcgatagattgatccgcacgttcatagagcgacttcttcaaccgcttgcgacccgctagaggaccatgtgacagtacactgggggcaacgactccgaccgtcattcagccgtgaatctatcgaagggggagctcagggtccacgtccttgctatcacagtaggagtcacatcggatttcctggacgagagtgggccactaccgttcaaccaagtgaggttgtgcgaccaggtaagcc

SEQ ID NO: 181823 - DNA, 524 bp, Zea Mays
gagaatttcatttatatggagttttttgctttggtctaagatacgaaggatgtagtttatggagttatggggaggcttaggctcataatactacaatatggggatatttagcctaggcaagaaaagttttagttcatatgcttgcatgtgataccattttacatcatattaatcttgtctttacatgtgcattctagcaagtagattgcatcgtacatttggtattcaattatttgattgctttggctttgttagacatcctcctttatggtggtgtgtgttatgggcctagtatggcccaacccattagaccatttagtgcttgtatatatattataagtcagatcaattattggatgtgagagaatatttttcctccatcatggtacccaaccacctatcttaagccctcatctcctggtcgttgtcatcgttgccctccatccatggctggtgttccgcctgcccaggctagctcctcctccagtgtcggcgcacttgcccccataccatcctcatcctag

SEQ ID NO: 181824 - DNA, 847 bp, Zea Mays
ttacatacttggtctgatgtagcctttctctaacaactcatcaatctgcttcttgagttccaccaactctggtccggacactcgataagctctcttggaaataggggcggtgcctgggataagctctatggcaaattcaactttcctttcaggtggcatgcctggtaactcttcagggaatacatcagggaattctgacacaatcctaattgcctcaatcggattggactccttgtcatctactgataaatggtgacaagctccttcttcttgttcagataagtacagcttggttactacttcctttccggatggggacactaacttaactgttctcttgtcagaactgacagtggcttgatttctgtttagccagttcatccctaggatgacatctaacccttgagttcacatgactactaggctagcgaggaaggctatcccccttatttcaatccttagattcgaataaatcctatcggactgaacttttcccccaactgaattaactctcaaaggtgggatcattggttctatggggatgttatgtgattctacccaagatgcaaaaacaaaagaatgtgtggcaccagtatcaaataatacttttgctgggtaggattcgactggaaacatacctactgccacgtcctgagcatcctggattgcttcggcctctaggtggttcacctttccacagttgtaggcctgaccacggactcatggtgcttgctgtggcgctccttgtcttgctagggcattgactgctggcggccgatgagctgctttctttggacaattcttcgcccagtgattttgttctccacagtagaagcatgcacgacct

SEQ ID NO: 181825 - DNA, 448 bp, Zea Mays
gtcgaggcgattgtggcggtgcaaagaaagaggaagccatcatgataccacttggtgtgggcggctaacgggataggcgatgtcttgtttggtgtaggcatgcattgacgacttgatgggatggataacgtcccatttggtgtaggcatggcctctacgtggtgcgactcatggtgctctgcccgagccgggagccgtctgccgaacggacagtttctctgctcggggtcataggcgagcagaatttggagcggcgaatcctcccacgccgtggtcatggtgggcccattttttgagcaccactcgtcctccctatgtttgtgtatataaacagaggaaaggtcccttgggttggttacgcttaccgtctcttgtgcccttgcctccattgctccctaaagcattcttgctcttgcactctctacctgtttgagtgctccgcatgctc

SEQ ID NO: 181826 - DNA, 868 bp, Zea Mays
tcccaagtacatgtcgtgatatggttgtattgagataataagttataagtgttgcgtgatatgagactcgatcgatgtagttaatattgaattggcctgtagagaggtggtgacatgctgaagtagtcatcgcttcctctacggttaagtcggagtcctgcgtgatgatgttatttatgggggtgaatgcgtattgaaatattttatgttgtgcaatatgattaggaagatgaaggatagatatgttgtttcggaaatgttagccaatagattcggacaggcgtgatagaggttgagtcacttatgttataaaattgatgctcgacatgttaggtctcctaaaatgtggtgttttaggtgacttgtgtgttatcccattttaagttgagaaaatgtttaagagaagctaattaatttgctcccacccatgttttgagtcgcaatgactaaaatgggttgaatgaacttgagatgtattacaatagctgtgtgtcgtgccggtcatccaaaaatggcgaaaggtggtgtgtgatagtaattgggaaatagtcacgacattagccaactcatgtcaggtaggagttgattgtgttaagtgattgttatatatgtcgtgtcacgaattatgataataataggcaagccggcgtgtatgctgtctagcgggctgtgtcgttgctctagctagccgactcgttagatgactttagttaagcttgtagtcactttaaattacttgttgtagtctaaatgcacatggttatgatcgcgggtaaaaatctatagtgctcatgtggtgtgtaaattaaaatacgaactagtgggtgaaaagcgcgttgatatgcatatatgccgaaattgatgattg

SEQ ID NO: 181827 - DNA, 515 bp, Zea Mays
cttggtaagacgatctattattacccagatagagtcgttccctttttgcgtctagggtagtccggttataaaatccatgcctatctcctcccacttccattcgggcactggaaggggttgcaataggcctgcaggcttctggtgctcggctttcgttcgctggcaagtgtcacaccaggccacatactgtgctatctctttcttcatcactctccaccagtatctggttttgaggtttaggtacatcttggtggttcctaggtggatggagtaggctgagttgtgagcttcatcgagcaggacttctcgtgcctccccttttggtacacatagacggttcttgaaccaaaggactccttgttcatttgtcctgaggtccggaagttgttctttgcgagctttttccataagtcttgctgtctccgagtccaggcgttgagctttgcatatgaggtcttctagcattggtttgacttctaggctgtcgttgtttcccaaacatgcattcagctgag

SEQ ID NO: 181828 - DNA, 786 bp, Zea Mays
tgctcctcatgctctttctctttctgggaatatataagaatatcatcaatgaacactactacgaacttgtcgaggtagtccatgaacacactattcatcaagtacatgaagtaagctggcacatttgtcaaatcaaatgacatgaccgtgaactcatacagtccatacttggtgatgaatgttatcttcggtatatctgagggtcggattctgagctgatggtagcctgacctcagatctatcttcgagaacacactggctcctctcaactgatcaaataaatcttcaattctaagcagggggtacttcttcttgatagtaacctcattcaagaatctgtagtcaatgcacatcctctttgtgacatcctttttctccacaaacagcactggggctgcccaaggcgaggtacttggtctgatgtagcctttctctaacaactcattaatctgcttcttgagttccaccaactctggtccggacactcgataggctctcttggaaataggggtggtgcctggtataagctctatggcgaattcaaccttcctttcaggtggcatacctggtaactcatcgggaaacacatctgggaattctgatactacattaatagcctctgatggtttaatctcctcaatatgggcggtgatttggtgatagcttcctttccttggtccagacaagaccaactccactaacacttcttctcctgataaggacactaacttcaccgttctcttgtcacagctaagactggcttgatacttggttagccaattcatc

SEQ ID NO: 181829 - DNA, 530 bp, Zea Mays
tagtttagtaacatatggaccttatgtgattataatatttaaaccttatgtggttcaaatatatgggctgtatttgagactatgccaccgttgacacaacatgacctaaaagttttttttggacttttctagtatgagaccgtttgacccgaagcatgattggtcctggaccaacccccaactcccagcactaactatagcctatagggccgggccaccgtaaaaggtgaggacaggcagcgcctatgcaactcacaaatgaagtcgctcaagcctaacatttaccttgtgtacgtgtgtaacgacgccattactcagatggagatgctactaataatcggctgtttatgcagagaagatgtatgggtatggcatcaggcatccatcctaaagtcaaccaagaatccaggaccactgccatccacgtcgacatcgtccaccactttgattttttataaaataacaacgccttcccccatccttttcggcaatgcacacccccactttgttttttgttttttcccccttcc

SEQ ID NO: 181830 - DNA, 775 bp, Zea Mays
gtagattagctttgcagtcatgacagactgaatgtaaacagccctgccaacccggttcatcatctgtgctttccaacctaggagcatggaagccaccttatcgatcaacacacggatctggggtcgacacaacttatatagagataaaggaaggcccagataagtgcaataaaacgcagagaactcacagggcagcaagcttttagccaccaccagtacttctgagcaatggatgggaaacaccttgcttttttggacattagtcttgaggcctgatgctgtgccaaataaatgaagactattcagcatcaaatttaaatcaggggggtcaggccgaagaaagatcacagcatcatctgcataaagcgaaatgtggtgttgcaatggttttgagcacaatggttgcaggagatcttcctcaacagccctttgaaccagccatgataaaatgtccatgactaaataaagagcataggcgagaggggatcaccttgcctcagaccccgttggtgcataatacgctctcccggaataccattgactaaaatctgagtagaaaaggtagccaatagcccactgataatatcacaccaaatctgcctaaagcctaacttcttcattacctcaatcaagaaggcccgagaaactgaatcgaatgcttttgtaatgtccaatttgagaagaacgcggggtgcttctgttggtgaagaaaacaggttgtttgttgcactagcatgaagttgtcctctatgaaccgattcttgatgaaagcaga

SEQ ID NO: 181831 - DNA, 581 bp, Zea Mays
cgcccgaccgtgcaccgcgcccacgcctataaagccacctcggatgcgcaacactccactccgcacctcgcctgacttcccaaacccagctcttagatccggcgagctctacgccgcccgcccgagccacccgagcactggccaccgcggccagccattcccgtagacaactagcctcactcgagcccctggatagcttccccgtggagccgtgaagcttttccaagcaagaaccgagaccctgcctcaccggagcagcgggatcaccctcgccggacttcggccgcctgccaccgcgcgtagaccgagctaccaggtacaccattctccaattgctcgcgcctacgacttccctgacctcccgtgaagctccccaactcaatggactgagttattccgccgtggttaggccgggatcctcgacgctgacgagcttccctgcctacgcacgaggtccgaccaactccggccatccccgacgacgacccgcacatcaacgtgaccgctgcaacctcccctacgtcatcgaccacttcaccggagctatctcgccgccgataagccccgccgcccttctctcc

SEQ ID NO: 181832 - DNA, 537 bp, Zea Mays
ctggggaaggctaatgtagtggctgatgcccttagcaggtccagggttccagaggtggccttgtcgttgatcgctgatctgaaccgtttgggaatcgctttgtgttatgtcggtaccgctagcaaggagactcagatgattattcaatcctctctcatggagagagtgtgtgcggctcagcagcaggatcgtctattgcaggaagctcgaaagagggttggtgatggtaaaccacgagagttcaccattgatgagaatgatttggttcgtttcaggggccatctttgtgtgcctcagaaatcagaggtgaagatggatatcttgagagaagctcataaaacaccttacaccgtccatcctggcgaaaccaaaatgtaccgagatttgaagcaaaacttctggtggaagcggatgaaggttgacgtttctaagtatgtggccgcctgtgaagtatgtcagcgcgtgaaggccgagcataagcggcctgctggtttcctgaagccattagaaattccagagtggaaatgggagcatatc

SEQ ID NO: 181833 - DNA, 663 bp, Zea Mays
gctgactctttgatacctcgggaaaaattggaggagtcttctaaaccttgctttacattccgcacttaattcaagcattttacattgtgtatttgtttagcaagtatttgaagtattgtcttagcattgttgtatttctagtattattctcctattgctagttgttggggtgaagttgggctcttgcttaggttttaattattgttgatttttagaaaagcccaattcaccccctcttgggcatcgtgatcctttcacatgtcacctacataaatcttagtcgtcggatattctatgtgcggcttcatcgcttagcaacgctcagctatagtttggaactctcccacgtaccacaccagatgacaagtcgtgatgcttcgagagcttcttccccctccactccttaaaccatgtcatcgtgcaggtgctacctatcgcttggagcatcttcttcttcctactccactcagacaccgacgccttctgtccattcaaagcggcttcgactagaccaccagtccctcccaccagacgccgctgacacgacccacttctaggaactccatactctccctcatcctctcaaacggtaacaccgctgtcgcgtcggcacaggccaaagcactgccccctcctctatgtgttgattccatcggatctcca

SEQ ID NO: 181834 - DNA, 328 bp, Zea Mays
gaagatccggccaaaatccatacttccaccctggatcagcagacttccgtggcttccgggtaggattgctcttcgggtcgtactcaccagccacagaagatggagcttcatttcgagaagacattatgttgtcgctactcgctgcagtcttgagttcgacttcttgacagttcacacttgacaaaaacctgaaagtgtaaaaccagggaaagcaggggaggaggaacatcatttttgggtgttgacacctgagagaaagcaggggaggaggaagcaggggaggacctaccagtctaccatgttgaaatgttgtacatgggccacatgg

SEQ ID NO: 181835 - DNA, 835 bp, Zea Mays
tacaacagtatctacaattgcggaagtaaatgtagtgtgatggttttgaaatttcttcgtattttacggggcatagaggtcgccctaagatgagtaattgcgaacgtgcttgtgttggattaagtaagcgcgagtgtaccgtgccaatttaagtcattactgacttaaaccgactgctccgatagtagggtataatggtcaccccgagttaagtaagcgtgagcatgtcacaccgccttaagccattgccgacttaagtcaattgctccgttagtagggtatagtggtcaccccgagttaagtgagcgtgagcatgtcacatcgccttaagccattgccgacttaagccgattgctccgttagtagggtatagtggtcaccccgagttaagtaagcgtgagcatgtcacactgccttaagtcgttgccgacttaagccgattgctccgttagtagggtatagtggtcaccccgagttaagtaagcgtgtagtttgacagtgaacaatttgagtgtctttgaagtctttttattgatgatatatttcccagtttacagaatacattgtcgtcccaatagcttttgagatatagctaggggtaaaacttcctgagatgttctatgttccatgagttcccaatttctgtgtcgtccatttgagtgagacgatatgatctaggccgagtgacctctgctactatgaatggtccttcccatagtggtgacagtttgtgccgtccctcacccgttaaaattcgacggaggacgaggtctcctactgcgaaggatcgatgccgtatggccttgtcatgatagcgtctcagagtttgctgata

SEQ ID NO: 181836 - DNA, 615 bp, Zea Mays
ttttgcagcatgcatgaacttgtatatgagacgaaggccatgggcaaagaacaatatcataacaactttggctgctacggatttatcgcccgtcccaactcaagctatccggtccctacattccggaaaaggtggcccggagcctagatggaggaatggttttacgtgaacaatgacttgaaggcaagagacgatattaaggaagttattatgcgtcccatttggtcttgcttcggcctccaaaggccgaaggttgaaattgacgaagccgccgaagcatgccagaaggcatttggtactgtctgctttttcattggtacaagagatttaatccaagagcatatagccttcagagtatggccgcttgtagagaactgggacatgccgaaggaaactgtcgccgaatctagtgaagatgagctggtccggctgaagtacaccttcagatatggggataagttcgacgaaccaaacgatgactggttaaaatgcatcgaagtgacatgtgatgaactgcttggatcatattccaaggcagaagataatgcattgtccacagccttcggaggtcgaggaaaaaagagattgaacagagtttttgacgctattggcttc

SEQ ID NO: 181837 - DNA, 573 bp, Zea Mays
gggttgcgtaccatgtgaaggcggtaccagtaagggacaatgaaatggacacggtaggcttccttcagccaattctcctaggtgcgctaagaactggattacgtgctcgtgcatgcttttcccatcttaaccaaaaaattagagaaattcggtatcctagtttcttgcggatatgcaccacgtcaaatcggtgattataaggttttcgatacgactaccccgtacctgacacactaacactgatcttgtctctaaacaacctggctaccccgtccctaatttttccaccacgtctgtcatctggtgaccatacattgagcttgggggtaaaaacttcaggttgctgtcatctggtgaccatacattaagcttaggggtaaaaacttcaggttgctggatattttttgtcgactttcctcacagggatgttcaaaatgtgtgttaggtgtcctattaatgccacccctcctgccatatatctctcaatctctctggtggccgaaaaatatttggccctttgtagataaggtggcatgacatggctataatatgttgcgggtgggccgggtagcg

SEQ ID NO: 181838 - DNA, 942 bp, Zea Mays
catgagttttgttgcattgcaattgccctttttctgtatctttcttcaagaattcatgattatgctcatagtttaccagatcaattcggacggaaataacattctctttagcatcatcgtagatttttttaagtttcatcctagccttgcactgtattcgttttgaacatgtgttacgtatcctttgatttccagctaccctttcagcattctttccttccattgaacaattcaaccatttacaattcttccgctccctatatttcttcaacggaaatccaacctcgtatgcatattgactataaaaattatacgcctcgtccacgttactaaatgtcataccgactttaggtatcaatcttatatcaatattgtccggctgcgcacaaaaatttaacatttacgattcaatagcgactaaatctaacgtaatataggtacaacattacaaaaaagtatgtaagaaaataatagtatcataattgggagaacttacatggctttgaagaatatgaggtgtgtcctgttcatgcgtcccaatatgtctcatggggatgtgcttatctgcgccgaccacgtctgccgattttgtgtgctcatcaatatgtccaggtgccctcaatgccgcggggggagtaacagatagaccctctgtgtaactagtgatcgcagacgctacaggatgcatgttcattgaaatagacgtacctgttgatctatgcacagacgctacatgttgcatgtcatcgccagcgccggtgctagacattttctcgccgttaatcgtcgcccggtgctctcccttccgccgccgttaaccgtcgccaatatcacagatacgaacgtggacgagcggctgtaaattagaatttgtttcctcccgtaactgtgcctttatttacgcgaacgtggagcacgcctttccttatctcaaactggtgg

SEQ ID NO: 181839 - DNA, 794 bp, Zea Mays
cggccttgctcttcccatttctcccttctttcgcggtctccttgacttttataatctgaatctgactcatctgaaccccaattctattctgcaaatttctatctttgttcatctatgtgaggcttaccttggaattcttcctcacttccgtttgtggaggtacttgtatcactgtcgtcctgggatggctagggggcagcactagctcgtgggcggcgcgagtctggagatgcgccgtgggagaaaaacagaataccttgatatcccacttaaggatagcattaaaggatggcgtttagagtggtttattgtggaaaaccatggcaagtcccttccctctcggtcaggaagacaaccggatgtgcgcacttcgagttggattgagtctcctactgccttggaggtagcgaaagccaagatactgcttgctgaaatttgcttgctgaaggagagaggtctgaccgctgaggctgtggttgctgactttgtttttaagaatattcagcccttgaaggacagagcatgcccaacttacttgtatagcggtgtcactgacccaacccgagttaccaataggagaattcgtgctgaggatctggtgagccgactagacatgatcttgagaggcaaagtatcaaatgttggtgctcctgttgcctattctgcttggaatttgccacctcctaagtcctttttcagtttcgtgtccactcctcctgccggtgatagtggcctgggtcttagagtgcgaccctctcccaaagatgttgaggtcttggttgcttctctttgcg

SEQ ID NO: 181840 - DNA, 423 bp, Zea Mays
gacgaaacagattaagacagagagactgttatttagttctgtctaatttttacgatcctcaccagtgatcgatcatttgatctgacgccaacgatcacatgctgagaggaacaattcacttaatcagctgacgcatcgttctgttcggacagcatgggctccaaattgttcataaatcagaagtcttctgatttttcgaattcacttacgtgcgtgattcgaacagttcaaaattcgccagcgacgaagatttgataatccaaaagcttcatgaaccctttttagctgtttatattaccgaaagaaaacgacaccaaactcgatagattttaattaggcacaggactcgcaaatttttggaacaattacgttccgaatttcgcgaagacttaggaagagtctaaatagacagaaacatatgcg

SEQ ID NO: 181841 - DNA, 548 bp, Zea Mays
tgtccgcggactccatggagtctatttgacgggcctcgcgacctcctcgcccccatactaatccttcacctcaccgctaactcgcctgagtcccatcacaaccaaccgaatccagccgccattgccaccgataggagaggagcgaaggatagcgcttcgacgtgggtcggcgtcagaaaagtgttgccggtgctccgccgtagcacgccgtaaagttttcaggcctcgcctgggtgaatcgtcgaccgaacctgctgggaatttctcgccgcacttgttcctccgccgcggctccgccattccttcgcgaccaacaccctgcgctacaaatatctcgggtacgattactttatcaagttcgttgtggccccgtatcatgtaggagcgggcgaattggaagctagggcgctcgtgcactgggtttgggcttctccgacgaagttccaccgtgaaccgagggcggcgccgccgtcgggagcccagggttggcaagataaccaggaaccgtcgatctcctggtgaatggatgagattagttcctggggagc

SEQ ID NO: 181842 - DNA, 309 bp, Zea Mays
gtttccgataagaatcaatcttcttggccgtggtaaccggaattttcagggtgcacatcaaaaaggtcgggagagctgagaacaccgagttaacaagctctagcctgccagcctgggaaaggagagcagaggtgcatgacaatctcttctcaatcctatgaatgagcggtaaaaagtggcaaattttaggctttgacagaccaagcggaacaccaaggtaggtaaagggcattgaacctatctgacagttgagggttccggctagaatctccattttagtgggacagacattgatggggtacatacttg

SEQ ID NO: 181843 - DNA, 702 bp, Zea Mays
accgggccatctgcgtgcatcggcccagcgtgccccctccccggcccacctcgctctcccgcatgctccctattcgtccgcgcgcgcgacggataaactgctcatgcctttgtccctatgtctgcgcgactccattctcctccctccctctcacctcgcgatgccgcccacagcaaccgtgtctgcgtcccatggctacctagcgcgctcgcccgatgcactcctactgctgtgcagccacaccgtcacgttgacgtcgacaccgacgagcccttcttccccgacgagcccttcgtctctggtgagtttcctcccttctctgttctccgtttccgttttctctacatcgtgctgcttagtcatgctcccgcttgcgcgccccgctccgtagcctcgtcgtgccgtccctgctgccgctgcgtagccccgccccacacatcaggccggttgcgcgcccccacatctagcagatggctggtgcccaggcagccgcgaccaggggctagtgtggccaaggcgccggctccctgggatggcggccagggcaggtcccagcgagttctgccgctaggaaggccatggctgggccacagctcccgcgcagcgttgacgcgcaaccgtccctgctcccttggcgtcctccgtccagtcagccgcgacctcctctggccggctagcagcctccgtccatgcgtgaaatta

SEQ ID NO: 181844 - DNA, 374 bp, Zea Mays
aggcaggcgagatcactgaaatgacagaagaggtgagcacgtattagtcacatagtcataagtatatgaaatgtgaataaatacatacacagagagttatgacacagaaactgagtgatttggagatacagaggtcaaacgacgcgaaaacgacgtttgagcgaggaatagtgccataggaggtttgaaattggaattgaggcatgaaattacttggaattgagccgatacttcacgagtaggtttatatgagtaattatgagtgaagtgtgcgcttggtttgaatttaggcgaagaaagtggatttgtgacgctcggctcggaattgatcgctagaaatgggaatttgtgaaaaactggagtctcgtatatcg

SEQ ID NO: 181845 - DNA, 818 bp, Zea Mays
aacaaacaacacaactacaacaagcaaatcaccgtgactacaagctgaactaaagtcatctaatgagtcggctagctagagcaacgacacagtccgctagacaacatacacgttggcttgcctattattatcacaattcgagacacaacatatatataacaatcacttaacacaatcaactcctacctaacatgagttggctaatgacgtgactatttcccaattaccatcacacaccgcctttcgccatttttggataaccgacactacacacagctattataatacatctcaagttcattcaacccatcagtggagcactagcatatttcagaaaatttcctgagactacgacgacaaggcatcgatcttatcattcacataaaagcatcacaagcatatttacgaaacctatcggttaacttgatcgacacactacacatgttcttcgcctttcaaaaaaaatttcgcacaacaggaatcatcccacttgctaatgacaccaacaagacctacttatctattattcacaacacgaacacagttacacgccgcattctagtttctaacataatccttacataactcgtaatccaactacccactaacaataaatcacgcatgacaactacacagcaaccggttaatttatttggacaccgcctgcccagcgtaccactagtaccccacattttgactcgacatataaacatagaggaagcgatgactacttcagcatgtcaccacctctctatttaagcaagacaatttttacctacaacgaccgaacatccccatcgagcacaccttatattttc

SEQ ID NO: 181846 - DNA, 363 bp, Zea Mays
gaagaaaggtagcgccctctcagcaagtcttgagatgaagcggctaagggcggccaaggaccccgtaagcttctggacgtccttgattcgggccggaggcctcattgtctcaattgctttgatcttctctgggtttgcttcaatgccccggtgcaaaaccaggaatcccagcaacttccctgcggagacaccaaagacgcactttttcgggtttagcttcgtgcgtgttgcctgcagcttgtcaaagaccagggttaagtcttccactagggtcaaccctcttttagtcttgaccatgatgtcatcaacgtatacctctaccttgtccctaatcaggtcaccaaaagtcttactcatcgcccg

SEQ ID NO: 181847 - DNA, 481 bp, Zea Mays
cagaattcgaagcagctttccgtgagcaccacgtaccccaggggatagttcaactcaaggaggatgaatttcgggagttagctcaaggcagaaggacagtcagtgagtatgtgcacaagttcacagagctggcccgctacgcgcctgaggatgtcagcaccgaggccagaaaaatggctcattttctgagaggattaagacccgagcttaagaccatcctcgccagccaagacttccacaacttctctcacctctccaacaaagctatccaagtggaaagggcaaaagaggaagaaaagggcacatcaagaggaaattccaagttctccgagctcaacagcaagaacgtcaccagagagctcgaccctttgggcttccacccaggggaccaagcttcaataaaccatctggacccactccatcacgctacagtcagcagagttagagctccctttaggcaccctctgttgcaagcaaccag

SEQ ID NO: 181848 - DNA, 604 bp, Zea Mays
ggcgtttaggatggcagggcagagaagcggcggtgcagggaattgagaagaagaggatgagtcagttgttgtttgtctgtgacctccgactgaaggacgtctgccctttatagacgggtcgccataatccgttgattcgatctgctaaattctaggaaccggcccctggaatatctctacatgcaaccgtccggagatctcgcacgttgtccattactcctagttgatgtgacagtctaggtgtgatatttgataaccaaaataaacaaaagacaaaaattaaagtgtcgtttaggatggcagggcagagaagcggcggtgcagggaattgagaagaagaggatgagtcagttgctgtttgcctgtgacctccgactgaaggacgtctgccctttatagacgggtcgccataatccgttgattcgatctgctaaattctaggaaccggcccctggaatatctctacatgcaaccgtccggagatctcgcacgttgtccattactcctagttgatgtgacagtctaggtgtgatatttgataaccaaaataaacaaaagacaaaaattaaagtgtcgtttaggatggcagggcagagaagcggcg

SEQ ID NO: 181849 - DNA, 342 bp, Zea Mays
gtgggcacatttcatggcccaaaatgtcagcacattgatgtttttgcaaaccaacctacggtcctcgccgcgactccaagcagattcgtttgggcgtccctcacggtccctgagctccatctcgtctgaactccaaaccctagctcctccttgctgccgcctcatcagacctcctgctcagccgcggctaccgtcgctgctcctccgggcgaactcgccgtcaccccgcccgtgtccacagcgtcctgctacgcctacttcgaagaccttgacccgctcccctccccgtcgcctctgcgccaccccgacgcgccatggacgcccagctccaatagatgtgag

SEQ ID NO: 181850 - DNA, 691 bp, Zea Mays
ctttgatggtcgtggatccattgatggctgtggagaaggtggatcccttgctggtggtgtagacagtgggtcaccaagaggatgaggaggagaaggtggtggagccctgaatggtgatgcttgtggtggagacagtgggtcagaaagaggatgaggagcaacatgtgaagtttgaggaggtgctgatggatgtacaataggaactacaggtgatgacttttgtgttaagggttgggcaggggacgacgacagtggtggatcaaccatttcgacatccctttgaggccagaagagaaattcttgatagcttatccatgtgtctcagtaccttcgggcccagggatgtctagcatgtcgccctcagatccttggatgaccgtcgtcacttgtaccctacaataattttctaaaatgtcgcttgcatgaaacttgtgtcctaggatcacaaggcatgtggctactttcttcgtacgatgattgttaataccatatcttataattagggtgcacgccacaggccttgtgatgtaatcaactggatagtgtgacttatttcccgttgacgcgatagatcttggacgatcgtacaatcggtggaagacgacggtagagctgctggaattagttgcatctatggagtggtcatctgttgaacaaacatcgcactcgccaattgctgcatcaaatcaga

SEQ ID NO: 181851 - DNA, 489 bp, Zea Mays
ggtccagaatagtaacagagatgttcaccaacatcataagtgatttacaatagttgatgcccaaacttcatcaaaccacctgagtacatgagattagtattcatcgggtatgggtacatgtccaaaaaagtgtggaggtaggtgtccactaatgcctattgtaaggtaggtgtccactaatgcctattgtaaggtattgttgtctaagttgattcataaatgaatcttaggttgtttcgtctctcttggtctctttgctgcattggaccataagtgatagacctcctagcatgcagtcagtgcctcaatcaggttgacataactgctacaaggaccaccgcctttgcaattagcagacgacgtgcaatagaaggatccattgcgagagtaatgaattagaagaaggatggagtggcgcatcaaggcttgaattcctcgatcatccttggggcatggtctttgacaaaaaggcctaaaattgatgatgct

SEQ ID NO: 181852 - DNA, 354 bp, Zea Mays
ataagctatgtattaaaaagtcactcacatacacatcatgcactcacccttatgaacacacatacacacaccctacctttatgaacactttcgagagactggcaggtttttgagattgaggaagttaccatgggtgtctcaatgtcaatggccatgtcacttaccactaaattgatagtgccatttgttcggaaaataggagcacctgtgcccaggtggttggttgcataaataagaaacttggctaccgctccaccttattctatagcactgttattcagggctgcagttcattctgtttgcacaatgcatgttttcatcttgttctttcttcagaatcttcttctacttttc

SEQ ID NO: 181853 - DNA, 593 bp, Zea Mays
ttggaatgcgccaagaagttaaaagacagctttgctaaggttggggcatattcttctgagcaaaaattcatttgtggcgaccctgatggagttgtccagtggatcagtgaagaagccgaagcttttgacgaaattttgaatgaccgaggagatttctgcgccttcgctagttcacggggggccacgtcaatcttagagaaagctggctgcgaacatgctaaggctgtagttcagtcaggatttgttttctcagtggaagacattaaaaacccttcggacgaagcttctacgctaggcgggaaattttactccgaggtgtggatgacgggtggccatgagatagctgatgaagctattagaaagaatgaaaaagaatctcacgatgctcaagaggaaaccaaacgagctaaagaagctatcgagcgtgcaaggcttataagtgttgaaaggaagcattagatatgattaaaattgctaagaagctgttgacgaagctatcaacagattgctgaatgaagccgctgaaaaagtgttgaaagaagattaaaactttgtatatttaagagtttaatgtttgtacatggccttcatct

SEQ ID NO: 181854 - DNA, 1084 bp, Zea Mays
cgggttgataaatgtaaaagacagggtctcttttgcaaggttacaccaccgaaagggtatagcgcgatatcgtccgcccgatctagaatcaagggctctgattagaccgagccctatacgaaccagtacgtgcgcggtgtcgttggatttacatccgatggtttagatctaatgtacccgagttctaatctcgcgcatccgatccgaaatggacggctctcgctaccctaacccaaacgatatgccatttctaatctggaccgtatgccctagatccaacggtacatgatcgacgtcgtctacccggctcatggccacggcggcgccattccttgcggcaataatcccgccggcgatcgtcgtcccggctattccgagcacatcacacctatttctctagcgcaaaaccaagggaatgaccgcacgaatacggaggttgggtgctcaccggcgattagggcacggaggtcccaggcgacggcgaggtgtggctttgcggtgaagatcgactccggcgacaaattcccgtggtagatcagcagttcagctccccgtatcgcccccgtgtagacccccgatggctctaggaacaccacgaccttgcccgacagcttctacggcgatggttgggaaactccacggcggcggcaattttctcccgtgcggtgcgcgacggcgtactagtggcgaggagttggggataagagaggagaggagaaaataacgcgtgcgctacctacttgtatcccgttcgggaggccgggaagtgggcgcgagctggtcaagcctccggcgaagttgcggcgacagttgcgcgtggatttggtggaagggaggagtccgacggcttgggcccacgactcagagacaggtagccagcgcgtgcggtggagagtggtggggctcagggatcagtgttgagcaggcaggccgcgtgggagggctaggtcaattgggctggtagcgcggatttgggcccagcacgagtttttccatttctttttcttttctttttctgttttgttttatctcctctttccaaattccaagcttcaaactaaatttaaactttgtggaacctttg

SEQ ID NO: 181855 - DNA, 275 bp, Zea Mays
cttgcaggtttcgctgactggatcaagagatatggaggggtgaagttgggtttgtctcactgccgagcacagggagaagatcccgggtttgacgtgtccagggcacgcgtcccaatgccatcttcttgtatgaggtagaggggttagttagacacatttttgtcaatgggagcttagagttttgagatagagatcaaggtgaacgcgctcggttttggttcaaaggctgaaaattcagaaatctgaatttcagatttccccattgaatgtccatt

SEQ ID NO: 181856 - DNA, 540 bp, Zea Mays
ttcaggtgctttaaattatatctcggtggagcccacattgcaagagcaaatagtcagggcacagattgaagacaagggtgttcaggtcattaaggaaatgatcaagcagaaagtagaaaaatacaaatgcttccggcaggacagcaaaggaatcctatggtttggagatcgattggttgttcccaaggaccctgagctcagaaagaagatattggatgaggctcacctttcaaaattctccatgcacccgggcagtaataagatgtaccatgatctcagatccttatactggtggaccagaatgaagagagaaattgccaagtatgtatccgagtgtgacacctgccagagaatcaaggccagtcatttgaaggcaacatgccctttgcaaccccttcccataccatcttggaaatgggaggacatatgcatggatttcatcatgggattgcccaataccgcccggcaccatgattctatttgggttattgtggataggttgaccaagacaactcatttcttgccggtacacaccaccca

SEQ ID NO: 181857 - DNA, 797 bp, Zea Mays
catttctgtgatttttcttattctctagactgggcgcactattttaagagagttcagggggctcggggtaaaatccctaagaatcagaggacagccacgatggaccgcgggttcattcactaaaagtccgagggctctttaacaaaagttacccgcgaaggggtatggacaaatactggtcgttggatgagatcagagcgatcatgattagatctaggcatccagtgaatcggtacacgccagccaccctcggatcgaggatcaacgaccacaatctaaagttatgtgagatttaataacatccctcggatctagatcaatggtcacaacaacatgcggcgaagggggtacgcctaactctaatcccgattgtctgacccgaatccgatggtcccgattcacctcacccagctctggtcaggcgcgcggcggcgctatcccagtcgcggcggagatctcgccggagatggcccaaaccgtcgctagctcaccaaattctcagtcgctggacactacttgtccctagcttggccccgaatgcaatagaatggaggctcaccagaatgaagctgcgcagacaccaatccacgggagatggcggcaccacgacggtcacccagtgacggcgagggattatgtcgagcaccaccgacgaatccagccgcgaatgtcacgggcaccaccggtagtcaccgccgaggaagccaaccaactcgtttagggctaggtggcggagctcgtggttcaagccggcggcgggtcacgcgggtcgaagacgcggcgcgcgtggcgacggc

SEQ ID NO: 181858 - DNA, 544 bp, Zea Mays
gttggtttctggaaagcagaggggctcttatgcaaagttctatggccgaaggggtatggaatgctactggccgctcgatccaaaaccgagggcccagattagatcctatccaaagtgaagcggtacgatacttagccgtttgatcggggatcaacggtgcagatttaaaactgtcctgatccaccctgacccgcacgattcatgatcaacggttcaggtgagttttactgaagcggtacacccgatctaatcgtagccctctgttcccgatccaaaggccagggcagcccccccttctccgatggaggagcacggtggcgcgcgcccatccacggcggtccgcccgccggagatcacgaatccggcccatacgaacgccatatcccgattcactcgactcacgcgcaattgacgactcccagaaccccatgctacaactaatttcggctgttgtcgagtgtaggattcggcccccagcgtgccgcggcggcgccattgccatcggcagtggccacgtgaactaacgcacctaagccaaatccga

SEQ ID NO: 181859 - DNA, 1102 bp, Zea Mays
ctgaacgactgcagtagaggggtgaccaagcctatggtgccacaatgacgatgacacctttgcaacaccaggggcctgcttattggatgatgactcactggaggatagcttgatgggatagaggccagcctcgcacttgcctctatggagtgtttgctttgtctcctgttcttttataagaaaatgttcaggatgaaactcaacaaagacattgttgtctcgggtgagacgattaatagaaactagacttttgttagcacttggaacatgaagaatatttctgagatgaattttatgcgaaggggactgcaaagtactatgaccaacatgtgagatctccatacctgagtcgttggctgcatgcacctgctcacctccgtgatacttatcatgaatggtcatcttgttcaactctccagtgatgtggtcggtggcacctgaatccatgtaccagttggtgtccaccccgtagttggttgatgcagcagatgcagatttttgtggacgattgtcgttgtagcgctcatcgaatcgattgtagcacttctaggcagggtgccccttgatgccacagatctggcacttgacaccatcctggtactcggggaaaggagttcgagtacctgtgcgaccgcccttggggccacggttgaagcctccacgaccaccattagggcggccaccacttccttgatttggcttgaagttgttgcgattccccttcgcagcaacgttggcggatgactggcttccaccgcttctcatctccaccctctgctcatgactcaccagttggctgtacatttccccaatagagattggctgagtcctattactcacgcccgtgacgatcgagtcatactcagggtcatttagcccggtgaggatgtaggctacaagttgatcgtcttcaattcttttgccgaccgatgccatgtcatcagccaagctcttcattttcatgaagtactcattcatggtggagctcaccttcgtcgtcgttgccagcgccatgcgtgtggagatcagacgcgcacggctttgagaggcgaacatctcttcgatgtgcgcccatgcagatgttgctgtcaccttcatggag

SEQ ID NO: 181860 - DNA, 875 bp, Zea Mays
tcacgattggtaagctatcacgccctgtccacgtgaaccgcgaacgatgaggacaatggtacgtgttcccggtgatccctggcggtccggttcaattaaagggttcgaggggtttgcggggtacctacggaggctagaacaagcggcagagggacttgagctcacctgaatcgagctgaccacggtgaggtcttcttcgcggtggcggagaaccaaattggggggaattcaaaatttgtgctcgctagtgggggatttgggatgcaagtgggtgcggtagctgcttgggtacatggcggagctgggggcatggtcaatttatagaggccgcgagcggtggctggggatttgggcgacgacgcgcggcggccggaggtagaagaaggtactggcgcacgtgaattcgtggcatctaccgtggcagctactccgacgagccacgaagaggcacagggggttcacaatagattgggtggaggggctgagccacgcgacgcccggccgagaggcggcggtcgacggcgagtactttaccgcgggcggtgagctagaggagatgtaccgtggccgagcggggtgacttccagctcaccggtgacgaggaccataaccgcgacagccttatccggtgaccgccgagcacgaatcttggcgagcggcgatcgacggcggcagctaccggcgacgagaacgagtacgatctccttcagttaaccggtcactgtaccatggcattgcctcatcagacagtctgtcagccgaacttggagcatcattatctcttaatttctaatgtcaacacatgtcgagctctgcagcaaaagtgtagagcaatatgccccctacaactcgactataggacttgaacatatttg

SEQ ID NO: 181861 - DNA, 555 bp, Zea Mays
gcaaggaacttgaggagaaggtacttttaacttctttgcactgatttgttctgaaggagaaggtgaggcagatttgaattggcgtttcaacgatggagcatccatgaaatcgtcgtcagacagtgtggatggagcaggaggttttctttttaaacgacaagctaacgcctttctgcgaaaacgatggattagggctggttgtggctcattctgctcctgattttgtggaatatcatcttagtgagttgagctgctggatcttgtacgtctggaaatgtcaattgaaaaaacctcctgactggattcaatggttaatctttttggattactgggcggacgatcaacagacttcatgattaaatactgaataaatctgtagaaaaagaagttgtttttaaatacattgatttatgcatgaatatatgccaaaaaaagaactaatttttactataactatctgaaatgcatactatataatgctaagtggaattacataacttaaactaccttttacatttatgcgataacatttaatgaacaatggttatatacaag

SEQ ID NO: 181862 - DNA, 558 bp, Zea Mays
cgtttccacatcgtagtaaactactaaagcgtgtccggtcatcgccggtgaccttgccacggtgaaagccacgaatcctttgcgccagtgctctcccctctctccggccgccagcgtgccattccaaattcaagagccaccgcccttgggaactataaattaagcgtgccatcagctctgctaggtaatcacacacccaatgcaccagcccgtgcctcagattgtccaccagagcgctccaatttgggatttcccccaaatttgttaagaacaccgctatgtgtgagctcgccgtggccagctctccaaaggtccgatcatgccctcctcgttcttgttttagctctcttatgtgctcttgatgcttctcgacccggccaattgaattagaccgcgttagatcgccgcgaacacctcaggttatcctcagtttgcgccatcaccgtggacagcgtgattcagagttagaactctgcaattgatggaggggaaatggtcgttaagggtagaattaggtgttgagcaacggagaagcatagccgttgcattttccggccg

SEQ ID NO: 181863 - DNA, 646 bp, Zea Mays
gactaagaagagcaggagcggacctaggatcggctggccacggagcgcggaggattttcgcttgccggagactgagaagggggaaaatggtgtcgcgacgagctctagtgaaattaggaggtgaggttggggctacacggtcgcaaagtgctactgattcatcgtgcactgctaatttgggaagagatggaaaggatttcgcgaatttgggcttcaaccgagttcactagtgaggtggtgagtacctcgtcgtgggtagcggagctatttaaaggcgcggtggtccggctaacgatccacggccgcggattacatcgttcgtgcatggttaccacgtaaagaagaggcacagtgagggaggagcgaggcatgagtgacaccacgacggaaatgaccgagccacggcgaccgccggtggaatatctctagccacgctcggctaggttcgtgggatggtgccacgtctgaagttatctccccgcgatcgatcccttcaccaattcatccgaacacatctgattctacagtgccccagatctttgtcttcatttcagatattttcagtgctctggatcttcaatgttcttctaaaccgacccccttccaccctctccttctcttgattcttgttaagaacagggtaagc

SEQ ID NO: 181864 - DNA, 328 bp, Zea Mays
gtggaaggtatcttggtatcactagatgaacaggtgatactttctgtgtcgcctttcgggacattttattcagccattttgttttagagggtgaccgaggtttctttgctggccgattgcatagaatgcccttcttgtgcattatatgtagggccggcaattgatcagaagtataccgctttctgtggaggtcgatgcctttgtccatgggcagactgtacgactgatcatctgtttgagcaccagaccatccgcgcgcaagtgctagaccgtccgcgatgctcgagtcagggagctttgctcagttgctcgattgagcctacccctg

SEQ ID NO: 181865 - DNA, 291 bp, Zea Mays
ctgcgtaagagattttttccaattcagtcatgttgcacttggaggtcgtgaggacttcggagacgtagtagactggacactgccgggtcgtgccctctctgtcttgctcttggactagcgttgtgctgactacatatggcaaggctgcgatgtagagcagcagaggcaacgaggggtctgggctgatgagagttgccaagtctgataggtgttgcttgagtgatgcgaaggctgccgcctgttctggtccccacgcgaagtctttcgcaccacgcagtgtcttgaggaaag

SEQ ID NO: 181866 - DNA, 754 bp, Zea Mays
cgaggccacgagcggtggcggtgacggaccagcggtactgcacgaggatgcgaacaactgcgctgacgcggcgcgagcggcggctcgcctacgctgcggcctatgactgatattgacaaggcatacagggaagcagggttgtgggccagcagcatgcagccgtgtacggtgcgcccgtgcttgctagcttccacgacgcttcctacttgcatactaatctacgggaatcggccgtccacgacgcttcccacggtgcggctgtgttgtttcctgcttgcctgtttggccttccacggagcagccaaccattgatccacaggagttggccatccacagcggcgcgacagtgactcgatccacgacgcccacggccctacacttaaatcctagctccgccactagcagttgctacgaggagaccaaggcaacaggaggcagcatctgggcggcagcaggtgctagcaatggggaagcagtggtggtacacactgcgtttagagggggtggtggtgtggagcagtggagatctccataggggcgctcatgggttttgtggagcgagagttttcgagtcgttcgagatccctctctcgtggcctcctgctgttgcctggaagtgtcttggaaagagaatctttgggtccatgagccctgttgggtttcgaatctcctgcgggttcaggtctagggctcgattttaacccgcattagattcaggtttgggtctgtatctcacttttagggggtgggccca

SEQ ID NO: 181867 - DNA, 395 bp, Zea Mays
atgtggagcagatatggggtaactgagtgtaagtggctttatgagggtgtgaccttctctagtagcttcaagatccttccccttggaagctacaacatgattcttggcatggattggttggaatgccattgtcctatggttgtacactaggcacagaaatggattgaatttgattatggtcaaaagagagtgcgtctgcaaggcattttaccaaaaacacaaacctacaccggtattacttgtttacagttggattcactgatcagacacgaagctgtggaacaacttttggaactgcagacagtggatacaaccaatggaggcgagattcccaacattattaaacagttgttggccaagtatcaacacttattcgttaaaccctatggccttcc

SEQ ID NO: 181868 - DNA, 579 bp, Zea Mays
agttgcggcagaagttttttgcacctttggcaaacctgccattctcaatggactcaggatttctggtatttttgtcactttttccacctgtggctctttggccttattatcttcagccttggctggctcaactgtagtcatctttggtactacactcggctctacagcgctctgcataattgaaacactctcttttgctttggcagctgaagaagtaccttcgccaaattcaggaatcactgctgcttcaatgtaacgcggccggtgagtcagaaccttcatcttcttgcccttcggctcagctgtgatggccgaagcagcaatctttcccgaagcagtaatctttctctttaaccctcgccctcacagtgggtaacaatagtctgggtatacgaagccaatagcatcaaataccctattcaatcttttcttattccgacccccgaaaggtgcggacaaggcattgtcctcggccttggagtatgccccaagtagctcgtcgctagtagcttcaatgcacttcagccaatcatcatttggctcatcaaatttatccccaaacctgaaggtatacttcag

SEQ ID NO: 181869 - DNA, 425 bp, Zea Mays
cgtgactactaactacaattgaacaagcacaaaccgattcaccctcaccaattaaatcgcgaagcacgattaaccaaaacaaactagaccgacagactcatgtttcaccacaggcaacttgaccatccaaatgtatatcatacttgaaacatgattgtcacagatgaatagatgatacagctgaaagcatataggtcttttaactagtctagagaagtaggcagacagcactgccaatttcagtgcaacacaataaatagcagccaaccagacagacagtcacagtacatgttctagagctctgcttctaaacaagcaaattaacctccaaaattcagaagaatggtttcgtttggcgtggacatcaaatgcaccagatagtataaggcttctagcaaaatggcacagcacatttaattacactc

SEQ ID NO: 181870 - DNA, 492 bp, Zea Mays
ctcgatgccggcccacggtgaaggcacgagcacgggcctggttaacgggcaggcccgactagagcccgggtcggcatttacaggggagagagggaaggggtgcgaggggatattttcccattcccagtttccacgcgccccctcgcatacgcgccgcactcgcctgctcacgaaaccctagcggctctccctctcccctcgcatatgcgccgcctggtgcctccactagtcgtctgctccaccgtcgccgccttctcctcgcctcccgtcccggcgttgacggttgccggcgagtcttcatcactgtcccgctcgtccgctcccctcgtctctcgatctgctcgtccgtaactgttctttcctctccctgtcgtttcccctggtaagcgctccaggaggcagggaccgacctctaaggtttggttgcattttgaggaagttacggagaagcagggaggtaaggatttccgccatttgccttcactgcaagca

SEQ ID NO: 181871 - DNA, 610 bp, Zea Mays
ggtacataaaaaatgaagaagagccggatgacaaggctgcagcagaacgcatcgcaaggtagtcagcccactacaccatcatagggggcttactgtataggagaggcgccggaggagccttcatgaaatggattcactcggctgctgggaaacaattgctagatgaaattcatgccaggcagtgtggggtgcttgctgcgtcaaggactctggtcggaaaggctttcagatccggtttctactagccaactgcgaagagcgatgctgccgagttagtccagaagtgtgaagcgtcccaattcctatcaaaacaacaacacttgcccgcgcagcagctgcagaccattcctgtaacatggccttttgcatgctgggggctggacatgatcgaatctttcaagaaagctcaaggaggctatactcatatactggttgccattgacaaattcacaaaatggatagagtacaagccaattgcctctttgacctcagccaaagcagtggagtttatccaggatataatattttggttcaggatactgaatagcgtcatcactgacctgggatccaacttcaccagctctgagttcttcgatttctacgagcaaag

SEQ ID NO: 181872 - DNA, 468 bp, Zea Mays
ggtttttcttaatctttttcttatctattggcacaccaagatatttcataggtagattacctataggacatgtaaaaatatcagcatacagaaagtcaatctctttagcatcaccaaaacataatatttcacttttgtgaaagttaattttcaaacctgacatgctttcaaacaaacataaaatgaatttaagatttctggcgccttctaagcaatcttgaataagaaaaatggtatcatcagcatactgtaaacaacagcaaccattttgaatgatgtgagggatcgacccttcaataagaccttcctcctgagcttttttaatcatacaagctaatccattagcaaccaaattgaacaaaaggggagaaaaaggatccccttgccttacccctttgtgagtagtgaaataagggcccagagtatcattagtcttgatggcaactttaccacctctcacaatctgca

SEQ ID NO: 181873 - DNA, 921 bp, Zea Mays
attcgatttaaaacagctctggaccgggcctcaattatagaaaagtacaggggtcttggagaaaaattcctaagacacagggtgcaccacaaatggatggcgggttctatttcaaaaagcccagggtctcttatgctaaagtgccagagcggaagggtatcagatagctctagccgtccgatcagaattggacgcgcaagattagatctgggcctattatgattccgcacccgtttctggtcatcggatccgaaatctacgactcctagttcacaactcccccggtcacttagccaaccctatcctgctagggcctaattgcgactgggagtgtgacgaagcactggaataagttcataccggtgattgggaggggaggaaggcagggccacggcgcaggcggcttcacacactccgacgagaaattctcgagtcccccgaggttctctactcgaattaagggttcctacagcttcactggttcctagcgaacgccatctaccactcgcgtagacccgagctcagccacggacgaaaaacaacggcggcggcccgtaccttgctctcactcacggaactatgggcgactgggcaatgacgataatgcgcgcgaggagttggaggaggggaagtcacgtgcgagctccacttttatcgtctgagtccacggagggggaaaacgtggcctacatgcgcgaagaaagggaggaggatccacgcatggcgcgcggtccgttgatgcagatgcgggatgactagtggggtcggcttgacagtcacctacgcgacacgctagaatccaaatgcgactgacgggagggccccgcgtatcagtgaagtaagaggagggacaagcgtgcgcgactgacgaaagggacccacttgtcggcgcatttgtgcggtggctgggctgaccgtgcg

SEQ ID NO: 181874 - DNA, 456 bp, Zea Mays
ataagttaatacttgtgaaatagactagaccctatccacatgctttaacttagttcactctgtgcactaaataaagaatgacagaccgacccaaccaatagagtcttgatggaatgcataatttgcctatccccacctaacatcaagcaaacttttaacctatatcatgtagtctatctcacccatatctattttaaccatattccccagcccgataatatacactaactcctaatcaatgagacgagaccggagaagatgatcaacctcatcaagaagggatgagcaccaactcaattcttcaaggatcaagtgagatcaccaagatgagtcagcatccacaatcttggatggagtcttttcttaccccactccttacccaaaactatatatactttaaagatatctttcatcctgcataataaagtgactatacttatatacacccaggccttc

SEQ ID NO: 181875 - DNA, 1050 bp, Zea Mays
acgtggcatgatctcgttggctagagtccggccacacaatgggctacatggctgtcgagtcgtgtacagggtacagacgaactcggccaccagtgtagatatgttctgaccgtgatgcataaccaggaaaacaacaaatataggagtcgtacctatggcgagggcaatggcgatgttgtccagggtatcgctgagagctcggtggaaagaactattctccgttgatgaactcgcacgcgctccacgtgaacgacgactagccacggccgcccaccgagatagaacaatggcatgactaaagtttccctcgcagctacaccttcctggcaatggtggcaggtgatgtcgagctctctatgtcttcggatatggcgaggctctcagcgttctcgtgatcggcccagatggagaacctgaggtacggggttgggttttatattccccacggccaggggagatctgccctgggacgttacaacagacggcaatctcggcggaggttgttttagtggtcaagcgtgcgcggtgttcggacttcggcatggtttgttacgataaggaaggaagacacggttctgaacgagcaaggcgcagagcttcgtacgtgatcctgtggtccacatgtcggcgacggcgactacctagaagtagacgtgtgcatggaaatacgactgcatgtgttgcttgcttgatgtcacacttgtgtcatgctgacatcatgtgcggcaagaggattaaataaaggaaaagaagagatgtggctatggggaatatggcaatggtgctgggccgagcgccaccacaggtaaatcttccttcatttttttctttttattttctgtttcctttttttgtttcttccatgtttttaaatttcaattacaatttcaaatttggacctagttttcaagattccacttcatttttatgcacgaacaaactccaggatgagatgcataagtataagttttactttttttagttactttattcatttagtaaatatttccaaatatgaagtacacacattctaagaaaatcttattttga

SEQ ID NO: 181876 - DNA, 537 bp, Zea Mays
agagtcggccgcacgaccatcttggcgtccgggccgcgtgtgagctgaagtttgggttggtgatcgtcgcgggttcgcggtggagctttccgcgggtgagccaagtggagtcggtcggggaagcggcccgaattgctcaccgttgttgttgacccgcaaacctccaccgtgcgccgtgggcgagcctcccggtgatctaatcctcggtaaagttcccacctctgtgttcgccaccttcctaatttcattttgcaccaactaatttagcaaacgacccatcgtgggggcggattggatcgccccggccatggctttgccgcgtgcgtgatgccgtgaaccatcggagttggtcgggaggaaggagagggttgtgaccgttgatccatagttcgacggttgcgattagatcaaagggatactagttgggtggattagccagcgccgttgatctagatccaaaaggcgtagatagatctggtctttttaaattagagccgtccattgcgtcatcggcggtccgcacagatcgccgaccat

SEQ ID NO: 181877 - DNA, 1285 bp, Zea Mays
agcttccagcatgatagagcctttttttttgtataactaaaacagcatgaatgaatgcccagaaaattgagaggctcacaacacagtattatatagtgacgcaaaagaaaaacaaagtacgaagagaactttcccagtatcgggggcagtggggcacaggtggtaaaaagaagtggagcaaggaggccagcaaatgtgccctacaccggattttaccacagatcttgttcccagcacttgacagcagctgcacataagtaagagccgaccatacctttgaatatggcgcatcccggtaatccttttgtggaacactgggcgccccaccaggttatatctttactcaaagcactcggcatcataataccgacaagtgtatatggccccaagaatgcccatacattgaactgatgccggcatccctttttatcgaaaggctaaaatcatcacagacatattatcaccaccattaacaaactgattcatactaaggcaaaaggaaaaggagtactttagtatagtggctgagctgttcagtcaggaactgggttgttgtggcaaaatttgggttacaaagcctggaaatcaaatggcagtacactaggaaatcaaattaaagtcgcttacctttcactcagtaaaggccccgcacaaaccagagggacaagtcaaaagccagaacataaatcaacagaatactggctctagctggtaaccagaaggtaactgaaaggtactgaccgtctgatggatttcgagtaaaatattacatgtttgagaatggtaagacacagttttcctgctccatttccagctattttcaaaagacacaggcttcaagttgacattactgatcagcgtgttttgtcaactaatggttgttaactggtacaactacgctcctatgtatcgtgcaagtgtagccatgccataagtgctaatttgaaataaggaccaccggtcaaaccctggctgacctagtagcttgtaaattgcactcaatggcaattggactattaaaagttgcatgtctaagtataattgtaatcctacacgattattgcagccagataacatgcattgttgttgttgttgttgttgttgttaacttgctaccatacagagccagaattttctgttcatgtaataaactaacattccaattaggttaactgtggtatgaagatccctccaaataaacatgatacatgagctcgcctcagctgcgatacagagagcaaatttccatcaatgttctggcagcatatgccacgcaattcccttc

SEQ ID NO: 181878 - DNA, 683 bp, Zea Mays
gggagttcctgtagatgacttcgtcgctcagcctgaggcacatccagcttagcagatgccacctcctccacctccccatcagcaaggatagtactagcagcttgcacttggctactttgatccttattttcagcagatgcaacatgggctccagaatcatatggatggatggttttagggcatgatgacacatgtggatggccgctttgatgctatgcaatctcattttgatggccaatattctgctttgcacaatagattctctgctattgatactcagcttgatggggtacattcttagtttgctgatctccgcactcatatttaggatactgtggatgatcccatcatgagcagaatgaacaacatcaacagagctttcaagacaatatgggcactctgtccagccaattcgagactctgtctaccagtgacagcattcattgactggatgagaggcaacaacagcttcagaatgacttcagtcagttcacctccatcttcgacagtttcagctcctattactacaatatgtatctgcatcccccacctggtgcgcagtgaagcccctcctttatggaaattgatgccaaagggggagataaatgaagatgagaagatgacaatcagggggagctcgcatgtgaacattcagacatttacatatgcatattttttatgtc

SEQ ID NO: 181879 - DNA, 696 bp, Zea Mays
aagaaatatggcacagaaaacgagagatatggcgatcgagaggttaaacgacgtgaaaacggcgtttgaacgagaaatagtgccataggaggtttggaattcgaattgaggtatgaaatgatgtggaattgagccgatacttcatgaataggtttatatgggtgaatatgagtgaagtgtgtgcttggtttgaatttaggcgaagaaaatggaatttgggcactcgattcggaaacgatcgctcgaaacggggaattgagtgaaattgaagcttgtatatcggattggcgtgaaatttggcgaaaatgttactggaggtgttgtgaaggtgcctgaaaatttgggttcaatcggagcatttttggctggtttggacatttcactgaacacgtggtatgcggtgagttaggtttttggagatatggccatttgaggattgaaaccctcccaaagggagctagaaacctgcagggatattcaggggacacaaaagaacacattccaccacttggattcactggaattgacaagaatttgaatagggcacaaagggtggaaataggggtgctcactggtcatttgaacggagagagaggagagggagccagacctactcaccagaggggagaggaagtgagcaccgtggtgaggtcgccggagggcaaccaccggtgagaagatcgccggagaggggtg

SEQ ID NO: 181880 - DNA, 352 bp, Zea Mays
ctgtctaggagttccgtcatgagtttataaggcatacatattcactttatttacacattactacatggcttcttcctccttggaataaaatagaatttcccttgctaggctctataatgtttcaaatattttctctatgcagagctttttatatgaattgggatgaatgtacttctgcaaaattaagaaggtgcaacattatatttgctttccatttcccttctacccccgtgttttctaacttgatctatttgtatagctgtcatatcatatctattatgcagacagttacaaattcgttttctcgctgctacacatgcaagggaggaacctgcttatagatctgtttcct

SEQ ID NO: 181881 - DNA, 561 bp, Zea Mays
tttgagaatgcttccccttcggacctctcgtagtcatctgcttgattacttattttagtttgttcttcctcatcactgatcattttccacatcacatcattgaacatagatctcagaattccagcttgcttcttgtctttctccctaatggagaagaatttccctggattcaaaaacagtgcagccatattccttccaagcttgttcatgcttcgacctcaatgttgttgccctatcgacaaccctatcaagccaaggtaccctaacatcatggtacgatggaccactgtatccaggaccaaattgcccaattgactccaacataacctcccagctccttgaattgacgacgtgcaatggtattttgttctcatatagaaaatctgcgacatggtcgttaacaatttgcttggcttcctttcctttctttgtgcaagcttcaagagttgactgagtggttttatttttatgcctgtcagcaacaacttcttctggcgtcttgcaaaacatggcagccactgacttgccggacttttgggtgggatgagctgaaacaacaaa

SEQ ID NO: 181882 - DNA, 670 bp, Zea Mays
ctgaggaggaggcagaccaaagaattgatgcgccaggtgaatagcaaagtgttcttccccagactgtgctgggggaggatagcttcctgaaggatcatggggcggaggataagaagaggattgacccggatccccctggtggggaggcggggcaaactgctcacgatcatcaaagtcttcttcatcttctggagtcatgaaaggcaccccatatgcctgctggtgccactcattgatttctggtggaggaggatgaagaggcacatcaggcgaacggggagcaaatgtcatacccatagaggaagcttgacgatgaagattgtcgtcagtctcccgctgccgccgagccatctcatgcacatctgaagatatatttctgcacatggaaaagaatgctgcaataccatgggccagacgagcacccatcccacgaccacgacctcgaccacgaccacgaccacgtggtgtgggagatccgcgaccaggagatggacgcgagggtccggcagcagcaggtccacgagagctggaggacgctttcctcagacgccttgctggattatttggatcaatccagaagggggtgtaagatagatgtcttgtgcctttctcatagcgaaattgagtcaccacttcaatcatcttcatgatgaagggggcgtgaagacat

SEQ ID NO: 181883 - DNA, 610 bp, Zea Mays
agcagcgtcctctaaattacatcctctatatcaacagaatcaatgttttgggccataaatgggtcgttgtgggtttgctcgtcgttgacctaccatatttcttctcaccaaatagtaggtagccccagtcttggatcatatcctcctctgcacatggtcgtcgaacccttccctaatctgcgcccatggctagcaacgcccctcccggattcgtgtctgctctgttcttgccccatcctagatgtgaatcgcgtggccatcatcactcagtcctagctctgagcccgtggccagcgtcgcctccatcgagctcaacattcttcaccggatgtggttgcgtcgtgtgatggaggtcgacatcaccgtgcttggagacgtcacgggcaatgccacctccatttctgcactcgatctccgactcccaagtatctgctcgatctcctctctttcctcgctctagcccttcttttacaactttttggtgtcgtcagcgttgcggctgaaccaagttgctccacatcagcagtgttgttgctttgacctccagaagcttccaaggcagcgcaggagagaacaggaggaggcggcgcgcgtgtgaacagttgatagc

SEQ ID NO: 181884 - DNA, 428 bp, Zea Mays
tgttgtgaggctttccgcgacgctatcaggcggaatcgacgacggagcgactagtaattgctcaccggagtgtgcggggtaccgccgagccgcctggacgcgtgggcagggccgtcaccgcttcataccgaggtaatgcgcccaccaacggattcgccttgacctcctctacgcgtagcgctagggaatcgaaaacttgacagctgggcatgtaggttggggagctccagccatggcacttcgccgcggtgagcacgccgtcgggcttggaggtgttcggggaaggaggacggtttctgaccgtcgatgcgcgatgtgcggctcagatcgaatcagacgtagggattaggctggaactcaccgtggtcattgatctcgacgtggacggttacgattagactcagctcttcccctttggttattctgac

SEQ ID NO: 181885 - DNA, 691 bp, Zea Mays
gcagccggactagcacaacaagtgcgcaaaaccgaagtcttcttcaaaagactatccgtgcaaaagtcgcctaagggtgcagctggactagcacaacaagtacgcaaaatcgaagtcttcttcaaaagaatatccgtgcaaaagtcgcctaagggtgcagccggaccctccgtgcaaaaaccgactacaggtacaaccagaccaacacaataaacgcgcaagatcaagtgcacaagtcttctacgggcgcggccggatcagcgaaggcacacaacctcatcacacaaattatagttacatacatgcagcgagggcatcacacattacatcggctcaaccttcgggatgatacccatctccctataattgaacaacattatcctcaattcatcgccctcaaacagacttcgcaactctccctcacctacactcgccccagccggcgaggacaaaaattcccgtttgctagccccgtccacacaaagacaaccaccctccacctcaccataatgacgcctatctcttcgcgacacctcactaattctccgtttcgccaccgcccttcgccgcctacgcctagcactcgcaccaggaagaacttcagcacccatcacacgtggagaagcctccgtcgcagccacatccaatgccgcaaaataatccaagtcctcatccgaggactcctccgtcc

SEQ ID NO: 181886 - DNA, 825 bp, Zea Mays
cagatgtacatgcatgcagatcagaggaagtcacggtcgaagacgggtactcagatcacgatcgaaatcagatcattaaccatgctatacggtgcatgtcttgcctaacggtaacggctagtacacaacaacagtcagtaaaaaagcccgtacgttgtagggtttggttcaccttttgaccggccatcgccttcaccttacacaccttcaggctttcatctacggcctacggtggcaggtggcgatcaatccgacgacgtactggtaccctacatagttttatataaactctgtctgcacgtacgcggcccctttttctcgtcgatgactgctcatgttgagcacagggaggacaagagccacgttaccgctgatgaaagcgtgctttcctttctcgtgctgtatgtactagtacgtactaccgccaccagtccaccacgcactggttggtcttcacgtgtcagtcattatcacacacaccgcactactcccactgcgttttgttcctgcagtcagagaagacactagaaataaaataccacagcaaacataagtatatactccgtatatctctgacatccatcgatatacccatgtgagcatgtggccaccaaggccacaccgccactccgaaagcgattatatctcaactcaagtcgaccgagagcggcatataaattcgtgcgaagatatacgattagttccggaaaaaggacggttgatgagatttcggagctgcaccacgtgggctcgtccgcaggtcgtcaaacctgtttgatccccttaactaaaacaactagataaactagctcatatatttagaat

SEQ ID NO: 181887 - DNA, 905 bp, Zea Mays
ggggaaacaagtagcaaccagtgaagagagtccactggtgtcctctataattttcccctatatctcattattctgccatatcagcaatctctcttcccctatatctccacccctacagttgttccctctaaattctctccctatatcccactacctccataaaatatcactttccatatttattcaccatctattacgcatcagttttttctacactaacaaacacttcgcaagagcatcgacgctaggggctagctatcacacccccacatttggcagtgtactgtgctagaagctatcactgtcacaggttgtggaggaggtaggggtgtcgatgaaccaattggcgtgatgatgtagcctctacaggcgtgaagagggcaggttgcgagaaatattgaagatagttctagcctgtcttcaatggtctcctctatatttctccccctatatcccgccaagtcagcattctctcttattttatatctccactctctatagtggttcccctaaattcttcccatatacaccactacaaccgttaaacatcatttctcatacctatttatcatccattaccattttttctacaactaatagatacttgtgtgtactgaaatcgaggaaaggggagttgtcggtgttgatctggtcaccaaacactaggggtgtacctcctggtgatgccctctatggcggcgcggatggtccatgacctagggccagacggtgcatgacctggcagcatgagtggttccttccctgcgtcgctccagacgatccacgctctaggtcagatggtctgcaatggcgtaggccatcttcctcctcgtaggaacctagatctaaccctctagggaagagatcttagggtgctctaggacaacagttcacctaggacgtcc

SEQ ID NO: 181888 - DNA, 781 bp, Zea Mays
gatggtgctcaccattttcgacaggaggtgcctttccttttctagttgcaccaggcgactttgcgcctcgacgaagctcccttcggcagcatcgaatttcccttgtatagctgactgggaaagaaatgagccgtgtgagggggaaagcgcagagaggccaggagcttttcctcctccttagtctgaccaaccaactcctcctctaaggtcgtgactcaggattcgatgagttcctttcctcgctccagaatacggaggtgggagctcgcctttgcactcttaagacatgcgagggtcatcgattctacatccctcctcaccgcatcaactagggtgttgtgggcgtcttggaacgacgcgacacgagcgtgggctttggtggcctcactctttgttgtcagatgatcaccagcggaatgctccaacgcctccctttgatcgagaaggaagtgggatttatctaccattgtcctagcaagtgactgaagacacaaaacaccagaaaaggaatcattagcaaagggagtgttctccttaccaagccatctgcacacagctcaccgccagcttatgacgcacggccaagagccgatcgaggttggcccatagctcattctcagtcgtgtcgctctctttgttcagctcccaacaccgggcctaggagtcactgctttcggtaaacgcttggctgaccgtcggggcccgacagcatgatccaggacttcccatgagcagggacagatgatgccccctcagataatacgatctccataaaaacgaa

SEQ ID NO: 181889 - DNA, 1329 bp, Zea Mays
ccgacttatccctgatagcttccgtatgttgcatccgaaggcgctcatttttgccctcgagccgtttcctctcgtaacacagctgcgaggtggaaacgtccaccagcgccccagacgcaacgtggccggcaaatacaaccgcctgacattacattaaccaaggtcaaaaaaactcacatagcgcagctatcgcgcgacagttgctgccatagcaactttgctttcgccatcaacagcggcacaaaattgcacccacgggtccagcgaggttccatccgcacccttcgctgaagcccccgtgtcggcgggcggcctcgccagtgccaccaccaactcagtacctatgccagaatcacagttagcataaatatgcaccaccttacccaatccataacaaacaccccacttaccagcaggcggtagccccgtctaggcatcaaacatggtaatgcccccaccaggtagtcatcgacagataactcctggccggtccctcccgtctctgacaccgtcgtttcaacatcgcatggtggcgaagactcctttgtgggtaccacgggcaccgcagaagggggcattgctgcagccggattgacccccttcacgctggggcgcgacatcttagcgtcgcgacacaggtcaaccagttgaagagggaccttctgtttcttccgctgggcctcttggcgatccttatccatcactgctaacacaacaacaccaatatttcttccgtaaggaaagattttcagctcacgagccatacgagacgtaaaatagtcattgccgacgaccctaggaatagggtccttcctatgccaccgaccccggtaaccttcaacatttacgaagatgtttcccggagtttgggcgaagtcataacctccccaggccaagcacatgtccctgtcaaatcctcaacaaaaaacctataggccttcggccccaccgcttcccgctctgtacctttcgtatctattttcctcttccgagttgctgcaatcatagccttccccttcgaggtgcccacttcagaccgagtcttcacttgtttacctcggtcatccctagcatcagtagagtcccccttcggaaggaccgcaacacaagctatttagttcaaaacacggttcaacctcacgttggaaccgcatatattttagctccttatcatctacgtcttcagcacatatttaccaacaatcttaacaacctctaactccacctccctgacaaaggcggctgcatccctgaaagtagcctagaggggggtgaataggctacaccggaagtttttcactaaaaatttcgagataatgttaaattcaa

SEQ ID NO: 181890 - DNA, 347 bp, Zea Mays
attttgttgcgttggatgtggctgcggcggagacttcgccgcgtatggagggtgccggggatcttcctagtgcgggtgccgggtgtaggcggcgaagggtggtgggaaaacatagtgtggtgacttttcgcggagtggcaggcgccgtcgtatggggatggagcgtggccatctccgtgtaaaccgggttgataaacgagaattgttgtccttgccggctggggcgagcataggcgagggggatcttcggaagctttttgagggtgaggaattgaggataatgctgtttaattacaggaagatgggtatcattccgaaggttgagccgatgtaataggcgatgccct

SEQ ID NO: 181891 - DNA, 454 bp, Zea Mays
aaagaattaacatgcataaaaagaaatcgatggatgagaactgattcttccttcgcaacacgtattacccaagaccgtgttcataagtgcagttctgaccaggctgggccttggatggcgctggaaactaggttttacgggggccgaccttatcgtactgggatttggacaaatgtaacctcgttatgcgggaagagttcattctcatgctacctttcggacgtaaggtttggggtcgacctaaaccgcccgagctctgccgcgcatctgacttcgaggggtgagcagtgcctggttgaggctgttggctgctaccctgaacaccatgagcttgtggccgacggcttgggtctggggaacactggcatggagagcttccatgggccctcctcaccgcggctggctacctcatgcatgatgaggttgtcgaaggcgcaactcattaatggcttgc

SEQ ID NO: 181892 - DNA, 843 bp, Zea Mays
tgactcgactgctggctgctctatgctctccttcctagattgctactccggatatcatcagatcagtctggcgaaggaagacgaagagaagattgcattcatcacaccgttcggggccttttgctatacctccatgttgtttggcctcaagaacgttggagcgacttaccagagggctatccagacttgcttagctgaccactgaggcaagcgagtggaggattatgttgatgatgtggtcatcaagacagaaaacttagacaacttcatcgaggatttgcaacaggtcttcaacagcttgagacgctatcgatggaagttgaacccagaaaaatgcgtgttcggagtgccgaatggaaagctacttgggtttatcgtcagccatcggggaacagaagcaaatccagagaagattgaagccattatgagaatggagccatcacgataacagaagaaggtacaaaggctcactggatgcatggcagcgctgagcagattcatatcaaggctaggcgagaaaggaatgtcgttctataagttgctcaagaaggcgggcaaatttcagtggaccatagaagcgcaagaagccttggatgcactaaagaagttcttgaccacaccatcagtgctcaagccaccacgccgagctacatccgattagtcggccgaagacctgctaatgtatatttcctgcatgactcatgtggtaagcaccgcattggtagttgagcgggcagaagaagggcacgcatacccagtgcagcatctgatttacttatcagtgaagtcctcggtcccttaaagataaggtatcctcaagctctaatatacgcagtacttcaa

SEQ ID NO: 181893 - DNA, 511 bp, Zea Mays
ggacggctgaagcgcttgtccgtggtgacccatgtctgatttcctgtggggtcatggcctccgatccgtatagcaggcggaagggagtgaatccagtcgcccgacatttggacgtgttcagcgcccagactgcttcaggtagtaggtcggcccatttgcccttcttgtcgtcgagaagcattttcttaatggcggtgaaaatcttgccgttggcgcgttccacgacaccgttagattgggggtggtatactgaggcgaaggctagcttggtgccgatggagaagcaaaaatccctaaaatcctggctgtcaaactgtttgccattgtcaactgtgagttcagacgggactccgaatcggcagatattgttttgccagaaaaatttctgtgcagtcttcgacgtgattgtggatattgcccttgcctcgatccacttggtaaaatactcgacggcaacgaaggtgaacttgaggtttccttgtgccgtgggtagtggcccgacaatgtccag

SEQ ID NO: 181894 - DNA, 330 bp, Zea Mays
tcttcaggtcgggattctattggccaacagcgaaaagcgatgcagccgagttagtttagaggtgcgaagcttgctagtacttgtcaaagcaacaacatttaccagcacagcaactgcagaccataccagtaacttggtcgttcgcatgctggggactggatatgattgggcctttcaagaaagctcgaggaggatacactcatgtactggtagcaatcgacaaattcactaaatggatagaattcaaacccattgcttctttaacctcagccaaggccgtggaattcatacaggacataatatttagattcggaataccgaacagtatca

SEQ ID NO: 181895 - DNA, 684 bp, Zea Mays
tcagaaactacaggggccaactcgaaatatttcccatactcgggccaacatccgcatggacgggggttgattccttaaaagtatagggtctctttaggaaataagccacgcgaaggggtatcctcagatctcatccatcagatcacagttgaacggcctagatcaccacagccattaagtgaaccggtatgcgatgaggtccataggatccgcgatgaacgtacaagattttaacaaagctgattgactcccacacgatagatttaaatcgagcggctcacatcatttcatcaaaacggtacgtttaattggattccagtcgtaagatcaccgatccacggttgaaagccccttacctttccttctaatcttacccgtacacggcccgctcaacggcccaacgcactcgagatccgtttcgtccgccgaccgccagattatgatcctgcggcccggaagtcgtctacaatccccagctacaggggcacggtggcgttccccactacggcggcataatcgccggtgaacctaaatcccgcccccggcgatctatcaaggtattgaacgagcaagaggaggcgacgacgaacgctagaaggtgtcttatcaaaagtttgaagcggcgatgagagctgaccacgatgcatggtcatcccgctgccgaggacgaacaacgacgagatt

SEQ ID NO: 181896 - DNA, 1208 bp, Zea Mays
gggaacggctggaggatgttggacaaatccacattttcacaacggatggggtggatggagcttttctcaaaatttgttgttagacccatggcagctccgaacgcattgaggatttatttgaccgcttgcaggtcattacgtgttggattgatgaagatagccgcatcgtcagcatagagcgaggttctgagcttagctgtagcaagagggagaggtgtcaggacgccatgctttgaagcaaggtctaaaatcctttgcagtgggtcaaaggcaaggttgaacagcatgggagagagggggtctccttgtctcaccccacgcctgtggtcgaagctgtctccttgaacaccatttatgagggccctagagctcgccgtgctaaaaaggatggtaatccattcacgccaacgatgtccaattccgcgagcttgtagatattctaaaaggtagctccaatttatcgtgtcgaacgctttctggatgtccagctttaggaataacgccagtgttttggtcttttggaattgcctgacaatattttgcacgtacaggaagttatcctggatgcatctcttccgaatgaaggcactttgacactttgagacaagaccgtcaaggtggggcgcaagcctgttggccaatagttttgagaaaattttggcaacactgtgtatgaggctgatggggcagaagtcgctcacccgcaaagcatcctttttttggggatgagaacaatattgcctgcattcagtagtttgaagccttgcccatttaagttgtggagctgattaaacgctgctgttaaatcgtccttaatgatgtcccagcacgccctgtagaaggtacctgtgaacccgtccgggcctggcgccttgtcgcgaggcattgagaggatagtctctttgatttcttcctaggagaaaggagcttccagggaggaaagatcaatgtggtggtagcctagcgaattccagtcgaacgtccttgctctaggggccgttgtgcccaaatgctgcttgaagtggttagtgatgaccttctcctttccttcctgtgtgacgaccaagccagtctcagtttgcaaggcttgaatgaagttcttccttgccctagagcatgcccggagatggaaaaaatcttgagttggcgtccccaaggcggacgacagtcaagcgggacctttgtctgattcgtgatttctcaatgag

SEQ ID NO: 181897 - DNA, 683 bp, Zea Mays
agcagtttaacaatacacaactaaattcccgtttgctcagctaacaggtacacaaaacacgctcatgcggacacagaggcaagcgatggctgacgagagcgtcaccttggaggaatgatagggcagtgcagtagtaccttggcgatcggatgcagagaagcacggcaaggatatcaccagaagcaacacaacgaagcgcagctccctcatcttgcgtagatcccactccggccgggcctccattctactccacctaatcagcccagccgcgctagagggccccggtggccgcgccgccccccgggaggggggggggaggtgcagcgcgttgaggagaagagagcgtcgagttcgagcaaggcggacggacgtcgggatcgcggagggggcggccgcggattcgagagtttcagtgggctggggctgggatgagcaagcagaaagaagagcggagcaagaacctcgagcacttgtcctttcctttttccttttgttttcttttgtccttattttctttcaggatggggattattcggattcgtgggccgagcattaacggaagaatggctggatggggaagcctgtgaccgctgctgtccttcagtccttgggcctttcgaccctcgcgcattaccgtttattggaggcctccgcgcgctccacggtttcatcgcctctccgcg

SEQ ID NO: 181898 - DNA, 385 bp, Zea Mays
gacaggtgaaagactttgggatgtccttcagctagggtaggatgccgactctttcgtcgtagacctcctcggacctctgggagagtttggtcgccacgaggttgccgatagcgaggttgccgatagcgaggtggctagtctccatgctcacctagaggaggcggaccgtcgcgtcgtggggtaggtggtgtcagggcgaactccatttctgtatgtctcactcccctctgtgtgattgtcctgtgccatttttcagagttagagctggaggtcgccgaccttcgtgagggtgtggacgaggtgttgcctttgttcgtgtctagggcaccgatcgtggatagtgcctcctcaacgttgccaatcgggtccaattggctgtccgtcg

SEQ ID NO: 181899 - DNA, 715 bp, Zea Mays
cttttagtgtgatgaatgcgtgcacatgcacggttcggctgtgcctggggtctaacggtagcaagcaagggaaaaggaaaggaaaggacgagcagcaaaatggcgaagtgtgccctccccttaacataccccacaaaaaagctgccctgtgtcagcttttctttattcagataatgtctattaaaatctcaattgtgctacctttcaccctgtccctttgctgtgcgggagaataaactttggacaaattccgtggccaccgctcgcgcatacgtgccgctgcaaaagatgcattaaagcgtgcgtgctggtatcattttgttttgcaagtacctgtaacccccctcctactaattacccagctaatacaaagcacggcaagcttactggtgaaacgctgtaaagtgccctctctcacagtaccggtcgcatgctccaatatgggagccactataccatggcaattggataaacaaacggttgagagagaatcgggggccctgagctggattctctatgccataacaatggataaacggaatgtgacctttaaactcgattagaacaaatccgaagcttcatgcatggggaggggagggctgagctggattctctatttaggtggctgacgaagcggagggaaactgtagcctgcgcattccctaacctctcgtgtccgcgtctccgttctgtacaagatccgagcggagtggag

SEQ ID NO: 181900 - DNA, 511 bp, Zea Mays
cttggcctatatttgacgcaaacttcagttctcacagaaacaaatggtagtgtgctctatttgatcttgtcaatttgttagttacttgttgcacaggtcagtgtgaggttttctcaattctttttatagttctcatttttaattgtaattccacctaaatgattatgattctgggctatttttatttattctgactgttttctttactactgtctaatttagttctcaatttcttgtgcagtgtccatgtactatcttgtgcggatttcgcgcaccatatcacctcctaccggatcttttcagctcttcatcaggttacactttttacccttgctttaggttgactcatgctacttatgtttcagattttcatacagtcatcgggtgctgtttttggctgagttagaagccatgtttaggtcggcagagcctgcttatcttgcacattttcctgcactcacaaggtactatgcaatttcaccatggtttaaccatttgattaacaacctgc

SEQ ID NO: 181901 - DNA, 273 bp, Zea Mays
taccgcggtgcactcactgaagtacaatttcccgtgcaagattactgggaattgtgttttatatcctcagttggcctacttgttggttgtgcttgtgcttctgttgggtgcaggacacgtgtggtggagaagaagggctgctggccttggctttgtgggcaacacactggctgaaggtacgagggtcattttgtgatttagtagaaacataaattatatcaggcataactcttggatctagatcatctaacactccatgaaagcccagaagta

SEQ ID NO: 181902 - DNA, 826 bp, Zea Mays
ggctgcaccatgtgcatcggctaacaagataatctaatatgttgcaactttatgagatggatgtcacaaaaaatactatattaatgactgaactatcattgtcgggtaatttagtgcaattcgtaaagatgacaaaagattaaatatcttcatccgacatatgtgcaacacgataccgctctcgtccgcgtcctaaccctagtcgtctgatgtatctctcccgcgctacccattagttgtcggcttgtcgttgtttgtctagcgatttccctccatctcctctatggtgcgtccacggccgacaggcacccgcatccacgcccatgctttagatcagtttacgttagtggctaatcggccaagttgccaactacaaggtatcggttgtctatcgctagcccaccaacaccacagttggccgtcttactgtccctcctttgatccatttttagatccgtcactgctcgtatgggagagcaacgcgggggcctaaagtaaaatatagcctaaagtgaaatatagttgctctattcttattgtagaagtagaatgtgttgctattgtagaagtagaatgtgttgctaaagaaggtggatggggtgcgtatcatccatgtgaaggacgagattgttgtctggatggagaacttcatcctttccgcttttatacatctacaaaatctaaatcctgtaataggctaatcttttctctctctctctaaatctggagttgccagtactgtgtatactaccgtactggtactcctttcttaaagggaaaagctaacggacgcgcgtgtgtttgtttggctgtttgtgctcgcctt

SEQ ID NO: 181903 - DNA, 521 bp, Zea Mays
cttgattcaagaacatatagcattcagagtatggccgcttgtagagaactgggaaatgccgaaggagactgtcaccaagtctagcgaaggtgacctggttcgactgaaatatacattcagatatggagataaatttgatgaaccaaatgacgactgtctgaaatgtatcaaagctacaagtgatgaactgcttgggtcatattccaaagcagaagataatgcattatccacatccttcgggggtcggggaaaaaaagagattgaacagagtttttgatgccattggttttgtttaccccgactactgctacccgctgtgaggacggggaaagaagaggaaaactgctgctttcagccaaaactactgcttcggccactccagatgagcctgcgccgaagagcaaaaagttgaaagtccttacccactgtccatgttatattgaaccgaccgtggtacctgagtttggcggggagacttcttcagctgctaaaccaaaagagcccattcctcctacgcagaa

SEQ ID NO: 181904 - DNA, 1376 bp, Zea Mays
ggaacaaaagcatgaaacatggaggaacctgttatcatcattctttaaagaagaagacaattttcttcaagcactatcatactataaggataagtatataccccatgctatcaattgcatgcacgtggaaaacaatgtatttgagaggacaagttgggctcctattagatatcaagggaaagatgaaggatattttgaattaactgatgggtcttgtcaatcaacacactagaccaaaccttcatctgtgataaccatagaataaggaactcaaccttttggtactagctacaatatgaagaaagacaagaaaaggacttatgtggtgtcaaggtgccaatcgattcctcttccaacatcaagagccgagtctcagtgcaagacatcacactgaccaactactactcacatgagttccatgtgatattcactttttgtactatcactattgctactatcatcatcattatgtaccttttgttcacctttagctatcatgcatatgtgtctaggggatgatgaagatagtggtagagaagagaaatctaatgcaagtgtgactgtattctcatcttcatcatcactatcacatgaatatgaaccgcttgtgtagtcagtgtcggtgagccaataatcaacaatatatgaatttccaccttttctattatgtaatcttcttcttcccatctcgcttcttaaatacattattcttttgtcattatcaatagcatcatttttctttcccatgaacttgtttttcttgggcttggtacattgatgagcaagatgacctatcacaacaattgctgcaatccatctatgatatgggttttctcttgctacttgtgaagaaattatttttccttaaatctaatttgattaattcatagttgagttgcttaagtattttggtggtcttcttcaccatgagtgcaagtttggcatcatcaatgtcatcatcacttgtactttcttcttctgcttgaactctttctttgcccttcttctcttgattggccctaagagccaaatgcttcttcttgtttgaagatgagtcgcattggtcatggatgtgcatgtacatctcatgagcaatgatctttaccaatgtttgagttggtgtagttgtgaaaagatcttcttggtgaagcatgataacaatgtggccatacttcttgattatgagcatactaagagttttcatcacaacatatagtcatgtgagtcccaaaccggtggcattatctacaaggatattaggccattattacatgtcatttgcattctcatgatgaagcatttcataagaatttaattttgtcaaaacaatgtgataatacccctctcgatcactcttggtcccctcatgtagtgcg

SEQ ID NO: 181905 - DNA, 609 bp, Zea Mays
gagggcatagattaaatcgcggatggtatgagatcacgccccttggatccaaaacctacggtccggatcacatctctgaaacagtacgatggtttctctaatctgcgtcgtccctgaccgaatcaacggcgcaaacattctcttctaccccaggatggtcaggaacggcggtgctctacacctacagtggtgggttcgccggagtgaaatccccaggtgccccaaggcctaatccctaccctggcagcggtggtatggggtaagattatggtgaacccaatccggggaagggcgcaccgacgacgatcatgaagacgacaggttacgcgcaggcggatccttggcgaggctaaaccaccgacgaggaaatccatggtcacacgatgcgcgacagtcgatggcgcataattataagagtagacgacatcaaggcgaacggagtgggtgaggctttaccggcattggaggacttcgctacgaatcatggctgggccagagcgcattccggatctcggccgcggcgaggccgaaccagcgcagaggcgacggggtggacatgggcggtggccgcgggcggatgtagaccaacacgaaggatgtgcgagcgcg

SEQ ID NO: 181906 - DNA, 652 bp, Zea Mays
gggacttctgcttctccatcggcaccaagcttgccttcgcctcagtatatcacccgcaatctaacggcgtcgtcgagcgcgccaacggcaagattttcactgctatcaagaagaggcttctcgacgacaggaagggtaaatgggccgaccagctacctgaagtagtctgggcactcaacacaaccgaatgccgggcaactggattcactccttttcgactactatatggattagaggccatgaccccgcaagaaataaagcatgggtcacctcgaacaagtgcatcagccgtccctgatgtcgacgaacctatgtccaaagacctcatcgacggagaccgcgtctttgccctgtaggccctcaacaaataccaagctcaaacgaaggcctggcgcgaccacgcagtcgtcccaagagaatttaacgaaggagacctcgtactcgtctgaaccacccggatagagtcacagggcaagctggagccaaagtgggaaggtccattcatcgtcaagtcaaaggcgtcccccagcgcatacaggctaacaacgccatccgacgaagacctagaccattcctggaatattgacaatctacgcaaattttttgtctaagtcttcagggcctgcgcgcccttgtaattcaccaaacaaca

SEQ ID NO: 181907 - DNA, 344 bp, Zea Mays
aggagggagatctgtcagtgaatacgtccacaaattcacagaattggctcgctatgcgcctgacgatgtcagcacagaagccaaaaagatggctcgtttcttgaaagggctaagaccagaactcaagactatcctcgccagccaagatttcctcagcttctcgcacctctcaaacaaggccatacaagtggaaagggctagagaagaagaaaagggtcacctcaagaggaagtttcaggtccttcgagctcagcagcaggacaggcaccagagagttcgatcttttgggtttcctcccaaaggaccaagcttcaacaaaccagcagggtctgctccatcacgtt

SEQ ID NO: 181908 - DNA, 1090 bp, Zea Mays
cccgcgaagaccatccaggtcggcgcagacccctcccagaccacccgcatcgcggggaacctgggggaaaaataggaactcgcgctcgtcgccttcctccaagcaaatgccgacatcttcacttgggagccgtcgcagatgcctgggatccccagggaggtgatcgagcaccaactaaaggtctacccggacgccaagccggtaagccaaaagccacggagacagtccgtggaacgacaggacttcatccgtgaggaggtccggaagctgttacatgctggctttatcgaagaggttcatcacctcgtgtggtggccaacccagtcatcgtaccaaaggcaaatgggaagcttcggatgtgcatcgactacaccagcctgaataaggcatgtcccaaggatccgtacccactgccgcgtatagatcaaatcgtggactctacctcggggtgcgacctcttgtctttcttggacgcctactctagtttccatcaaatccggatggctaaggaggataggaggcataccgcttttgtaacagtagatggactatactgttacattgtaatgccctacggtctaagaaacgccttgccaacatttgttcgggcgatgagtaagaccttcggggacctgatccgggacaaggtgcagatctacgtcgatgacatcgtggtcaagactagggaggggtcgactatagtggaagacctgaccctggtttttgacaagctgtgggcaacccgcaccaagctaaacccggagaaatgcatcttcggtgtctctgcagggaagttgctggggttcctggtttcatatcggggcattgaagctaacccggagaaaatcaaggctattcaggtgatgaggcctcccgcccgtattaaggacatccagaagcttacggggtcactggcagcccttagctgcttcatttcgaggttggctgagagggcgctgcccttcttcaagcttttgcggaaatcaggcccatttgcctggaccgaagaggcggaacaagccttcaaagaattgaagcaacacctagcttccatgtcgatcctggttgctccggagccagaggaaccgct

SEQ ID NO: 181909 - DNA, 818 bp, Zea Mays
tggatcctagttgataacaccatagcggggacttgaacttccgggggattccttccatcaagctgagcttccagggctatgatccttgcatgtgcatcctccagctccaagtgtaccctagagaggtccagggtagcactatctaggtcggtgttaagacctgccaccacaccagctaaggtggtgaggcgatcttcatttgctccacctggaacaatgctggtctggttctctccatgaatacgtagaggaagatgcctgtacttcatattgtgcagcagctgctggtaggtgtggctgagagaccacagagttcacctagcaacgtcgctgatcgaagcagcgtaggtggatagcggcgtcagagactcatgtgctgacagagtcctgaaccctctatcacctgcatccattaccctgacatgaatgcgagtgatgtagtagcaagccagaggaggctcgtacactctcctagtctcgtacaggggtcggacgtaggttcccaacgcgtgcagaacatcctgcagcaggttagggaagtgccttgtcttgaacattgaggcataatgttcagtgacaggccataaccccacgtagtggtcctgctgttcttcgttggcttcatcgttgaggttttcctcatcttcttcttcctcgtcgtcttcatcatcatcaccagaatcgtttggatcgtcgcctccaggagtaggggcttggattgctggtgctgggaatgctgaagctgatgatccaactgcgaaggctagtgattctgccaacagggtgagtgtaggcagagactcctctgagctatcttc

SEQ ID NO: 181910 - DNA, 343 bp, Zea Mays
aagcttgtggggaaagtacactatgactatgcaggcatcacttgcacatgagggaactgtctatggtgaacaagtatgtactcacttaaccactttactgtatttctctgttttaacattttgctgtattcctctgtttgaaccactaagtttggctttccattgcagaagaaaaatgagttgtcctcagaaaagtacgcacttattgtggaatttgaaactgagttggatgaaatcttttgtttctgtgatgagttcaagacatcagcggtaatggcatgtagaaccatgtctcctacacaacgcagcagcagcaacacagggtctattcagcccttcaccc

SEQ ID NO: 181911 - DNA, 706 bp, Zea Mays
ggccaatggatctggtgctggcacggggtccttaggggttggacggtaggaaccaaagtgtaggcgtgaggcctcaagagtgccctgaaactgcggtggccggatcagctgagcgaagatgtgacacagatagtgagcataaggcagctgtcgacgagcgcgtagaccatccagtacggtgtcctcgatctcacaaatgaggaaatccacaacatcaaactcggagtgagagaccagggcacctagtagccaaagttgaatatgagtggcagcctccctgtaacccatccgtggcagaagcatccgtctcatgagctgatatagaaacttggccgctgtggtgaaatctgccggagaacatcgcgacccatctgagaagggcagtcggaacaaagccgcgatgtgagctgtacctggagcaacgccgccgtgagggcgtcgaagaggatcagaggtaccgtagcacaagctgtgaagacgagtcgatgactcgggaaatccaaacagctggcgaatctggctggcatgaatagtgacatcctcttgctcaaagcggaaccgcatccactggtgatcaggtcgatccatacaagtaggagaggtgaacctcagatatcagaagagtcagaagtccaggcaagtaggagaggtgaacctcagagtcagcaccagctgctagcaggaaggcagggagatctaatagccg

SEQ ID NO: 181912 - DNA, 1091 bp, Zea Mays
gggtctcaaattctagaaagcgcagggggttctgggtaaaactcctgcgactcagggaacagtgtaaaggatggcgggttgattccgcggaagtttggggtctctttagtaaatagtacccgcgaaggggtatggatcaatactggccgcccgatccgaaacggacgcgtgagattagatcaggcgcaaaacgaatcggtatgcgctattggccgttagatcgagatctgatggcaccgattttatgaaacccaaatcaaccacaaccgcccgatcgaacatcgacggctgcgattcaactgagcgaaggggtaactcctatctaatcagagccattcgacaatagatcaacggcccaggtgcgtcttcttccacctctgtccaagccgagcgacggcgccaggagctccccacgacggagctgtcgccggagatagtcatcccgcgccccgagaccttcccacactgcccgactagcgctacacgaactggagggcatggcgaatccagagaagcaaatctcaccgagtttggaggtgtggaattccctgcccacggagaggcgcgaccgtggcagacgcccccgctccggcgagcaattcgttgcgagccgcccgccgcttgcgtttggtgagtccacacacaccctcctgcagacgtggcgcagcactcggcctactcgattgggtccgaacggcgtcgtggggatgaagacgacggtggtgaggcatggtacgagggcagggtggtgacggtcctcgattttatagccccgaggtaagtccgcgtgggcgccaggatttcagccggggaggttggaggtcaggtcgcgagcgggagcgaggattgcgggcgccgttcgaccgagtcaagcgcgatttctgcgcgcttccgtgcgagtccgtagcgcggctggggaagaagatctacagatgctgcatgagacgctgacggatgggccccatgcgtaagtgacaccagcgaagagaattgagctgggccgcgcgatggaggttggaaagtgggccaaaacacgctgattccagcccaacagtcccatttccttttctttttcttttacattttctgtt

SEQ ID NO: 181913 - DNA, 1065 bp, Zea Mays
gttttagctcttatgttaatgcataagctttttgtatctcctgttcaacagcattgttgcctagttcatgtattatatattagttcgatacatgcatagcgtgattgataatacctgaatgaatttgaagacatatatgaatgagttccttttcatgagcagacgctgccactggtagttggacttgagaagctcaagcctcttgacaccgtaacttgatgtacaaagagctgcaggatgattgtgatgtcggttgtatggaacagttaattcctgatgcaatctcttaccaataataaatgttttgaaggcttcagcaaattttgatacagaaacaaattggtatggataatcatagtggcaccaatactgctgttgatctttcttggacaaaacctgcgatgaaagaaacgtgaatccacgagaaattccagtcggtatagaattcaaaagtgaagaggtgtgtacttcttgcaaaaaatcagccacgttttttctttctggacacctgaatcccatagcaccaaaaaagtcaactgcatattcacgtggaccttggtatacgatttgaccttcggctataagaatgacatcatcaaatagctcatatgtttccggagctggctgaagcaaggatatgattgtagttccgtcaagagcatgtgttgaattccttaggtatttgataatctgatatgtagttgcactgtcaaggcctgtcgatatctcatccatgaacagcacgcgggcagaaccaactagcaattcacctgcaagtaccacaatattagcacaacttgaacactgaaaagagcgtgctattttgcaataactaatttcagctgacagcgctagcatacttaaatggcagtaatatgcagtcacctgttgtcaggcgcttcttttgccctccggagatccctttgatcatttcatctccaacaatagtatcagcacagacgtccagtcctaaaatcttggctagatcaaaattagcaatcagaagtcttggcacagtaaagtaatcaagaagttataaaaaaagtaaattgtgctaacaacttt

SEQ ID NO: 181914 - DNA, 369 bp, Zea Mays
atgaacggtggaatagagaacttaatcttagcaaatggatcatggtctggttcaagattatgatgacgacgtctaccattacctcccataccttgtcgattacgtgtgaggcgttgtcgcagtggtgcataaacatcatcgtcatcgtcgtcgtcgtccacaggagagtgagctggggctggagttggtggtgagggacgagcctctagtacgtccatgcatgtaataagttcagcaactcgtcgatcaagcagctcataggatgtcgccgcaaagtcctggtatttttttaaaacttcagtcatcgcgctcatcatctccttcaattccagctgagagacacactcatcgtcgttaagcttaagcccc

SEQ ID NO: 181915 - DNA, 965 bp, Zea Mays
cagggacttcgatgtaagaatctctaaccatcgagggacgacgggttttatttttaagaaagccagaggctcataagcaaaagaggcgggccgaagaggtatctttgattttcagccgttcgattacaatctgaccgaccagattagatcagccctgatatgaaccggtacgtgtacgttatccctcagatcaaaatcctacggtcatggtttaacgaatcacagatctaatctgggccaagggatcagagatccacggctcagatcagtttcatccaaacgctgtcgaacttctaatcgtggccgttaagtatccgatcgacagccatagacccatcttccacccgcagtcgtgcaagagggaatcaacggcgcagacaacctcttcaccctcttccttaccagccggtcgaccacggtggcgcggtgcacaccgcggcggagctcaccggtgagcatggccgaacggcacccaagcccccatatcaccaacaaaaacggctacacgatgcggatgtcctagtgaacagcaccagtgcgacttaccaggatttagggtacggacgaagcctgcccatggagacacgtgacccgcgacggccatggagctgcggcgagcaatcccgggctcccccgccattgatttctctgattgaggtcacaacaagttccaggcgacccaaggaagagttcaggtcggttgtcgaggccaaggagatgacgaatcgcatggccgacgacggcgggccctttccgcaaccctggctgcgcccgaattcatggcagcatgttcacccacacggttccagcgaccgaacacatttctccctctcgtgcgctcacgatgccgcccacccggacaacccgctcgaccacaccgaaggtctgagtgacggcgcagacgagatctggctgcagtggctccatcctccctgcactttcctctcggtggtgctgctgcgagg

SEQ ID NO: 181916 - DNA, 499 bp, Zea Mays
cagccacttgacgttggatacgtccggttggctagatattcctgcaccaggtccctgatactgatttgcttagccaccactctgaactctacttcggccaactgacatgatgaccccagttgcatattacataggggcctggtcattccgaagttcaaagacagcggactcatgaccatggtcatcagcttctccctctttttctcatcagccttcatataaaaccattcatttttccaggcggttggccactttgtgtggtagctgaggactggtgcctttgtatattttcgatacgcaaaattataacaaccaaaattttcatgaaggtcatctgccctggccttcgtctgatagtgcagctcttgagtgggcccacaaatggttgtatgggaccacaaatgtcaccttgaattcgttcaaggaacttgagtggttcagcatgaatcttaagaggagatggtcttaagattagctttcccgttgcacatgatgtaca

SEQ ID NO: 181917 - DNA, 557 bp, Zea Mays
actcactaacaataaatcacgcacgacaactaccacatcaaccgatttatttatttggaacaccgcctgcctagcgtaccactagttcccacaatttgattcaagctcaacaatacaaccttcattcgattatacaacagcgacctaagcatcgcattacccaaggcatacatccttcctcgtcgcgagtataaccatatcactgcatatacccacacatctcaatcaaatatcttacgccaccaccactataatacaccacggcacacacgcacatacgtgccccaggttacgcacaaggcatcaacaacatagtgactctaaccggattaatcaaactcctcattcgcctcgactatcccaatcatcgatcacatgcataaaacaagtacacttatctcttatttttgcgcaggcttaacacctttcgggataaagtgttactataaacaccttacacatatttgccttaggaacctatcagttcactcgaagacatctattcaagtcataaacacaatcatacacttatttgcgaagcacaacttaaggaacgc

SEQ ID NO: 181918 - DNA, 486 bp, Zea Mays
agcagtaggtggaggatcgatatctgtgtccctgttgaaagaattcttcggttcttcttctctttgaggtgacgaggacgacattcttggtggttggtgacttggtgtagaaggaatggcctcaaacgagtgaaatgatgcatcaaagtgatttagtgtagtggtacactgcatgtgaagcagtgagtgtgatatccgctgccagtaatgcatagtgttcgttcttttcctagaacatgaatgtgttttcttatgccagttgtaattaattgtaatgtgatggggagttagtatccatttttaggatatgcagtagttttttccctgtggcagtggggcatatctgaaatcctaagaaaagaaattgttggtagtctgcaatcttctgtttcttgaagcaattctgaaaacttcgctagtggatatgttgtacttggaattgcaaaggctgtcttacatgacttagctttaacgttaccctgttgc

SEQ ID NO: 181919 - DNA, 883 bp, Zea Mays
aaagccttcattattggtgtaattgggatgcctccgatccgaaccaatcagctgcagttcagaggctacaatcgcagccccaatcatttgatttggttgcttaacaaatgatctttttattattttctcaagggccctgagtgtcgcccttaatccaaacctatttcgctcaaagaaaagaaaaaaagctttttcctctccactgggcaaaactttcttgcagctagcgttcaaatccagtatcttcatactgtagctgtcgttttggttactggtacatcactagcagaagcagacctagggtcaccgtcagctcagttacttgccacgctgctactgttacactggtagctaggtttgttgcgtatacacaacacgtatatgctaatacgcatgcaatttacagttggggaagagaaaatagaaaatatagattaaaggagaaaaggaaagaaatgtgactgcccaactgcttcagataaaccctttttgccagctattggtggttcatggaattatccgcatcacaacgagaaagctctggacccaaaaaaaaatgtctgcggatgtatctatctgctccgtttgtcaatgattagtacataattcagacagttcagagcttgggatcaattcgttggatgttgtatttacatttcttctctgcagcggtcaatcattagacgatcattcgttcgtggataggagcaagtgagcaattagttttcttttttttcaggaggtttaaagaatgaaactgcagcaagctaacacatgcaggtgcagtttcagtcagaccaaccagtggagcttttcttttcttttatcatacacaagcatggaatggaatgggaagttagttacatgccacacctgtcatctg

SEQ ID NO: 181920 - DNA, 759 bp, Zea Mays
acgcacctagcttcggtcaccaacctgcctccgaagaggtgctagaggacatttcaagtcgtcatctcctaccggtctctgctcatgaggtggttccgccgatccctcttccctaagtgatgctccagacccactgggccctggaggaggcagaaaaggccttccggcgggaatgggggcactagatgtagagcgagaacgcctcgctgactggcatgtctggctagagaagcgcgtcaatctgtctccctccagacagcctgcgaccgatccaagcttgaagaagaccatgaagatcttgagaagaatcttaaagcggtaattaactgggaaaaggaagccacccgaagggagagcatgattagcttgagggaagaggtggtgggctagaaggagaaactcctcgatagactaaagtcctcacttgaggcttgggacaggaccctcgaggtgcagcgaacacaacaacatgagatggttgtatccttgcacagacaatgcctggagttggaggagaaagccacctaggttgcctttgccgaggaggagattgagaaatagaagaaactccttgagaggcacgattccatcaccgctgccatggaaaaatcctagacaagcgggctggctggctggccgagcgtgaaaaaactatgaagcttaaggaggaggccctcgacgaccggatctgccaatttgatgtagctcacactatgctagatacttaggtgctggatgttggaacttgctctcaatcgc

SEQ ID NO: 181921 - DNA, 610 bp, Zea Mays
aaatagagcttggcaaccgtgagtgctgtgaagggatgagccagaggcaagaagtgagcatatttggaaaacttatcgaccaccaccatgatgcaattgtatttatgtgacacaggtaatccagagatgaaatgcatgctcactaccttccaggcctagtcaggaataggcaatggtaatagcaacctagggtatttgcccctctcaggtttagcttgctgacaaaccaagcatgtactcacaaagtccttgatttatctcttcattcctgtccagctgaacaaagatttgatacgacaataggtcatggggaaaccagaatgaccacctacagggatatcatggagagcacccattactttagtttacacttgctgattagcacccaaccacactctacctttatgtttaatcactccacccactaaggtaaaagcctccatcggctctccagttgccaaggcactcaaaattttctgggctaaaacatcatctttatacccttcagtaacttctaataaccatgttcgaactgcagaggatgcaaacaccacgttaagctgcattgctgaatcatcctgaccaaaatcactcctccttgacagagcat

SEQ ID NO: 181922 - DNA, 502 bp, Zea Mays
ccagattgtccaccagcatattgaactggtcgacgtactccaagatagacgtggtttgcttaatgtgaaacaacttacgtatgaatagttcatactcatctttaccaaatctctctaacaccatcttagaaaatgatgaccaactccaggattgaaaattgtcatccaaggaggacaaccaacatgctgcagatccagtgaaatgcatcgacgctaccttcacccacaaatgtgtttctactgaatacatatcaaagtagtcataacttcgcctgatccacaacttcggatgttcaccatcaaagacaggaaaattgaactttggaagacgactactggaggtgccgctcgtgtgactcacaaattgtggtgcagacacaggaaactcatgcatatgacaatcacccccaacagagaaggagacggtggaatttgcaggcatgtacccttgaccgagggatggagaagggtggtgaccgacccaaacccatcctcccggttg

SEQ ID NO: 181923 - DNA, 368 bp, Zea Mays
ccgcggtcttgctcttccaatttctcccttcttccgtggtctccttgatttttacaatctaaacctgacccatctgaatcccaattccatcttgcaaatttctacctttgtacatctgtgtgaggcctacctcagaattcttcctcatttcggattatggaagtatttgtatcactgtcggcctgggatggctgggggcagcaccagctcgtgggtggtgcaagtctggagatgcgcagcgggaggaagacaaaataccttgacattcctctaaaggatagcattaaagggtggcgccttgagtggtttattgcggaaaagcatgtcaagtccctccccctcggtcggggagacagccagatgtacac

SEQ ID NO: 181924 - DNA, 437 bp, Zea Mays
ctcaacatgtttggcagggataaggtcacgactagcacgatgtctgtttggtggcggatgggtttcaatgcggagatatgtcttcttcttgcttgcacacacacacacacgccaaaagagctagcaaccttcttatcccttgcacataatgcgtttgggcggtaaaaaaccggagatgccgtccttatccacaacgaggcgatagaggggatgggatgctatgatggcggcgtgagaggcgggcagatgatgcagtctcgaggtcatggctggcgtagagtcggcagatgagttttagtgcggaggatgcagaagcggcttgggggcgaatgggtttgagcgcggacgatatggtgccgagctcgcggctggtgcagaggccaatgcgtggagaatgcggtgcgctcccaaggtcgtggttggcgaggaggcggaca

SEQ ID NO: 181925 - DNA, 644 bp, Zea Mays
cgattccggacgggtgacgcggctccaggcagcggcgctgctgcacgggcgggctgcgcggacagggggctccggcgaacggcgcaactctagtgtggcatgacatgtcttggggtggtatctccatacgcgagctcctacacacatgctgctacatggctcgaggcgagaggtggcgtgagggagaggatctaggcgagtatggcaaggagaggcactgagagttttctcaactggggtcggcatgggcggttccacgaacaagtgcaacgtgggcgccggatggagtggacgaatggttggagaagaagtcagggctggtctggtaggtgggcctcgggttgcagcggcagcgggcaccacgcgggactggcgctgggtgtttacgacttgggtcacaggggaaaacctggccgggactgggagttgggtcatgtggctgggctggcgctggtcgcgcacggggtggatatctaaaaagagtgggtgtgggaagtggttaccaaatttactgtggattgtgtgagaccatgaaagatgacgacaggagttagataagtggtagacatggttagataaaattagacaaagatagtaggagctggcccgggggccaaggatgacgaggtagacgtcgaaggggt

SEQ ID NO: 181926 - DNA, 1290 bp, Zea Mays
ttcgacttcgccattatctgtacgagttcggcatcgtggtcgccccggctgggattcctcctccacgtaggtctcctcttcacgtcacacaacgccggaggtctgtcgcgcagccaccgccgaaggcctgtctcgcagcagccgccgcctgagacctgtcgcgcagcagccgccgccggggcctgggcgctgccagggggacgaggactccataggtgatccgtgggggatgggtcctgggctctgtcaggggacgaggactccataggcgatctgcggggacgacaagaattgttccgctttgcacgtgctgccagtctgcctgtgctaccagatttcaacctcgacatcgacgcacatcaccaatttgctgcgcctggtaaggattactctaaccatgtagatctatttatatgaaacagatactacaattagcaatatggtgcactggttgaggagatatgagaataatggtgcttgttgttctatgcagttgttgtattatgggtactccgtagatagaaaagacagataatttgatagtggtaagtgtggcataacaataatatgattattatttaccaagtatttcacttctattaccttgctgcaacattgatttattttgggcactaaaataattttgctttcgtcagatggacaaatcttggatcaatgcaacactatttagcaagccacacctagaaggagttagtgagttcatgaagcttgtaatagagcgatttaatgcgaatgaagagatactttgtccatgccgcaagtgtttgaatcggcttagtggacatagaggacaggtggaggaccacttatatcttcatgggatagctagtacatacactaggtggatatatcatggagaagccatggatgacataattaatgaaaatggtgattacgaggatgaacatgtgagtttcaatgatgatgctggtatgaatcaagatgaagaagatcctgatgataggattaatggtatggtagaggagttatacacagccgaagatcaaggtaaaaggaaatctatgtttggagatatactagaggagatgaaacaagaactttatcctggtgcaacttatacaagattttcgtttgtggtgaagttgcttcatattaagtcgttttatcgtatcagcaatgttggcttcactgcaatactgaagttgttgaaatcgggatttcctaattgctcccttcctgcatcttttggagaagcaaagaaacttattcgtgcactaggacttgggtatgtttcaatccatgtgtgcg

SEQ ID NO: 181927 - DNA, 594 bp, Zea Mays
ctcacttcccttgagacgatcagcaagattatccaacatctgtttctcggctctagccgcctcccattccctcgcatcatgtgctctcttctcattttccgccttcaatctcctctgttgtgcacgcattgggctgtcaaaactcaccgatttcgcgtacctacgcatgtcctgtatgtgattgttaatgttcgaatcgacgagctgagatccacaacgcatcttctgtcccattagtctcttggactttattgtgcatatcacctctcctttgttgtcataactctcccaaccgtatttcctcgtctcctacaaaaaatgagtaaatacgagtgcaacattgcagctggtgtaaacaaaaaataaataccaacctcatcgtaatctaccatatgtccacaaaaatagccaacaccaagctcaaaaggaactaatccatacttagcttcaataccatatttgcagagtactggatcaaacttcaactcttccgcccactcatttttttctttttctttgcctctgcctctgtccaatgggacataggaccatacaaccactctctggaatgacacttacgccacccgtatggct

SEQ ID NO: 181928 - DNA, 510 bp, Zea Mays
gtttgaatttaaaattcgaattcaaattgaatttgggaaagaaaagaaaaagaaaagaacaaaatgctacatgggctgaccaacccagctttcggcccatgaactactttcctacgttgcgcagcccagacctcactccgcggcgccgacatgcgggccccctttgttagccgaacctcacgctggcaccgtctatgacgcgtggggccccacagcaggcgtcttctccaactaaccgcggatctcgcgcgcgaaagctccgggcttgaccggatccttcctccccgcttgcttcggccgcagctgttacgccctcgcctccgggatataaaatcatatcccgcgcacccccgcgctcactttcgccattgccaaccgtcttgaccactgacctaacaccattgtcgcgggagaacggtgggcgccgctggtggcgctcggtggattggtggcgacaccgcgttaatcaaggtattggcgcttccactactttcgtattgtttgtcttcg

SEQ ID NO: 181929 - DNA, 390 bp, Zea Mays
gggatgggagctgggcaggtgggttagataaaacacgatcagaactggagggtgagaccgtggaacagtaggaaattgctatcatagaggcatatcttgaggggtagttatcctttatagctaatcatgcatgggtgtgggccaacaggtcgggtttatgggggcagaccctaccgggttggcatacccgtgtgcactacctagttacaaaaagggaaaaacttcgacccctcagacttgctctatagataaaacttacagagatatttcgacactgggggaggcattccttcagtcgtagctagacagttgcccttgggtcggggtactcccattaccatgaagggtccttcccagctgggggagtgttacggagccctaatttggtct

SEQ ID NO: 181930 - DNA, 749 bp, Zea Mays
cagcccatggtcgctcgaccgttcacagtcactgccccgtgggcccttgtggtcaacccacttcccttgcatcgtgcgcatggcggatgccgcaaccaacgcgcgtcttgatctccggcgccagctaaaccacctcctgtggccgtgcctatatgaagcgacgttatctcctcggccgcacctactctgcaccacgcctgaccaccagaaataccacatcaccgtgagatagccccgaggtagtgctccgttgctcgccatcggtgccccgtgtctaccccatcgattagtggccggtgttgagtcgcgggcggtcaacgtcgtgcgtgggatacgtgtgtgaagaatcaagctcgggggttgatctgaaacaccggaatttctcgttgatcctcgctgccgccacatctctgccctacactgcggaccgaccccgccgccgctcgcaaacccagtaacgacccatccctttagttggccctactttttgtcatgtttagcacctgccgccttagagttatagccccggaacaccgaaatcggtgacttcggcaatggtccgtcgtgatcccctgggcggcgccaccgtagctcgacggggagttaggggcgacttctggaccgtccgatcgattttgggcgatcgggattagaacgacgtaccccttcgatcaaaagggatcgcagccgtccgattcagatctgtcgctcgggactcaatccagtcgttttaaatccgatgcgtccat

SEQ ID NO: 181931 - DNA, 441 bp, Zea Mays
ccatggtagtggattgtgctactgagttttgttttttttgaagaccaagacaccaatggtcttcctaagacagaaagaaggatggtactggaaggaagctcctggatcataaagatggcaatgtaagtgtttgatcaggcgaaggagtgggtatctctttctagaaggattttggaatgaagatggtgtccgatcgcatcgtcgttgtgttgacttcaactccgaagcattttggtctgtttgtggctgcttcatgcccttccttggcaggaacatgttgttgtcgttatcagttcgttgatgtcatttaggtttgtctgctatgtttatctgttttgttgtcgctacatgtggtgatgtaatgaccatgatgctattttccgagatgttctaggctgtgaggtttgttatgaccctagtattgctctcagtggttgtaat

SEQ ID NO: 181932 - DNA, 399 bp, Zea Mays
ctctagagtgaggggtgtctaggctagaagctgctcaatctcctcggggtcctcctcctcgtcgctatctccttctgcctccatctcttgttgcatctcctggtggtgcatttccaattgagcattggtctcgtccagttccacctgcacatcatggagctggttctctaggacctcaatggtattgtcctagatttccacctactgctcaagctcacgggtgcggttactcatctgctcaatttggagatctttatctaccaactcaaaaggacaagtctaccacgaagacctccctatcattgagggttggcttggtagtctgagctaggcctgtcaagtgtgccatggcatcgctttgcagagcctacacgctgaaggaaatggtgacgcctaaga

SEQ ID NO: 181933 - DNA, 615 bp, Zea Mays
cggccaggaagacgggcaaaaggacaaagcagtgggttgacggggagagtgtccgcgacggcattccatggtggcgacacggcatccagggatcctgctatggtagagttcaaccgggcgggtcgatgagttcaactcacaggctcgatcgcggttacattagagagctctggccacggcaagatgcctcatggcggcgagggtgatcgatttgggggaaattctgaattctctggctatggtgggtggattgaggtgagcagtggtgcactgagcacgtaacaagagggcagaatagagagggcactcaatttatagaggccagctacgggtgctatgaattttggacgaagatgggttcacgatggtgaagaggtgagtcaccagagcttgtctaccgtgccgctcaatggggtaagggctcgaagcagtaattggttgtccaccacgacttactatgacatggtacgatggcgtatggcgtggcacgatcagagtaaatggcggtcatgacggcggtggtcgtgcgaccatgtcgccggcaagtgggtacggccagactggctcaatccactccccctcacatcttttcatcctcgcggtaacatctcaccc

SEQ ID NO: 181934 - DNA, 574 bp, Zea Mays
taatatcataaccacaaactgcaccaaaatggtataagtagtgatcctaagagtatatctcacccacgaacaaatctcaacaacacctagaacataagaactctatagtttttcacaagatcacaaagagaagagaaaggaagaactcaagaggaaaagactccataaattcagcaagggcacaaactgaaattgaagccaaccgaaagttgtaggccggtccagcgacccttcctcagatgaaacaatacagctcacaggcacagtcaacagacaaaatcgttgcggatctcctgacacaatagatgactatctagagaagaaaactaatagttctaaaacaagaaagactaaacaaatggtagacaagagatactgaactaaccaaccatcccctctatatatagggctattttcatttcctaaactgtccctatttactgagagtatccactcaaccgggggcaaattggatcatctcctggagttttcatctgatggtcacgcccttcacacggatttgcttcgctttatcgcatcttccatgatgacgccatgtgccgcctctagtttc

SEQ ID NO: 181935 - DNA, 1310 bp, Zea Mays
accaaacctaggacaatcgacccaccaggccacaatcattcgaccgaggacatacaccgataagcagcgagagatgataactgacgtatcgctagtttcgatgtacaaggttgggacaggcatgataggctccttggaatcacgcggcccacaggcccgaccatcaggttgggagacagccacaccagaagtggcgtcgaggcccagccattatcgagccaatactaggtaagccgactcaacccatcttttccatattcaatattcgatactatctctcatttgctgggaaaaaacgtagggttctcgttaacccatgactgtgaggcggcccaggctgacccgaaaaacattttttggagtcgaagttcagctcgtaaagggttcgcgaccgctcctgaaaccccaaagtattgaaaagatggagcgtgccccagatggatcccccgtaaggaatgggggacttgggggctcgccccgcaaaaagaagggttcatttggatcagtccatcagggaccgctaagggccatgatctcaactaccgaggggagcatggtatgactcgccgttcccctcctggcggacgggatgtgtgggaactgggaaggaatagagaaaagataggatgtgcccccagacggatcctccgtaatgagcaagggacccgaggacccgccccacagaaaaagaggctcgtcgtaatctccgttgtcaacaaggagcatgagatagctcactcttcctctttcggtgaacagaatgcatgggaagggacaatgcaccctcccaaggcgaacccataatcaatagaaagaaatccaagcaacaccgtggctaaaccctgctacccacgatctaacacttcctattacctcagagacgtgagggacgccgaaaattagggatggctgccttagcgcaaggtaggacagaagcttgtaaaaccgcttctcggggtcgatgaggcatgccaaatctgcttggtgcgtgatcggagagtaagagaggccccaaaataagtatgccaaaagtcatttcctatgctaagtaccaagaaaaacggggaggtaaccattttcacttattccatagggaacattacaaaagcattaaggccgacacgcccgggccgtcccacgactaaagccacctacaaacgcttcctaactagggagatccattgactacattcgttagcgggatgatgttgacatgcccaggccgtccgcccgtcccatggctaaagctagtgccaagctcgtagcccgaccggaacttcagaaagctagggctctagcagcaccacgat

SEQ ID NO: 181936 - DNA, 937 bp, Zea Mays
aacactagtaaatttattcctcttgttgtattgattaaatttacttagtatcattgtttttagtcaaaaccgtctattcaccccccctctagccggtgtcctagatcctacaatttgatactggagcaacgcattttttcattactacatcatgggtagaagcacataatcttccaataactaccatgtcaacacctattcaaattgactcagccggtggtagaattcgagccgatagcatttgtttgaatgtatgtgtggaaataagggggatagtgtttcccgctaatctcatagtaattggtactcagggaaaagatgtcatcttagggatgaattggctagataagtattaggcagttatcagttgtgataagaggataatcaagcttgtgtccccactaggagaggaagtggtgaccgaattagtcccgcctaagccgaagaaaggaagttgttaccagatggctgtcgatagcagtgaagcagacccaattgagagtatcaaggttgtgtccaagttccctgatgtgtttccaaaggacttaccaggtatgccaccaaagcagaaagttgagtttgctatagagcttcttcctggcaccgcccccatctttaagagagcttacagagtatctggaccagagttggttgaactcaagaagcagattgatgagctgtcagagaaaggttacatccggccaagcacctcgccttgggccgcccctgtcctatttgtggagaagaaagatggcaccagaaggatgtgtatcgattatcgagctctgaatgaggtcacaatcaagaacaagtaccctttgcctagaatagaggatctgttcgaccagttgagaggagccagcgtgttctccaagatcgatctgaggtcaggttatcatcaactcaggatccgaccttcagacattccgaagacggc

SEQ ID NO: 181937 - DNA, 525 bp, Zea Mays
tgggggtagtgggagcccctatgctgcttatttagctaacaagtcttcttgctcattatcctctctttggatattttttaccaaaaatcattcgaaggaggcttccatccttcggactgtatcaagatatttttcgagttttgggtcttttgtcttgctgcttttgtcgacatggcctataattacttgagagtcagacttaagtaccacccttcttattcccatggctttaagctttcgaagccctaacaacactgcttcgtattctgctatgttgtttgtacacttgaattctagcctgaccgcatagcagattcttatttttatggtgaaatcaaaacagctactgcgcctccaccgaaggttccccatgtgccatcatagaatattgtccaagcttcttcatctatcaagtgtccttcttcatgagcccctggtgtccaatcaataatgaagtctgctagtgcttgagattggatcgaagatcgatggacaaagtcaatagtgaattcatttagctctgtg

SEQ ID NO: 181938 - DNA, 686 bp, Zea Mays
gtgggagtgggcggaatccgctgaccaggggaaatgtggtcgtgggagagcggttgctccgattgtgagtggatctgcggcacggggtggttgggtggggcagtgaaggccgccgagctggggaaggagctgtggaagccgccagctagggagagaggcggtggaggccactggccgggggagaaagccgtcgtcgaccgccgggctggggaagcggttggggaagtcaccagctagtcgaagaggcggtgaaggccgccggctgggggagaaggccgccatcgaccaccgggctggggaacgagctggggaacgagctgtggtagccgccagctaaggggagaggcgatggaggccgccgtcggtggaggaggacgcctggagaacgaagactgaacgcctggagaacgaagaccgtggctcagggtaatccgccgccggctaggggtaaatgtggttggtgttgtttgctgaacaccctaaaacgacacaaaagacatttttagttgaggttgtacgtaattgaacacaagccacgttggctagagggtggatggtaggcagtgtgctcgagagatacacggttcgatccctgaggcacggttggaatgttttttttgctgcggaacagtaacagaacggtgaggcagaacgggagagggcagaacggggtggcagcctacccc

SEQ ID NO: 181939 - DNA, 577 bp, Zea Mays
tttgcaccaaggtcttgcagtatcctaatgttttggttgatcggtgtttacaacacgaaagttagccttgccatttcacgtcaccttttcctctatctacctgaacccacctgatacaaatggttctttcctctatttacactaattggaaatgtttcttggatctgcatgcaggaaggtgctcagaattgtattaagaaaggagaaaaatatagctacaaaaccagttgtttggagggaaataaatatgtggaatacaactacatgaactctcaagggaacctagcccgcgcccactcgagtcgatcaactgagctgtgtagcttgggttggggtacacttgttttgcactttgttagctgtgggtaccctttgagctgaatctcatggatagagagaacccttttattgttgttcaagtttttgtatgtaatcttatattcctcatgtaagcatacaggctattgcttctcggttgtgtagacaggatgagaaaaagactgataaacaaatggtcggcttgaagagggcaagaagatgatacatgtttgagatggggaaaatgtgttatgcaaac

SEQ ID NO: 181940 - DNA, 628 bp, Zea Mays
gagagcccagatgtacacgctgagcctaacaatggcgttgggggtcagctgatgaagataaatcccgaattttccaagacttctgcaatcattccatgtagaggaaatctcaaccctgctttgaacaaactcttaaaaactacaacttcatcatttttcggcttcgggatagtctcttccccgccaaagcgaaccaaccccttatcggcttccttgaagtagcctagcttcgtcatcatagtcatattagcttcatacacagttgatttcccaaaatccaaatggctgggcttcgatggcataataatattataaccaatccctccttcattagcatcaccctcttcaatatctgcatgctcggtttcagcaacgggtgattcttcatcagcagcgccttcagtcacaaccaatcccgaccgcctcataacttcggagatcggagcaatttcagcaacttcggcttggccattttgatgttgaattttttgcgttttgacgaagttgaaaatttttatctttgtcgaagctctttcttgtcacgaagctagagcaagatgatctttcggttcagaatacagcgagcaagcttcagctgtggtcaaattttttgacagcacaacagtgc

SEQ ID NO: 181941 - DNA, 931 bp, Zea Mays
ttaacctaccacaacgctcgataaatcccataatgtttctgattgcatggtcattatcaccaaagcccacaatttgggcttgattgcacgtatagttttccctcacctggagtgcgttgttgatgacgtggaggtcatctaacttgtcggtcaccaagatgatcgaccaaaggtgaagatcctcacagtgagagattgaaggtgttagcgaaaatcgccatagcaacatgttttcccttgcgagggcccctatttggaacactaactgtccttatttagtactgcatggtccatcatgggatgatccacaaggtgggtatattcgtaagggacttggaggatgaaatgtgatggtgtattgtcaaaggatctaagatttggatagattcaagcaaccaaatcattgtaccctatgtctgtatggagtggttgatgcttgtattgcgtataggtgagtcgatgttgtgagccggtgtcacgagttgtctctagatgtggctgttttatagagccctttaagggttcctagctcccttttatatatgcaagggctagagttgcaggtcggttatgtgctatagatctaacttaagttataacccgagtataaatcacaacagagatcatagccaagtagaacttcatattgtgtttgcaagggatatgtcatcttgtattgtatatccttgatgacgtgggttgatccaccaataagatgtttagtctccatgagctcgaggaaccctatgtgacatagctcccacaaagacgctaaggataattcaaaaggtggtacacatgctacaaaggcatatttgtatcttgtatactttagcatcacttagtagtgatatggttgttacaaatttcatatgtacgcatgtgtgtgagcttgaaaccaaaccttttgagcacacatgtatggggaatt

SEQ ID NO: 181942 - DNA, 1067 bp, Zea Mays
ggcccttgcgtttctgtctaacagcgaacgagttctttcactgtttaacagagccactgacaacttgcaaaagagacccccggtttctgtttcttcgcagtgggaggtcctcgacggcgtcgagcgcggagaggctccggcgagctcctgtactggccgaatggggctatgaccggcgctctcgagcggctaacactcagttgaactctccccgaatgattcccctaagttaatttctcatttggtaaactatcctgctctgtccacgtgaaccgcggacgatgaagaaatggtacgtgttcccggcaatccctggcggtccggttcaattaaaggggtcggggagcatcaccatcatgtagggatgctagaacaggaacaagaagggaatgagtagacctggggaaggctggccacggtagggtgtggttctcggcggcggagagggatttggggcgaattcaaaattcgcgagttctggcgaaggactgctagcgattagcggtggccgggtggaggatgaccttgcggagctagcgggggcttcaatttatagggctcttcggtggtgaccgtgaatttgggcgttgatgtgcggcggtcggaagtgaggaagaacgttggtgcagtgaacacgtgttcatcgtcgtggcagtaactccggtggtcgacggggagtttagagggagtcacggcgatgcggtggcacggttaggacacgcggtggacaacgacgatggcacgacgacggtgagcacctttacccgcgggcggtgtgccaggggaggagtaccgcggctgaccggggtggcttccggcttgacggcggcgaagatctttctacccgaagcgttatccggttaccagcgagcgtgaatcctaacggcggcagcgcgaatctttgcgcaggggggtcaccggcggcgagcaagctacgctggcattctgatccactcggtctactgtaccatggcgagacccttgcagtgcacctgacagccacggttgagggccaaattgctcctaaatttcaatggcaacacacctaagtttctgcagcaaagttg

SEQ ID NO: 181943 - DNA, 453 bp, Zea Mays
ggaaaagtcatacgatgctgagaactttcacatctcatctgcgttaaaaatgtgtggtcctgacagcgcccctgagaaatatctgaccacgagtggacccccaagtgctcgctatatatgctgggttgcttcgaaggaggaggcaggcagcatgttttttattgtaatcgttccttgtaatccagattaaggagtatataaagtggtctcgtaggcatacagcacgtacaacacatgtcaatattcagctgagctcttcgtctggggaaaaaacagctggcgctgtcgattagcatggaagatatccttatggtaaatcgctttgtgtattaaaaaaaatatgtgttggattggaaagcatttttccaactagcaaaaacgttggttcaacccttctttcttttagcaatcatttacaagaagcccacatcaatcaggcttccattccatccg

SEQ ID NO: 181944 - DNA, 442 bp, Zea Mays
tgagagcaaataagtggcaaacctgttgtaccaagcatgtcagacggcatagagccaaaggatcgcggtgagcgccaggcagtcatggcagccgacgatctcctctccttcctctagctcaatggtgtactgccaccctgccgcctccaagttcatttacatcagcatcatccactcctgttagttggtcatgtgaaactgagtcccgatggcagatgtctcctcaaaggtgtggtggatcatgaccttgcggcgccctctgtgtggttctaccgagggtgaaacatggcgacctcgccgccttctataaccaccgtctggtagagcagagtggcgatccacccatggctcgtacggctccaataacaaacgttagccgaaactcttttccggcgatgatcgaagctccggcaaggatgaaccaatcatcagaactctcaac

SEQ ID NO: 181945 - DNA, 613 bp, Zea Mays
attgagagttaaccgaacaagtccttattgggttggttgagtttgatttacttgttatatttttatgtgggtatggaacaggtgtcaaggtggctatatccatcggactctttatcccaccttctatctcactccatattttaaactctactctgtaaatagtgcgatacagtgtaaaacaatgttttgcacgaccatatacatactctgtagagccgaccttactaaacatgggtgatatgggtatgggttgggtgcggtttggatttcctacatggtgtatgggtcgggtattggttggttgccattaggaggcctaccttttttaggattgagtaggtcgtaagacttgagattctgtgcatgtttcaactgcaactgtatgggactagcgccaaagctaaatgagaaatctagcgtggtgaaacacatttcaaattgtgaatgatcaagggtagagtcaagaatctcaagagtcctacaaacatgagggctagtttagaaactcaaattctctttaagatttgagggactgaaggaaaaattagttcattttcttctcgatcccctctaatcccggaaggtaagtttccaaactaggcatggagggcct

SEQ ID NO: 181946 - DNA, 289 bp, Zea Mays
ttcaatcccagccgcccgatttacatcagcggccacgattagatcacaagttatgcgatctggtacactctaatggtcgttggatcaaaacttagcggtcgagattttaaaacaccccaaccaaatctcgatcacacgtctgaaatcgaacggtctagatcaacttgcgcgaaagggtacgtgcgctctaatcacagctgcacaaatcgtgatcaacggcccaggagcccttctcctacctctcatacatctcgcgtttctcccaggcagcggcggcggcgcccacacg

SEQ ID NO: 181947 - DNA, 437 bp, Zea Mays
ttatgcagaggattgaagagccggctgcaatgccgaaggctgacaaaattgaagaaccgagaaccgaagggacgaaaacatcagaagttctaagcccttcggcaggagtggaggcgccgaaaacacaaaaagatcaagcagcaacccccaagagaaaaaggatggctagtgtattagatgtgctggagacgataaaaacttcaagccctactccaggaaaaattgccaaggcttcgaaaacagagattgaaaccgagacaaagttgaccgaagccaaagctatactgagccaggctgacgccgaagctaggcctttagtgcccgccaaggagaaatcctcggaaactggagaaaaggcagcggaagaagagggtatagaacagattttgcttgaaaaactgccgctcctgctcccgaagcgtcttccgaagtccttg

SEQ ID NO: 181948 - DNA, 755 bp, Zea Mays
cttggatcctgcttctgcttgtcgccggcatggcggggcgagcctcgacctctcttgcctttgcccatggtcggatggagaagaggataaagggagaagaaagtagcagatgatcaaaggatgagtgaagagaacaatggtgcaagcaggctatttatagaggccggaagtgaccgtccacttcctaccacgctcgccgaacagtcacaagtattcaataagcaattcaagccgcctgaaaatgagttaggcaacagacgtcgctttgcgtaaaacgacaccatttggaccaaggtcaactgctcgggcgatatgattacaccccacggtcacatcaagttactactccaggacaatgcgttaaacactctgcgtaccaaggcgccccttggtcacacccattggggggcgggggtaactaggaattttcaatagattttctgaacaagtcatatccatacggtatacacaatgaatgtactgagatagaaggaagagatcgatagagatcgaaggaaatccaaatatagctactgaactgcaagtctagtcagcagaggcattgaagcacagagtggggtgaagaccagccaagagccatttaccaaacgtccaatctatcaccattcaaataaatttcagacctaacaaggtgtgggcagataatattgtttgaattcgcaagagcatgaaatgaagacaaaatgctgatttctaaagcatgagatgaagacaaaatgctaatttctaaagca

SEQ ID NO: 181949 - DNA, 1830 bp, Zea Mays
gtcacgccgaacctatagtcatagccactaaaaacgcgcttagatttaatgcactgtcctcagaatctctgtgctcacattgtcgcgccaatgtacgaaaacgcgtacgttaattgagatgtacagaaatcgacaagactgcacaaaacattgcctgttttcggaaagcaaccaggcatcatgtaccaaccactcgtcctattgaccaaactccacgttgccatcatgctgcacggatgcctcgtctatgcaaaaccagtcggttcagcatcgagagcgaggataatcctgcgcaacaaaaaccgacactgacgtcacctttgccactgggtttaacacatcaagtctctgaaatgtctgcatacaataagacccttatacatcgaacagtatttacaggagaatatacatggtgtattgagcctgtactgagataaatactctacaaaatctgccgccagcgcatcttccagctccagggcgccgataaatatcacagcggcagacatgccagatcctgcggcattgtcatgtgatgcaggttcgggccttctgcagaaaacctcattgcttgtgcagttctcagcatgctctgagatggctaggtactgcagctagatgacatcatgaatggatgctaactttaccaccactatcagagacctaaatcgaatgacggaggtgcaaaactcatgtctgatgcattcttaatttccactggtttctgcgtcgattgtgtggtcttctgtctccactgttcggttgcttgagcttcaattgcatcaagatcaaggttctcaaagaaaccatcatcaaaatataggtgatcagcgactctgctggcgacgtgtggagatggttctggtgctggttctggttcaaggtttataacagggatcgccagaggttgctggaagcttagccttctctttctgcaatccagcttagtcgatgattcacaattggcgatccctctttcacatcgatcctgtacaaaactgtacgatgggcttgggtttatggtatgatgttgtgtttgaatctctttgggagtctcagtgtaattgtgcctagcctctgaagaatagcttgaatttccggtccgagaagcagaattgtaagaaacatcaaggtaccttgagggtagaactactggggactgagtaaacaacgattgcctgcacaaacatcaaacgaaattggcttcaggaaaaatagcaaacatatgaactaaactcgtgcaaataatgtcaaactatgttacaggctgaatatcttaatcataataatcaaaccgtgcaaatccatttgttttcagttgtaaaacaacgcggtaattttgaactgtaactatcgattataaaacttcagcacttgtgcttgttgatgccatattgaatgccaggaacacaataaccacaaacatgcaatctagatggacatcattccaaaactgtgccggaaatgagttggctaatgatctgataatacctgtagaaacccatcatgtcaccattgtgtcgatcaccttgttcagtttgtgtaaattcagttggagttgcctgatcatcaatgaagctatcttcgtatttatcttcactctgattatcatcctcatcctctgaaacatatgcatcttcagacaccctaatgcaataatgcaagagtaaagttggaagttggtaagataacatgacgcataggtataggtaagccataaaaatagcaaaaaacaaccagcaagagttcgtctgctggtatgtagtttccattcgaaaggtgacaggaatcttacccgacttcctcgtcaatataggcatctagacgcct

SEQ ID NO: 181950 - DNA, 299 bp, Zea Mays
gtcgccctcttcggctctcaccctacctatgaccacctccgcgttttcggttgtgcgtgttaccccaacatgtccgccaccactcctcacaagcttgcctcccgctctagcctttgcgtctttcttagctatactagcaatcacaaagtctatcactgtttggacctttccaccaacagaattctcacctcgtgccatgttgttttttatgaggcctcgttttccctagctggctcttgagactcgatcactaaccttgattttttgtctaaccttgaggagtcgaccttgctgatcgg

SEQ ID NO: 181951 - DNA, 473 bp, Zea Mays
gagaaactagcaaagccaaccctctaatgaggaagggcacaaaaacaaccgctttgtgagtatcctctgttgggacggtaattccccgctagatccgccaagagcataactctttggacgaaagaacaccgacctcgatgaggcaaagaagatcagtttctaagacaacgaaggcgtagttaccgtagaaagggagttggctattgggatcaaccggagggatatcgagcatggtgaccccctgtttcctcttcctaggctccatctcaattcttcaagcaagaaggctcaggaacaacacaagaacgagtgggagtttgagacgctagagtgcggcagaggagaaacagagttagggttcaagcaccaagaaactattgacaaagatatatgtgcacacactaagtcgggggtagcgtagcaggcaaataactcggactggtcattggcacaacagagcaaagcgaatggac

SEQ ID NO: 181952 - DNA, 347 bp, Zea Mays
atcacagaccacatgaatctgcaatcagaacatatgctttgactaaggccaatggaccatatccgcaggcgtccccgagaatagatcaaatgccaataagtcaaatgtggatatgatattaatcccgggtatatccacatctacatcaggtagaagcattcaaaccaatatggttactcctcaacgatttctggcaaactccatatacacaggagtacactctgaacgacgagttcagtttggcttttgtgcgtttaatagaatattgaggcattacactatatgggcattcctccccctaatgccgagatgttctaaaagcatacagataaaatccccaaccacaa

SEQ ID NO: 181953 - DNA, 625 bp, Zea Mays
aaagcgccaagtcatcactcgggaaagcgagacttcagacataactcgactgttacctctaaaaatgccgacgggatcaagcataacttggttgttacctctaaaacgtcgacagtgtcaggcaccaatcgactgttacctctaaaacgccgacaagatcaagcaccactcggccgttacctctaaaacaccgtcagtgtcagtcataactcggctgttacctctaaaacaccgacgggatcaagcataacttggttgttacctctaaaacgccaacagtgtcaggcaccaatcgactgttacctctaaaacgccgacaacatcaagcaccactcggtcgttacctctaaaacgccgtcagtgtcagtcataactcggccgttatctctaaaatgccggcagagggcataactcagcagttaccagttatcgcttggtgattatttctaataacgtcagcagcattaggcgcaaagacgaactatcaatcgactataaagaaagaacggcggaaaaaacgaaagtttgctcggaacagatgaaatttcttcattacgtagaggagggaagtttttcacaaacttaaagactaactcattatgagtcggccttttttccctttttc

SEQ ID NO: 181954 - DNA, 528 bp, Zea Mays
ttgacacagtaaatagtttgcttgtaccctccatctccgtcgaccctctatactcatggtccgtgtcttttcccatcctcgtacgagagacatgagagtctattgttgatttggacgtaatgagtatgagggttaggcaaaacaaggacactctccacttcacgttgtgtcgcgacaactgtcgtggtagtggagacccgacacagagcaatctgatttggtttggcttttcctcgggttacgcgcgtttcgcccgatccctcgggctcgcctccatctcgcccgaccctcggaggttcctgccttcattcagggtttgaccctcgagcgaggcaaaggttatcctatgaggtcgaatgttgttcgttcatgctcttaggggtcgactgtgacttttttaggatgcttctatttttatgaccatatgggctcaggggttcgaggggttttacaccgataaatacatatttgtcatatcctcgatacatacatgatgcatgaagataactgtaacaccatgaatttggg

SEQ ID NO: 181955 - DNA, 575 bp, Zea Mays
ggatcatctgggtgctcaccttccctttagaggagagagaagagtaggaaagggaagggcggtgcattggtgtgcgtcctccacccttgcccctggacgctggagataagggggccgccatcgtaaaggacagggcggagaggctgtgttgtcgtgccgtcgaagaagataggccatgacgcgcgctggtgcggccgcagcgcaagatacgggcgtggagcaggggtggccgacaggcaggagctcaaagagacgacgacgtggtacatagagtcacgagttgcagcagcgaaatggagattcagacgaaagcgccacagagtgacgacttcgtcatcccttttgcggccttgttggccaagcggatcgcccaaacgcaacgacccttttccggcaacagggcgcttctagagtcctggacggacgttttttccatgcaccgacttgaacagcggcaacagagtcttcgcgaaagagggaggacaactgatgttctacgtcgttcaaagttgaatccgacggtccatattttcctgccaacgtggataggctgaaaggccacgttttggaccggc

SEQ ID NO: 181956 - DNA, 444 bp, Zea Mays
ctctgctgatcatcgggcggcgcggtgttcgaacagggtgcggtgcttcttctgcaggcggccggggcaccgtgtgagcgagtgcccgcgcaggcaaacgaacctggccgctcctgtgcgcagactggtgtggcggccaatttccatggaggccccggcggcggtcgctggtgccgaccaagccatggcgggtggctcgacgcttggtggttccgatgccgcgatcagcgggaagcggcgtacccgccgtgggcagcgaaggcgcaggtccgggcctagtggtggtcttggcggtgatcctctgctgctatcttcgggagacttgtcgcccgcggctcaggatggtcctcgccctgtgaggtttattgggcggtccaggatgctcgaccgtgctgagttggagcttcgccatgccctgatcgtcagcgttgttgggcaagaagg

SEQ ID NO: 181957 - DNA, 898 bp, Zea Mays
tcggtccagttctcgcatctatctgtccggtcccattctttttatgtcgctcgaaccagtctggctcaatatcccgttctcgatgccgcctgtcatagcccctttcccgagacacgccagtacccaaccccacccttcctggtgatcatgtcctgcttgttgtcattatgacactggcctgtatggaagctcctatctcgctcgtcacgatgatgcgagcggtccccggtggccaacgagcttggtgaacaagcaagccttgagtccctaccagagacatcgctagaccccatccatttatcgatgccctcgcccttcgaggaggtcaacattcgactaggtataaatggctttgatttggccaacaaaacttagcgacatgtttgatttttttgttcatatagttttgatttatatcatgttttgatataaaatttgaatcctaagcaacactagtttttacactcttggttattttatcgtgaggtcttcttaaccccatgaattctagttccgcgttcaccactttcgaatcaaatacgaggaggaaggtcctagacacagtggtccaataatcagctaccacgggacacgtatgcatgcattagagcggatgtccgaggccaaaaaaggcaaccatggccaagggaagctcgatcgagactttagtgcgcgagtcagatttcgatacaaagatggacggtgattttacatggagggcccacacgtcagtgtatccttgcatacgtacttgcgatgaggcagcctagcgttcggtcccacctgccagtgatgtggtgtctatatgcgctcaagcgaaaatactgcctcgtgggtcccacacgtcaacgacaccctacgggcacgcgacatgggttgtgttgtgcggggggaagcc

SEQ ID NO: 181958 - DNA, 603 bp, Zea Mays
cggacatcaagtcacatgggacgaatttaaattggcgtttcgtgagcactacatcccagaaggagtgatgcatatgaagcaggaagaattcatgaggctcaagcaaggaggagatactgttatgcagtatctcaacgaattcaatcatttgtcctagtacacaattgaccaggtcaatactgacctgaaaaagaggaattgttttatgaggggcctcaatgaccggctacaaagaaagatggccacctgcctcgatctctcctacagcagggctatcagcacagtgctggcagttgaagctaagcaagcaggcctaggcaaatcaaagggaattggaggtgaccggtccaacaaggggcctgaaaagcgacaaaggttggtaatccgacctttcaatcaaaatcgttcttcgcctcgtccaccctcctaccccttcaaacatcgtgtattcatccgccctgccactgcccccactttaataactcagccgagtacccctagtgctcgtttcctcgtcctcccgagttcttcaattggctgcttcaattgtgcgaagtctggacattttatcaaagattgcccatatccgaagcagaacaaatc

SEQ ID NO: 181959 - DNA, 661 bp, Zea Mays
gggggggtggggggttgtctcggcgagcgcgcatctgggggtggcgttgggcaagggcatggccttgactggtgtggtgatcccctcgggcgctgatggaaggggatggtggggggatgtaaagtgagttcgtcggttggggtttctgccttgggtttgaggcgttgcttcggcgctttgagtgtcggcaaggttacgtgatggagtagggacgcggggtaagaaagccttacagtgagagaagctccaggcagcagcggttgagatatctaggcggcgacctctccggactccaggctttcctccggccccctccgagctccacctacgcccgtgcttcttccctccagtggtggcccgctcgcgttaggtcccctctgccttgcccctgtgaactcccctccgccctgcgaggatttggtggcgctaatggtgcggtgtcgaccgaggatttggtggcgctgttggcggggcaggtttgggccatgagcaagggcgcgtgggggaggacgcaataacaacagaactctatcacaatgcaacactctgcatgatgatgatataatgtaattatgtaaaccattcagaattataactattagagttatggtggtttaattgtaatggagtctttgtgtaatgggcttaggcccaacaactt

SEQ ID NO: 181960 - DNA, 487 bp, Zea Mays
aagaaagagttgagcatggcaataaaatacttcattttctagcttcaaaattaacctctatacctttatactgttgtacgcgaggctatcagcaagatcatccttcgacaaaaccgaaaggccttcttcaagcttaggaaatcccatactcctagctatctcctggcacacgaatatttctttgttatcagggagacaatacaagaaatcatcttcgttggtaccattgaacactaaggcccccttcggatatttcagtctttgagcatagtgtttggcctccaagatttcttcttcagataattttttccccgaagcgtgccgaacaatgtaatcaatatcttcaactaaggcttcgaggacaggggattttgctttttctgccatgtctttctctatcgtcttgccggtatctgaactttgctgactcatcttatcttcaggcacgacgaccttcgtctcagtgggcgctgaaggcccagcttcc

SEQ ID NO: 181961 - DNA, 633 bp, Zea Mays
tggccagattagtattccgggccacaagctttgatccaattcgtgttgtgcgatgcgtgaacgaaggcgagagcgggtgactagttcataccggcgattgaggggcgagcgaggtaggtccacggcgcgggcggagtcgcggcgggttgcgtactccgacgaggaattggctcaccaccgcaggtctccccgacccgattacaccgtaacgccaatcaccagaaccagttggttcgcccggacccctcgcaggtcaccggaatgatcccaggtgtgatctccgcggcggcggcgatgttcttgcgcagcggaacgcggcggcgcaaggatttgcgtggagtggaggcagcaaagaaaagggagcacgagcgggcgaggttgtggggtccggtatttgaaggcgtcatggagttcggggtggctgcaacggaacccgtagctcacggcacgacgcgacatgcgcggggggcgagtgacgcgtggagaagacggaggcgcgagcggttgagagactgccctgcgggtcccacgtaccatgaagtggtgagatgaggcgcgggcgagcgactgtcccgtggggcccggttgacagcgagcagcgcaggtgcggggtagagtctcggacatgtgggc

SEQ ID NO: 181962 - DNA, 562 bp, Zea Mays
gacgagttcgcttgctgtcttgccttcttttgccttgtgcttcttccagtctcatctgaattctcatctcatgttgatggacctatcaaggaggttaggcttaggacacacacaggcttggccttgctaaacgctatctgtcagatcgtcccacaccacgtcgtagcacaatccctgcagtcgctcaaatttacttctctcaatgggctgttgggaaacaaaaacgcacaactcgggctcagccctatgtatctgtcaatgggcctcaagtcgtgggctccggtaagataaattcgccatccttattcatgggaacaacatttagtttgcccaggcgcttgggtcgagatcgaggacttcaggcggatatatgaggagctggggaccgtcatttaggggtgtaattgaatcggatacggacgaatatcatcgaaactatatttgttccatatttttgttcggatttgaatatggatagcatcggatacgaatacaaatcagatagtcatgtatcgaatacggaactaattggacacagatagcgtcgataacggattttttt

SEQ ID NO: 181963 - DNA, 658 bp, Zea Mays
ggcgaggtggtgcaggcggaggcgtacttcgcgcacccgagctacgcggaggcgctctggcggcgctgcggcggtgaggaggccgagattggagagtacaccgtggaccatgccggcgagtacgtcccgaagagtgagcgccttgccgacgctgctgggcttattgacgccatccataggttcgtcgccactgccacggacaaccgacgtcgtgctcacggattactaccatagttcagtgaatatgtcacgtgtttcctcttttcctgggctagtgcttcggttgcagctgagtctgtcacgaactgtaattcatcctgcaaatttgcagacactgcttttaggctatgcaggtcgtcgtattatgtattcagcatgattgaatccgagttttacgaatgagaaatgttataccacactttgtttggacacatgattcttctcttttcttttctttttctctccggtgagtttagacgaatgttttgggaagcaggcagaccaggagacggtggcaaggcgaaagagacagggaaatatgagatggccgcagagctcgagcgaaatcctatcatgggtgcggccactgcggtctgcggcggggcggtggacggcagacggtaacagcacgttgggacttgggacgagaaagaaatag

SEQ ID NO: 181964 - DNA, 425 bp, Zea Mays
tcgtctcgccattaactcgctcgccagcacggttggcaccttgcgtccctgtccccttgcgccagcccgagccatcccgtcagcgcctgcccgagtcgtcccgtcgttgccactgtgcgccaccatcaccgtcgtggcaagctcgccggtgctcgccacctctcgcccccttcgccgccccgggcgcctataaaaggaccgtccgagctccctctttctccacaccggcctcggccactccctctccccttccccgagctcgattgagccagcgccgccatgcccttcctctgctccagtgagtcccaccctcctctctcggttaagttatggtccaattagtgtagctcttgagcttcaccactccctcacaaatacaacacacccatccccttcacctattgcgcccggcatccctcgctagc

SEQ ID NO: 181965 - DNA, 804 bp, Zea Mays
ctctcctccatcttacgccgtccgtgcactagatttagaaacgatgatgctgacctgatatgatatgctatgccccccagcaattccgtgaaacgtgtgcgtggctaagatgctcattgctcgttgaaaattattaaatgcgcggtctgtcccgaaaagtatgcagatgatcaccacaagtccgcaacgcctagcggttcggtgtcgtttctctgtgcgaaaatagtgatccctcgtagtagttataaacataatttaacgccgcagtttggagccattattgtccacttgaaagctcctgaatgctagtattaatttcagggtgatgtggacgtccccaatcagacaaattaacttactcctagttaacccctagtactagcaaccaacagactcgaggacagctccatgccgtaggcgaacaccgatgacagcgaccacgcacgacagggaaagggacagagaaggcgtcgcattcatcattcctttgtccacattaccgacctacagtagcattttggaatcgatttccttctggatcctgctcaataagctgctactatttctttttatctcggctccatgcattgctgcccaaagccccaaacaactatgcatgtggtgtgtttcctgcttgtcctacgccgacagtgccccagctgcacccatccattgaccgctcctgttcatgtgttcctgacatgcatgattcagcaattatatcatccgtacgtgactagttacgtgcccatgcattgccacggaataaaaaatttgtatgaaacgtagatatgaaacgataaa

SEQ ID NO: 181966 - DNA, 433 bp, Zea Mays
catggagctgtgattaggcacaaggcaagacttgtggcccgtggttttgttcaacaggagggaattgattatgaagatgcctttgcaccagtcgcaaggatggagtcagtacgtgttttgcttgctttagcaacacaagaaggatgggagtacatcacatggatgtgaagtctgcgttcttgaatggagaactgaaggaggaggtttatgttactcagccaccaggttttgtagtatcaggggaggagaagaaagtgtacatgctacacaaggctttgtatggcctaagacaggcccctcgggcatggaatgccaaacttgatctgaccctcaagcagatgggttttgagcagaatgtgtatgaagctgctatgtacaggaagggatcaggtgactccctactggtaattggagtttatgttgatgatttgat

SEQ ID NO: 181967 - DNA, 649 bp, Zea Mays
aaggcaatagaaattccaggaaaaaggaaaaggccatttcggcccaaaccagcccaataagcccagtccacgcgcgcgctagcgcgcccttggtgcctgacaggcgggccccgcctgtcggcgccaacccgagcgcgctcactcccttgctctctcgctgctctgtggggtcgagctgtcggcgccgttctctccccctgtgcctgctctctctctgtcccgttgtccccacttgtcagccatccctaacctctcgcccacgatctccccgccgtggacgcgcccacgtccgcacgttctccgaccacgtccctgcgcccgcgccccttttgagcccaacgccctgctcgcccaccttccctcgctcatttgcgccctctgccaaaccctctcgctctggccacgcatgcagggagctttcgccaccgcccgccatcgaccactgcctgttctgcgtccaccatcgcgttcatgtcccgtccagtgccacggtgagctccgcctcgctgtcagctgctcgagacaccctttggtgtgtcctttccatctttgtttcgtccggtccgccctcaccagagcgatctcagcacagccagagccccaccgtcgtcgcctcgtcgtgttcttgtgcctccgtcgttgcttcgcg

SEQ ID NO: 181968 - DNA, 634 bp, Zea Mays
tgcttggtttgaatttaggcgaagaaatagggttttgggcactcggctcggaaacgatcgcgcaaaacgggaattttggtgaaatttaagcctgggatcttggattgacgtgaaatttggcaagtaggttactggaagtgtggtgaaagtgcctgaaaaatttgggttcaattggagcaagtttgactggtttgggcatttcatcgaacacgtggtgtgcggggagctagggttttaggaatatggccatttgaggtaggaataccctcccgaaggagccaaggacctgcagggatatgaaatagggacaggggaacacaatccaccaactggatgcaagggatttcacagaaatttgagtttaccaccaagggagagagggaagagctccactgcccaccaagaacagagaacaacagagaaggggagaggagaggctgctcaccgagggggaagaggaggggagcccaaggtcaccggagcacggccggggaggatggccgccggtgaagatcgccggcgaggggaaatcgccagacgcagagagctgggcggctgggagaagaaacaaagcctctggctcggcttggtcgggctgggggcggttttttaaaacgcgagatgggcacaccgg

SEQ ID NO: 181969 - DNA, 316 bp, Zea Mays
ctgtggattgtgatgcatactagagtatctaaacaagacctttgaagaaaatccatgcacccttgtccttgttccctaccacagagaaggaattttctccgtgcctaaccccaacgaggatcgaggacccaatggcgatcccagtacctgtcccctccgacacaataatagaccaagtcaaatttacctaatcactgcatatgaatataagaaagcaatgatatatgcattcataacatcaaacaaaactaatcttgaatatatgtctaaaatttgaacaaacagaaacaagaacaaagaaagaatatgactcaac

SEQ ID NO: 181970 - DNA, 376 bp, Zea Mays
ggagcaccattgatggtagggaatgtaggaggagcaccataagggggaatatatggagattggagaagaatcgtacggggcacatagagaagtgtatggataccctacgagtacataggagggtatgcatgaaagtttgtgaaggacagacatcagtggaaggggcttcatcagtgctaggaggagtgtcagtggttgaagacacaatagtagaaagggcgtcaacatttggtcagtaaggatatagagaatgatacgagtaagaagggagaggttgaggagttataccgtaatgacaaacaagatagtcctcccaccgatggtggacagaagaaagactgtaaaaaaaaattgtccacacccacttggatattag

SEQ ID NO: 181971 - DNA, 524 bp, Zea Mays
caagctaagatcactaactcattgttatgctgaatatgtgcatactgtttgaatttataagataaaaattgattaggcgtacctctctttttataaaccatggtatgcaaatggcgcttcaacctgtgggattaaagaagaaaatactgcttaatggtcttttcttttctgtttataacatctagctttctgtttataactcgagttgaggaagtcatactataaaaatctgaggacatgcggaatagaaacacattagaataaagaagcgactaacgttaattcatgatacttcatctgaatctggttaaagctgtgaaggtagaagtgattgttcatagagtaaaaactagaaattaatgatctcacagaggtttgctgtattaattcataatcctgtcatattatcttggatgctgttaggtatctttgaataagatcctttgcagactgtactcatacttccatcataatgaaatatcacaacataggatttgttgttgtgcattggcttctactccgta

SEQ ID NO: 181972 - DNA, 772 bp, Zea Mays
acgccaaaccggtgagtcagaagcctcggagacagtccattgagcggcaggatttcatccatgaggaggtccagaagctgctgcgcgctggcttcatcgaagaggtccatcacctagtatggctggccaatccagccatcgttcccaaggctaacgggaagcttcggatgtgcatcgactacaccaacctcagtaaggcctgtcccaaggacccatatccacttccaggaatagatcaaatcgtggattctacctctgggtgtgacctcctgtccttcctagatgcttactctggtttccatcagatctagatgtctaggcaagataggaagcataccgcttttgtaactatggatgggctttactgttatgttgtaatgccttacgatctgaaaaacgccttgccgacatttgtacgggcgatgagtaagacctttggggaccttattagggacaggatagaggtatacgttgatgacatcatggtcaagactaagagagggtcgaccctagtggaagacttaaccctggtctttgacaagctgcgggcaacacgcacgaggccgaactcggaaaagtgcgtctttgttgtctccgcagggaagttgctgggattcctggtttcgcaccggggcattgaagcaaacccagagaagatcaaagcaattgagataatgaggcctccggcccgaatcaaggacgtccagaagcttacggggtcactggccgcccttagccgcttcatctcaagactggccgagagggcgctacc

SEQ ID NO: 181973 - DNA, 425 bp, Zea Mays
gttgttttcggaaaatcgacaataaaacaaggacagattgatgccatgagggaaaggtatttgcgtgacatttctattgtgtgggctggaggagagagtaatgtccctctgcccgaagctgacgaggtagttgtctacagaagtttcatgaaagcggggcttcggttccctttggataatgtgctggtcgaagtgctgaaaaccttcgaagtctaccttcatcagcttatccctgaagccatcatcaggataggggtttatatttggaccatgaggagtcaaggacaagagccgaatgtgaaatgtttctgcaacttgcatgaattgacttatgagacggaggctattggaaaagagcaataccacaataatttcggttgttatggcttcgtaacctgttctgaagtaagcaatccagtgccaac

SEQ ID NO: 181974 - DNA, 395 bp, Zea Mays
cttgtggggaagggacttttatcttctttgcacgggttttttctgaaggggaaggtgaggctgatctgaattggcgcttcaaagatggagcatccatgaaatcatcatcggacaatgtggatggagctgaaggaggatttctttttacacgacaagctagtgcctttctacgaacacgatgaactggtgctggttgtggatcagtctgctgctggttatgtggattatcagcttgatgtgctgagctgctagatcgagttcgtcttgaaatgtcaacggaaaaaacctcctgacttgactcaatggttagtctttttgcattagttggagggcgatcaacagatctcatggttaaacactgaatatatctgttgaaaaaaatattgtttttaaat

SEQ ID NO: 181975 - DNA, 1006 bp, Zea Mays
gcttcaaaaacttgtccagatactttgactaggacaaatacaaggatagaaaacttgacttcttcttgtccatgacttagctaaatagtcctttgatcggcattgataatagccttattctgggctaaccaattcatacccagaatcacatctacatcttgcccttttataactatcatattggtggggaaatcatatctagctaaattcacgggtacatggaagactacttccttagtacaaatttgatccccaagtgattgaataacaatacccttctttgattcaacactaggtatgcaatggatctcaacaaaagccttgctcatgaaagtatgtgatgcaccagaatcaaaaagaatgacagtgggatgattggcaatggaaaacgtacccatcatcataggctctccttccagggtggtaaccacttgagtatagtaaagtcgtccagttttcctttgatctttgcatgcctaagtgcttgccacatttcccttgccttgagatgtgctttcagaagccttttggaaatttgatttattttgttttggatagggacagtccttgatgaaatgtccggacttcccacagttgaagcagttgttagatgaactaggtaaggcggggaaatgagtaccaggggcacttggctgattgttttgagcaagggcaagagtgggagagatgaaaactggttgcttgaaaggataggcgagtggacgaggaaaagagcgatttgggttaaaagtacgaattaccaacctcgaccgcttctcggatcctcaagaggatccttcacccccttcacacccaaatctttttgtctttccctaccccaaatttttggcttccaccaaaagcgctgtgctcacagccctgctgtaagtgagatctatgcaagtggacatctttcgttgtagtcgatcattcagacctctcatgaaacaattcttctttttaggtccgtttcaacttgctctatagcatactaggagagatggtt

SEQ ID NO: 181976 - DNA, 1040 bp, Zea Mays
cggcagccaagtcgcatagggccgagccccatcctcccgagcggcgtgagcacccaaggtggccgcacccggcgatgcccaggcaccagtacggaaatccctgtgcctggctctcaatcgcccgcagacgacgcgcccatacctaatgaagtccggcaatccccctcgatgccccccagaacccagcgacggcagcattcccaccgaacacaccacagcaaggcgaggcgaacaacgatggcagcggcttcaaggtcaaccccccagcccacacttcgatttattcacggtgtttggccgacctcccagaccgcaccgcagagaaccacacgaccgaggcacaaccagtgatggttttctttccctctttctctctttcttcttgcgtggctaacttggggctgctaatggctggattcaataggaggcgctagggccggctatttatggttccgggagagggagtcagggaagcgcggcgttggtgatggagagatcgagtctttaggagagggtctcaccggtgctggcaccctgtacgaaccggtcgcgacgccaatagcttgaagatcccttgatgaagaagcccgatcggtgccgaccgaggtgtagagcgatggctcaggtggcgcggtcgtcaacgttctcaattgcgatggctctctgtgtcctcccttcctccccgttctttgatttcttgccgtggccgagcgccgagcctatgggacaagggcatacgatgtctgtttatatatccgagtgagcgagaaaatctgttgccgagaagctcgggttgaggccgaatcggcgggatttgttggcaatcggttgtaggcgttgattcggattgggaagaagacgaccgacgcttggtcccacacggcagtgactaaacacacaagtgtgccagcacgtgcgggtgaggtgggggaaactggctagtgggccatacgtgtcagcgaatgtgaccagcgtggctgattgggccgaccaggccgtatttcggcccaaacggcaacatgtgagtttttcttttcttt

SEQ ID NO: 181977 - DNA, 424 bp, Zea Mays
gggcggcagttcgcccacgacagtgagaaccggtcgccggtgaacctgatggtggttcctcgccggtggtctggttctatgtagacgggatggtggcatagcacgggtggaggtagggggtcacggaagtggggtcaatttggccggtgggggcttggaacaaccagttcgcggtgaggtggctggcgcccgcggcggtgaggtcactagcgaggcctatgggcgtgataggtgaaggaaaagggtgcgccgcgttcatggtgaagtggtgaaactcgtgagccaaaccaattgaactctaggccaccagagaagggagggagggctcactggagcggagggagagggcggcgcgctggctcgattgagcttggagaaggggaagggggtggccgaagctggtgtgaagaaaactggagctcgg

SEQ ID NO: 181978 - DNA, 1111 bp, Zea Mays
gcagcttgtgatttccgttacatttcagacaggagtcataccagcatgaaaccagaagaaatcaaggagtacagaaagcagaagcgagcaaaggccgagaagagtctagatgcgtatgtgcagatggcaaaggctgttacatttcaggttgcctgtgcgaaagtaataatcgagacggatgatgtagctgaaggacttgaggagctcatctctcttaataacgtaactgagtttgtcatgggagcagctgcagaccgacacttctctaggtacggatcagactaacaaaatcgctctacttccttaaattggatgcacatcttacttccatgattctgaatgattaaccagaacgtcaccatactctctcacacttgaggacctgggatacttaaacaagttttcttacaagctggttatgtggttgcagtaacagaatactctattttctcttctaacaagaaatggataggaagctatagcatactcagaccaagcaatttcttaagagcataccttgcaatcgcgcattctaacagatgctctcaaactgtagagaaatgaacacgccaaagtcgatgacagcgctcaagcttttcaagacagcagctccatcatgcaagatgtggtttacttgtaaaggtcatttgatatgtaccaggtaaagggcgaggtccagctgacaccagaaatttttagcacttccagacttctatatatctacgaatagtacattccatttcagctgggaacccaatctactgtgtcattaaacaagaactctccccctgattgtcccaaaatatagtcagtattatattcaggatagaggggttgcaaatgatgaaaaaatattaaccatgcatatcaacacttacagggaagcaaatgaaagccttcctgccatacttgcatcacctgaaaaaagcaacgcgccgctgtcaccggcgcacaacgtttcaagtcaaatgggatcaatggcaaccgagttagaatacaaagaatcaagccacaaaggatacatttcaagctcatcggctgcagcagaaatgacggaatgggattatctttttggaggtgactatcctaaatatacatacgagatgtaatt

SEQ ID NO: 181979 - DNA, 694 bp, Zea Mays
tctttctcaaatttcaatttgggaaatccttggatgaggccaagtgagctcaatcgacacaaaagatcaaaacttcagtgaactagcctcctatgccacatccaaatcaaataagaagatcctaccaagagacgtcaagaagggctagaagaatgtgtaaagtcatcttaaaaaactcgaccaaaaggggaaatctggcaaacaaggtcccctaagcatccaaaactagagaatagcccttttaagacgcacttcaaagtcattctcaagcagttgcaaaagagaaagcaaattgaaatgcatgtttgaaaccaaagcaacatccttgaggacaaaactctcattcactcgaacaaagccacaagagacaaccttacctctcgacttatccccgaatgtgaactattccttaccaatcatggggttgaggctggagaacaatttggagattccaatcatgttgcacgaacagccagaatccatgagccacttgttgtctaggccttcatcctgcatcagtagaaacacacagggtgaacaaatggcacaacacttgggtacgtaaactgtgaagaatactagtgttgcggcatttgcccctgaaaattcttagggaaaaaacaaaaaaaccctggtcctaaagagaggcgatcatcacaagaatgaaattgtggtcagttggggaagtaagaac

SEQ ID NO: 181980 - DNA, 1378 bp, Zea Mays
atcaccaatttccgaagttatgaaacaatcaggtctagttgtggaagagggaaccatggacgaaggtacttctgccgccgaagctgaacataccattgccgaagaagatgttgccgaagaagaagatgttgaagaggatgaagaggattacaatattctgatctcaacaaaacccagccatctagattttgggaaatctactgtatccgaagctgacatgcccatgatggtgaagttgggctactttggggaggctgaaaagaaacttgtctgatttgccgaagaagaaaccaccccagtgccaaagtgatacgcccagcccaggtggggttggccgaggcccaacaagttagggttgcccggagcccaacagttcgttaagcacacccaactcaaggaaaggcccaatcgccccaaaagactagtccaatgggggaagggtggctctcccttttaaagtggcttcctcctcccaagttaagcaaggtgggataattctaaggctcacacagtcaccgtccgactacaattgggccaactaggccaattgcgtctttgccaacgggtaatagtggaggatgtcctcatcattcccaccttcttaaaatgggccctagctctgataccagatgatacacccagcctaggtggggttggccgaggcccaacaagttagggtttctcggagcccaacagttcgttaagcacacccaactcaggaaaggcccaaacgccccaaaagactagtccaatgggggaagggtggctctcccttttaaagtggcttcctcctcccaagttaagcaaggtgggataattctgaggctcatacggtcaccgtccgactacaattaggccaactaggccaattgcgtctttaccaacgggtaatagtggaggatgtcctcatcacgaaggatgatgaagtagtagttttcaagagttttttcagagtgggactacgacttcctctgaatgagatgataggggaagttttgaaaaatttcgagatatatcttcattagctgacccctaatgccattgttagactcagtgtcttcatctgggccctccgaagccaagggatgagcccagatgccgcagcattctgccgagtgcatgaattgcactaccagacgaaggccagggcagacggcctgcacgaaaattttggctgctacaattttgcgtatcgcaaggatacaaaggctctagtcctcagttatcgcaccaaatggccaaccagctcgaaaggtgaatggttttatatcaaggccgatgaaaagaaaagggggaaactgatgacgatggtcatgtgcccgctatccctcaacttcggaatgactaggcccctatgcaacatgcagctaaggtcagc

SEQ ID NO: 181981 - DNA, 1291 bp, Zea Mays
accgccttaagtcattgctgacttaaaccgattgctctgttagtagggcatagtggtcaccccgagttaagtatgcgtgagcatgtcgcaccgccttaagtcgttgccgacttaagccgattgctctgttagcagggcatagtggtcaccccgagttaagtatgcgtgagcatgtcgcaccgccttaagtcattgccgacttaagccgattgctccgttagcagggcatagtggtcacactgaattaagtatgcgtgagcatgtcgcactgccttaagtcgttgccgacttaagccgattgctctgttagcagggcatagtggtcaccctgagttaagtatgtgtgagcatgtcgcaccgccttaagtcattgccgacttaaaccgattgcttcgttagcagggcataatggccaccccgagttaagtatgcgtgagcatgtcgcactgccttaagtcgttgccgacttaagccgattgctccattagcagggcatagtggtcaccccgagttaagtatgcgtgccaattgacagtgaacaatctgagtgcctttgaaacctttttattgatgatatttttctcaatttacagaatacatcgtcgttccgagagcctccgcgatgtagctacgggtagaacttcctgagatgttctatgttccatgagttcccaatttctgttccgtccatctgagtgaggcgatatgatcccggccgagtgacttctgctactatgaatggtccttcccatagaggtgacaatttatgccgtccctcccccgttagaattcggcggaggacgagatctcccactgcgaaggatcgacgccgtatggccttattgtgatagcgcctcagagtttgctggtatcgcgctgattgaatcaccgtattcagtcgctcttcttcgagtacgtcaacatcttctagcctagtagcttcagcttctgctacatcatcaaagattaaccttggtgccccgacttgagatcggcaggtagcactgcatccgaaccataaaccataaagaagggggtatttccatgcagagctcggctgggttgagttctcaggctccagactacgtatggcagttctctgatccattttcctgcgaatttctcgttcttgtcgaagactttctttctgagtgcttctaatatcatcccgttagctctttctacttgcccgttggcccttggatgtgccaccgaggcatatttgatctgaatgctcttttgctcgtagaaatcgaagaattccgaactggtgaagttggatcctaggtcg

SEQ ID NO: 181982 - DNA, 517 bp, Zea Mays
acgcccaaaagcttgagggtactcgcccaaagcgtcgtcgccaagtcaatcgtccgactgcgcctgctgaagaaaagaagaagaaaaggagacggcttcgacgattgtcatgcttggatcagggtgctggcccttctgctcctgttgctgaagaagtaccggcagaggtctttactggagttgatcccactggtggtgtacctgctgaagttgaccccaatgggtgtgaccgtgcaccgactggccccaatgggtgtggccctgctgaagctgaacctaatgggtgtaatcctgttgtagctgagcccaatgggtgtgatcccgcaccatcttttgtccacatttttgatgatgactaagaagaagaagaagaagttccactaattcgcaagaatagccgactctacagaggtagtagaggagatagtgatattccttctccagccctgtctgctcttgttagccttcaggatttatctataacagattttgatcagacccttgaggatgtcattcc

SEQ ID NO: 181983 - DNA, 518 bp, Zea Mays
gcactaatcaaaagtatattcctaaccaaactgatttcacatgtgctattacgtgcccatacgatctgctcattttagccggtataagcattattagattatacccggctccagctataatgagactttagctccacttctagtttcaaatcttagcatgcctattgccaaatgctaggatagtatttttttcaaatacttaccattgagggccttgggtaatctccttccttgtaagtcctcaacgaaatatgcatttccgtgcacaatacctacaactttgaatgatccttcccaattcggcgaccatttgccgaatttattatttttgactcccacgggtaaaatcgttttccataccaactctccaatctgaaatgatttctccttcacctttttattataagctctcgccactcttagcttttctttctctatttcccttaaggttgttaatcgactttcattattcccatcaattctgtctagcattagctcaccatatacctcagtcgata

SEQ ID NO: 181984 - DNA, 747 bp, Zea Mays
ttctaacaggtatggacggcgtgttgattacttgaaaggtcgaggactcatacacaaagtgtccagcgatgaaggggtatcatcggatctaggccatccgaccccgaacgggcggtccagattagatgtagttgtgtgacgagtcggtacgcggctggtgcacacgatctgagatctgcggtcgaggtttaacgaagacgcgccacaaccccagccctctgatcaaatcggacggcccacgcaacccaggccgaaacagtacacttaataggatctgggccgcccatcacgcgatcaactgtccacatattatctccttcccccgcggcgaccaccacgacacagcagtcactacgcgacagcggggacgccggagaacgccactcaaacccccgacgctccaaataccttactaactagtgcaatgcatagagggtatgaaggcggatatgacggaagctgacataccacgaattacaccgcagagaggcacggtcatgccgcagtgcggtcccgagatgaagggttggcgctggcggccgattgtcgacgacacggactcaaaagagcccacgccgcgagttgtgtaccttccacgacctttgaccacgactctgaatcgggcttggcgatcgattcggtgagcagggcggggatcgtcgacaacggatcagctccaatagagcacggtggcggcgcccggtatggtgtttccctcacctgacagtggtggcctatgactcaagc

SEQ ID NO: 181985 - DNA, 506 bp, Zea Mays
ggattgtgctcctctctgcgactattatcgtcgtgtgccacgccgcctcgcgctacttcgtcgtcgacacctcgaggattaggattctactccgtgtgtcgttccatctccttccatgcggacgccctagccctcaacaagctcgccacattgctctcctcctctgtcactgcgggtggtgctgggggcagcagtgagcaaattcgggcaggtcacccatgtgccgcatcaaaccacaaccgccctcgcccttggccacgatcttggcttccgacgaatgtgttagggaccgtaggcgacctcataacgagtggagaattcaggcaggtctacctcggcatggacctcgagtccagtgagatcctcgttgtcaaacaggttagtcttacatctcgattctggtgatttgatggatcttgtgttgttttctcgctgtctcagtttatctatgtatctattcattcattccactctaaattgcttacacgagagtctttttactaggc

SEQ ID NO: 181986 - DNA, 523 bp, Zea Mays
tagaacggtcggtccgtggtgaggtggcgggcgcccgtggtggtgaggtcgtcggcgaggcctacgggtgtaataggtgaagggaaagggtgcgctgtgttcgtggtgaaactcgtgagccaaaccaattggactctaggctaccagagaagggagggagggctcaccggagcggaggaatagggcagtgtgctggctcgattgagctcggggaagaggaagagaggtggacgaagctggtgtgaagaaaactggagcttgggcggtcccttttataggcggccggggaggggggagaggtggcgagcaccggcgacgcttgccgcagtggcgatgatggagcatagtggtggcgacgggatggctcgggaagacggtggtgacgggatagctcggggcaggcgcaaagtgccaattcgggtggtgggcgagtaatggcgaggggatgtggtggagcggtgaccagcggtgatcgcgtcgatagccgatcacgtgcgagagagagagagagctgacaagcggg

SEQ ID NO: 181987 - DNA, 498 bp, Zea Mays
tttcgatgaatgatctaaagatttgatggataaggtcaccacatgattcaccaggaaaatgattaccagattcggatgaaggagaggtaggaaaacaagatctgctaggatgagcaacagaaatgctatgaagattcgggataggatctatggaaagaaacatggccatgatagggtttgtgcaactatacatcaaacaacaagtgcacaaggagacttgggttggcctagcagacaagctgtgggggtctataagctgtgcaggtgcattaccaatagcgcaacacacaagggctagaaaacaccaacacaagcatgtgatttaatttttttcaagggtttcacttgctaaccactaggttggttaaagtgggggggggtcttttcatgagcagaataggcaacctttttttgcaaagagggttgaacaattacaataccacctagatagcaagacaagagaaacacataacatgacctaacaagacttaccaatct

SEQ ID NO: 181988 - DNA, 584 bp, Zea Mays
agattgttggggctgcagtaccgcattattttcaagaagggagtggatatcagtgcggctgatgcgctgtcccgacaccaagctgtgacttcttcgtgcttagctatatcttcttgcactcccaagtggatatctgatgtagcagcatcatatgaacaggattctgaagcatctgctcttattgcaaagctcgccattgattcaatagtagtgcaacattttacctggtaggatggccttcttcgctacaaacaccgcatctgggtgggtcagtcacctgacttgcatactcgtttgattgcagccatgcattcgtctacaattggaggtcattcgggaattccggtaacatacgctcgtgtgaagcaactgtttgcctagaagggtttaaaagctgatgttaagacgtttgtcacaaactgtctgacctgtcagcaagccaaggcagatcgtgctcgtttaccgggcttgttacaaccattgcctgttcccacatcgttatggcaaatgattactatggatttcattgaagctcttccttgttcccagtcatatacctgcatcatggtctttgtggatgcctt

SEQ ID NO: 181989 - DNA, 1772 bp, Zea Mays
aagaaaatgaagtgcaagtattgctaccgtgctattagagcttattcttatgtcaatggcactactgcaatgtggaggcattttaatatctgcaagtgtaattcccataagaacaataagctagggtccaaagcatgccaatttgaaagtgtgccaatgagaaggtgttagcacttggaggtatgatcctgaggcaataagacaaggttttgctgaaatggtcatagaggatgagctcccttttatgtttggtgagaagtcgggatttagaatttttttgaagatagttatcccacatggactccaccatctcaaaggacatgcataaggaacatagttagaacttattttaatccatatatgttgtttctatttgctagctgctaatctagcgtgaattgtggagtctacttcaaagaacttaatgctatgactgtgaggcggagggcatgattgcctaatggagtgagggcttgaggcagtgaagtcgagtcttcaacaactttccaatgatgtcctcctgtccctgatgctacattttattgagtaatgactaatggcgtattaaattaaactaatgttgtctaagtgaagacttatgtctcttatttgtggctttatgacttgtgagactaagttgttagcttgttagtctatgtcaaattgttgatcatgcaggctacagctgtacaattaaattaaattatggttgtgtctcagtaaggactggtcatatttttgcttgtacaattatacactttgcacatgtttatgcttgctgctagcgccctggcttcatgaaggttgtagctcagtcctaactgaagcctgaaaggtacgggctttgctcacaacaagcatgtcgtcatctagcaggctagcagctaggctggctagcacccactactcaggtggctagcttgcttgttgtttctcggttctgttgggttaagaccgaaaaccgaaccgatattttagctatctggtctgttggtttttatttgctgagtcattaattcggttctcatactatacaaattgaaatttaaagaaaccgaaaagaccgaaccgaattctcggtttagcccggtttagaccgaacgcccaggcctactcataggcggtattctcaagcaatagacaaaaaataggcagttgaatgcatatcaagcagtgttgatagcttcagcccaaaacctctatagtgtattgttctcgtttagcatggttttagcaaaagtgatcaatggacggttctttctttcaacaacacaatttttgttgatgagtgtatgttatggatattcatacttgatcccaacttcatcacgatattgttttatgtttgtgttgtcaaattcctgcccattatctcttttttcttgattttcacttcaaacttgttttgtgctttcttgaaaaacttcttgaatgttgatgcaactttggtattatattgaagaaagaacacccaagtataacttgtatatcgtcatctactatcataagacaatggaggttgtctcccacatttgcatatgatgttggttcaaataagtccatatgtaagggctctaacggtctcgatgttgacatgaaacctctagttcgatgagtgttgacaacttgcttactagcttaacatgcactacaaattttatccttctcaaacacaatatcttttaaacctctaaccatctctttattcaatagcttttttagtgtactcatttccacaagagcaaaccttctatgtcataaccatccatgtg

SEQ ID NO: 181990 - DNA, 384 bp, Zea Mays
agcaatacgagccgaaaggagtaataaaggaggtcgcaggttcgtcagactgcttcatcacaatccggtgatagccttagtaggcatcaaggaaacttagcacctcacggtcggaggtagaatggaccacctgattgatgtgcaggagggggaacggatctttcgggcacaccttattcaggctggtgtaatcgacgcacattctccacttctcgcttttcttttggaccatcacggtattggtcagccactcggggtggtaatctctcggataaaaccggtagtgaggagcttactaatctcttccccgatggccttgtgtttttctttgtcaaagaggcacagccgctgcttcgctggcttcaatctgagattgactcgtaa

SEQ ID NO: 181991 - DNA, 381 bp, Zea Mays
acgcagttcacctcaaaattttggaagagccttcagcaagctatgggcaccaagttagatttcagcaccgcttatcacccccagtcagatggtcaaacggaaagagtcaacaaggtcctctaagatttactaagagtctgtgtgttgacgttcgacaggaattgggagtccagtttgctgtacgccgaattctcatataacaacaaccatcaggccagcatcaaaatgtcaccatttgaagcattgtatggaagaaagtgccagacccccctaatgtggtccaatgtaggggaaaggatactagaaggacccgactttgttaaagaagccgaagagaaagttgccctgatccgcaaaaggttacttgaagctcagagtcga

SEQ ID NO: 181992 - DNA, 1006 bp, Zea Mays
cacagcaccatctctctgcgcgtgtgggcgtttgggcactgggggaccgggtccactcgtcagtcgttggtccttcgttgccacgcatccgcgccctgccagtgaccccgctcgagttgccgaccccacctgtcgggcgaagatttctccttttgtttctctctgccgcatgggacccatgttccctgtttctcttcctcaccgtgcatctcgggcgggtggttgaacctgcggcacctccgctaaccgcgactgcacctcgactcggcttcaaaagcgggccgaaaaccctcctcgcttcttcccttgacttctctctatgcgccgtcaccagaaagagaaatcgctgccgcttggaacagctatccccgtcgagctctgcgtgggtgctgccgggcgaagacatcgtcgtggctcaagtcggaagtagtcgcaatagcttcggttgagttggtggactccgctcgcggtctagttgcacccggtgggtgtttaggtggccgagaatttgtcgtcatcgaggaaataccacgtcgggccactgcggaccgtggccggctccctagcctcaccactgtcttcggtaagcccttggataacttcactttgatgtacactccattttgcaccgatttttggattgagggaagcacggggcgcccatctcggttgttcgctggtgactcgccgccgtggggggatcaggtcagtgtggtgacgatgccgccagtccgttgatctccctctgaacggctccgattatacggaagaatacctctttgccacgtgtagttgtgaccgttgatctagatctaatggatgatattagatctcgcataattatatcacgatcgttgaacttgaatccgatagtgttaagcgtgtatcgtgtcatccgcgtataggtctaatctgggttgtcaacgtccgatcggacgactctaattgaaggataccccttcgacctgacatttttgcataagagacctcctgcttccgttaaaac

SEQ ID NO: 181993 - DNA, 899 bp, Zea Mays
tgaagaaactgaaactattaggccagaagaccttgatgagtatgccagagttttcagcaaagggctttcagaggtgcaaatcatggccatggcagcgctattcggctggtctaggcctatggagctgctgcagggtggaccaatctgctgatttattgggtccctcactggtagtcgttcttctttcatcccttatggatccttcaaaaattctaatttggaatgtgcgaggccttaatgggtctgctaggcaggatgctgtacgcactttggtggattctgctcgagttgatgtggtttgtcttcaagagactaaaatggtggacgtttctcggttccttttattgcggatgctaggaccagcttttgaaaattttgtattcctaccttctgttggtgctagtggtggcatcttggtggcttggaaaaatagcattggtgtttgtgctggcagtagggtggatgaatatagcgtctctatgaattttcattctagcaccagctcaccgtggtggcttacatgtgtgtatggtccacaagggaaccgtgagaagattcagtttttgcaatctcttagagaaattagagctctctgtactgggtcgtggcttgtgctcggggacttcaatctgatattaagggaggaagagaagaataataataacttagaccgtgccatgatggacaggttcaggagatgggcaaacgacttggctcctaatgaaattctgttgattggccggaaatatacatggtcgaatggacactctaattctaccctagtcaaattggatagggttttctgcataacagattgggaggaacaattcccagattctcttctccagagctcagccacggatgactccgaccattgccctttgctgcttgggtttcat

SEQ ID NO: 181994 - DNA, 477 bp, Zea Mays
aatcattcgggcaatcccattctttgtttatctgacttatgaccaccaaagaatctccatatactatcagtctcttgatacccagcgatatggcaatattcagtccatgaatcagggcttcgtattctgctgcattgttggatgctggaaataacaattggagagcatatttgagttgttcacctctaggtgcaataaagaggatccctgcacctgctccctgcagcttcaacgagccatcaaaatacatttgccacacttctgcagtttccgggttatccggcacctgttgctcggtccactctgatacaaagtcaaccagtgcttgagttttgattgtggtgcgaggtcgaaactcgatgtcatgagatcccaattcacaggaccacttggctattcttccaatggcttctttattgtggagaatatcccctatcggaaatccagtgactactatgactttgtggtcgtcgaagt

SEQ ID NO: 181995 - DNA, 711 bp, Zea Mays
ctccctttggatatttcaactttcgcgcataatgtctagcttccagaatttcttcttcggacaatttcttccccgaagcgtgtcaaatgatgtagtcaacattttcgatcgaagcttcgggagcaggagtctcaatcttttcaggtgcaatctgccctgccgttttttcctcaggcgcggcaagcttcgtcgcgacgggcgctgaaggcccaccttcggctcgagcctgagtttttgtagcttcggcttcagcctgagtttttgtaacttcagcttctgcttgcccagtttcggcttcggcttgcgctttggcagcttcaacaattttcttcgtaggagcagggctcaacgcctttgtagtctccatcacagcatccaacacgttggccatcctcctcctcttgggagtcgcggcagaagcctttagcaccttaggcagttttgcctctgttggagggcttagaatttctggcattttcattatttcttcaacctttggctcttcagccttatcaactttagcttcgaccggctcgactgtaggcgtcttcggcattacagttggttcttcaacactctgtgtaattgaagcagcctgtcttgcttcagcagttgaagaggctccttcggcaaattcaggcaccacagccggttcaatataacgcggtcggtggatcagaaccttcacctttttgcccttcggcacaactg

SEQ ID NO: 181996 - DNA, 511 bp, Zea Mays
tctatccacaatgacccaaatagaatcgtggtgtcgagaggtgttgggcaaacccacaataaaatccatgcaaatatcctcccatttccaagatggtatgggaagaggttgtaaggtacctgctaccttcaaatgactagccttgattctttggcaagtgtcgcattcagatacatacttagcaatttccctcttcattctggtccaccaatacaaggatctgagatcatgatacatcttgttactaccggggtgcatggaaaatttggaaaggtgagcttcatccaatatattatgcctgagttctgggttcttaggaacaaccaatcggtcttcaaaccatagaactcccttgctgtcctgacaaaagcatttgtacttatccaccctttgttcgagcatctccttaatgacttgaacacccttgtcaccaatctgtgccatgactatttgctcatgtaaagtgggctccactgagatataactcaaggtacctgaggaaacaacttcc

SEQ ID NO: 181997 - DNA, 556 bp, Zea Mays
gggtgagcggtggtcgcgacggcgacctctactacgctggcagctttctctccggttggtccctctctcttttgttagttagggttcttggatcgagtccttctactcacgcgccgtacgtgcgtgccgctcactcgtagatccggtgacgattcctcccctgcgcgtgggtggtgaaattctccctccgcattccaaatcttccgtctcgccgctgggatttgatttaaggcgaggcgaggtgatgtgagatgagatgcctcgcacgaacgcctgttggactagggagatgagacgattcatgcaagatttgttcctgctgctgtcttcctcctgctaccaagtggcttcttgggggcaggcaaggaattaagcttgtaaatccctggaatttgaagaacaaacatttgaaatcaaaagaaaaaaacagctctcttcgctaccaactttagaagcaggacatcaaattccaaattggctgacggattcttgctttacatacacaataacacaatacatgcgcctgtctgttgtgccttgcacttagtcactggtt

SEQ ID NO: 181998 - DNA, 420 bp, Zea Mays
gactcaccggagttagccacctcgcaaccttgcgccacgtgctttggtgcttttaccacgtcgcagtgcaccttagcccacccattcatcgccggtgagcttgccgcggtgaacgccacgaattgcttgctccagtaacctcttccctctccggccgccaccacgccaactccaaatcacgagccaccgtctccaagtcctataaattgagctcaccctcggctccgctatgtaattatgcaccaaacacacccactcgtgcctccaattactcactagagagcctcaatttgaaactctccccaattcggtccagagcaccgcactgcgtgagctcgccgtggccagcgtgctacaggtccgttcatgccctctgctctcccatttcattacccttatgttctcctgatgctcctcgac

SEQ ID NO: 181999 - DNA, 614 bp, Zea Mays
tgccagcactgccttccctagggatagagaacctttctaacatcgaggatgtatccctggctagccttgatgatcttctcaaggagtttggggacacattagtaggaaacgctagtgcgtagtgtaatccgtggtggttgttatgcttgtaatgaactggattgctaaataaaataacatgtttgcaaaaaaaatgacatatgcatagtagtaatcctttctcccctctggcagatggcctcggatagaaccacgcctatcacctcaggaattggagcaaggactcccctaggcatcaaaggagaggacaaaggggaagggagtgagacccacctccctgcacctccagagatgccactagacctagcccaagttctggccaaccagactcgactcatttaggtcctcactagaagcctcgagaaccaacgcccgattggaggaagacctcaggacagaatgggagagttcctaaggctcaagcctcccatgttcgctagatctagcaacccgctcgatgatgatgattgactgcgcacagtgaagaggaagttagaagccattggatgcccggaaaaccagcgtgttcacttagctgcccactagctctccgg

SEQ ID NO: 182000 - DNA, 752 bp, Zea Mays
agtttgtcatactcattgcccttccctttttaatgtgcttatatatttgctttcaagcaaaatatatgatacaaagtgttagtctacagtataatgtagacacatactcataagtccacaagacttatgattttctttgctattcattttgcgcttgcacatcaagccacaaaagcacataagttcttttcataagaaccataagagaaagagagcatctcatttcctccaaattgaagaggtgaattcccatatcatgcaaaaatgatcttgatatctaatgaacattgaggataattaaggccagtaggcgagttcatcaaactctattaaataattatcatccaaatggattaaccattttctgatgttgtaatatgccgcaaaatatatcatatctttatatgttggagaactctaggtatcacataaagtgtaccaaaagatttttgaaaattggtgtacacaacgtagataatctccatgtaatgaaacaatggagtagatctctcagtagtgggcaaaaacttttgttgcctgaaagcatggtctctgggctgatatattcaaggaacataccgcagccaatgcttaggactccactaccctgtgcttggccaaaatttcaaaaataaaatggtaatcacaataaaggtgaattaccaacatcacatctccaacatatctacttggggaaacacatataggtaatcatcatcgacatatgatgtagacctcttactgatgggcaa

SEQ ID NO: 182001 - DNA, 956 bp, Zea Mays
atcaccggagatgagactatcgcgcccaagcgtgccaaagcttatcacaagcggtgctatacgcagcaatggatacggctagtaggttggaggaggtcttaccatgaatcacgtgagcaggagcacagtccacagcgtagggcggcatgcggtggttcccccactccggcaagggattgccgatgaccaggtctccatcctacccatgccatcaccgcaaatacaacccagaacccaaagcgagccgcactgaccatacgcccgaccctggcgagggtgcctccaggattcacccgcggcggtggcaactctccctttctcttggtgtgcggcgaagctaggcgatggcgcgctcgactatggcttgggtaccgaggaaaggcataggtcttataggaggcgggtccggggttggttgcgctcggtctgcggaaatcgcgcacgtgcggagctctcggccacggccgattcggtcagtgggatccgattctcgtggggaagaaggttacccaacggggtggccccaccaccagtgagccagcaacgcaagggcaacgacgcgagcaccagacggcccggttcttatggccccatggtcaagcacccgagcggaatcaggaagatggcgcggaggttgttgcgccagctccgtgttcggttctaacagagtccacgcgagggggaagagacggtcctgacgatccgggcccacgaatcagagacaccaggacccagcgcgcgaaagagttgaagcgaagccaacgcaagggcccatgtggcagatacaaacggtacagacgagtgcgaggctgagcaaatggcaagcgggcccgtcttgtaagcgaccggtcagcgcaggaacgtgaagaaaaagtggtcgcgtgcgagaaggtggttaatgggctgggactgcgagaatgagcccagttggttccttttcttttttttcttttatg

SEQ ID NO: 182002 - DNA, 451 bp, Zea Mays
ccatccaacgttagtgaagttcgaagctttttaggaatggcaggatattaccgctgttttatcaaagggttctccagcatagcaagacctatgaccaagctcctcaagaaagacaataaatttgtgtggaccccaaagtgtgagtaaagcttccaaatcataaagaagaaactcgcgaccgcgccagtattgacgctaccagatattcaccagaatttcgtcatcttctgtgatgcttcaaggcaaggtttaggatgtgtgcttatgcaaaatgagaaagtcatcacctatgcatcacgcctactcaagccgcatgagcagaattatccaacacatgatttggaattagcagccatagtgcatgccctaaaaatatggaggcattacatgattgggaacaaatgtcacatcttcacatatcacaagagcttaaagtagattttcactcagc

SEQ ID NO: 182003 - DNA, 804 bp, Zea Mays
agggagattgctctgttcttagcaagaatccagagttaaagaaggaagaaggtggtcgattcagacaaaaatcgaagatcgagcgctgcaaatatctgatgaggcaataagaacaggggcactgttgaaatggatgaacttgcacgatctagtgctggggattgatccggggtggatagcttcgaacgtggcatgatttcgcgaacccggtcgaccgtggccggagatagtcaccggcggccaccgtgactcagccagttttgctgcggtgtcatccatgccccgattctacctcactgtatctcttctttacgtgtaagcttgcgctaacaaggttatccgtggccgtgaagtgatcgccggaccgccgcggctataaatagccttgtggtccacgacgaggtatgaacatcacacacattgagttgaatcgaagccaaattcgcgctgcctatgccccgtcctctcaaattgattgtgcacggtaaaactagagtcccttgcggccgtatagccccaagctccaccctcaatttcacccgagcacgccacgacgccgttttcccccaaatcggtcagtcgcgccgccgagaacagcttgtccgtggccagcccgctctggtaagactctgtccaattcaagcgttgttttagtagctctgcatgcttgtgaagcttgtcgtggcaaccgttagctcaactcggccatggttaagcgggaacgcgagctcgtgatcacggtctccgccgtgcacatggccagaccattcccaaagtattcaagctaagattagtgagtgttcc

SEQ ID NO: 182004 - DNA, 517 bp, Zea Mays
ggagcagcaggtagaagaagtcaaagcgatgcaggaacaggaatcagcaaaaaaggctgttgaagaagctctaactcaagaaagagaaaagatcagtttattgactactgaaatcgagggcctaaatgtacgttcttcatccataatattctgctttgttgcaactgatctacaagcataaggattgaaacaaggactaaccttattctgttttatcaaatggataatcttaaggtcatacactcaatagtatgctaacataacatttctcttagaatttaattaagttgtactctaaacttagcatgttagacattgccaagaatgtttgacaattggtgcatgctattattacaggccctgctagtagctgaacgagaggagaatgatgtaatgaagaaagtgcatgctaatgctctagaaacaaatgaagagttaaataagaaaatcagtgatgcggatgaaaagatcaaacaatttagtgatactgtacagaggtttgttgctttatttcctg

SEQ ID NO: 182005 - DNA, 744 bp, Zea Mays
tggtgcggtggatgcggagcgggagcgtggatatatggtggggggacgaggaaaagcgcgagagcgagcaagagcgcaagagaagacgcgaaggcggcgagacgacgacaggtgcatgttggcggtggcggtggcggtggcggtggcggtggcaggacgaggaaaagcgcgagagcgagcaagagcgcaagagaagacgcgaaggcggcgagacgacgacaggtgcatgttggcgggttgcgtgaggagggcgaggatgcatagcagcacatccttcggcctttgtgcattttaaacacgaggaggaagggtctagactctataggaagctgctcagcagtccaccgtcgttggtgaaagcgccccttccagagaagacgagaacaaagtggcagagatgataagaagggataggtaagtagccactgagcgatccatatctgacgactgatattcagaaggcgacgtggcgctctgtatggccgcgtttccatccggctttcatataatagaaaaattgtaaattttagttggtatacctatagtaaaattctggatactccactgatttcatgtataaaccaatagtacatattttctatcgccttcagccgcggctgacctctctctctcacgctcgcgcggatcgggagtcggaatgggctagggttggcctattgggccaaatgtgtcatgggccaaaatccccaggactaccctttgagctggccactgacggtctcg

SEQ ID NO: 182006 - DNA, 710 bp, Zea Mays
agggggcggctgttgttgccgaggtcagtgagcggaggcttgtcaccttggccgaggagaggcccgatacgtcgactgcggtggcacccggtgcaccgactgtagggggacccgacgcctcggtcgcggggtgcgcagaaccgtggcccatcttggggagcagcggccttatcccccacgcagctcaatcccaatgagtggtgtgggcagccgctcctgttctggagccgcgacacctcgaagcccctcctttcccttaacgatgagttggaggagcagttacgggataatttctgtgaatataccgaggcggcgatgcggtcgcttcggacgaccatggaaatcctttccagggacgttcccagggtcttctaggtaaggatttagacgtacacctcgcgtgatcagggcattctttgtgatattctattttcctccctcaggagctcgcgaacgtgagcaccgctaagtcgttgttcatccgtcgtgagagcgacgtttgggagtcgctgcggtcccggtgggccgcgcttaccgaggccaatgagcgcctcgcccaacggagcgccgaggtggcggaccttcggctgctctgtgatgagctaaagtcagacgcagcggcagcgcggacagaggcggcgtcggcacgaacggaggcttcgtcggcacgggagcaggtggcttcccaggccgaggagatgcaacagcga

SEQ ID NO: 182007 - DNA, 854 bp, Zea Mays
gcaacggcggcagcaatgacaagggcatcggcggcaagggtggcagcggcgacaaaggtagcagcaacgccggtggcaaggcaccaccgtcttaagtattagtatagtgtagtagtgggtagttgtagtattagaagtaatagtagtagaagtggagatcgtattttgttagggtcgatttatgatgaatcgatccttttttgatctataatggtccctttcccttatgaatgatgtctgatggctgaacgtgctccttaataccgagttacctttgatttgtatgctgcattttgagatcttgcttcttgttatattcagttttccattccgactgattgtgcataacagtctcctgtccgacttagtctgcccggctgaaaacccatacgacataaccatccgacttagcactttccccttcaactctgtgctgatgtctatagtaggtccacagcgtgtgcatatagacacccgctggcagtttcctagcatgcaaaccctaactctgctttttttgccgcaaatctccctatgacattctcatccctatgcgagtctatgctagattccacgccttagtgaggtcccatggtgcccatgaagaagaagtaggagagcgttgcgcccgtcattcccccatttgatcccaacaaccaacttcctttctatggtaattatgcttccgttgtctctgaatccgacttgcttcatttagttgagattggttttctgccatcgaaggaattgtgctcttggcgggtttggtaagggatcaccgtacccatggaggatacccatgaatctatagtgtttgtccctttcttgatttgaggtgtaggtttacatgtctc

SEQ ID NO: 182008 - DNA, 874 bp, Zea Mays
cggggtcttccctccctcgccaaccaattgtcctctgcgcggactcgcccttccctataaaagcatggctgcgtgaacccagggcatcacaccattttgacctgtgcaccgagtgagagagaatatggcttcaccggtgattttttgctacatcgccggtcaagccgtattcagtggacagggagcgtcgtcggcacataccccacgtttacatgacctattgaggtaagggaaggcgggactcaacgggtattcatcaccgaatatggggccgccaccgaggatccatacccagccatgggcagacctcactgctatcccatctctggtattgcttgtcttcgcaactttgccctattctcctcatagcatatgacctagccgcactcgaattggctcaacagaacgccataatggggcgctcaccagcgcggcttcgccgtaaaagctggtggcatcgggtgcccggcacgcgggtcggtggagaagatgatgcgtgaaccattgatcgtggcatcaatgatcaggagttgatctcgtgtgtttggagatctaaaccgtggttctggcaaatggcgtctgtgatttaattgtgatatagcggttccgccgtggcaggtggtcgttgatcgttgatcggagggttgtgagcggtttagatctcataaaatcctggtagtcggatctcgatccgatggctatcctagtgtaccacttggggatggttgggatataatcctagccattgatgcatgatccatcgaccctggtaaccagataccccttcaatcgcgagaaacttgtgaaataaaccctttgttttaaagtaatcaactcgccatccatcgttatttagagaaccttacaaccagac

SEQ ID NO: 182009 - DNA, 646 bp, Zea Mays
cggcctggtatacttcgccagccgccagccgccggccgccggccgccgcattgcccatccacagcggcagtgcaatcgattgtcttccttctactggtatccggtaaggtagccctgcttttattgtgtgggttgattatcttcgtctctgtcagaaccggggctggggttttctttaatcgttgccgccgtgagtcagtcaccggtaaccaaagccgaatctttgttccattttggctatgaacttttcttttgtctgtgttgtgtttagcaggcactttcgtttgtgttcatgtgcctcaagtaatattgctgtcaacatggtcaagggatccacaggccaccacagcaaccccatcgctccagtccgtaagtgatagtttcagcacctgcatctcttgtgccagcggacagaaacttaggatctatccgttgcttgcagcgtttgaggcgtttcataacggatcatggcatggagccaattctataatgatacgggatggtggtttgcttgtaaaatttgtctcctctggatacgcagtcgcagtccagcatgatattgatgggtcctatctgcgcgttcgttctagaaaggcaacttgctcggattgctcacatgttctcaagccaggcgccgatgtttgtg

SEQ ID NO: 182010 - DNA, 495 bp, Zea Mays
gttgcccaccaccgaggaaaccgctgccgagaaaaaggccttcactgaagggtgagcctttatattaaaggaagcccaaggccggtcaggatcagtttttttcagccagagccagcgcagcctaagagcccaattcattttttgcaagtcctagatgcccaaccccccaagcttttttggtctagtaaccttgttctaggctaccatacaatgtcctcccaaagcattcttccttcctctccacaagaaacttcttctgattttgtcaattgctttaatcacccaagtaggtagatccatggccatagttaaataaatagtcattgatgacaaaacaacttggccaaggatcaatcttccagctttggttaacagatcagctttccagctgggaagacgacctgcaattttatcaatgaacggttggaggtgctgtttcccaagcctcttcaaggaaagaggcacccccaaatacttgcaggggaagttggcaac

SEQ ID NO: 182011 - DNA, 2924 bp, Zea Mays
ctaatatctttgatatcaagtccacgagcagcaacatctgtggctactaatactgaagccctgccagttcgaaactgattgagaacattatctctttcggcctgtgatttatcaccatgaatgcttacagcattaaagttgcgaccaatgccacgagcaagctgatcgcacattttcttagttgagcaaaatatgatgatttttgagcccctttcttgatctccaagaatctgctctagacgccgctgcttgtccataggtggaaccacctctacatactgcatacatacaggagccttaaaatggatcataataaaaatgaccacataatgtattacagataaaggctgacacagagaaattaggtgacaaagaaattctgacaccagtcatcaatggcacttcaaggaatctgcatcctagagaaaggcaaaacataaagtatgaaaaagaaccaatcataatttcactagatacctgagtgatggatttgttagcaacaagttcatcgatactgccaatgttcacctggacaggatctctcagtaaatccccagctatttttgtaacctcctttggccaagtggcagtgtacattagagtctgcctagcattaggaagctcatccacaatcttccgtatttgcggttcaaaccccatgtcaagcatgcggtctgcttcatcaagcacaagtaatgaaacctgatggaggttaatcctcttcatctccaggatatcattaagacgccctggtgttgctaccacaatatctgctccacgctcaagttctcttagctgagggacctttgaagttccaccatataggcactaaaaaagaacgtaacaacgatgatttcaatgtaagaaatatggcatgtcattagtaaacatagtacagtgatgcaaatattctacaatgcacttaggtacagaaatcttgaaggatcgatgcaaagcaatattgttcagaactaaacaaattcatatgctaagataactactgcaataaacagactaggcctagtgccgtgatagcaatctcaaccgcatcgacctttctaaaggtgaagctatcataaactttttgaaggacaagactcgagtttatgattcatgtttcaaagccaataaagcacattattaacttctgacatccaataacttaattactatgtgttgtcttacaaaacagaaaatttgtgcacatagtttcaggattatgattggttgtgatcaatgctttattattatatgcaagaaaagataaggtcataacaaaagatatcaggtcagaacttactgtgcaagaaactctagatgattgaccaaacttaactacttcggcttgtatttgtgaagcaagttcgcgagtaggggccaaaaccaatactgtagggcccagcatcggattattgtggcatctcctcagatgtataaaagcagggattaggtaccccagcgtctttccagaccctgtcttagcaatagctactatgtcccggttttgcagcgcaacaggccatgtttgagcttgaattggagtgggatttgaaaaaccagctgcatggatcttaaatgaaaaaacgaataagcatcataagggcatgcccacctgcagcagataattggtattttccatagcaagtaaaaattggttgcaaacaatgagaaagtggttaaatatcctaagtgaatatggctgcttacttaagcaactcaaggcatgaagaagctctttgttgattcagtggcagagacaagaagcaggaagcctcagcctcattttataatctgaaacaacatcaatcctcccaatacttgtcagcagaaaatagccacaagtatttcactacagtgcccagaaattgaaaacctattgttgaattagggcactcagcatcaccgtaaatccattgtgctacatcattgagcaatgcatacaatgcactcactatgagagaagataattttccatttcaaagatatcattttcaacggcccacattgtcaagaatttctaggttaagataaagtttagataatgcatccatggatccacaagtagcaaagccaaactaaagaggacatacctctctcagaatctctggagggaatccagtggcctcaaatgtcataaacggagcaggaacgttctcaccctgaatattttttaaaaaataaaagtcgaaaaataagtaatcaacagatagcagtacaaaagaataatgaacagatagcagcctaactaaagaagaaaatgagcttgtacacctagagaaatattctaaaataccctgttaccaagctatacacaagggaatagggcatagtaaagtatggccaactgcagaagtgcatctctcaggctttatgagattttggtatctcgaatgtatttctctgtgcaaaacaaattagaaagtacctctgtctggttttctttagtggcaattggccagagatgtatatatcattcttaaaatgtctgatatgtgtgccacaaaaaaatacatgtaaatgttagatatcaaccagtaccactattatgcacatgggttattaaattatgcagagatacagagtacgttacaaaccacatgtggaacagcatttctataatgtttaagaagtataatggcacacagcctctggagaaattttgaactgtcttagttttgcaacaaaatatgtccatgcaatcaactccttaccatggcagtgacttcatggtgttgacggtatgcatcagctgaagatacgcttggaaaatctggaggagcaaacatacttgacggtggcctcactgaagttccaataggcaatggaccaagattatatggatttggtactgaatgcggaggtgccatgttatgaccaccaaaattgtctggccgaggataaagcggtccattatgcatgacctg

SEQ ID NO: 182012 - DNA, 428 bp, Zea Mays
tgtcctggcacatcaaaccagttcggtggtgtgtcggaccacttctgcaaagatgtattcaagacttcggtgacttgacgcactagaccagtctagttgtgtgccagaccacttctctagagagggaagcaaagagaagcttaaggacttcaagggaccggaccagtacagtgtgcaccgagccagtcgagtccaacgaatacttcagggtttagactccaatggctagttgacttggcaggacgcgtggcaaggtctggtggtccattggactagtctggtggtccactggactagtctggtgccacatggcaaggcaaggagacagtcagatctcgcttattctttagaccattggaggtctggttgtaacactccatccactcttggaccacaatgtacttactactggttgccctctatgatca

SEQ ID NO: 182013 - DNA, 805 bp, Zea Mays
ggggatccagatgcacggagggagggcttcgagcaagcaggaagcgttcgccatcgacattggtgaggcaaggcgatgatgcagccgtgtggaccaacaaaccattgcggactccttccggcgataacagggtagcagagatgtcactgcaaggcccgcaagccccagggaaaggcctctggcacagggaccctccattctaaaacaggccagagaagcaacaccgggagagctgggggatgacgagtcggataggacggtggacatggagcgtgaagaggatgacatcgctagccgaagagactccacgccacccgcggcgagccactgtggcagtgggggggagccgaggggaccagagttattgtgacagagggtacacacagcatccggaatagcctcccaggcccccgagaccaccgaagcattggcgcacgctggcaactagggcccaggaacagcggtggccacatccaaaaaggacaagtggagatccgtcggcacagaacctaagcgaaattgaacacacttccagtaggcgacaagcgaggagggcgaggcgcatgaggagcgggatgcgaccccgacatctgtggaggagggagagggatctgatttggccggatttgggaacgggggcagtggggtaggaggggtagtgacaagattagggttggaggggagagccagcggaggggggacacgacatctctagtcgtggtgagcgtctaacattagtcaagtgtgatagaaaatgtggcaattttttgccactttaggagtacaaccaaacatagtaatagac

SEQ ID NO: 182014 - DNA, 561 bp, Zea Mays
atcgaaggcctcgacaggctgcggagcaacccaggtccttgccctgcagtcatccgggcccacttgtaagccccttgtagggttagattttgtagtgcgtccgaattacaacactccgtccactgtaatgaccccgttaaggggaatattctgggaacgtagcaggtaaacgagggtataattgtacttggggacccactacccctctcaaccacctataaatacctctaccatgtacacagatggggcacgcataacaagacgctacagttccctacctactatctcgttgtgcacctgagccccttgtctcctaagtgttgggcccacctaaccacgtgtcaggacatatccaacatttggcgcccaccattcatgttatgaaagaacaaacccacgatggcccccaagaaagcgacaaccagagccagcacctcagtggatgatgctgcgaaggaggccctcgctgaaaagaaaggcaagacaaccctcttagataatgccctttaggtagccatagagaatgtcggagccttaacatcaaacatccccaaacagaaa

SEQ ID NO: 182015 - DNA, 530 bp, Zea Mays
taccttcccccggaaacccttctggactccccacgagtccaacctttcgatgggtttgtgtaggggtcactacaacgcgaggacgtggactcaagcggcggactcaggtgtcaagttgcaacccgaaatgcacatcgtaaccaggcgcccaagtactatggccgatggttcatgcatagtagggaacccagggtcgggacctaatcctgcgacaaagtactgaaccaagaggggatccgcaacctctcccccagcagggaggaacccctcaaggtgatggaaatatgccaactcgagggatgccaactttgctatagctgaagaagtaccccttcctatctcagtaagttcagtccatagaagcaactctaaggggttaaatttttctcctttcataattaaatttcgcatatgtgtacaccagcccggtgaggtctgcccacataaacccggcctgatggtttacacccatgcatatcaagttataaagaggaaattcaccccctcggacgtgtttctatgacaacttt

SEQ ID NO: 182016 - DNA, 1047 bp, Zea Mays
gagataagtgccatgctggatatgttggctgaagattcctctgatgcagcccctgctgaaacactagatgcagcacccatcccagaggctggcaaagctttggatactcagaggtctgatagtgtttgcccgaagcgtccttgccgagccaatcaaccaacttctcctgctaaggggaagaaaaagaagaagagacgtcttcgccgagtgtcaagcttggatcaggatgctggtccttctgctcatgctgctaagggagtgcccgtgctagtttttgctgaagctgaccccaatgggtgtgacccgactgatgatgaccccaatgggtgtgacctagatgatgctaaccccaatgggtgtgatccggttgaagctgaccccgatgggtgtaccgtccgcattgttgatgaagatgaggaagaggaggatgaaatccctctaattcggaagaacaaccgacgctacatagccaacgaagaaagtagtggtgttccttctccagctttgtctgccctcattggtctgcaagaattgtctctggcaaactttgatcagactcttgaagacatggtcccagaagatctgttgtcagagccggcagatggtggaatgatggatatttgtgctgatgtgcctgatgctgggctggggttatctcgagcagtgtcccgtgcctcatcgaccttagagcgcggtcttaagggtcaggaggctggtctagattgttctgctcccatggaagtgggtaaaggtccttcagccttagaagtggctgttacagagagcttggccctcaaggatggcgctagcgcttacctagcccccgagggtgtcgccggggatgatccggctcggatgggtagcgcgagctatgacccagcccctgagggtgttcgagttggttctccctctcacacttccatggatattcacgtagggtcttctccttcgcactctggttgcatggcagcagctcaagcttcgggtcaggaagtcgccttagaggtcggcgctcctgacgacagagttttgatttctgctgttgac

SEQ ID NO: 182017 - DNA, 593 bp, Zea Mays
gacggtatgatcccggtcgagtgacttctgctactatgaatggtccttcccatgagggcgacaacttgtgtcgtccctcccccgttagaattcggcggaggacgagatctcccactgaaaaggattgttgtcgcacgaccttgtcgtgatagcgtcttagagtctgctggtatcgtgctgattgaattactgcattcagtcgttcttcttcgagtacatcaatgtcctccagcctagtagcttcggcttctgctatgctttcgaagaccaaccttggcgccccgaacttgaggtcagcgagtaatactgcctctgacccatagaccatgaagaaaggagtgtttccatgcagagctcggctaggttgggttcttaggctccaaacgacgtagggcaattcccttatccactttcctgcgaacttttcatttttatcgaagacctttttcctgagtgcctccaatatcatcccgttagctcgttcaacctgcctgttgcctcttgggtgtgctaccgaagcatacttgatctgaatgcttttttgctcgcagaaatcaaagaactctgaacttgtgaagttggatcctaggtca

SEQ ID NO: 182018 - DNA, 739 bp, Zea Mays
agagagctggacctggaacatcgttgctagccttactgcgatgatttatacgaaccaagggaggcacatcctcctcctcctcctctgaaacatatctactggccctagcgccaccccaactttccacgtcatcttcaagattgagatttgctgcgtcatcaccaaggtttggagcagcggagtcagcctctagttccaagccagacaagcaccaaagttttcttctcctctttgtttcggcggacacgaccagggagctcacccagcatgtctgcttgtgacgagcgctaccagggttgcaaattcttttctccccatcacacagactgtgacaccccagtgtcacctagggtttctctcaaatgccaaacctaagagccattattttatgtgaaccaaagtaagcatgagcatcaaaatagcttaagtaagaaagaattcaccaaatgtatatacttaaaagtgtcatgatcaaaacaattgagacttttgaaagataagaatgtgcaaccctaattcaaaccctaagtaagccccatgaacaaaattcaagaaaatatgaaaaaggggatgaaaagtttaaaattttgagttgagccaattatataagttaaagtatatttattaagcaacaagaaagattgagaaggcttaggcaaaataactcaaataaattcccaaatcagcccttgatcaatgaatccttagggaattcagatttctgaattcctgaattttc

SEQ ID NO: 182019 - DNA, 429 bp, Zea Mays
atggctcgctaagactgcaaggagcaagggtagggattctctttatcgctcccggaggtgaacaactcaagtatgcactccagcttttgtttccagcatccaataatgcagcagagtacgaagcgctggtccacgggctgagcatcgaggtttcactcgacatcaagaaattaatggtgtacggtgactcactggtggtcataagtcaagtaaacaaagattgggattgctcgactgactcaatgggaaaatattgtgcagcggtgcggaagctggaggacaagttcaatggattagaattccaccacgtggaaagggatcgcaatgcagcgactgacgcattatcaaagctaggatccagttaggctcaagttccacctggggtttttgtccaagaaatacagcaatcgagtatcgccacggatcata

SEQ ID NO: 182020 - DNA, 309 bp, Zea Mays
atcactgtgacagtttcagcctttcggtcccggcgacagccatggcggacgcgggggtgacgggggtgctggccaagctgggtgagctggcggcggaggaggcgacggcgctgctgcgcgtggacgccgagatccgggcgttgcggcggaagctggcctacctgcaggcgctcgtacgcggggccgaccgccagcgccgcggccgcgcaagcgagctgctcctgctctggctgcgcgagaccagagaggttgctttcgaggttgaggacgccgtcgatgagttccacctccgcgtcgaggcctgccgcc

SEQ ID NO: 182021 - DNA, 732 bp, Zea Mays
acatcatagaattgtcttataaagatgattataaggtggttctgttcaaatgtgattggtatgacgttcatcaccgcaatggcataaaacatgatgagtttggattcacccttgtaaatttcaaacgactgatacacactggaggcaagatagatcatgatccctttgttttctcttcacaagtattccaagtgttttatgtggaggacccaaaagcagatggatggaatgtggtagtatcagtaagaccaagggatctatttgacatgggtgctgaaccatctggtggtgacgacgatgaaacgacataattttgtaggagagctaatatattttcagtcattttgttacaatgtcattttattcaatgttgctgtaatcagtgagaatcttgtacggcatattcttaaaatataattgcaatatgatttaatttcagaaagttgtcaacatgtccgaatggtgttaatcagtaagcttgaagtccacattccatgcagcatcacatttgaaaacaactttttcattatcgactatccttaattttttcatgtaaaaaacataaaaattcaaacgtacttgactatgagatgagtctctgggctggctatgagggttcagattgaatacaatgtaggatgtcacaccccaaaatttcacattttggggatgtgagcttttcatcatgcaaaactattttaaacaacaagtttcactaagttttaaaacttt

SEQ ID NO: 182022 - DNA, 416 bp, Zea Mays
gtacgtgtcctcatttatcccacgtaaccagctggtatgatcatacccttcttcccttgtaatgaactgtcacgacgcagactcggttgtctgtccgccacaatcagtataacgcgatcgttctcgccctgcagacctttccacacttgattgtgtgaaacaacaggcatatgcatcgttcatgtcactttgagttatattgacacctaccttgggtagtctccatcctcgctcacgtttgggcattaggtgtaggaacagaatccggattgcagaactgatgtgtttcttactgttaactgctagtagtagaaggggagggagcagagtcgatttgctgtcactgaattcctagtgtagtggggcactagtaaaaatgacctgcagatgtgtttcttggagatgacatgtgaggc

SEQ ID NO: 182023 - DNA, 1207 bp, Zea Mays
gactgaacctgaggcttcttcccacgagctcatgaaggaagacaagccaggctgaggggcaagcacttgtagatcaaatctcctcagcagctgaaaccagaaatcccttgtcaagacacaagaaactaggagatggtctaaggtttcatccttttgatcacataagggcattttggtgggtgatcaagccctcttttagccaacctgtcagcaatccagcacctgttatgagcagggagccaaagaaaaaatttgcatttaggtggggcccaggttttccacaccctggtatagtggctaataaattgatctcttgaagagcccttcatatgccacttttagctcaatagttaccatcagaggctatactaaaaacatgtttgtcttcaaatgcaggttgtaactctacatcagaaagaaggtcccaaagctgtagataatccaccaaagctcccacagaaagagctcctttgatgtcagagatccatcttcaattcagaagagcctcctgaacggttcttctttttgtaatcctccttggaatgcttcattgctttgaaatagcctgagagcgatatcacagattctctaccctgagagccatttatctgtctagaacagggtgttggccccatttccaacttctaaaattagaacagtggagaagaaagcccgaactttgttaggaacatgaaaggagagttttgcccagggacatgctggatcagttttatgcagccataactgtctcatctgaagagcccagcacatctcggataaactggagatgcccagacctcccaatttaagaggccgactgtcagggcccaagatgggctgcggcaaggagcagcagcaaggataagattaggcatcaagcatccttatcccctttgattagaatgttaaggcccataaagcccatatattctcgtctgcctatatatatgctacagtacccgagggggtgattgtcttgcctaatcaaggttagtaacatggtaacagagcaggttacgaaaccctaatttcttagccgccgtcgcggctgttccccaccctagccgccgtcgcagctggcacggatctcccccatcctagccgtcgcggaccgctgctgccgtgttgtcttccatgcgcgggtggcgcctcagccgccgtcgcggaccgccgtcgccacaccgtcttcatctctgcttcatctgtg

SEQ ID NO: 182024 - DNA, 506 bp, Zea Mays
gcccttgtgtgttgcgctattggtaatgcacctgcacagcttatagacccccacagcttgaccgctagaccaacccaagtctccatgtgcatttgttgtgtcaaaaaaaattttgttgtttggtgtctagttgcacaaaccctatcaaggccatgtttctttccatagatcctgtcccgaatcttcataacctttctggtgctcgtcctaagcgatctcatgtgactacctctctttttcacctgaatctggtaatcattttccttgtgaatcatgttttggccttatcatccaaatctctggatccttcattgattttgccccgttatctgattatctgttataacctgttctaaactatcggatgttgatcttgcctaaatctctcatttctggtcgttctcatacccccttctctgaggatcatgatgcttgttttatcaacttatctctaaacggcatatccatgtggattaatggatgttgctgttatctttggatctctc

SEQ ID NO: 182025 - DNA, 1166 bp, Zea Mays
ctgatgataacttaaagtaagaaccttcaagatgaatagtgtccttggatcaagggctattaatgccttagtttgtcagtttataatagggagtactagtcagttcgtaccaagttgtctttattgtggtgtggttggttattgatgatgaagaagcatgcctctctcgcaacaaatgtctcatcattatcattcccaatgcatctgattaactcattcatgactggaccatgagcttcgtttcgcatatgattgcgtgtgttggaatttcagaactgatacaaacgactcggcccttaattgcacatgatgaaatgccacgtcttgcaaccttcacttcggagccatggggcttccagatgatccagaggcaggagggaatggggcgtccgcttgagaagcgaggacagaacagttgatgccacaagtttgttcccatcttcattttcatagcataattcaatccgtgacgatgtggtatgcgagttatttctaataggggattgtttttgcccattcatccttgttttcagagtcatactcatatacatgcactagttggtttgtcatgcaagatatttcattattcttaatccatctaatttgttggtcgcgccatctcgtcttgtgtcactacgtgcattgactttatctgaacatttgtttggttgacagtgcatctagagtgtgggttgtttatctgagcatttgtttggttaacagtgcatctagagcgtgggttacacgagtggatgcaaaacaaattattttgagaccttttggctacatccactcacatacatacgctaaaaatgcccgtttccagccggcctgaatggtgggagcgcggcaatcagccggaatatttctttctttcatgggagtcatgcatgtacacgtagtattgtcttcaataacgcgaatccaagttttaggattggaactgtgactggcaaactagaacggaattaatcatcgtgagtcacatcctatcttacagttgttgaaccaataacggatcagaatgagatgttttctcggcacatatttctaaggttgtgaaggtagggattgcttgagacatcagaatcaaaagagagcaccgcacgcgttggaagtagtagctgcttgaaagcaccaaaatggttttctagtttcctacctgc

SEQ ID NO: 182026 - DNA, 491 bp, Zea Mays
tttacgaaggttgcgcataatgtgactttagggcttgaacgactcaccacaatccacgcgagtacaagctctatcgtatctggcgtcaacgcgtgtgtgggccatctgggctatgacaacacaacaagcctccataacaagcgcaacaggcgcagttgtggctcggtaattggggtacgcgacaagtccacacaacgtgcgcaacaggcgcaattgtggctcgatgatcacggcagacagacagtgcctacagggcatgcaaaaaatacgtgactcggcgattgcggtccgtttaaatgagagtgcgacatagcaatcacatgacgcaaccaagttcgtacgacacaaaatattgtgtcgtattgccagggcgcaactaatacttagccaatgttataactcagccgattaaaaacatagtttgattgacgcgatcaagtacctactagacaatttaatcgttcggcgtgagtccgaaagctcaacgcaac

SEQ ID NO: 182027 - DNA, 482 bp, Zea Mays
ctagaagcgagaatggaaggtgccatgaatggcggctgggggctcgccgagattgccgcgggggagaggggagcgcttgccgagggagatggccacggtaggagagggaaggagtgcgatgaaaccgcggtcgtggcagaacgtgcaccagtggacgcctacaatgcacacttaagtagtagtagagaataggctgttggtaatggaagccatgggcttccgttaggcatgggaagctccagtcagggtagtggtcacgcgcgtggtcaggtcgggccagtggggcgcgtgcgtccgcgcgattgtagggcatgtttatgcatgtgtaaatatgtgttatgttttgtgtaaacagaaggtgcgcacgtggtgtggtcgagttgggatggacgaaggtgggccagcgtcgtgtttgctggtcgggaagttggttcatactcgtgtttaggctagcatatttaatggttcagacttgcataaca

SEQ ID NO: 182028 - DNA, 516 bp, Zea Mays
tgcccctggcctccctcctctataaatctctagtcgcttgtgaccgtagtcatacccagctcctgtgcgagggaacaccaccgtcgaagagaagaagagaggaggttccggccgccatggccgccgtgagggaagaagctagaatgcgggccgccgcgagcttgctcgggtcgggtcaccagggtcctgcgctgtgtaggggaggtggtctgttgggcctcgccgcaggtgtacgagtaccagtgaagcgcggaagacgcgctgaactcgggaaatcgctcaccggtgtgttgctccgccgcggatccaccacggtgcgtggacagattcgtctgcatgctaatcctcggtgagactcttcttgttagtttcgctcttgtctcagatttgtatagcgctatgcgatttagtcagtgggtgaccggtgcagggtgggtggttgccggtgatggcgccgccgccgtgccctattcctggccatgagttcgaccggagattgaagaatatggccctggc

SEQ ID NO: 182029 - DNA, 475 bp, Zea Mays
ttttgttgctgggtggaaagtaacgaaggggtgtctcggagacttccctgctgtagttttggcatagatggcggagggctttttgggcaacattttggcaagtgtctgggaagcggtgtccagtggcggtgacttgtaagggagggtgatttgggtagtttcgactttctcccaggtagactgccatagagcatttctcaattccattctcacggtattccttccagacgtactacggcttcttgcggatccccatgcgaagcacgcaactccgtaaaagatgagggaatccttccacctctgagcagtaggatgtcctaatgacaaaggagccttccatctggtagcaagagaagaagggttggttaatatcggggggaggagagaagattctttttagagggtaagaggtctttttctttttaaggcaagcttttaaggtcgggctgcgatctacggtagtcctatggctctg

SEQ ID NO: 182030 - DNA, 441 bp, Zea Mays
ccggggaggatggcgccggcgcaaatccttccgccgagtgccggcacatcccatccaagtaggcggcacaccatgtcgagaacccactcagtctaggcatgctcgagatagacttacaaggccatggtaaactatggcgacacaaagcagaaaccttgaaggcaaaggggcgcagagagctcgaaggcgaaagggcaccacgagtgggagagaagcaaggcatggctgctactcgagggatgaaccctttttttaaaggcagatttcctcgctcgcgccccgaagcgtcacgggcaaggtctcccccgatgcgcgctaggattcccaccctatgacacgggggccaggcctcacatgtcatacaagttggcccgaagcgcgaagaaggcgaatcgtcacacaaggagcatgccaccgccccacggtagtgtgccccttcat

SEQ ID NO: 182031 - DNA, 356 bp, Zea Mays
agagggcgaggggtgaatggatctaagcaaggaggcgacacgctggaggtcagaccaccaagtagagcaagagggagttcgaggttggaggcgggcaccgggcgagaggatgtggattgtgggcgacggcagatttggtgaaggcatgatcgtatgaccatgtgagggtagtgcgggagtagttgatggtctgatggaggttgaaggattgaagggcatcatgaaaaatgagaaaaagggcctagagaaggcatgggcctattctagttagatgggtcaagcctcacgttgaattggcccctagcaagtagagagtacggcatcaagactagtggaggaagaggctttgaccaacc

SEQ ID NO: 182032 - DNA, 284 bp, Zea Mays
tgcatctgaaggtcgagtttgacttctctccttccttgacgagttttggtcttctttggccttcatccttggagtcgccatccatatcaaggacatatggttaagatagttgtcggtgcttgggatgggtaggcccaacaaggtttactttgcttttggagtaggtgaatttaggtaacatatcaggcgcgttaggtaattgtggatggccgagttgatctcaggcactagtttaggtttaggtgcattagggaaaaacaagggtcatatgagtaggatctagt

SEQ ID NO: 182033 - DNA, 409 bp, Zea Mays
gaagaggtctcaccagcgttttcgttgtgcagattcccgcccacggtgagacacgcacccacgatggtcatcaattccgacgagaaattgagtctggctcgggagaggatccttcactgggtggccacggtaaccattcccgagcaatggcgaagaactccctccggcaatccagtggacccggctgttggcatcggcgacgacgtcaggcctctccccctgacccgcacctataggaatcctgatgtttaggcggctagcgattgtttgatgaccgcgacaacttgcttatatatacacaagcagagcagcccaatcccaacaaccagcccacatcgcacgaaatttgtgttgcagccatttggattatcggggtttgctacaatctgatggagttcgttcgttaggg

SEQ ID NO: 182034 - DNA, 841 bp, Zea Mays
cagtgcaattgtacgagcatggatgcaaaagtcaccaccctgtgcgacgagttgtgcaagctcaacctagaagttgtttcttcatgtgccttaaattatatctcggtggagcccacattgcaagagcaaatagtcagggcatagattgaagacaagggtgttcaggtcattaaggaaatgatcaagcagaaagcagaaaaaaacaaatgcttccggcaggtcagcaaaggaatcctatggtttggagatcgattggttgttcccaaggaccctgagctaagaaagaagatattggacgaagttcacctttcaaaattctccatgaaccctggcagtaacaagatgtatcatgatcgcaggtccttgttctggtggaccagaatgaagagggaaattgctaagtataaaactgaatgtgacacctgccaaagaatcaaggccagtcatttgaaggtagcaggccctttgcaaccccttcccataccatcttggaaatgggaggacatttgtatggattttatcgtgggattgcccaatacctccctacaccatgattccatttgggtcattgtggacagattgactaagacagtccacttcttgccagtgcacaccacccacaggacggagaagtatgcggaaatctacattgaccagatagttcgtttgcatggaacaccaaggactatagtatcggacaaagcagcaccattcgtggcacgattttgggagcaattgcaggaatcacttgggacccatgtaataagaagttcagcataccatcctcaaacggatggccagacagagagggtaaatcagattttggaagatatgttgagag

SEQ ID NO: 182035 - DNA, 417 bp, Zea Mays
aggccgagtatgccactggagcaccaacatttgacactttgcccctaaggatcatctcaagtcggctcacaaagcctgcagagggaattcttctgttggtaacccaagttgagtcggctagccctcgatacagataagctgggtatgccctgtctttcaatggctgaatattcttgaagacaaaatcagcaaccacagcttcagcagtcagacccctctctttcagcaatccaacctcagctaacaatgcacctgcttcagctacctcctgatctgtgggagactcgatccagcttggggtgcgaacatccggctgtcttcccgaccgggaggggagagaattcccgtaattctcaactatgaaccactccaagcgccatcccttgatactgtctttgagagggatctcgagatact

SEQ ID NO: 182036 - DNA, 763 bp, Zea Mays
cgctgggatccgagtttcgcctgggagattcgtgctcagtaaggaatggataacactagggaagggtgaaaagatcagtggtggggtgaactcggtcgctaactggttcggccgtcatacccacttgcccgcacggtcgaccaagttgatatcaccggagctcgccatttcactcggctgtgccacgcaaccatgcattctccacgtcgtaaaggtcgtggcaagcagtcagttaccccaccccccacgaaccaattcctcctcgcgcgccacggtgagcaagtcaccgtaaaatatccaggccgccgtgaactgatccccaatcaaagttcgtgataagcctgaccgggacctttaaattgaaggcactcccgattccatctctttgttacgcgcccaacccaccctcagccagctcgtttcattccctgtagcccacagtcactggattttcccgaacacggtcatcaacgctgccgagtgtagcttcgctgtggccagagtgatccaggttaaatcctactcctctacgtttcgttttagtattcttatggtctctggatgctcacgggccaggccaattgaacgctatcgctacagactccgagaacactatgttgtcgtccgggaacgccgccgtgaacacccctcacgttgacgggctctttagtacttgctccgttcaaatttgtatgtgtatcgcgcctctggtgagctagtgatgctctccctacccttattctaaacgctaccacgttctgtt

SEQ ID NO: 182037 - DNA, 730 bp, Zea Mays
gggcatcaccagcatgcaaagatgctagaacaagaacagggagggtatgagcagacctgtggagggctggccacgacgagcttggttctacggtggcggaaacttgatttgggggaaacaagaaatttgggcacactggtgatcaattgctagcaattcttggtggctgggtagttgatgaccttgcggaactggtggagggctcaatttatagggagagtgagcggtgatgatcaattcggtcgagccgtgctggctgccggagatgaagaagaaccttggcgcagtgaattcgtgtccaccgtcgtggcaacctccccggcgacgatgggacagctctagggagtcacgacgacgcggtggaaaggcagagccacgcggcacaaggccgagaggcggcggtcaccagtgaagttatcggagtccgctgcggtgaacatggtacggtggccggagttgtttaatggccagagtctatccacggcgaggatatttacgcgaccccaagtgctatccggttaccagtgagtgtgaatcttaacgacggcgacgatcccggcgcgaagtcattggcagcgaggggagcggttgatttgatctgtccaggcactataccatggcaatgcttaatcagtgtgtctgacagccaagatttagggccagattcctcccaattttctatggaaacatccccaagtctctgcatcaaagttgtagtgctacataccag

SEQ ID NO: 182038 - DNA, 516 bp, Zea Mays
gcttcagcaggtacaccactgacagggtcaacttcagtgaagacctctgttggtgtttcttcacacacaggagtagaaggtccatcatcctgatccaagcatgacagtcgccgaagccgtttctttttcttcttctcctcagcaggcgcagttgggcggctgacttggcgaagacgctccggacgagtaccctcaggctttcgagtgtccactattttgacagtctccggtataaccacaacaaccattgtttcagcaggggtcgagttagaagattctccatccaacatatcgagtacaacattcatttctgcatcgtctagactcgctggcatcacaaaatgaacttgtcgctcatcattgggaagatcacaaagagaagcaaccaagacctcaatatctttaggagagggtcgcactctaagacctagaccactattaccagcaagaggattggacacgaaattgaaaaaggacttaggaggtggcagattccaagcagagtaggcaacagga

SEQ ID NO: 182039 - DNA, 854 bp, Zea Mays
gccaaaccgggccctctcctcattcacacgccacgttgtgtctctgtcctgtgggaccgggctatcagctcaatcgcgcccacgccaacagcacccgcgccgcgtcctccatgatctccagcgagctcaccccatgccctggtttcttggctaatcgtgccattagtttataagacctgaccccacgaactcctacgcccattgctcccctctaatctagcaaccacggcgagaataggagacttaggcttagatggcggccagaaatcgtccgccagcgccattgccatcttcacctaaagaccgggcacacgggtcgtgtccaggagcctcgcggggtgtttgttgaaggtttcgtgaccgtctggggaggtagtgactatggtggtggctggaattcgttgctagactttggtttccgctgtgcgctgtgggaagcttggttcgcctcttcgaatcgcggtgagtagcatcctacgaaatgccctaccgttaccgcttcatgctgttgcgttcagattagagtttaggatcggcaatgccctaccgttacgcaatgccctatgcaatgtcgccgccgtgcgtaggtctgttgccatcgtgggcgaggaaaggagatgggcgggccacgtcgtccattgatcggacgaggaacggctctgattaggccgaggatgtcaagtaggggggatagatctgggtcgtccgattcggatcggtcgggagaggaatggatggggattctttaaatccgtggcgctggtgttcgatccaacgactggattcgcgtaccgattcactaatattgacttctaatctggcacatcaaaattggatccgacggccagacagcc

SEQ ID NO: 182040 - DNA, 489 bp, Zea Mays
gtcgttgcgtcgcctttgcccgcctcgcatccaccgacgccgatgccccatccctattgcccgccccgcatctgctgcctctagttgccgcatcactgttgcctatcgccgttgtttccccacctgcatctgtcgccgccatcgcattcctttgcccaccactgccgttgctactacgagctgctggtgaagaacgtggagcacatccaggctagcaggcatctcttcgtcgatgcctcatcggccggccacactcagacaacttgtgggctgccaccgtcgccctaagccaggtgttaagagttgttctctttgccggcattgagcacctaggtactcgagttagagcttgtacctttcttcgattcaatctttggctcccttttttttgacatggatgcattcagtaggagaacaacacatgtaggattcagttagaggaaataacacatgtaggttcagtgtcaacttgagatgatttgtcaatac

SEQ ID NO: 182041 - DNA, 424 bp, Zea Mays
aacattttacctttaaggggaagaggatgaaatcatctgttatgtctgaagagattccttgagcacccttattttcagtttgtgtaatgagaaattcctcataagggtcatcaacagaagctcggtaaatccatgacttaatgaagttaaagtatggctcacaggaacgaatgaaaagatacttcaaaagaccatagtgaactggatcagcatcctaaaattcaggtgaaacaaaatgaggaaagattcattcagcatatgacatagtatgttatatgtacaagatgaacaggacatatcacaataagatctttgtgcagaataaagggaaattggtgatcatcaagtacacaaaaaaacactcaatttggtggaaaccaactaagcaattgcatatttgtaggaaggcatgataacatcagac

SEQ ID NO: 182042 - DNA, 362 bp, Zea Mays
ctcatcgcatgtccacggacgccacgagagaaactaaacacgatcagccgtggcaacgtgcaacaaacaattcttgactgcaacaattcaaactaatctaccaacagcaacctaactagattttcaggaagaaaaagaacacctccccaaagaacacaaacaacaatgagaaaatttatacaccaaaatcttggagaaaacctgacgtagatctaactctccgcaaaccaaaaaatgtcactttagaactcaacaccaattcacataaaaatgaattggtcatctgaaaccagactaatttgcatcagagaagagtggaggaccttcggtttcagcaaactggtagaaactgattaactccc

SEQ ID NO: 182043 - DNA, 271 bp, Zea Mays
taatgaccaccagtcaggtcaaaggaaaaactcgctacaacccaacttgatcttctctaaaaaggttaggctcctaaatatatataccttctttttgcacctacttggatattacctactgcacgcagaacaattaccttccaaattataatgctcctgaactccaataaactgttctaaacaatgctctgtccatttattttaccattatgtactgttttacccaatatatatgcaaactgacaaaggaacattctacataggaagagat

SEQ ID NO: 182044 - DNA, 301 bp, Zea Mays
gtcatcttctgtgatgcttcaaggcaaggcttagggtgtcctgatgcaaaatgagaaagttattgcttatgcatcacgcttactcaagccgcatgagcagaattatcccacccacgatttggaattggcagccatagtgcatgccctaaaaatatggaggcactacctaattgggaacaaatgccacatcttcaccgatcacaagagtctgaagtatatcttcactcagccagacctcaacctccgtcaaagaagatggctagaattgatcaaagattatgaccttgagatccattaccac

SEQ ID NO: 182045 - DNA, 431 bp, Zea Mays
acactcctcgcattacgatgactcgatggattttccactcacgttgatttacgcgatttttacagtaacaattcacatagattcaaactaagaagcgaagtatttgacggacataagttgattctgacgattagaatctaaccagaaagaatctaaccaggcgaaacaaaataagaacaaagtttagcggcatcaaaacttttaccattccatatcgttttagagtatttctacgcgccttttgcgaggcacccaagcaccaagcaaaccttatcgaaaaaaaagcaccaagcaaagtcgtaattgaacagtaaagctccagccccacctgtcatggacgcagcagcgcagcccccttcgccttccccgcgtccaggtccagccccattcccagagcagcacacgcaccgcgtcggctggttcggaccgac

SEQ ID NO: 182046 - DNA, 544 bp, Zea Mays
cggtcgcccgcctgcacgcgtggactggtcactccggtgagccattcttcaattcctcgcgcacaccccttccttgatccctggtgaagctctctgactcgtttgattggtcaatttcgccctggataggccggactcctcgccgtcgacgagctcccccgcctgcgcacgcggaccggccgacttcgaccatcccggacggcgacccgcacatcgtcgtgaccctcaggacctcccctacaccctcggccacctcaccggagcaatctcgtcgccggtaagccccaccaccctttcttccgctgcgggtactgtttaatttgggggaaggacctcgggttaggattagaagaatccagggggttttctgagatgtcagtgactcatttgaatagtggcccagggactagtctgtaaggaaaacttaaaacacccgccagtgaccccgatgcaaagtagttttccatttaatcatttctgtttaatctttttaataaacagagaacttagaaaattcataacttgatgaatacttaaccaaaag

SEQ ID NO: 182047 - DNA, 394 bp, Zea Mays
acatcggcatcctcaggaactgattctgctatcacgtgattaactcttcccttactctggttctacggagtcttgttctgtgcagatccatgagcaggtgtgtgctgatcagctcttgggttgctgttcctttggggtgtctgttgattgcgccttgggtagttgttagcatactggccaagttcgccacacttgaaacaaccattgggttggactagagtagtttgctattgtttttggccggtgtgttcacgacgcttccttgacgattctgctaataaccactagacctttgaccggtctgagtgttgttcctctgctggttctgatattggttgctcctctgaccttgttgtccagagcgtcgtacttggtaattattgttcccactctg

SEQ ID NO: 182048 - DNA, 762 bp, Zea Mays
cgggtaaattggctgtaggacttacttgagtattggtatttgctaatggatactaatcaatctcttctaggaatggacgtgagaagctaaaagtgactgctatgtcctgactattatatatacctttctataacccttaacagttatttaaaatagcaacatttgaagggtcaacacgtactaccaacactgaacactcaaaatatcttctgcactcgctccatctttttttttgctgcatgagcagtgcttctcctgtgctgctggtgacgttgtgcgggccttccggacgtaaggcgtgcctgattgagtctgtgacgttgtactcaatttgtcacctcgtgtaatggcggctttattgtctacagtgccgtgccgtgccgtgtgccgggataaaatcgaagtatgatttcatatgcaaatgtttcttcttttaaattgtgcatgtttctgtttctgtttactgcatctgagcttgcatgtttctgtttcttttaaattcttttaaattgtgagaaaccacctgtcggtgcaccaaacgaggaccggatgcaaaggccaccatattttagcactagaataataggcacctcaactgctcaagaaaaggtcgacggcacctttggactcaactgtttgtctatggcgcggttcaggttgggtggaggagggggaaaaaatcctttgtggccgtgtgattcgttgagattgtcattgtcgccggtccgcgaaccaaacaccaaccacatgcgatgcgatgca

SEQ ID NO: 182049 - DNA, 908 bp, Zea Mays
tgaagtgttccgacggttcgaggtgcagattcatcagctaacatcgaatgccatggtggccctggcgaagtttgtgtgggcggtgagttcatatggtggagagccttcgatcgaagtcttcgccaataattactatctccattggcagaaaaaggtgtttggtggcaaggttgcgtagtttggaacttgcaccttcacgtcgaggactggaaagacttcgggtgaagtagtggaaattgtgtcgtgtgccaagaataagtggggtaattggtgggatttttgtttctacgtggcgctagaggacaccgaaagggttcctgtgctgcatccatctattctgtgctcgcattgttatatcgtgttcccgcggtttaggctgaagaagggatataagggtgaagacacccttcggcccgtagataggacaagcagcggccacgatttggtggaagaatttattgcgtgcggggtgtggacgctcactcatagctagaatctaggtgcagtcaagctactcccgatgcccttttgaataattggatggtgctgagccccgcctttgccattgaactgtgggggcgggatgtgactgccttcgtcagggaggtggaagcggaggtggtgaaatttattagcaagtacttagcaaagacagagctaatgaggagttgggaaatacgaggttcgaatgttaggttgaaccatgattttgaattgaatgaccttccgtatggtccataccctaaggagggttgtaccgacaccggggatgaatgaggaaagaagatggtgacggtccgggtagacaaagggtgctcgaaagggaaggctatagttgcagcgagcagaaaaataaaaattgaggtgaaaggtacgatgaaggcattgggggtttgaaggccttgagg

SEQ ID NO: 182050 - DNA, 965 bp, Zea Mays
cagacccagactacacccgcggagactgcaggttagtttcgctattttgagggactcttttggaaaaccggctcactgctataatcgcggagacaacccgagccgctcgattcagaaccagcgacccagattaaaatatccgtgcgtcgaaccaatacgcaacgcctgcctttgaatcgcagatcaatgacccgaatcgatcgtgaactaatgtaattctagccatctgatacagatcccacgacgactactcgtcttcaacctcaccacacgccaccaacagcacgcatactggactctcactttatctaccgcatgctaatcccggcgtgacggccaaacacattggtgtcctacccagctacgatactgcgcagcacaccaggccattaggccatgctcgaacgcaaccaatgaagcagaggaaactatcacggcggaggagatgctcaccagcaacgtcgaggacacagcagcagcagcacggcaacggtcgatggattcaaaagacccacgtcgagaccttgatgttccaccatgctgttcggcgagcccctcacctgcgcaccagcaaggtctggcgtcgctacccgcccgcagcctcactttctcaactacggtggctcgcggcggaggcactctacacggcttctactggcttaacaaacgagatcgaggcctggggacacggttgattttatacgggtagggcatggagctagaccgatggaattcgccggacgccgaagatcgcgacgaggtagttacacctgaaaccgtctacccgagcgagagcttcggctcgcatgcagccaaccgccctaattatcttgtggcgttaacctgcatgccgccaacatgtgttttgctattgttattttccctttatttgttttattttctaacttcagatttcgttttccattcggctttgaattccactaaatttccaatcgcacgttcaa

SEQ ID NO: 182051 - DNA, 542 bp, Zea Mays
ctttattttctcatgaatatgtctcatacccttatcacttctttgtgcatcaataatcttttgcagaagaactgactcaagcttcaattggtttaaggttccatgttgaatcattcccaggtttaatttctccatttcttggcataatgtgatgtcataagtctttactgtaagacaacgacaggaagccttgtgacttagtgcatctgccaccaccttggccttgcctgggtgatagtgaatttatagttaataatccttaatcagctcaagccatctcctctgccttatatttagttccgactgggtaaaaatgtacttcaaacttttatgatctgtatatatatgacagatatttcccagcagataatgacgtcatattttaatggcatgaaccacagtagctaattctaagtcatgagttagataatgttcctcatgccggcgcaactgtcttgaagcatatgttataactcggccctcttgcattaagacacagccttgaccactgcccgatgcgtcacagtatacatcaaaaggct

SEQ ID NO: 182052 - DNA, 432 bp, Zea Mays
aatatctagtctagaaagctataaaattactctaactgaacactcaacgtctaaaacagactccatcatactgcacacaaaaaatcgagtgtacaacaacaaatgtatcggcctgatagaaaacatgattgaatttcatgcttacatgtgtactaactatttcacaactcttgtaagcaatgacatagggcgaaatcatgcaaatcaccaaaccaaatcacagatctaggcattttaggaaaatacatgaaaagcagagctacctttccacgattcaagccttcttctgcggttggactgcagcctccacccgccaacgacgacggcgactcaggaaagctcctccatcgctggtgccaaccttctatcgaatgaccggatccaggacggtgtccaaatcgtccacgcccccgcgtgccgagattgttggag

SEQ ID NO: 182053 - DNA, 930 bp, Zea Mays
aattttatttgttttaatctaatgaatagcaatttgttagcagtggaaggacaagagttcattttcatctgttagttattgggtgtaatttttataggtcgataattatgcatgtcttttgagtaggatcattcccttgtcgcctttaagctagagtaaaataaaatgttccctttgatgagttcaccatgtggattatggtttttttacttcggtctgctgtacaaccaggggatccatgttgggcctaactattttagggaaccggatcattgaaaattaggcaggtttttatggtggaatcatttaggagggtacttaaccatgtatgagaaattgtaatgttgcttttatttggcacaattatcaaataggaaaatgaatttgagatccatcatatcctcttccctatgccgccatcaacaccgctcttgcatcctatgcggggctgatctagacgtcgtcctcgcccgtcccgtctccctctctccgggaggacacctcgtggccagcacaagctggccttcttcgacttcggcgacgccgctagcccccaccacccatccccaaactcatcttcgtagagggtacactggtgcagaccttaggtcctaaaaggcacgtgcatgtcgtggccctggacgaggcgttgcagatcccgcaggagttggcggcgtttgtgacttgctatggtcaaagcctccatgtcctggttgggtacgtatgagcttcactcattctcttcctgtttagattgcgaacttagttatcaggtctgttttggttgcacttggagcacccgataaatgacaatgcaatagcaactagaaaattaaatttgggcagccttctattttggttgcaagcatcaacacttcttgggaatggtgggatctagcttctcttctgaaggaagctatacatgttgtc

SEQ ID NO: 182054 - DNA, 557 bp, Zea Mays
caagtcctcgccgaacaagtctgcgaggcggagcaaacgaccaaacagattagcaaggagggagcctagactaacattatgggtccatggcggccataacagcacacgtcgccgctaaaccatgtccatgtcatgtgtacagcaccaagggggtcacgacattgaagtttccacccacgtaccagaaaggataggacgacacacctagcgcatgctcgaacatgctggagggtgacgcaagggagttgacaaaagatgaatccgtgctgaacacgaacctcaaccttaccaggagcacattttgtgggacacacctggtacaatggcatgggcatagagtaagctacaaggtcttgcacaaaagatagatgggatatagtgccatgtgaggaatacagaggcacaagacttgtcagaaggaaccatatcgtgcgcaggcacaccccaggattgacctagaggtgtccactgtgcactgtagctgaggttgttagttgaagaactctctctcacttttaagtatcgtccgttgaagtataaaagagagccccctccac

SEQ ID NO: 182055 - DNA, 608 bp, Zea Mays
gagtacctctttaccccaagggttgaatcgtgacctgccagctggaaggcggtagcaaggctagtgtgtgtttcccactagggttaggtggggacggttcagacttggggtgtaactaggggaaagggtggcatatgtgcgaaatcctagggaaagtaagcctatgccgtgtgcttgggtcttccctgcagggtgtaaaattggttcaaatcactgagcttaccaggtgttaagctgcttgatctcgcactaacaatcgtcgtatgaaccaacgttaacatgctttagtctcgtgctttcaataccacatgtttgcttggtacatattacccaaggaagtagctggcaagggtaggtgctggaatagtggaaagttgatggtggagtcgtgctactttcttgggcgagtttggtttgattaagtagttgacagacacaaagtcagatcgaggatctggttttggaaattagatggtaggtacaactcagatctgatatctgggttttaaagtagttgataggtgcaaatctagaacgattagtgctaataattgaatttgagctaaaatatgaaagtaaggattgatttctagtaagctcccgctttt

SEQ ID NO: 182056 - DNA, 658 bp, Zea Mays
ctgcggcgaggttccgcagactacggacgacaggtcagcgttagaagtccgagctaggaaaccgatgcattcagttgggaagacgaccctgccaaggtggcccaccgtcagcggcatcacgagctgagttcgtgtggatggaagccgagcttctcggtgggatcggcgtctgctatggcgtggagtctgtttagaggatagagatggcactgagcaggggcccgccatgcagcgtcccgagctgtaacctgcgcgcgagggcgagtgtcaggatgggacgaaagttggcggatgcgggcggaccatagcgttggatcgagggcagaccgagctcgaggaagtccttgtgccagcgatatgtgcatgaacgcacgatgtggagtttgtgcggctaacttgcatgcttatgtcactcatgcgtcatgatgacctcatttgcggcaagagaataaagaaaaagaaaatggacgttgacatgggctgcaagtagagcatattgggctgcacgtggtaggagaaatacttttcttctctttttttatcttttatgttttattcctatttctattttcatttcctaacttaaattcaataaagttgtgaattacaaattcaaacacaatgcacaaacgattaaaacttagcatgatatgtaaag

SEQ ID NO: 182057 - DNA, 611 bp, Zea Mays
gccggtccgagtgttggctatgggtggcaattgtgccgttgcggtcgactgtgcctgggcgccgtgaggtagaagaaggccatttgccgtgcgatccgttttaaacgatcaggattagatctaggcgtcgggaaatgtggcgcgtgggtaatcgatcgaacggtgctggaagcgtaccgtttcactctgtataacagttaatcttaagcgcttagatcggatcagacgaccgacgtcaattcgtacccccttcagtgaggcgtttttctaaaagaacccctgtagaatccattaaccaacccgccgtccacattgaaggtagtctgagtctgtggggtttttgcgccgaagtccctgcactctttagatatccggtgtgcagtccagagccgggtgaaaatgggataaatgaatataggaaattatttttaatataaaaataattccagaacagtgtttaatctctagaaaattcatattagcttctttttaatccattccggttcccataattttgtattaatattgcctactacttggtaacactgttttaacatgaaatctatactagaattgattactcaattaattttatagcaagtacacacgaa

SEQ ID NO: 182058 - DNA, 624 bp, Zea Mays
ctactattcagctttaatcttgctatagcaatcatagccaaataatgattggatcatgatcaaatctaagctcaaagattgcctgaccatactgttagtctgaattcagacttcagatagtctgacagctcaactttgagcacatttttctccaaatttttcatgtgactatggtttaatccctatagcaaagttgttctcctttcatagctctataggtttgatgtgctgaccctaggcaaattctcaatatttttggatctatagagccctaaagtcagccctgcttcactattttcagacttaaccaatagagcttaattagggctttttgcaaataggtccaaaattcagggtttaggttgcaaatccacacacatgtgaaccatatgagttaagacaccttaatttcatggtttttgcactttagtccaaaagtgcactaattttgcacttagccccctagggtttaagtctagggctttccagggtactatttagggtttttggcactcttagggtttgaatatcccataagtctattcaagttgacattttatgattatctctaatgagttttgaagttttctcttactaggcttttctttgccctactgagcccaa

SEQ ID NO: 182059 - DNA, 542 bp, Zea Mays
ctggagcaatgggggttgtcaacaggagatgctttgttgccttggtgaggatctatcgatatatgtctccatcgagtgagtcggggaggccattcgcgatctaggcaagcatgccaccggcttggcttggagtctgcatgagcctggtgaactccagcagcaggttgcgcgggatgggagataaaccacgcagaggtgcatgatcgtgttgatggcgaggatctcggggaagtggatggataggtctgatgtcatggcatcgtcgatcgcaggtgagaagttcttctaggtctacgtgatagcccgttaacctcgtgtttcctccaccacgtcgtagatgcggtgcaagtcgtcgttctgatcgacgatcgacgagatagatccaaagtggaacatatcgctggtgattgacttgatgttgttaacaaaaatgattgccatggtgctaactgatatcgatatcatctcccctacctgttgcgccagaggttgatgtttggtaccaacatcacttcacgggatacgtcatgatgtgcttttgg

SEQ ID NO: 182060 - DNA, 729 bp, Zea Mays
ggggaatacaaacttgattggataccaaaattaacacatgaataaacataaatatatacatgttacctgtgattttctaggagtcttctgtttaggagagttttttttgtaatgatattagactttggacttcttttcacgcaaggaacttgaggagaaggtacttttaacttctttgcactggtttgttctgaaggagaaggtgaggcagatctgaattggcgcttcaacgatggagcctccatgaaatcgccgtctgacagtgtggatggagcaggaggttttctttttaaacgacaagctaacgcctttctgcgaaaacgatggattggggctggatgtggctcattctgctcctgtttttggggaatatcatcttggtgagctgagctgctggatcttgtacgtctgaaaatgtcaattgaaaaacctcctgactggattcaatggttaatctttttggattactgggcgggcgatcaacagacttcatgattaaatactgaatagatctgcagaaaaaaaagttgtttttaaatacattgatttatgcatgaatatatgccaaaaaagaactaatttttactataactatctgaaatgcatactatataatgctaagtggaattacataacttaaactaccttttacatttatgcgatagcatttaatgaacaatagttatatacaagcataaagattgatttaatatttcatataattgtaaa

SEQ ID NO: 182061 - DNA, 630 bp, Zea Mays
ggcgttgttcgtccaaatgtgtgagactatgttgatcagttctaatatgaattccccaccaataagatacgaacgctaatgatccactgccatatgaatggttaaacatttttcatatgtcgataaaccctggtgtcgaggcccaagagccttactcacaaaggccaaaggatgtccagcttgatgaaggactactccaatcccccttctcacaagcatcagtttcaatctctaaaggtttggtgaagtcggggaatgctaataccagatctgtggtcaaagctgttttcaatgcttgaaaggccagctcttgttcagaatgccacccaaagtcatgcccctttttcagtaaagaagtgagggggaggcttatgatgtcgaagtgttgcacgaacttcctgtaatagtgcgctaagcccaagaagctacggacctccttgatatttacgtggagtgggccaggactgaatagctgccaccttggcaggatcggctggtacatcatgctgactgatgatacggtcgaggtagtgaagggactgttgggcaaaagagcactttgaaagcttgactttgaactgacgtttgtccataatggcaaaggtttcccgaatgtggttgatatgatca

SEQ ID NO: 182062 - DNA, 740 bp, Zea Mays
ccaggctgtgaggttcaacgtgcctgctcgcttgctccgtcgatccgtggggagggttcctttggccttgccgccctgatctcgccgacaggattgcagcgattcgtcaccagagttgaacattccaccgatctcgcgctccgctatgaccagggaccactgcgcagcgattcacggtaagatcactcctagagtattcgtcgttccctagagtttgtgtagatgcccttggatttatctttgcggctctggcgtggctgttcgggggtgtacgccggcgttcgtcgtggtggcggagctgcgccgccgcgttcggctggcacggggggggggggggtgagaatgtccctggccgtcgatgcgagagttgagggtcgagattagagctctggttggcggatctggcggcgggtgctaaaccgtaggatgagtaaaggatggttcggattggatccagctgtgaggttcgttcttaggtgtttgcgccatcgatctgggatcgaatgaatccccatcgatctggcttgtttaaaatctgggatgttggatctcgatccaagggccagcatcgcacatgggtctaggactgctcggatccattgatttgaaatcggacaaccctaatggccccgtaacccttcacccaagccatgtttcacataagcccctgcgtttgttttaaatgaacccgccgtccatgccaggggcactctatgtctctggaaacttgcgtgtgagcc

SEQ ID NO: 182063 - DNA, 463 bp, Zea Mays
gttccgcagtcgaggaggcacggcattcggcgcaagtggcggtgcggctctttgcacgtcgtaaccagcgcgccggttacatgacatgcaggcccgcttcctttgcactggtctaccggatatggtcgaagccgaaagggcgtacagttgcggtgcggttggatgcctgtcgcgtggcagtccaccctttcgaccaccggtttctgcgaagatggcagagcgcttgtaaccgcgggacggttatatgcctcgcgtgcggcggttcgccttcttcgtgcttcggatcagctcgtatgacgtgtgggacctagcccccatgttgtagggggagaaccctggagcacgtcagtggagactttgcccgtgacgctaggggtgcaagtgaggaggtctgcctataaaaggggatcgatcccccgggcagtggtcatgccttcgttctcccctcatgcattgcgccctt

SEQ ID NO: 182064 - DNA, 508 bp, Zea Mays
gaccgcctcaaccaaaatggtggatctaccactagattcactaaaatggtggagcaacacagagattctccaccaaatccaagtttaatgaagttgaagaaaattattcaccatgtcacttgttacacacattttttgttctaaactgttacattcttatttcttccttccaccgctcttccccgttgttgtccacaagttttgtcttacttgcatgcacccgaccatggccataccacacgtgttgtggccatggattcacccgccactggcaacatgtcgtgctcagttgccctagagtcgccatgcatgtgcccttccatgcatgccctgaagctgccccacatgccattgtcatgcccactcgcgcccacatgtgctcggtcttgaccacctaccccttcaaccttgcatcgaccgtactcaagtcggtagttgcatgcatccctagccattcgcactcaggacaccccctctcaccggtttctagggttgcgcccgttgatac

SEQ ID NO: 182065 - DNA, 809 bp, Zea Mays
gtgtgtgtgcatgcactatctttggttggctggctcaggctgaggttcttacaacaattgggttcttaaagggtgccccaaccattagcgtgcacggattcaacatctatcacaaaaaccgccttatcttggtgagcttcctgaccccttccttgcgttgattcactttgttttaagggtgcattgcatagtgcatacacatagagacaagattgacatggttatctctgtctaaaatgtactgcagccattccatagagtgctgagtaccgcgagcagcaaaggcagaagcgtctctggagtgttggaggtagacttcatcaagcccacccatgacaaacaggactttgagaagtcgcagctgtttcagcggctgatgaaccgcctcaaggagatgactaacgagtactggtaagttccaggttcttgatgatattatctatctaattcctcccgatttcccgaacctagcaccgatgcttacttcgcctcaaatgtcaccacgcaaatgtctcggtccttccacagggatctttacagtaacaagatcggatacgtgaaagtgccacgcgtgagagcagctcccactcctgctcctccagtgatgctggcaatagagaatggccccgccgaaccatcagaaaggagcgcgcctgctccgacgcaacccttgagatggcagcacggcaactccagctgcgtgaacgcagttccaatcgccatggcgccccctgcttttcacccagctcctgtcaaaacagagactgatgcaccaggagcgcctacgggctacgcctactcctactccc

SEQ ID NO: 182066 - DNA, 1140 bp, Zea Mays
cggcgtgtcagtggtgcgtgggcgcgagcgcggagtgggcctgaggtgggccgaggggggagggagtcgcgagcgcgagagggggaagcaaccgtggcgtgggctggaaacgacccagctaggggggagagaaaggtttctctttttctttttattttccaaattctatttctatttttgcatcctttgtttttgaacaattaattaactaggtaatcttaggtgctaaaaaatatatattctaagtgaggtgcttctaatcaaacaaagtatatgcatatgatgagaagacctagggataaaataaataagaaagggggttagattagggttccaaacctcgggtttgaaaattgggatgttacaaacctaccccacttaaaggaatctcgccctcgagattcagacggggctcgagaaaaggtaagggtattccctcctcagagagtcctcactttcccaggtagcttcctcttctccttctctgctccactgaaccttacagagtcttacttctgagttgcgggtctttcggactgctgagtcaagaatctttattggcttttcccggtactggagatctttttgaatctgaattgtctctgccttgatgtggttctctggtacttgcaggcacttacggagctgggacacatgaaacacattgtgaatatctgacatggattctggtagtgcaaggcggtatgctgcgggtcctactctgctaatgacgggataggggtcgatgaaatgcggtgctagctttcctttcatttggaaccttttgaccccacacatcggggagaccttgaggtatacgaagtctccttcctcaaatctgagttccctccgtctgttgtctgcataacttttctggcgactctgagcttcaagtaacctcctgcggatcagggcaactttctcttcggcttctttaacaaagtcgggtccttccagtgtcctttcccctacattggaccacattaggggggtctggcacttccgtccatacaatgcttcgaacggtgacatcttgatactggcctgatggctgttgttataagagaattcggcattcgacaaactggattcccaatttctgtcgaacgtcaacacacaggctcttagcaaatcttcgag

SEQ ID NO: 182067 - DNA, 849 bp, Zea Mays
agagctcatataaaaagtttgggcatttttggacttattatctattttctaaaaatccagaatcaatgctttaggctattttaaataacccaaaattccctatttaatctaaaaatcctgaaattatttttattaaatactatgcaaaataagaagtctagaaaaattggtttgacatttttatcatttttctataattttctataattgttttagctctggaataaaaagaaaaagagaaacttgtgaatagtactgggctgattccagcccagatggcccaacaacacagagaaacggggcgcgcgcgcgctggcggctttacagaaagaccctcagagttcttgctaattggagatgggtttggttactatttctctgtgtcactgacagaatgcagagaggccctcgatcttctatctcttctccaaaaacacccctggccatggcgcgctcgtcgttcttccctgacgtggtccgtaccggccatggccggcgacgactgctacagctaactactggtgaggcatcactggcttaaggcgacctaggaacatccatttaatcgacacaaaccccactggaaactatctatccacgatcagggcggaacccgtggtgtcgatcctgtgttcccagtaatctacgctcggattggtcaaacggccactacgaggagcttcatgaatacatagagctactaaaacaaagcttgaattggacagggcattaccagagagggctggccacggagcgcagagctttacgttcgccggagacagagaaaggggaaaacggtgtcgcggcggctctgggcgaaattgggagatgggatccaatatttggctt

SEQ ID NO: 182068 - DNA, 585 bp, Zea Mays
aacatgatacaatatttttcaccatataatatcgatgaattggtcgcctctcttatatcgtaatcctagctccgccacacactgtgttcctatatatgtagttggactgacatcattgttgggctgtcggtccgttagagttacggttcctaagtatatatatagtttatatatttagagccctaggctcacattaacaaatggaagctctgatctaaattagttggttcgaccccaccagcttgcaactcagacccacccacagccaacgtcagttaggaaacaaataccccacgtaccccacctccaatctcgacgcgtgccttcctaaacaaccatctcggcgccatatcatttcctccgcattctccgcgctcgccatttcttctctccgtctaggcgactgggaggcgagcgaagctttctccggcgtggggaatcttctccagcagtcggcgattcgacggcgcgccgaatagggcatctcgccctcacccacatccagctgcggagtctgccgacagttccatcgcagttaagatttttcggtccgccgctcctcccatcgctagtagtgaatatccg

SEQ ID NO: 182069 - DNA, 412 bp, Zea Mays
gaaggtttcaccgatttgtgaatttattcgatctcaagaacagcccaatttggagcctgttaaaacttttatttctcgaagcaaacgcaaattcgaaagtcaatctcgtctcgcaactcccgtccagactcatttatccaaactctcgacaattgtgatgttacctaatctatgtccgaatccgctctctcgatagccagtctatgtccaaatatttaatctgaatccgcattctccatcggaatctctatagtatcaacctctaattatttcttatgcaattcagcttgttatatttatgtcatcatccatctctatctatcaagcgtattctaaagatttcttaaagtttgaaccaaatattcgtgtgaaattataaatcctacgcttacctgagactgctcgattaagt

SEQ ID NO: 182070 - DNA, 379 bp, Zea Mays
aggggaaagggtgggcaaatggccaaatcacaaaagggaaccattacccaagataaagtatattagcaaatctacaaaatgtattaagagaagtattaaaaaaaggcccaacaaaaaccacaaaacaattcaccaagtggggagcacactagagccattcaaaacttctctaagtccccaaaaccacccctagcccaaagatcaaatgtgttcacccttgtgctggcgccaaaaccacttggaccaaatagcaaaaagtggccaaattacccaaggcacatccctgaaaaaattgaaatcaaaccaaggtcgtttgacatggtttaacaccagttttgtcactggtgaacagtgcagacagacaggacttggcgcccac

SEQ ID NO: 182071 - DNA, 738 bp, Zea Mays
ggactggatatgattgggcctttcaagaaagctcaagggggatacactcatgtactggttgctatcgacaaattcactaaatgattagagttcaaacccattgcttctctaacttcaactaaggcagtggaattcatacaagacataatattcaggtttggaataccaaatagcatcataaccgacctaggatccaacttcacgagctcagagttcttcaatttctgcgagcaaaagagcattcagatcaaatatgcctcggtggtgcacccaagagccaacgggcaggtagaaagagccaacaggatgatattggaggcgctcagaaagaaagtcttcgacaagaatgaaaagttcgcaggaaagtggatcaaagagctgtcgtacgttgtttggagcctgagaactcaacctagacgagctctgcatggaaacacacctttctttatggtctatggatcggaagcagtgctacctgccgatctcaagtttggagcaccaaggttgatctttgaaaacatagcagaagctgaagctactagactagaggatgttgacgtactcgaggaagagcgactgaacacagtgattcaatcagcacggtatcagcaaactctgaggcgctatcacgataaggccatacggcatcgatccttcacagtgggagatctcgtcctccgccgaattctaacgggggagggacgacacaaactatcactgctatgggaaggaccattc

SEQ ID NO: 182072 - DNA, 845 bp, Zea Mays
atagcgcctcagggtctgctgatatctagctgactgaattactgtattcaaccgctcttcttccagtacgtcaatatcttctagcctggtagcttccgcttcaactatgttttcgaagaccagccttggtgccccaaacctgaggtcggcaggtagcactgcctccgaaccatagaccatgaagaagggggtgtttccatgcagagctcgactgggttgagttcttaggctccaaaccacataaggtaattctctgatccacttctctgcgaacttttcattcttgtcgaagactttcttcctgagtgcttccagtaccattccattagccctttccacctgaccgttgactcttggatgtgctactgatgcatatttggtctgaatgctccgttgttcgcagaaatcaaagaattcagagctagtgaaattggatcccaggtcggttatgatgctattcggtatcccaaacctgaatattatatcttgtatgaattccactaccttggctgaagttagagaggcaatgggtttgtattctatccatttggtgaatttgtcaatggcgaccaacacgtgagtgtagcctccctgagctttcttgaacggtccaatcatgtccagttcccagcacgcaaatggccatgttacgggtatggtctgcagttgctgtgctggcaaatgctgctgctttgataaaaattggcaagcttcacatctctggactaactcggctgcatcactctttgtcgtcggtcagtagaaaccagacctgaagaccttcccaaccagagttcaggatgttgcgtgtgtcctgcactgtccggcgtgaacctcatctagca

SEQ ID NO: 182073 - DNA, 721 bp, Zea Mays
ctaaatgttgcaagtataaattgtaataatgagtcacaagagtttgaattaaatttgaatttaaagtgaatttgaaaatgaaggaaagaaagtgggaaaataaaaagaaaaaggcaaaaacgctatttgggccagcttctaaccatttcggcccaactctcccctcgctgcgcgcctacctctccttggtgacactgccgtgtgggctccagccgccaggtcggctggccgtttactccctcctgcgcgcgacgtgtttgtggctgtctctgagtcatgggcccgcatcgccagtccgtctcccctgatgcacgccgtgttcactgccaatgggaccccacgatgtcaggagcccatctccctctcccttcaccgcgcaaatcgcgcgtgctcggtcatggcggacgttgcagactccgttgtaggcacgcgcggaccaatctcgagcggccataagaagggcgtggccaggtccttaccctcccctccacttcgaccacgcgcgaacatccgcaaccaagcagacctccactaccgccatgtgaaccgtgagggccgagatccaccgccggggatagccgtcactggggggggtctccgctctcggagtcggctcgtagagtatcgtcttcgcctggggaagccatctgtgccaagtaattgggtggtgaggctgcggtgcgacgccaatcgctcgccgttgctgtcgcgccaccgtgaa

SEQ ID NO: 182074 - DNA, 1510 bp, Zea Mays
gggcacattaaatgctggggtagcacatcgcctgccagtggagtggacagggctcattaaatgttgaggcggcacatcacctgccagtttgacaagcggcgcgccttatctgcaataaatgcagaggacacgcggcctagaggccttacgtcaggctccgcctgctggcttacgtcacgggcagctagccacgtggcagcatcgggtctccggctgagcgaatagtagaggcgtatgcgatatggtccagacacgtgttggctctggacccccgcctagccttgattaaggtccgggtactatttgtcccagaatcccggggccctattgtgagtggctcggaccccactccaaggggtccggaacccatcctaggggtccggtttgtacccgtggaggtcctggacctcgcccggaggtccggtctgtgtatacaggggtccagcactttcctgcgggagttcggacccatcgtaacatcgttttctcaggccacgtggcagccccgggagccgtccacgtggtggggtcgggtgctgtcctccacgcgactagagatagccgcacgggcaccgtgccttcacactgtagtaaggggtacccctgtttcagggtaccgacagtggcccccgggcccacctcaggagaggatacgagcctataggtggggccaaagctttggttggcgattggcgcgccgcttccgtgtgcttgctaacgtaatcactgtcagcccgccttcggtcactccaactgccacgtctgtccccgtggctgactgacccacgacccccacgcatgatggtttcaccgggccacgcgtgaggcaccttgatactgctgcattggctttgaaaaattaccttccctgtcttctgcggcggccccgaggcggagcagcactggcacgagcggcggttagccttctccgcacctaggaaccggtgcccaaggagtatgactcgtggacccaggcccccatgccagcgactggaccattgtttttggtgaagatgaaggggcgcactaccgcaggcggcagttcgttcctcgtggcggttcgccttctcagcactcagggcccaaggagtatgactcgtggacccaggcccccgtgtcagagactgggctgttgttttcggcggagatggagaggcgcactaccgtgggcggtggcatgctcctcacacggcggttcgccttcttcgcactcggagaccaacgcccaaggagtatgacccgtgggcccaggcccccgtgatagaggctgggctgctgctttcagtggagatgaagaggcgcggcggttcgctccttgcgcggcggttcgccttctttgcactcgaagacccgcacaccagctgagtgacttgtgggcctgggcccccgtgtcataggctaggttgcttcggtgcgcatcgggcaggattttccgcagcgccttggggcgcgatcaagggagtcttcctttaaaaaggattcaccccgtgtgcagcggttatgctcccgc

SEQ ID NO: 182075 - DNA, 456 bp, Zea Mays
gagtgcggctaccccagaggcgagcccatctgccgcagccaacgagcgcgccttggaggcagaccgcggcgacagcgaggaggaggccggtggggtggggacgtccaaagacgtgacatcgggttcagcggaggccacgtcggagggcggcggcggcggggtcctccgccaccaccatccccatgggctcgccgcagtagctgggtggatctggatctgggcagagcggtggtttgaggtgcttcagatcggggaatggggctcggcagccgccgccgctgaaactctagtcctctcgggcaaagcagtcgtcgcggtcggttttatatgatagtacaggaggcggtttcagacagtatgacaaaataaacgtaaacttgtgtacaacaaagcataaaagtctgttggcgttatattaaatggatcagatggtgcatctgaaacatcttgtgggct

SEQ ID NO: 182076 - DNA, 806 bp, Zea Mays
aatatgcatatgccatatttttttcaaacatgttatttcattcatctccctgagaaggtcgtcaaggctagccagggacaccacctcaacatctgaaaagttttctgtccctgagggaggcagtgttggcggggcttcctcttttcggtcagtctggcatccttggctcttggtccgcttccggatcttcttggtgggggcaagcttctttaacttcttagcatagtccatcttcaaagtctggtatgcctcatgagtgttggcttcttcgccttccgccatctcgagactttcttggaggaacgccttttcttccttcaattccttgatttgttgctctaggctttccacccgggaatttaggtgggtatagtgggagaaaaggtcgtcatagtggttgtcaagggtatggagatatccggccatgtagactatggtagggtcatcttcattaggatctctccctgacaagacctgaagtcttttcctctaggtaggagtatttttgttgctgggttgaaagtagcgaaggggtgtctaagagacctccctgctgtagttttggcatagctggcgaagggctctttgggcagcattctggcaagtgtctgggaagcagagtccagtggcggtgacttggaagggagggtgatttgggtagtttcagctttctcccacgtagactgccatagagcatttctcaattccgttctcgtggtattctttccagacgtacttcggcttcttgcgtatccccatgtgaagcgcgcaactccgtagaaggtgagggaatccttccacctccg

SEQ ID NO: 182077 - DNA, 590 bp, Zea Mays
cgtgcacgtcgtcgatttcaccccaacccccaccaccgacggagaacttgcttctcatgtcgacgccgctagaggaggaggaggtggtggagatgtgggcaccacgatcaacaaggaggtggacctcaagcccgtcatcgtcaagcttgaggtgttgttggtcggccatgtccacgaaagagcctccaccaagtcacctgtgcaattgctattgagctaggattctgatgttccacgaggtgctgattcagtggattgccgcaaggggatttttttcttttatggatcgtcatcttgcgcggaatctagaatgcacttctagcttccttggactctctgctggcctctgtttgcaacactgtaatagtgcaacaaatgtatggatgtttgattccctttgagcaatttcaacttgtatcatgtgttgtcgtgatcctcttgtttcgaaatgtggacgctgtctgaagcaatcgagatctcttggccaaatgcaggtgtagagggaggtgacaatgtcccagatgctgtggagtatggttctgaaaaggtatgctgcttctctccacccctctaattcatccaagaattcc

SEQ ID NO: 182078 - DNA, 783 bp, Zea Mays
aaaatcctttgcgagctgggctggagatcatggtttggagtcttggacatggagatggttaatacttaatagagccatgaagatggttaatagagccataaagatggctggtggatagtgtgcacatagcacggtacaaaggaggagggaaggaaggcaaaactgtaagacactatggagagttgcgagttgtgtcttctatcgaagcttgttcgaatggacggagactctagccaaggtaggtatatgtatatataaccttatccactttaagtgtaacctctgttttggtactctccatggtataattttaattcttgtttcacatgtaccggaccttttctggcactaggatagatttaccagagtagacgatgcttctccagtgttgttgtgattgctttttgtgtcctgatctgtaaccagcacacacgtaatttaactgaagctttctactaaatcaccaccgactgtaaacttaatttcacaaacacggattatatttttcattcatagttactgatgtagtgatgtgtgttgtctcttgagtagggtggtgcggggccattattagttggtatgtactgtgtttggtggattgacctgttggttctgaatttttgataaatacactggccatgtgttaccttatttggcctgcatcacaaagattctgatgtaatgtatcatttatttgatgtacacttggtactgatatgtgttctgttaacttccatgttaacatgtacaaatgattttttgtcatcatttttatgcaatccc

SEQ ID NO: 182079 - DNA, 349 bp, Zea Mays
acgacggtggctgtgtatggcaatggcgacttcgacgatagatggccacggtgcgagtgggatgaaggggagaagaggaggggatgcggccgagtcttatgtgcgcgcggaacggaagctaacctctgaagccggaagacccgggaaggtggttgaggtcacggcggcaccgtctacgcggttcggttgagctcgcccgcgagtctcacggggaagacggagtcgcgcgtctgagagtctgtcgtgtgggcccgcgatcacagtgcaaggccggttaacgcgggtgcggttgagcaacagacaagtgggctccacatgtcggcgcggtgcactgagcggaggtgggcgt

SEQ ID NO: 182080 - DNA, 749 bp, Zea Mays
aagagactaagcactaatgttgtatgaaaatgggagatagttgggtctgatgttgggctgttagtcatcaatgaagactgaatcttgaccaaccgtgaaataggatgaactttgagatcgaattgcaagggaattagtggatgtttgagcaaggtttttgtatcaaagttgtagttggtacatcaaacaacagctttgatacaggcagatgagcgagttgccacacgagaattgaagatcaaagcgcttcgatttgctcggtcagaacaacggatgaagagcgcgatggtacaacgattaaatcagatgtcagattcagtgaaccttgccggcggtgatcttcatgccacgattcgcgctggcgctgcgattcgttctatctggggcgtggattacgaccggcagtggaaagatcttacccgcagatgaggtcgtgtgctagccgccgtacccacttgctttacggtcggtcgaaataatcctcgccgaagttggccgcttgcctcccgagtgccacgtaatcggaagtgttaccacgtcgcagcagaccgccgtaggtagcacattcatcgcatgtgacagtgccccggtgaatgccaccatagatagctccggtgactcctcccctttcttactgccagctcttctccgcccaaattcgtcgtactcgcaattgctctctataaattgagcgctcaacgtgctccgctaggttgttacgcgcccagtgcaccagcccttgcctctaa

SEQ ID NO: 182081 - DNA, 387 bp, Zea Mays
ggtgggggtagttagggaataaccatcaataatggtcactaaatgtttaatgcgtgtttcaaatagatggacaatttttgagcatttattatggaggcaatgtggaagatggcccctatggaaatgctaagttctttgacatgtgacacgtgcatgtgttattcgttggtagaccctacttgagtgatgtgtttacaaaggctaaacaaaagctaggttaccatgaagatgataacattgcggatgccggagtgcttaacattagtcatccaccaaatgtcataagacatgtcatccaaattgattctcaactagaatgggagaattttgttacttcggctatgcagacctagttgcaactcatgaaggttgtggtgtggcgggttg

SEQ ID NO: 182082 - DNA, 409 bp, Zea Mays
cgggggctggagatacacggcaagctggttgggttgcttcttgcccaaccaaaaaactagcagagggtgcgacgtctgggctctctatacggacgtcgtcagctccagtttcagatagctccaacaaaatgtcctcaggaataacctcctccagcacgttgtcaatgacagacattgtcattccctggaggctaaccagccctaagagagcttggtctggaacgtcattgctagccttactgcgacgatttctatgaacaaaggagggcacgtcctcttgatcctcctctttcaaaacatatctactggcactgacgccaccccaactttccacatcatcttcaagatcgacattcactacgtcatcaccaaggtttggagtagtggagttagcctccaattccaagtc

SEQ ID NO: 182083 - DNA, 710 bp, Zea Mays
caggatatgaatgatagctgtcaaaccagcctcttgcagcttgttcaccgacaaatcaatgccaaagaagccttgctcaggtatcccaaacccaaataacctcaattttctctaggattgacacttagctaccatgtgccttaattccttgcacttataacataaagggtcatcagaacatttagattgatggtgtctagattatattcatcgaaagcatttggttcctttgacttgatccccgtgcgctctaaaatccctatcctgatgacattctcctctgttgtctgaagtcctcccacccctaggagatgagaaggacccaagatcattattcttcttctcagtaggtctacccacatagctgccaacgtcccactgggctgaatcacgatgaccaccatagccatccatggatgacatatgtgctccactacctcctttgccacctctctagaaaccccctcttccagtcttcctaaaacatgtggtaagatcttgatgatgatgcccttgatctgttggatccgcatttcttttatcattggggcccctcgggagttttgcccttagatcttgttccgtgatgttctccgaatctagaaggtcatcatcctctatccattcgtcttgccttctgttctagctgctccctccttgttctcttctccatgccatctagccttctattaccacctgagcaaaggagc

SEQ ID NO: 182084 - DNA, 567 bp, Zea Mays
ctggtggacgatctgaggcacgggctggtgcgttgggtgcttgactacctagcggagctgatggcacgctcaatttatagggcccgagggcggtggctcatgaatttggaatggcgcgctggcggccggagagaggggagagcactggcgcggtgattcgtggcttctaccggggcaaggtcaccggtgacaaatggacacgcttaagacgagttactgcgacatggtagagcacctaggcacgtggagcacggtcgataggcggccaactccggcgaggaccactttgcccgaccgcagcccaagtgggtacggcgagctcaccgtcgaccgggtctgagcttatccggtgccaagatttttaccctgccatgataatctcctcgctagagagcacgaatgatggcgacggcgcggatcacggcgcgagggtcaccggcggcgaggggagctgaatctgtgatctttgtcaagtactgtaccattggggtcctattcagagcgcttgatagaccaatttgcagggcctagatctcagatttttacatgacaacatgttaatccgcc

SEQ ID NO: 182085 - DNA, 463 bp, Zea Mays
aaggcatcgaatagaacatcagaaaaggcacctagagagcatgtcaaatgagcacttcaactatgtagtatactagatatgcccactgtggcaccgaacatgatactcagagaacatgtaaattgcacactttggtgcaacactcaccagacatgtctagtggtgtgtccagttagtgtactggatacttgacatagttagcaactaatttatagcctttggaattgtagtcgttggaaagacaatggaaatgtctggtgtagaaatcagtggtgcaccaaacatgtccgagggctctgatttctatgcaccaaaaggtaatggttagatttcatgttacggctacaaatagaccccttgaccgatcttggttggcatcccttcactccttgcacttgagaacatctccttggactagagaaacacactccactcatatcttgtagttcatcatttacttgag

SEQ ID NO: 182086 - DNA, 647 bp, Zea Mays
ttttgccagaagaatttttgagcggtcttcaatgttattgtggatactaccatggcctcaatctactttgtgaaatactcgacggcgacgaaggtgaacttgaggttcccttgagctgtaggcagtggtccaacgatgtccagcccctagcgttgaagtggccatgtatgggcgatgagcttggtgaattgcgaagggctgcctgagcgaggggagaacttttggcatgctttgcatgaccttgtgactcgattggtagtacaaattattgcgggccagtaaaatccctaatgaatcaccatggcagcgagggccctaggtcctgagtgggagccgcaagttccgctgtggacttcacggaggatttgtatgccttcggtttcagttatgcacttcagcatgggctggctaatccctgtcttgtacagctgcccctcgactaatgtgaagtcccggcttttgtgctttagtcatttggcctcattgcgattgcttggatggtagtggccttgcaggtatagagttattggggcccgctagtcttcggccatgatgaggttgacgatgtggtggccttcggcttcttgagttatttgtagaccttctgggttgtggacagctggcgtgccgatgacgtggtagaacac

SEQ ID NO: 182087 - DNA, 567 bp, Zea Mays
ccaaccatcgcctgaatggctgaggagaacaagatcgctaaccccgctctggccaggtttatgaagctatggagaagactaacacagagaaaatcaccattgagatgctggcagggttgtccgaaaactccagcgatagtgagagtatagacgtagtgagtggaaatgaagatgttgaagaccggccatggaggccgacccatgttgtttttggaaggtcaactgttaagcaagggcagatagaagcaatgaaaggcagataatttcgtgatatttctattgtgagggccggaggggagaatacccttcctcttcacgaagctaatgaggtggtagtcttcaggagcttcatgaaggctgggcttcgtttcccacttcataaaatgctagtcattgttttgaaaacatttgagatatatcttcatcagattacccctgaagctcttattagtagggttttttatatgggccatgaggagccaagggctagagccagatgccatgagcttctgtagtattcacgagttatcctatcagacgaaagcgactaggaaagaacaataccac

SEQ ID NO: 182088 - DNA, 766 bp, Zea Mays
tggcaacgtcagcctaggttccctccttgtgcatccgctcggcggggtttggtcgttcaccccgccgagtagactttctcggtggggacttggtcgttcgccctggcttgcagagttgctcgatgaggacatggtcgttcgccctgcctcgcacacttgctcggtggagactttggtcgttcaccccgcctcgcacacttgcttggtggggacttggtccgtaaatgggcaagagagaggtttatggacctcgccttgctacgtttatgggtctcgctttgggtaccccgttcctgggtatctgacacaagcttcatgatgatgccacttgtcgcatatcattcccgctgaaactccaagtgagttttgtgacccaaatctaaaaacatcatctcgttgttttgaggcctaaacctagtgtgtcacctccaatcctcgatcgcctgattaccaagtccttcaacacctcttgttgactgagtcaactattgtattgacttggtcaacatggtgtaccctctatgcacatttctgtttatccatgtccatgggtgtcagccatccatagttagtttctggcctcctttatcccttggtccaaacttgatagcgtctgtgtagtccatcaatatgaacctggttgaccttctccaatgttgtcgaatctctaagctccacacctatacaccacaagataagagacatgttacatgacatcaaatcactcacgctaatgttagtctcaaactcaaataaagttgattat

SEQ ID NO: 182089 - DNA, 327 bp, Zea Mays
cttctcttcaataccagtggacgcactctttgtgaatgcctgtgtccattagcttgacgaatgtcagatagtcacacgtgtgctcagaaacagatcgacacaaagaagtttatcagggtagtctttaatagtgattgagttaactatctcattagttcattcattgctctatggggttgcagttcctttcacttggagagatttcagatcttgtacattctgcatcactggacacagtatacactccaaaagggaactactaaggcccgtcctgtagcctatataatgtggggtccgggtcagccctatcaacattttccttgtctc

SEQ ID NO: 182090 - DNA, 306 bp, Zea Mays
gtcaggctattctaggaaataataagattcgtctacatcaggagtttaagtgaaagaagtaaaggatatacctgatgtgagggagttctcggatgtgttcctcgaagatttgactagttgcctcagaaagggatgtggaattgcgattgggttgcagtccgggactccattcaccctaaaggtagcaataggtaccaaggtttgaaacagagattttggtggacctatagcttataaggtacagttgccaaaaggaccttcaacagtgcacgacgtgttccacgtgtccaaatggaagaaatgtct

SEQ ID NO: 182091 - DNA, 478 bp, Zea Mays
aatcataaaaaccattagttagaaaatatgcaatcaccatatatgaaaaaacaacaaagagatagcttattactctcttgtacggccatgcgatcgacatccgatcagcatcacccatctcctccaaataaccatatgggcgaggtagaagggcatcccttttcagcacaacattctcaaataaatcccttctgtgttcagaacagaacagaatttggcgacagcgtttggagctggtttcctgaaacaggtcagttcctattagatgaccatgatcatgcctgccactggcttaattctgttgtgtcctaagaaagaagatccgaaattggaaggttaaattcctagggccagacaaagagtccaatctcattcatcatatcagcaggtgcaaaacatgacacccttgctacatgtggttcgttggtcaacaagtagttactcagatcttgatcaatcgaggtcaaaaaaaggaaag

SEQ ID NO: 182092 - DNA, 346 bp, Zea Mays
agtgggcgaccaatctggtgaagctgctggagcctgctgctgtgactgcatggtgaggtagacatggtgaggtagacggaactgcaaaaacctattgttgtgaccatacggacgggcgagagaccaagacgcgtcgagtggtgacgcggttctgagcccgtggttcagggcagctggaggagagccagcgctccgctgcaggagacggcgcgtgcaggcggaggatggtcgacatgggcacaacgacggcgtttgtgggggagggggatgggattcgtggcggcggcaacgacgagggggaagaggatggcactggccactggggctctagcagttgctgttactc

SEQ ID NO: 182093 - DNA, 753 bp, Zea Mays
agcatactttgagataataatatacataaatgtaacttggggggaaatacaaaactgattgggcaccaaaattaacacataaaataaacagaaatatataaatagtacgtgggattttctaggagtcttctgtttatgagaactttttttgtaatgatattagacttgggatctatatcaaactttggactgcttttcacactcggaacttgtggagaagggacctttatcttctttgcactgtttttttctgtaggggaaggtgaggttgatctgaattggcgcttcaacgattgagcatccatgaaatcatcgtcggacagtgtggatggagcaggaggttttctttttacacgacaagctaaagcctttctgcgaaaacgatggactggtgttggttgtggctcattctgcttctgattatgtggattatcatcttggtgagctgagctgctagatcttgtacgtctggaaatgtcaatggaaaaaacctcctgactggattcaatggttaatctttttggattacttggagggcgatcaacagttctcatgattaaacactgaataaatctgttgaaaaaaagttgtttttaaatacagtgatttatgcatgaatatatgccaaaaaaatctaatttttactataactatctacaatgcatactacataatgctaaatggaattacataacttaaactaccttttacatttatgtgacagcatttaatgaacaatggttatatacaaac

SEQ ID NO: 182094 - DNA, 675 bp, Zea Mays
aagtgactcaacctctatcacgcttgacaactaccacatcacccgatttatctatttggaacaccgcctgcctagcgtgctactagtaccccgcattttgactcgacttaaaaacatagaggaagcaatgactacttcggcatgtcaccacctcactacacaagccaaaattattattgcttacccacacgcctaaataagaatgatttcaattcaacgcgcccatattttaaatctcggcataagcttggctattggctaacgaagtgaccattttctaactaccaacatacactcctttcaccatttgtggatacttgtatgacacacggctattgtaatacatcacaagtacatacaaccccatcagtaaggcaccagcacatttccaaaaattctcgagactacgacgacaaggcatcgatccgccatacaacaaaaatcatgacgaagacgataggtgctatcaactaatcgttaaaaaaatattagacttacttctctctttgccactactccactctttagtcacatgaccatcatgtgcatcctttattcgattatataatagcgacctaagcgtcgtgtcacaatacatacatatttcctcgttgtgagtataaccatatcacgacatatacccgcacacctcaatcaaatatcttatgccaccat

SEQ ID NO: 182095 - DNA, 430 bp, Zea Mays
ctaaaattaagatctgtctactacctacaagagtagcttcatgcccttcttaggtttatctagctcaaattgtaccctgcttcagttgagagttaggttgatgccagtgccaaagattggatgggggagaatatgggttcacgtggggctggaatggggctttgtatgctgttcattctaatgcctgatcggcaggaattaatttagtgtatagcttacacgtacttcagtgcctttgattgttcatttcattgactaaactgagcatacataacgaagtagaatcagatgaaaacccgcgtacaacctacacaagtagctcatgaatcatgatttatctttagtgggtgtgattgaacttatacgctgcctcaactctttgctcaaagaatgcttgtaaattgacttgctattatggtgcactactttt

SEQ ID NO: 182096 - DNA, 568 bp, Zea Mays
aaaacccccaaggaaatcacaacaagattggccgaaaagacctcatcaacaaggatgatggaacacccctgacaaactgaacaactactaatggagccattagcagaactaaccaaaattgggtgacccaacctctgcaccgaaagaccagcacgcgacacaaaattctccgaaataaacgaatagctagctccagagtcaaaaagagcatgggccacaaacgaatcaactaaaatcgtacctttcaccacgtctccttgctctctgccatcggcagcgggtagcacataagtttcggaaatacccgcagaagaggaagctcccagagtgaaattaacagaagaactccactaagccgacgggtgaggcagacgcggagctccaaactgagacgacataggagtagtcggtgcaagagtaggcgtagccagatattgaggaaaaccctgcatcggcacgaacaagaagtcccaggcacatagaactgctgcggaggaagtggaactgaaaattgctgctcagcgcttgacatcatgttgacagtgccctgagaagaggaggaagtcac

SEQ ID NO: 182097 - DNA, 1037 bp, Zea Mays
tgcatttaatctgagtgaggaattcacaacaaaatttgaattcaaaatttgagatccaaaaataaaaaaagaagaaaagaaaatagaaaagaaaaagaaaatggaaaagaaaaagaaaaagaaatcgcgcgctcggccgccacccagggtttcggctcgtttcccctttccctcacactgcgcggcccagttaaccggaatcaggcgccgccaggtggggccatcccgtcagtcggccagtcgtgctctgcatctcgcgcgcgcccgacacagctattaccctgtgcggctggacaccggggcatgtatgccagtctctctacccttctactcgcgcgcggactcgtctcgcacctactgacaggtggggcccacttgcagccacacgcatgcgcgcgcctaccactacctctctctgccgagtgggaccctcacctcccctgctctcttcccgggcagccatctcgggtggattgttgcgccgccctcggaccgcctcgtcctggctacaaaggcggaccgaccctctcctgattcctctcccataactcatccgatcgccacgttcaaccaagagagagtgtgaaattcgtcggtagcagagaggagggaaggagaccgccgcgctcgatttcccttgtcgccgacggtcgatacgcgggaggggtctcggaggacttgtcttcgtgcgaggatcgcgcacactcgacttctcaaacgcggaaggcactggacaccggagaatcgttcgccggagcaccaaggtccgccgcggacttcgttttcccgcgggcagtgctctgcatcacgctgtctttggtatgaaaacctcccctatgctcaccatgtccttataaatgtgtttcgcgtctcaagttgagctttggggcttgcgctcgacttggtgtcgctcgccggcgcgatcgccgccgcagtgcggtcggcgccgtcgtggcggcagtagagagagtggggtaaagtcgtggagatcgcgtggaccgtctatcgagggttggatggcgtagattagatccggc

SEQ ID NO: 182098 - DNA, 650 bp, Zea Mays
ctagcttcggagagcccatatgtaaacactaagtctaacgattgcattgggtgtcaactgatgaagatatatctcaaaaaaatttaaaacttctcctatcatgtcatgtagagggaaccgaagccctgccctgaagaaactcttaaaaacaacaacttcgtcctctcttggctgtggaactacctcctccccagcaaagcggacaagcttgctcttgtcttctccaaaatagcccaactttttcatcataaccatgtcatctgctgtcacagtagatttcccaaattcaatgtggctaggtttcgttggactcagaatattgttgtcctcttcactttcgttgtcactttcaccttcagccacagtttgttcagcttcagcattggaggcaccttcggcgatagtctcctctgacgcaacaaggcccgatcgcctcatcacttctgatattggtgctgtttcggttgcttcggtctcgtctccctcacgagacaccctagcagtggatcttaccctggccattttagtgttcaggctcttttagacaaagttgatctcaagtgacgaagcgcttgtttgaaaacgcaatgcagaaagcttcagctatggttaatttttttatagcacaacagtgcgatggcaatgaatgt

SEQ ID NO: 182099 - DNA, 485 bp, Zea Mays
atgtgatatctcctagaatatttcaccaaattggacgcataagtactctatggaaagatatgataatcctctacatgaattttacagcgattactactactgctgtccgcccgccaccaaaaatcaggacaacacccccgctaatttgtctaggagaacggataatctaatgaaattgcagcacaattacaaaatagaaaacaagattactttgaactccttctcccttccttcttcctccaactaatccaccaatggagatttgcacaacccaaaagagaaccaagtgatagagtggctgcacctttgaggagtggaatgggggtggctagggtttggagggaaggggcggttacttggggaggatgggggtggctgttttggagagggagggggcggctagggtatgaaggggtgaggtcgctccgatgccctttatgcgacatcgacggctcacaaacagttgtcccacctgtgccccggtt

SEQ ID NO: 182100 - DNA, 704 bp, Zea Mays
gaaaagtgaacttgcctctcatcattgggaagatcacgaagaggagcaaccagagcttcaatgtccttaggagaaggtcgcactctaagacccagaccactatcaccagcaggaggcttggacacaaaattgaaaaataacctaggaggtggcagattccaagcagaataagcaacagaagcaccaacatttgataccttgcccctcaggatcatatctagtcggctcaccagatccttagtaggaattttcctattggtgacccgagttgagtcagtaataccactatacaagtaagctggatacgccctatctttcaaaggctgaatattcttgaaaacaaagtcagcaaccacatcttcggcagtcagacctctctccttcagcagacatatttcagccagcagaaccctagcttctgtcacctccgaggcagtgggagactcaacctaactcggagtgcgtacatctggttgtctctccggccgagaggggagggacttgccatggttttccacaataaatcattcaagacgccaccctttaatgttgtccttgagaggaatgtcaaggtattctattttcctcccacggtgcatctccagacttgcaccacccacgagctggtgctgcccccagccatcctaggccgacagtgatacaaatacttctataaaccgaaatgaggaagaattccgaggtag

SEQ ID NO: 182101 - DNA, 579 bp, Zea Mays
aatttggggattcataggtttttctctctaatctagaattgggcagtggaattacaattttgattggtggaatttgctcgtgttactcattgtgaatatgatgcaaaaatttgaaaggatttggatggttattttctgtcaaatcaatgattggatggatgggggcggctagggttctagaaaaaatcgcctctggacggtcgcggaccgtccgccaggatggcgtggacagtccggccccctagcgcggatagttcggtccctaacagaaacttacacttcctttctctatgttgtgacatcatcaactattaaccagtggatattcctcatatatattgcagtggtctgggtggtcttaagaagaagcttgcaggtcgttttcagtcaaagcgccgtcgtgtagatgatgcagattataatccagctacagactctgaggcccaatcattagctgggggcagcatttctatggacacaaaggatgctccacacgctcatccagattatccaattgatgtcacaggatggacctatcccaagagaagattctctatggctgagtactgctccaggagg

SEQ ID NO: 182102 - DNA, 489 bp, Zea Mays
ggtcttgccctaggtcaccacatcaaatttgtagagctatcataggagaacaagtttacttaagcaactaaccgctggtgctgaatgaaaactgaagataaatgagtctgaagttggactgtcagactgcttggattctgaaattcagagtgacagtggaatggcatgaatttagggctcaaattcaatcatgatccagtgggaatttgactagggatgctataacaaagatgaagatggtttgtagggctacaactttgctgcagagcattggttgtgttaccatggaaaattgggagaaaattggactcaaagttgatctgtcaggctaactgatgagcaatccaatggtacagtgaaccggataggatcaggttcagccccctcgctgccgataagccgcgcgcggattcgtgcggttgccgccgtgattcgtgcttgggtcagctagacaataccggaggggttagtaaatatcgcatcgcggat

SEQ ID NO: 182103 - DNA, 802 bp, Zea Mays
gctcggtcgtaaccgccgcgccattatcgcgtgcgtggatctcgccggggatctggcacgtagacttctttttcccctcgcgcatctaggtataagaacttccttgccatgcctctgccaccgcaagctcgtatcgttagccgcaccttgcatcgtgccgaaacgctagaaccagagagagagagagggccgaggaagtcgctccgcgccatcgtcaatcgtgggtcgccggtcgacttcgtggctcagctgggtggtttcagctgggtggggagaatctccatgggctaccattgtggaattgggggctcatgaacccggagaccatttgtcgctgaacgaacaccaccgtgctgcaccaccgtccgcctggtgtcgtggccgggaggaaccactccgagatatcctgtgagaaccttctacactgctaaaccatgtccccaatttcgtgttgcgccgtttaatttgagtttgggggtgtggagcgccgaattgtgattcctccggcgaggtcgcaatcatggccaacgcggtggccatggcggcgttggaggggaataggaaattagggccctggccataggatttgagttggacggcagagatgttgtcccgcatacccgttcacgtgaatggatcagtgcctttagatcttgatcgcgcagttcagagaaaatcaatcctcataaaatctaggccgtccatttataatccaagggatcccgagccataccggttcgattctaatcagagccgcacgtgtctgatccaacggctctggttgctccttaccccttcgctg

SEQ ID NO: 182104 - DNA, 515 bp, Zea Mays
aaactaagcaaaactagaaacagaaacgacgatgcaattgcaatatgcaacgcgtacacacagcttgcaaccgtacgtacgtacgtacgtatttcagcaagctcagctggcccggtcgtcgtcgtctctgtcgttgctgctactcgacagacagcgatggattataaatttcagcaaacagactaaaccacacacctgacagtctgacagcaacaaaactctgtctgtttttggctcgcgtacgtgacctctgatctgtatttgctcctcccggccgctcgtcgtcctctcgcctagcttctttcttcttcctgtgtcgttgccctcgtcggcgcctctgcttcttttaatctttgacgtggtcctgcattaattgctactgctttgcaggcgggatcttgattattaacttcgtcctgatgctggaatctttcctaatgcatcggatgcgtcccccattcctgctttaagctagctagcctccgtcgtttctgtccagttcatcagagtataca

SEQ ID NO: 182105 - DNA, 643 bp, Zea Mays
aaaaaggagaaaacagattcggcctgctcgacccatttctcgcgccagcccgttgtgcatgacctcactgccatgcatgccccatccaccagccggtcaccatcgggtgcctgctccgcaccgacgcctggccccacttgtcaaccgtaacgcgaccgcgccattccgtctccttccccgaattgactctgcgaagctcggatcgccggcgccgaattcaggggtggttgcgggtgctcgggccacctttccggggctataaagccataatccatggactggatttctttccccctcgaaaccctgccaccagtgccatagtaccgacgaggaagctctcggcgcgacaacctcgccgctgccgtaaaagaattccagctcacgtcgtcggccgtgctcggagagtggtgcggaagcttcgtcaacacatgtgtgacctacacgcagcggattgactagaaatcctcggtaaggtccccatcattatgcccgccacctttccctctttgtttttcaccggattgtgttagagttaaggctttcctgacgctggctcgggagttcgccgtcgccggtgccacttcaacggtgttcgtaccgccggcggggctcgggatggggaagaccgcgctgaggcgtagat

SEQ ID NO: 182106 - DNA, 1704 bp, Zea Mays
ctgggtgtgctgctggtcaagtgttaccatcgtcgcatgggtgccctttttggatttactcgctgggatgctgtcttgaaagtatgtgctgattctctgctatatcacgcaatgccaggctgctgtcaacctttttttgttgagtgttatgagcctatgaatggcccctttgacatagtagcttacagccacagttggagcgtgcttttgtaccatctttttttcttcccatgtcagtcagattggtgctcataaatggaaaataactcttcatttatctatatttgttgccactggtcgatgtgcataaaaacagggaggtaaaatggagatctaactccaaagcgtgaattggtcaagtcttaatgtaaatttgtcgtagcaattgttaagatggcattgtattggattctggtaggctttagagcaactccaagagaaaccttaaaataacactaaaaacatttattggtgaaaaacaccttattgagacgtccaacaatatcttcatcctctccccaaaacattcgcatcccgaatccgcccgtccctctcccgcatatattggcgtcgccgaatcctccccaatcgcccgagcgcacgcgcacccagttgtttggtacacaatagtttgctcgcacccagtatcgttggttttggaaggcacgaaccgtcagtggccacgggaggtttcagcggcagcggtagaggagacgggagagggtacaacagcggtggaggaggcggaggcggcgtcgacggagggagatgaagcctggttgcggcgctgctccgaaagcgccagtggaatccatcggaggcaaagtttctcatatgcagatggccggagatggagaaatagactgtgacggtggaggcgccttgcaaggacctctccgcccatcagtgccaggacgcgcaagagccatcgcaaatccattttcattccccttcggatgcagcgacgtggccttctgttcatccttcaagctagcggctaaaaaggcatgaaactgggtgtttagggtaggaacgtggctacttgtgtttgtgtctgattggggtcgcaggaggaatccatgattagcatcgctgatgctttgtgtcagtctccaaacacggaggtttatgtttcgcagatccattcatgtccgattcattagacaaggtaaatccatctaaaattttaccacatatgttactttacttgtgcacttggtagtaattggtcattctatctctatgcacagagattatgcataatgagcgttatagatttttggagtttgctatcaatgtcaattactggagtttactagcaactaaattattactgcttcctaaatgcaaccgttgtcttgatgaacttttccttctcagcttcatatctctcagcctaagtctatatatgaagtttagttggttagtctatttagttcagttggttagataagaatgtgacaattttaatttcgccaccctcttgcttagtctatgtgaccttgtgctgaatttacatagttcttattattatccatccatacatggcagctcgctcattaattcattatggcgctttcagaattgaaacttgtgccttgagaactgaagctcactcataatgtttaccaaattgcaatacattgttcagtttgtgcatagtacctgggatttgatatgaatacttcaggttacttcaattta

SEQ ID NO: 182107 - DNA, 626 bp, Zea Mays
ctgttccacactcgcgccgccgcacacgccatggcttcgctcggtcatcctgattgctttcaggctgaggaagcgctcaatctggtgcgtggcctgcttgggtggagcgggccagggctctccggaagaatccatgccggcgctgccccccttggcgatctcactactggggagtttgtgttgttcacctcctacatctcttgtgggttggcgctgccgatctcgcccttcttcctgctactgctggaggagttcgggcttcagcttcaacacctcacaccccactccatcctctaggcagcaatcttcgtccacctctgcgagatggtcgtaggtgtggccccctgcacttccctcttctgctacttcttcgtgctggtcaggtctgggaagactatggaccacattggtgcgtactactttcagacaaggccagatccggccatagtctacatccccacctttggtggtgcgaggtgggaaaactggcgcaacgactaggtgattgctagcaccgaggccaacgactgcctcatcctgccgagcaatgggccagccctcgaccgcaagcaatggaggaccaagccatccctctcgccagagttcctgcccgtattggacaggat

SEQ ID NO: 182108 - DNA, 1421 bp, Zea Mays
atgttcgcgctccaagttggactgaatcccccacggacttggagatagccgaggccagggttctgcttgccgaggttggcttgttgaaggagagaggtctgactgctgaagctgtggtcgccgattttgtttttaagaacattcagccactgaaggacagagcgtacccagcttatctgtatcgtggcatcacttactcgacccaggttaccaacagaaagtattcctgctgtgtatctggtaagccggcttgagatgattcttagaggcaaggtgtcgaatatcggtgcttctgttgcgtattcatcctggatctgcctccttccaagactttcatcagttttgtgtcaaatcctcctactggtgacagtggtttgggccttagagtgcgaccctctcccgaagaggttgaagctttgattgtttcgcttggtgaaatccccaatgacgagtggcaggttcattttgagatgcctataaaactgagtgacgcagaaataagtgctatgctagacatgttggctgaggattcctctgattcggtccctgctgaaacactagctgtagcacctatcccagagcctggaaagaccttggacattcaaagatctgatagcactcgtccgaagcgtcttcgcccggccagtcatccagcttctcctgctgaggggaagaaaaagaaaaagagacggcgtcggcgagtgtcatgcttgaatcaggatgccagccttctgctcctgctgccgaggaagtgccggtagagatttttactgttgatgatcccaatgggtgtgacccggctgttgctgaccccaatgggtgtaaccttgatgacactgaacctaatgggtgcaatccggccagagctgatcccaatgggtgtgctgttcgtattattgatgaggatgaggaagaggaggaggaaatccccttaattcagaagaacagtcgtcattacatagccagtggggagagtagtggtgttccttctccagctttgtctgctctcgttggtctgcaagaattgtctctggcaaattttgatcagactctcgaagatatggtccctgaggatctgctgttcgagctgatagatggtggaatgatggaagtttgcgctgatatgcctgatgtcgggttagagttatcccgagcagcgtctcgtgcctcatcgactttggggtgctgtctcaagagtcaagaggctgatctagattgctccgttcccatggaagtggttggagatcctttagccttagaggtggctgctacagagaactcggtccctgaggatggcgctggcgtttacccagcccccgagggtgttgccagtgataatctggctcaggtgggcagcgcgagctatgacccagcccccgagggtgtccgagcgggttccccttctcatacttccatggatg

SEQ ID NO: 182109 - DNA, 688 bp, Zea Mays
atttgctcaacggaactgcatgcgccgccgggtgccgtgctaccctatggccggggcacttcacgaaaaccactcggtaattaacctgtctatctagttcatcttgtggtaggcgtcgtgtcgtagcattcaattcgtggtttggggctctgttgcacgaagtgcctgtcgccagcgatggcctccgccatgggagccgcgggcgccgtcgtgctgatgcagtcgatgggaaggatgctggtgtgacgttggatccaggggcatcggtcatgatctagcctgcgtaccggtagggataggatgggtctgagccattggatctctaatcgtgcggttggcgcgaatcattggtttagagctgatctcgttcgcagatcacgaaatcaacggttgtcgttcgtctttgatcgcgcattgtttcgtaataaaatgatataatctggacgattgattttagatcgtgcggctaggattggccaataccccttcggccaccactttttgcataagactccctgtcctttttatgaataaacctgcagtccaccgcggggtaaatctgagtcacgggaatacttacgtagaagcccttgtcttatatggtaattgaggcgcggtttagggaaatggtagatcagataaattgatttataaaatgaatttcttatataaaaacaattccagaatc

SEQ ID NO: 182110 - DNA, 512 bp, Zea Mays
ccgccgcggtggagggcactaactccggctgccacgcggccatccctcctcccggccgtgtccggtcatcggcgccgctcccctccgttcatccacgcctcgcggatgtgactgcgttactgtcgcggcggggacgtggcaaactcgtgagaacagctatcgcttgacgccgcatttgatcgccagctaaggccggcgatggttatcaccatggacgcggtagtgactcaccgcggctataaattcaccacatcctcgctcccttcgctcaaatcaaccgagctccgaccttcgtctctaaattgcgaagccatagccaccactcccatctccgattagcccccctagccggagaatcaccgttttcccccaaatatgtttaccgccgccgtaaaagcaccctcgccgtggccagccacttccaggtctgatcatgctctctgcggttctgtttcagtacctgtgtgcatttgtgatgctcatcaacccacccgatcgaactaaaccatccc

SEQ ID NO: 182111 - DNA, 626 bp, Zea Mays
gatacagggggtaaacaaaggaacaacaaacaccaaagaaagttatcaacccactaaccgatgttcaaagctttcaggtcatctatctgtttttgaagcaggagagggttccactgcagcaaggatagaacctggtcggggacaggggcaccgcacgacctcagttgagctgacacagagctcagagcattctgcaaatacaagaattagcaaaggagtcctctatcgacaaaggtaaagaagggtaaggatcaacacacttgaaggttagaaaggaacaaaggaaatcccaaagccaaaggtgtcgaggtaccatcaaacggcgggacactaatagaggcaatatcgagagcagacttgagttccagaggatgattagagctcattcccaaggcaacacctagtgggacctcagctccaacagcgtgcagcagatcctcaacgcctgggtcactgacctctaaagtgaccgggcaaacaagagcagtaggaagattaaggcttgtcactgctggttcctcagactgaactagtggtgatccgacatgaacatccatagaagaagccgaagaagagccaagcttgggaccctcgggggttggctcaccctcagaagcaccctcggg

SEQ ID NO: 182112 - DNA, 1065 bp, Zea Mays
cgcgggtttatttttaataaagtcaagggcttttttgcgaaatggccgggccgaagggggtatcggccaatcagaaccgtaggatcgcgggtcaaaggttaataaaagaaactgaatcggtatgcaacggtgacccacggatcaatggccaaggatacgccatgccattcatctaatctgatccgcacaatgagatccaatgatcgagatacaatctggtcaaaggggtgggttgcttctaatcctggccgatgatctactattcaacgacctagattttattatggctataccttatcacacctccacggcttagatcaaatcacccagatgatacgcctagcgccaaatcacggtcgttgcacgctggatcaacggcgcaagcttgcccccacctcacgtcatccaagcacggcggcgccaccagcctagacggcggagagatggccggagttcggccaccccgtccaggagggccttatactctaatctaaagtgtgaatcatatagtgcaaggcatggcgaacgcaggggaagagttctcaccggcagggacgaagcatagaggcccgaccgcggagagtgggtggtccgcggcggattcagtcaccgacgagaaattcaccgagccctggccgcccacggccccggaattccacacggcgacgtccgcaaaccttgacaaagctttcccgagcgcacgttttgccctaaatggacggtaatcaccgagggccgattacggcggtggtgctcggctttccctcccccttctcattgtttctcttgcggtggcttagaaatctgcagacgagcaggaaagagggtcacagcgtggtcacttttatggtcccgggagcacgcgaccagcaggtatttggttgctcgcctccgggttcgtcagcgagggcgcaacggtcgcgaccgattcggccgagaggttcacaaggaccgaacccgccgaaccgaagagcgagtaaaatgggaggcaaagcccgcgtgaacccggcgaggatcacgggagcgcaacgacccgaaccttgccttgtttgtcatagtctgctg

SEQ ID NO: 182113 - DNA, 524 bp, Zea Mays
ttgtcagttccgcatcccgcccgcacgccgcgctcctttccatcgatgtcgtcttccccacgcgctgcgctcgcctgccatcgccagctagcacgccccctccgcaccatgtggttctgcccttgctccccttccgccgcctctaaatcagatcgtcgtcgcgcctgccccttccatgcctcgctgtgaggaaggcacgcaatcgtcgcccgcgcttcggctagaaggaatctccgtccttgcccaaatccacgcgggtatccacaactgtctcgccgaccgctcaaagaaatcgccccaatccacgtctcgcccatggaaggaatcgccgcatcctcgctcacttgccctacccttcatctgcctctcccgtgggccacctcctcatcaccacctctcctttctccctgcgatcctcactctcttgccctccccttcctctgccttcgccgcgtttgccgctatcctctccgtgattagttggccctcatccacgctcttcgtcctcactacactactctgcg

SEQ ID NO: 182114 - DNA, 374 bp, Zea Mays
cttgtaaaggcctcagatttctttgtttttggcgcttaatgtcaaagggggagaaattaataggccaaagcaaaaacaaaaggaccgcacgaccaccctattttgaaaaccttttaatcttccaatttggtatttctgcttctgcatttgcaaaaaccctcttgacagctaagaggagaatacctatttatgccaaaaaaagggagaacttattcaggtggagcttttatttggctaaaggaaaagcattatctgttaaacttggaaaatgcttttgaaaattctattcttacaccttaggccaatttcaaatgaatttgaaaagattttaccaaaagatttgcaaaaacgatctaagtggtgcaaatgtggtc

SEQ ID NO: 182115 - DNA, 1268 bp, Zea Mays
cttgagtggcatccaaaccctagaaatgccaaaaaaccctaaaaagacccctcgaaaaccctgagttgaaaccctagggggttatatgtaaacctggcacacttttggatccaagtgcaaaaaccaaggtattagggcaccacaaatcatatatgtcacataattgaggatttgcaaatcaaattgtgaactttggcctaaattgcaaaaagcacctcatatactccatatacctaagtccaaaatgagtggaagaaggctgtttttggagctctacttctcgggattcttgaggactttgccatgggccagtaccgcaaatctgtagtgccatgtatggagaacaagttttcttaagtaatcaaacactagtgttccacaaaaatgggagatacatgaggttaaaaaggcgctgtcagtcggcttgataggtgttcattcactgcatctaatcaggatcagggttcagtgttgtcgcgccaacttgagcgtcttggcctgattaatccgtggatattttcggcatggtcattaattcattataccaaaatgaaacaccattagtccaggtacaactttgatgcagactcatttgcaagtagtcacataaaatttgaagcaatagccagttgaattcggcctggcagtcgtactgttcaccggagttcagaaaaatctcgccggggataagattgccaccgcggctggggattacactgcggccgcggtaaaaatcttccgcgacgtggcgcataaactttgaggtggcgctgctcggttaatcggtgatcaccggacgctcgccgtggctctgcccacgcgggtgagctcgccagcgcacttgaagatccttgaatctcatccacctctggccatcttcctataaattgagcccgagcgctgcttcttcaccacatcacacacatgagtacttgcgcaatcgacccaattccaccgaagaactcagataggccataaatctcctcctcactgttcttagcgccaccatgaaggacctcttcgtgggtagccctcctcggggtcagtactcgcccaattgtctcttgttctagcatgtctttagcttcctatcgctctcggtgctgtccaattgaattttaccagagccccaccaccgggaacacccagtagttccatagaacgccccgtatacaccctctctgtcgacccgctttcctaccctcgttcggcctaaattcaatcgtgtgcctagtccctggtgaacccgtggagcttccccaagcttc

SEQ ID NO: 182116 - DNA, 805 bp, Zea Mays
ctcggttgttgttaggctgctcgcagcgtgccgtggcgcctggtgtttctcggcaatcgccagtgcggtgcgagacatcgttgaaggacgacgcttgcggcaacgacaatgccaactaatgatgacttggcctgcaacggatcgcaacgggttgtccaacgtggctgaacccatccggtgcggtacaatattggaagacgacgcttgcgacatcttcgttcttctagctcgttggcgacgacttcatgtgcgagggaaagcaatgagatgatttcaaaccacggtggtggtttcggaggcctgataagattcctagagggtggggcacctcttcttgctaccttaacgacatttcctgaaacaagtccggagtggggagctgtgtagcgggtttggaggttcccgcgcacgagagagagaggcgtccaacggcggatgtggcgaggcccctgcatgttatgttgttcagacttggtgttttcattccgtcgggtggtcggctttggtgcaacatcactgcggcaatgggtcctgcgagtcgatggccttctcggtgtggtggtgtctgcccctcttctcctctatcggcgctggatcacttcagaggtttcaatgatcgcaagcgtgcggttgtgggtggaagctgcggttgtgctatgtctactctatggtcgttgtgagtagtgctgggccgtgttgatgtcccaatccaactcgttagtgagtatagttgagcggtaacccgtgttgatgttccgatccaactggatgagtttgttttttcttttcttgcctatgatctccc

SEQ ID NO: 182117 - DNA, 794 bp, Zea Mays
cctaaccaaacataaagaaaggaccatccaatcttgtgagcaatgaatctgctctggatggagcaaatcccctaaccaaacacaccatttgttttagtacattcaaatagcctctcagtcgtcgagacagacttgtgcatgcagactgcacagcaaaaggacaccatcatcaactcttgagtgacaaagccacactgcatgcacgcacgcacgcatgtgtataacagaacatgaaacaccgcatgtatgcactaaggccgcatcagcaactgactttttgcttagttgttgtctctttcgtgctcggtgtatgaaaggagcctaatgatggtctccacacatgcatgaatcatgatcaaaaggtcgtcggccttattagaagatattagatattgtgcttatctgatagctaggattgttatactcttggagccgtgtctctatctctccctctgatttttctccaactgtgtaacaaccatgcatggctcatctatataaagaatacacgggcaccatcttcaggtgtcgagtcttgagccacattaacatggtaccggagccaatggttcaatagatatgatgtccatcatctcaaatttttcttccgcctccacccctgccaccatgtatcactcggccaacaccataccttcctctcctgccataccgctgcatcatgtggtgaccatccgtctcaccaaatccaattatctactctagcgagttcaactccttccatatctctgcagcaagaagttgatgggtgtcggggaccataattaggggtaccc

SEQ ID NO: 182118 - DNA, 544 bp, Zea Mays
gtttgcgcctgcagttgaatagcttgaactgcagacactggtacgggaaaaatggttaatgaaagaacagctgaacaagttgatgactagaaatggtgaccgatatctaggccgacgatgcaaggagcttaatgaacacaatttcactatctcagccacaatctgtcttacagactcacagaacatgccagtaacaggaagataaaccaactcgctgggacgtcaaccattcaccagaaacaaacatcaccaagatgatctgccctgccactgctgctgctgagatgaagtgcctagagtattctagaaacatcacgtgggaaagaatgctgggaccgatttggggaggtggcgaatcatgaaaatatgcgggacgacgggtcctggattagcgtctgcgaatagttagggaaggtttaggggagttgttggacttgctttttttcttttttctctctctaaaaaggtattagaggtaagatacagatgctcttggagttgctctgacatccaaggtgccaaggcgttaccaccattcctaaag

SEQ ID NO: 182119 - DNA, 1091 bp, Zea Mays
gcccaacaggtctaattttatattgctcgctgtatgccttaatgcatgtgttagatttgatttgttggacaaattttgtatggttgtatgtttttatcatatttaaatttggtggacaattttgctggacaaatatttgaatttggcggatttaaaaattatgtatgtgtagtggatatccgttacctgcgagtaatggatgtggatactgtttttttatccatagcgggtaacgggttcggatatcggaaataagtcacggatatagatgtccataggcacttttctctgatagtccagaggcacttttctctgatagtccagaggcacttttctctgatagtttatttgttgccatctctagtcttacggatgatttggatggggttatcaggcagatagatgaccaatgtatagaattttggagtgctaggatctaagtgggaggttagaacttcgttatcccttttacccatcttttcatttgactgaatggtaaatctgattgttttatgtgtaaagagcaattgaggttgtgttttcaagattgcaatggtttaggtgagattttctgtacaatgtgatgaaaattcatttaacaaataacaaatagcttgagatatgttttttggacctatcacttgaattgtcacaacaaactggaatagtttgaactgcccagcaaaaatttattatagacagaaaagtttctaaaataatgcatgtattgttaagaaggaagaatctaactgttaggtgcacattaaaatcgagcaccattgtctagaattttggagtgctgcgatgcgaatggaaagtcataattctatcatcccttttagacaacttttcatttaactaaatgataaatcaagggaatttcaaacttcacttggtctgcaaagatcatatctaaggtatgagatgctcaaccgcttataagttcattaatataatgaattgtaccttatatttacttgctaaataaaatgtgacagttatttgtccaaaacaatgaataaaggactttagatagcatgactcgtgtcacaatcaccattatgtatatgcaaatcaaaatttgagcagat

SEQ ID NO: 182120 - DNA, 567 bp, Zea Mays
tccccgctaacctagtagtgatgggtactcaagggttagatgtcatcgtagggatgaattggctatatagaaacaaagccaccgtcagttgtgataagaggacagtcaaattggtgtccccatccggaaaggaagtagtaactgaactgtatttgcctgaactagaagaaggagcttgtcactatttgttggtagatgacaaggaggccaacccaattgaggatattagaattgtgtcggagttccccgatgtgtttctcgaggagttaccaggcttgccacccgaaaggaaagttgagttttccatagagcttatcccaagcaccgccccaatttccaagagagcatatcgagtgtccggaccagaattagtggaactcaagaagcagattgatgaattgttagagaaaggctacatcagaccaagtacctcgccttgggcagccccagtgctatttgtggagaagaaggatggaacaaagaggatgtgcattaattacagatccttgaatgaagtcactatcaagaataaataccctttgccaagaattgaggatctattcgatc

SEQ ID NO: 182121 - DNA, 777 bp, Zea Mays
ctatgttttgaaaaatgcagattatgttttggggaatgcatcgatagatgtttatgcgaaaatgtattggttttatgcatgtgattggtgattgtgatagtcgatacgattgaggagtatgattggtcctgttggagtcacttgtgttgttgttgtcttgcgcgtaatgtggggacacgtatgtgtgtgcgtgtcgtggtgtattatagtagtggttgcgtaagatatttgattgaggtgtgcgggtatatgctgtaatatggttatactcgcgacaaggaaagaagtatatattgtgtaacacgacgtttaggttgttattgtataatcgtgtgaaggatgctcatgatggtcatgtgacaaagggtggtgtagtggtgaagcgagagataagtttagtatttttaaacggttagttgatagcatctatcgatgtcgtcatgatttttgttatatggcggatcgatgcttcgctttatcaatcattacattccatgcctattggataaataaatgtcttgttgatcgattagaggtctcatatgagcattatcacaacccaataattattagaagcaagtagcgttcataagtcggtccttgttaaaaaattgaagaacaatccgttgagatatgcacataagtgctttaggtcctccaatagcaaaatgtagtcctatagagttttatgccatgtgttaatgctcttcatgttagatctcctaaaaatatgatgttttatgtgacttgtgcgttatccaatttaagttgagcaat

SEQ ID NO: 182122 - DNA, 785 bp, Zea Mays
ggaaggccaagtagtttactaggttcgctaccctatcatcaccatttgtagccttcagatagggtgtgattggttgctttctcaaagcagcctagccgcccggaccagcttcacttcagtctgaccgcctggagacaaaaatgaatctcgtttcctgcaggcctaccttatggcgttctgctgcatctcttaagccaaatcagcacacccacccaaccaaacagatgtacatggatgtgcaaatatacgtgcagataaccaaacaactgcaaagtaaaaagatgttgcatgtgcggatgcatgcgcacaggctaccaatcacgtccatagtgacctgcaaaattggtggttgggatcgtcgctagtcggctccttgttaggatcagctcgctctgtatggcgggagggttttctttttgcaagtggatagacagatgctggaaggaggtgggattgtgggaggggaaaagtgaaaaatatctatgcgtggttcgatgaggaatgaaggcaccagatttaatgtgctcatgtgagcacgagagctatatgagcacgggatacgttctcctactcatttataccactagtttaaactttgcaaaactcacccaaccaaatcacctacacattgataacatccactgaatctaccaaacaaattgcacacagactcaacatatcgtcaaaaccaacgattcagatcgctggatagttcacttccccttactcaaatccattaatccaatggacaacattatttggatcatcctcatctctcatccctc

SEQ ID NO: 182123 - DNA, 579 bp, Zea Mays
atgagaggtcggttgccacagttaaactttccagtgtttgagggggagaatccaaaattgtggatccggcttagtcaaggctattttgatatgtattcagtggatccgagtttgtggatcaaggtggcaacgatgcatctgaaaggacctgctgctcgttggttttcttctcgagcagagcagtgtcgtgcttctacttggcctgttttttgtcaatcgctgttagatcggtttggcaaagatgagcatgaagcttttattcgtagtctgtttcgtattcgtcaaacatctactgtttctgaatatgtggaacgtttttccgctttggtcgataatctggtagcctatggtcgtcctatggacccaatttattttgtgcaacgatttgtggatggccttcgtgaggatattagagctgttgtgtttgttcagcgtccttcttctctggattctgcctgtgtgttcgcattgttgcaggaagaggtgtcgacatcgcataggcatgtggatggacgtcgtttggagttgtttctgcccgagcgttcattggcgtctaatcctttgcctctacctcgacca

SEQ ID NO: 182124 - DNA, 639 bp, Zea Mays
cggggacacccaagagtggcagtctgcgatgaggtggcctagcggtggcgcggacttgctccggcgagcaatcgcgccgacgacagggcagtacatgggaaattaagggcatgggggagttgttcacctcgagaggaaactctggagtgctttagcaacgacggggacacagggatgccttgggtcaacagcggtggggctttggctgcacaaggagaacgcaggtgagtgtggactaggcgaaatagagaggctggggcaaaccagagggtgtcccgcattgctagcgaagaggcagagctcaccaaggcaacaaacacggtagacgctcgacgacggccacagaacggtggtggatcacgacggagctccacgggcgtgcacgtagagcgagagagagcgagggagtttggctgagggcacaattgagcaagggagcgagtgagtgggcatgggctccagaaaaggctcgggtgcgtgggacgtggccgggaaacgcgcggtcgtgggcgcgtccacgacggagatcgtgggcgagaggttagggaaggggtagtggctgacaggcggggtccatagaccagtgagggtgagcaggcgaacgggcggtcaacgctgacagggaggtcccaccgagca

SEQ ID NO: 182125 - DNA, 466 bp, Zea Mays
ctttttctcttaggggttgctgctagatctttttgtgtcttcggcgcctccactcctgccgaagggcttagaacttctgatgtttttgtccctttggttctcggttcttcaattttgtcagccttcggcattgcagccggctcttcaatcctctgcgtaagagcaggtcctttggcttcaatagccgaagaggtctcaccgccaaattcaggcactatggccagttcaatgtagtgcggtcggtgagtaagagccttcacctttttcctcttcggtgcgggctcgcttgaagcggctgaagcaacatccttcccagaagttgcaccctttcttttctgcccccgcggcgggtaccgatagtcagggtacacaaatccaatagcgtcaaaaaccctgtttagtctcttcttttttcggctctccaaggccgcaaataatgcattatcttcagacttggagtatgctc

SEQ ID NO: 182126 - DNA, 825 bp, Zea Mays
cagaaactccgcgtttctgcccatcacctcaagttagacctgcgaatggtccgccatgctggcccggacggtccgcggtacctcaattcagcccacatttaagaaatcgcttttgaataagtttttaattcacgaaccaaagcgttgttagacctcatgcaaatgcaccaactatatgagcaatgaggcactaaagacatgtcaagtaagataattgaacccctcttgatggtacagctatctagcctactaacccggtcaattatcaaactctaagcaccttttgaccggtgagacaaaaacctattgttatacctttgtcttgagcattcatttccatctccttaaatgatgaacaatgggcatccataagtgtagccaaccataataccttttaccatttgtcaatagcatgaagttccttcaccatcatcatcaagccacttgatcaatagcccagaccaacacatggcttgataattctataatgatatgatccactccatgttatcccatggccttcttggttcatcaatctcaacatagcttgctcttcaccattgctttatgtccatcggtgctaagtccttgctctagcttcaccgccacacagtccctcacacatgagactttgacttgcccttcacactagccactcggtccatcgaagtcaagccatattcttgatcttctccatatagccacatgacaccatgtcatgtcttcatatgcaatgagctcctttatcacactagttgagcatctcaatatcaccaagccacatcaccaccatggcttaaataactcaaactagtgtacctgtgg

SEQ ID NO: 182127 - DNA, 756 bp, Zea Mays
gctgtctccctgtggatcattgctccaccccaattcaattttaaatattagacacggccacatcatgataggttcaatctaacccacataaattaaagggtcactaaacattgcatagcagaagacgacagagtattagtgtagcaaagatgaaggagaaagttgacacgtatgtactgtaagcagtaggtgaggaggagtggctggctacccatgccatgcatgaggccatgacaacagcaagattagggatttgtcgcatgcattagcatcacaacagtggacagtggagtatatgttgtccaccatattagcaggcattcgtgtattaactaggaactaaagttgtagcaggagacaagacaagtatgctatacctacatacatcgaccatatgcatgcagcatgcagtagtagtggtgacatgtgtacaagatagaggggtgacacatgtaccagcagtcggatgaggactccacaacaatctcactatattttacccacacttgttcccaatctacatgacagaacaaattcatgcacgtacaatatcagcttacagtgacgtctctacccgtgcattaatcttaactaatttcctgctactatgaaaatggaaaatcaaacggaacagaagtacagaacaaggtctctgcgacgattgatctttcggacaagacgccttaattgactccctgtctcttacagagcatcggctttctaattttctcaccgaacgcatgaatccatccatga

SEQ ID NO: 182128 - DNA, 407 bp, Zea Mays
gctagatggccttggttaagctcatagtcacgatgatttgcttgttgtagtctaaatgtgtatgattatggtcgcgggtaaaaatctgtagtgctcatgtggtgtctaaactaaaatgcggactagtgggtgaaaagcgcttagatataagtatatgccggatttgatgattgtggtgaatgcgtttgttaactgaatatggtaattttagtgcactaaatgatttggatgaaaaattggtaagtctacttgttggtcctaatttgattaatttaactctaacaaatggtaaagcgttagaataattcaagtctctagaacgcgaaattcttgaagtgtatagaagctgaattttattgattgctgttttggactgcacgcgctgttttagttgtgttgtatgtttg

SEQ ID NO: 182129 - DNA, 337 bp, Zea Mays
agcttggtactgctcaagcgcatcagctcgctccagaagttggaggtgaacaccgagtctcgatcagagacgatcgactggggaatgccgtggagacggacgatgtcggtgaagaatgcctgcgccacagactcggccgtgtacgggtgcaccaggggaacgaaatgtgcatacttgctgagcggtctatcaccatcaagatgacggtcttgccgcggacgcgaggcagcgcttcgacgaaatccatggcgatgtccgtccataccccttgcggcactggcaggggcaacagcaagccggccgggtgctgatggtcgggcttgttgcgttggcagac

SEQ ID NO: 182130 - DNA, 375 bp, Zea Mays
gtggaggctcagctgaacctgaatcagatattgtgcaggcttgcagaagcgtatgcgctaagacatctcatcccttatcagttatggtgtatttgtttatgatctttaaccctccttttattcaatgaagtttctagatcaacggcagtgcattaatgtgtggcgatttatccaaactatcaacgagtatgtcctttttatctctaaagcttatatgttcaactcctacggtcatacggtgcctgagtcaatggatgagtgaaaccagataataatattttgtgatgctttatacaggagaaaagacttgacagagaacctgaagcagctacagtgcaggacactaatttttgttggtgagaattcccagttcca

SEQ ID NO: 182131 - DNA, 449 bp, Zea Mays
tgcagttctcgtttgactcggtcttcaccttgtcggtccagtcgattgccaggtacctcctcttccttcgcatctgctgaccacaaagtagggttcttgggtcctagggtttttagttcttgtggaatattggaattcagtggtaaattatagagcacttaataggattgcttgctacagaagtatcaagtgtcagctttgtctcagcacctaatcagtaattgcccagtccaataaatagttgtaatattttgtgtttcacttctctgaccattgtttaaaattgttgggggcgcaagggatgacatatcaccctggaacaccgatacacgattttcttgcagaaacccatacaatactttcataacagatggttaaactccttgcatcttttttcccttttaggttggagggatccgttggacatggcatggcctgatgtattggac

SEQ ID NO: 182132 - DNA, 583 bp, Zea Mays
cccagtgcaggtgccaattgcgctgccaaccatttttctgccagcaggtaaactcgtgggcatggcatgtcgaaaacagagctccaattctttgttgtgtgcttgtacccttgtgggcttgtggtagtcactctgctattcatcatgtcttgcgacagtgctgcatgctggtcatcactctcatgtggcatgtggcatacttctgaaacaaatcattgagatggtgtctccaaaaattaatctacgtactcgtcactgtgtgccaagcatgtcattctgaccaccgaagatctcataaagccctaatatcattagagtcaaataatgtctgatagatgagttagcatgtgaatatattgattctaacatgatcagcatgcgattgattcaatgcaagtgcaaggatcataaacattcttccactgtcccacgacttaacccattgtcgtggtggcactgaacgtggtgtccttgggtgacccacttagaaaatttagagtttagtgatgggtttgctcattttatagtgcagtgacctatttgcacatacaagagaagtctggtgacctcggatgcaatttac

SEQ ID NO: 182133 - DNA, 564 bp, Zea Mays
ccaccaggtacgcatgcgcccggaggacgtgcacaacacggcgttccgcacccacgacggactgtacgagttcctggtgatggctttcgcgctgtgcaacgccccgacgacattccaggccttgatgaacgatgtgctccgcccgttcctgcgtcgcttcgtcctggtattttttgacgatattctgatttacagcaagacgtgagttgatcaccttcgccacctccgggtcgtcctcgacgaactacgacgccaccaactcttcgtcaagcgcaccaagtgctcttttggtgcttcctccgtcgcctacctcggccatgtcatatccgcggcgggtgtggccatggacccaaccaagatgcaagcgatccatgattggtcggctccactttcgccccgggctgtgcgcagtttcctcggcctcgccgagtactaccgcaagttcgtccacaactatggggcgatcgctgcaccacttacggccctactcaaggagggcttgtcctaggacgacagcggctttcacagcgctcaaggctgccgtcacgtccgccccgtcctcgc

SEQ ID NO: 182134 - DNA, 719 bp, Zea Mays
cttctacccaacatcatcgtcctcctcttgttcacaaccatttccgactccacgaacagcaacagcgatctcaatgcactcttgtcattcaaatccctcataacaaaggacccaatgggtgcactgtcatcttgggatggggacgcttctaacaggagcgctcctcatttctgccggtggaacggcgtgacgtgcagcagccaccagcacggcagccatgtcactgccttgcgcctgcgagccttcggtctggaaggcaacatctcccagtcgcttgggaatcttagccacctccaaaccctggatctgtcgaacaacaacctagaaggcgagataccttccagtatcggtaacttgtttgctctccattttctcaacctaagtgttaaccacctgtccgggaacgttcctcagtccatcggccgtctttccgaactcgaaattctgaatttccgcgacaatgacatcgtaggaagcattccttcttcagtgctcaaccttacaggactcacaatgcttagtgccaccgaaaattacatgacagggaggattccagattggttgggaaacttgacggatctgacagatttgaacttggcatggaataacttcagtggacagatcccacaagctttaggtaagctacctaaccttgctagattgactatgcaaggtaatcaattggaaggtttaatctctcctacactgtttaacatttc

SEQ ID NO: 182135 - DNA, 326 bp, Zea Mays
gtccagcatacttcattgaaacattatgtttgtccaaagcacaccacataacatttcttggtattttgtcataggtcttcttcaagtcaatgattggtattttttcataggccttctctaagttgatgaaaatcatatgtaggtcattctgctccctatactgctccatcacttgtcttagaaaatgactttcatggtttgccttccaagcattatcaatcgatacaaaatcactaaatgcctatacacaatatatagaacaaaacgtaaactggcatgcataaggctgtataagtaacaggtcgggagaaaagtttgactacaaa

SEQ ID NO: 182136 - DNA, 346 bp, Zea Mays
gtactcaaaggtttcgggctgttcctatgcccgggctggggctggtgtgtttccgttgtggtgatgcgcatcgccgtgtagagtgccagtggagtggcaggtgttctatctgcagtcaggaccacaaggatgtggtgtgtaggaggaatcctaatgggaagctcagatgggagccggtgacttcctcctcttcttagggaagtatcaacatgatgtcaagtgctgagcagcaattttcagttccacttcctccgcagcagttttatatgcctgggacttctcagttcgtgccgatgcagggttttcctcagtatctggctgcgcctactcctgcaccgactactcc

SEQ ID NO: 182137 - DNA, 338 bp, Zea Mays
ctccacttctcttgaccaactctgtcgtagtccgccatcgcctccaagatgaatcttgtctgtgccgatggttttgctgacagagccgtggtgacaccctgatccttcctctgtcctcgaatcgaccaaactctggtactacttgtgatagcccttggccgacggtacgccatacgtgagcgaccacgacgatcgccagaagtgattcggcgtgtgcgctgtttgaaagagtgagataagtcttctggaacaaattctgttatttagtttttcataccccacctgacggccacttgggtatttaaacgcttacaacaccggcccacggcccacacgac

SEQ ID NO: 182138 - DNA, 424 bp, Zea Mays
tctcgtcttcaacatactgcgaggacttaatcaacgctttgagcatctctgtgccatcatccgctgctacttgccattcccaaccttctgctggaggaaatccaactagttactctcggtgcagtgacgcctccggcgacgctctactccaacagtacgccgtcgggcctgaagccaccatcctctatgccgtcactttctggcatcagcaacaatgctggtagcaccaatttcggcaacggccgcagtaagcggaataatcaccgcaactgtgacaacgacggatggaacaaccattatggcgatcgtggcggctccaccaacacccctgccatgcctcttccaggtgccagaggcaccgacgacaagggatcgaccctatggccgacgtacttccacccctgccagaggcacatcgccatgt

SEQ ID NO: 182139 - DNA, 809 bp, Zea Mays
ctcgggaaggctcccgccaaggaggagatggacaaggaggtggctttcaacaggaagcgggccgaggggaaggacggagggaagcgcggcagcatggagctcaagacccgcaggctcaaccccgtcaacaccacatgctacgtgcaggtgagggcatcactgacttgtggattctttctgcttggcgccattttacgtcaactttctgattcaaatcactagtatacctagtttggggtttattcgaggagagattggaccatgtgtgcaattataaataccgtggattagtagttccagaggccacatttgcgtctgttagcctaacattgctaggcatgaaccagatacaatcccaaactgttctcatgggaagagtagaggtagcatacaaagaatccaaagccaaaccataggccatctagtatttaacttattttttggtaaacaactatcattatttaaacgtattctgttgaatggtgcagaatttacaacaaagatacatcatcgacacactcagtcaataataaccataaaaatccaccctaatctctgagattatattgtaataatgtgtaaaatatgcactcaataaccccagctgctggcctggccttatgcagctgtcccattggtgaatcactgcattggttgaaccaaataattagtgtgggggcaatttcttcccttgaactagttcatgagtgcaggaactgttgttcttttggttttcattcaatctcactcccctttgttattcctgcgcagatacttggtacaggaatggacacacaggacacttcacc

SEQ ID NO: 182140 - DNA, 514 bp, Zea Mays
cctaaggccagccaaaacacaccaagctggagtactgcctcaaccatccacacgtttgctccaatcatccgtgtcactgcaaatagcggtcctgctttgtcagcggtaattgcagaagtagcataggttttacctaacagaaagcagaagcagcaactggagtgcaccttgtcgccgagggagactccagcatgacgttgtgtgctcaggagcatgtccagtgatggcagccaccagtgtaggagtggtgggaccaggagtaaatgcaagacatgctgcctttattgagaggctagtggcctgtactaatctgtgtctgcatggacctcaaccttttcacaagaccatcatctaccactgcctgtgttgtgccttcctaagtgtccccttgatggaatggcactctggctgacctaggttgactggtggcttggctggcccgtcccttctcctttgtcccttttctttcctcctctccctgctgttgtttttgctgtttttaggttgctatagg

SEQ ID NO: 182141 - DNA, 500 bp, Zea Mays
tcgaccattgatccctccaaggaccccattcgctctggcctcaaaccttgccttgagaggcctgagggaaaccctaacggtgaagctgggattaatgcgattgagaataagctaaagatgagagcaaggagggtgcttgcaaagcttgctgagaaaagaaaatcagctgtggaatcttcacgctcagaaaggagcttgggtggaattgatcttacatgcaagattgtagactttgggaatgcttgctgggccgacaaacaatttacagattttattcagacaaggcagtaccgggcaccagaggtcattctaggtgcaggatactcgttttctgttgacatgtggtcatttgcgtgtatcgcttttgagctcgcaaccggagaaatgctatttacacccaaggaaggccatggatacagtgaagatgaggtatatatcgcattcctcatgagcctagctattttgttcatctttgagttggcttcaattatgcagtgcat

SEQ ID NO: 182142 - DNA, 459 bp, Zea Mays
atcgacacatcggtacctcttgtgatcagaagaataacctaggaaaagacaacgagtggagcggggcgcaagtttgtggggagcagtggcggaggtgttgggatagcaagcacaatcaaagacatggatgtgcgtataggaggtggcgctgtcgaatagggcgaagaaaggagtgggatgactaaccgccttggaggggaggtggttgagaagataggtgacagtattcagtgcctccaccgagtagctgacaggaagagacgtctggaagaggaggcaacacaacatgttgatggtagtgcgaatcatgcgttcgacctggacgtttggagggaaagtgtaggggcacgagagctgcaactaaacgccgtgagaaaggaaaaaaggagtgggaggtggagtggtcgaacttgcgaccattgtcgcactggacaacacgaacatggcaaccgaactagg

SEQ ID NO: 182143 - DNA, 360 bp, Zea Mays
caaccatgggcaatgagctcagaatatgtacaagaatcacatgcatcatagacattgcagtcattgactcaaaggtactaaaaaagagaaagggaggctctttgttaccggacaagtacaataggacaagagcaccagctgcaacccaactatgcaacagagacctacacaagcaatcaactcatcattattcctggggaagaagcacagaagagggaatgacatgttagggtttacctgcgagggggagaggaaaaggaatggcgcgcgctcggggaagggaggaggcggtgctgatatatattgaggggattggcgggactgcggtaaccctagcttttggtgggagcaccatcggag

SEQ ID NO: 182144 - DNA, 745 bp, Zea Mays
gcacattcagcagcaaccgcatctcccaattcacccccatagacgacaaatggtattgttgctgattcaccagcagccccacaacccacacccacacccagttcaccagcatccacacctagttcaccagcagccacacccacattagcggcagtttgtgctggttcaccaacgctactactactaggattacggttggcttcactagccctggctctggacttcgacgccatgacaggacgtcttctcaccatatctactcacagggatcaccaaatcaaagtctctggcagcctaacaaagagagggtcggttttatagaattgactaactgaaaatcgaagcaacacacacttaatgggaatcgaagcagcactctgtcgcgccatttactggacttgaccaagggcgggcgggctctcgtgccatgcgctctgagttgtccgaggaagagccatttgttgggacagttggcctgtcgcgccatttactaaacttgaccgctccgatctccacgcagcgacgccacgggctacgggccacggatccacaagattgaatgctgtattggcctcacgccctcacaggatgtatgcagtatggtgtattagcctcacaagtcacaacacgcagtgacgcaacgggccagggaactcacctgctgcgacgggcggtgaagatatctgcgcgacgtcgcgacgaggtgggcaagtggtggactggcggcgggcgccgagcggcggag

SEQ ID NO: 182145 - DNA, 488 bp, Zea Mays
ctttgccggcgcagctgactctcgggacaccggtggcttctccaactccaacgacgcccctggctcatgatcggcgacctggttccggccaagcgcggtgtcgctcggtgacttgtctacagctgagaccttcgagcagagaccccccatcccctttcccaagacgaataccctgatccccacgccgtccttttccaatttcttgccgccgtcgcagcccgtgatccccacctcgtcctattccaattccttgccgccgtcgcagcaagtgacagagtccatccaataatgtttgggctctatgggcaagaaataaaagaaggaaccgatcaagtccggatggatctgcgaaccagctttagtgtacgggggtaggagaggagggcaacgactccgggagaaaattcggggtggcgtgctccagtggaagctgactagaggtgtgctcggcggtgacggcggcggtcaggggaagagggggtttcttt

SEQ ID NO: 182146 - DNA, 1057 bp, Zea Mays
gggtggtggctgacgaaggcggtgctgtgggcgaccagtgtcctgcggcgcctcaagcgagcgaggtggacgagggtggcgccgcgggcaaggagcggtctgatggtggtctggcgaatggggcagttgagggcagcagcattgcgggggaagtgccagatgtggctcctgtggtatctgaagcacggatggacgaggacgggggttgctccacaggcaatgagtactctgaaatgaagatggaggtggatggcggctgcgtagcagaacgagagggcgatggtcaggaacaggaacaagagtgcactgcagctgctgtggaaagcgaggttaagacgggggaaggtgacggcggagtggtgaatcaagggactacggcacatgctgggggtcttcaggttaaagaggaggtgggggaaggcttggtgggccgctacattggacgtagcgctccagggcgcacgaggattcttattgggaaggttgtgtcctatgatagcacagctggggtctacagcctggtgtttgaggacggacacgctgaggagctggggcttcctcagctccaggagcttctcatgtcggatgataatggtgcattaggcatgaaggtgagctgccggaagaggaagctagacttgctggtttcatcagggagcgccttggaggtcaaagagccaccaagtactaggcagagggttgatggatgcgagatgtctgccaggcctgatgagctgcagcatagtgcgtctggctcggatatgtctgaggatgttgagtcttcgagcaattcatcagatttcactagagaagaaacatctgagccatgccctcctgtacaggctgtggagttgcctccgtcgtcaggcgacattcctgtgccagaagagtccataagttctctcctctctgtttataacttcttgcggtcgttcagtgtgcagctgttcctgagtccatttggactggacgattttgttgcggccattaattgcagcgtgcagaataacttgttggatgctgtgcacgtctcgctactgcgggctctgaggcggca

SEQ ID NO: 182147 - DNA, 475 bp, Zea Mays
cttccacctgcaggtaatctcaaggaacagaaggggatggtgttaccttttcaacccctttctatgtgcttcaggaatatcaactactatgttgatgtaccagtggtacgtcagagctggatcatttgcaatgaggtttctcagaaaaaaagtatgtatttattcattcattcataatccagttctgctagcaggaattaaaaaagcaaggtgtagcagaagaccgcctgcagctgcttgttgatgtcactggagcttttaggccagggatactaacagctcttgttggagtcagtggagctggcaaaaccaccctcatggatgttttagctggcaggaagactggaggtctcatagaaggaagcatcactatatccgggtatcctaagaaccaagagactttcactaggatatccggatattgtgaacagaatgatgttcactcaccttgcttgactgtgatcgagtctttgtt

SEQ ID NO: 182148 - DNA, 398 bp, Zea Mays
aaagttccttgtcctatgactgttttggattaatgagctaaggtaatgtagaaagctatatctttcagcacataaggtatgtattgagattagatgcatgattaaaatattggaaacgattaatttctgcaatgttgtaaactcacctgcgtcttatttggggcatccattgagatattgcacttcttttttggtggctcaaagtcatcatcatcatccacattaggcataggaatgtttttagcatcagctgcaacacccctctttctatgctgcggaggatcaccatcagaccgcgtatttgtagggtctgccatgtcagtcgagcgcggaatgtcaacactgaaacattcttgacttgactcaatgattaaacgctgcggattggttgggggtcg

SEQ ID NO: 182149 - DNA, 431 bp, Zea Mays
gcagcaccggctgctcctccagcacccgaccctcttcctcggggtgctatcaccgtcccacccacggtcaaccagcatcttatggtgactcggaccaagtacggcttccacgtgtcggtcctgtaccatgttgcacccctgtctccggttccgaagaccttccgtagtgcccttgtcgatcccaactggcgggctgctatggaggaagagcatacaacgctcctccagaaccagacttgggacttggttcctcgcccccgacatgccaacactgtcacgtgcaagtggatcttcaagcacaagtttcacgctgatggttctctggaacgctacaaggctcgttgggttcgtcatgctttcacctagcatcctggcgttgactttgccgaaaccttcagtcccgtcgtcaagcctgccacagtgcgcacagt

SEQ ID NO: 182150 - DNA, 404 bp, Zea Mays
ggctttacaagtccagttgagtcagtaagctttgactcttctgaagttacgataggtgctggtgcagcaagtggaacgataaaaatatggaatattgaggaggcgaaaggtattaaccagtgttggtactcaacagtcagtgcattgaaaacatgaactgcaactatgtcttgcaataatctcagtttctattgacaatttgcacaatgtgcagttgttcgaactttcactggacacagatcaagctgtgcatctcttgatttccatccttttggagaattcttagccactgggtcttcagatacaaacatgaaaatatgggatactcgaaagaagagatgcatccacacatacaagggtcatacccaacgaattaatgtgcttaaatttactcctgatggccg

SEQ ID NO: 182151 - DNA, 417 bp, Zea Mays
gtaggtaggtggttgaattcccttttgaagatttatttttgtcaactcttggcttgcatactgcaacaggttgcgcggtatcttcagttgataacttatctttattattcttccctgtcacaaaaaaaagagaggctggatgatatgatggtaaggtcgcatcgaatggcttaagaaacttgtagggggaaatggatatgccttgtgagtgtgagactgatcaaacccttgcaaaagttctgtgatagtcactgcttggctgattgaagtaagtttgatgttgatatctgctgggaatatatataatcaatataaaaacttatcaaagatgcagaggaccttttagacgtatgaatgactcgtgagcaactatatggcctggccacgggtgctttcggagagattcaaagtgcatcc

SEQ ID NO: 182152 - DNA, 358 bp, Zea Mays
gcttcccagaaagagtaagtccaggtttcggagcttgttaagaagaggtagggggccaatgaagctattgttgctaagatcaagggtatgaaggaaggtcaggtttccaacagaggagctgatttggccagccaagttttggccggtgaggttgagctccgtgactcgatatggtcgcgtggaactgcagttcacaccatgccaatggcagaagtggatgctggggttccaattgctcaaggctccgtgcggatcactggtgatgcccttcttgaactctagcagagaatgaaaatcttggctgttgttatggtgcgtcgagcaatggactttgtccactgcatgacatagcagcagc

SEQ ID NO: 182153 - DNA, 349 bp, Zea Mays
agcagtataacttttttagcacccagatataatgatgctgatcccccaaaatacttcaaagctgctgatgggaggcctgccagttataaccaatttctttaccaaggtcagaatagttcagctggatggattgcacgaagtcctctggaaccttctgttatcaataattttgctagagttgaccgtccacatcattcgaatctgggtacatttactgtccccatctctattcctcaaatagacaatccttcaattgtctccccgatgggttcttgcacagcagacccaaggagcagcattgtcaacaatcctgctttaattccaagattcaatgggtcgtcaaccgtga

SEQ ID NO: 182154 - DNA, 285 bp, Zea Mays
tccctgtcctttttcaccggcgacgtggcctcctggccgtcaccggagttgccatgtgttactgcggctgcgccacgctccaagctttccaccacgtcgtctctagccgcaccagctcaccggtaaccgccgtagcttcttaaccggtgatcaccggaggaagcgccacggtgaaagccacctgtttcacacaccgagcgctttgtttcctctggccgccagcgctactcgaccggattgatcaccaccgctcaactatcctataaattgaagcctcagcttgtt

SEQ ID NO: 182155 - DNA, 393 bp, Zea Mays
cgagtgtgcaacaaggtattccgcggacgtcgatgcgcgagtaggcgctaggtggaggaccatggggcctagggtggtagacggacagctaagcggtggtggcgcctcagcaacgttggacagcaattccgtggcgattttgtggtgctaaggtggactgaggcgatgaggaagcggtcggacctgcgcggcgggcgaaactgtgactcaggaaaagaaagttgatgtgtgggaatgataaactgcacaggctgcacgtcaaaaagagagctcgtcaccatgctgcttcccgatttcatatccatgttccggcctcagtgctgctcctcgatctgttcccgccagacaccattcctgacatcaagttgcagttcctccccccgcccggctgct

SEQ ID NO: 182156 - DNA, 384 bp, Zea Mays
tcttgctggatctacatttgacagcagccagcttgtattgacagcttgtatgggttttcaatcagttagagaaatgggattgcaagagttaaggaaaaagtacaggcctgaaattttaactgcaatggaggaaagatcgaaagaccgtggctcctggaaagataagaaggggttagcaaccaaactttatagctttaaacatgatccttcatatgtgtgctcaccagttaagtccaaggaagggctagatggttcaaaggtgaatggagagactgggccagcaaatcttgagacctaccttagtactagttctatactggataatgatttggatcagggtgttgatcttcaagatcaggtaacaactctgctagtatgttattt

SEQ ID NO: 182157 - DNA, 378 bp, Zea Mays
ccagaaggtcctacaagatttggaggttagtatagttaactttgttttctcaacatgttgagtcaattcttgagtgttctctacatgacatcactattgtgcatttgttccactaaagttctatacatgtcaatggctaaattataatgaactttctaattggaaaatatggaaccaaaaagtccttaattttgggcttttgattgcttttcatagcatacatgctcttatcttcctctctgtgcatcaaatctgatgcattacaactttggtgtttgcagattactttgtgacaaaatgtggtgtccttctaatgtcactctttgtctttttcacaaccaccatgtctgtttcatttactttgagagaaacacaatc

SEQ ID NO: 182158 - DNA, 415 bp, Zea Mays
tgctcgctcaccttcctatccgcagcaatagcacaagcattcagcacgcctgtcaccgtgacatctgagatctccagcccatcctccaccatttgcctaaacaaacccagccctcggagccccgccttcttggcaaaagtggcgcgcacgccttccttgttccgacaaaacccagtgagaaccgcattgtatgtaacgaagttcctctgcggcatccgctcaaacacatccagtgccatgtcaacgagaccaaactccatgtacccattcagcaaaccagtccacgaaatcacgtccttcacgggcatcctctggaaaacgctcaccacgtcctcaacagaggcaccatgctccgcgtagaacccgatgagcgcgttgcccacactcaggtccgtctccagccccgacttgaacg

SEQ ID NO: 182159 - DNA, 400 bp, Zea Mays
ggctcttgtccctgtggttctggacatctctaccctctacaccagatggcgcgactccttcctcctcgtcgtcggcaagtacactctggcggaccatgtactcaccgacaccttcgcgcccacttcccctgactgggttcgaatggactgcgtcaagtcgtggattgttggcaccatcaccactgatctcgctgatgctgtcctcatccgcgatgctattgcccgtaccgcctggcttgcaattgagtctcggttcctcgggaaccgcgagactcgggcactcttcctcgacgcggaatttcgcaattttcgccaaggcgatctctccatcttcgactactgccgcaagttcaaagggatggctgacgctctcggcgaccttggcgaacccgttcatgac

SEQ ID NO: 182160 - DNA, 419 bp, Zea Mays
ctggagcaagcgatccatcataggttttgtgtcggcacttgctgtcttgactatcctgactgcaaggtgcatgtgaaagtcatcccgtgatgagaccagacctttccacagaatttgttgtcctcttcgccagaatgcgagacacaagtcctccaggtcccaaagagttggccccagggtgcgcagaaactggactccgaggataatatcgaagaagtcaagtggaatggcatatgcgtccattataaactcttctacgccgatgttgttggggaacctggagcatgtgaccttgccaccgttggccaccatggcctggagacattggttggggctgtactcaagtttcagagctctcgcggtgcctaggttgatgaagttgtgagtagaaccagtgtccagtagtgttgtaagagcct

SEQ ID NO: 182161 - DNA, 358 bp, Zea Mays
attcctcgtcggatttcaacagtcgtcaccaagccgcctcgcacgtggtcacgagtcttcgtgtagtaatctccggtaagaatactcctagttaatctttgacgccatcctcgttgtgtagaaccctctcggtgggtggtcggggcacctgtacgctcggtcgcttggcgccgatgtgcctcaccgtcatatgggggcgccgccgtcgtctgggacaacggatgatgatggaagcacactcgccattgatccctaaatggacgacttagattagacatctgcatacccctttgtgaagagatctaggtcgcgtatctgtagatcgacggttaggattggatcggccactataaaatca

SEQ ID NO: 182162 - DNA, 328 bp, Zea Mays
gtccctcgtgatcatggtcctgctcctgatgaagcgagtgtgcagagcaaagcaggccatcttggccctgcacgccgccatgatcctgaccctgttcggcctcatgggcgcgtacgccgccgggagctgcaggagagtgaggacctccgcttacatcctggcactagtgataggggtttctgtgtacatcgttgtcctcgtcgtcgtgtccataggagtcgcgaagcggctgaaaggagtggtggatgagctagccgaacgagtggtctggtgcttctctgcagaagacctgtaaaacctggcgacattaggctacatagtgtaaaat

SEQ ID NO: 182163 - DNA, 372 bp, Zea Mays
aaaagatgttgaatccaaatccaccttctggcaacggcgaatatgatctgaggactgatccatctaggaagcccaaaaggtccaatgacccaggttggaagtttgcatattgggcgaacctttagaaccgagatcaggtgacatgaagtttatgtgccacgacgattcatggtgggataaaaggcttaagcaacatttggcttgtggatatggaaaagttctaatgtgtagcaaaactaccactgaaatcggaaaagagatgacatagtacatggaatcacataagagggcacgttcaatgtacttaagtgatgatgagccagtggaggatgaagcagcagatgtggtggaggtagagggaggtgctcctgg

SEQ ID NO: 182164 - DNA, 674 bp, Zea Mays
gcaaggatcacaatattgaagaaacggtttttcaatggatgatcaatatgatgtgacttgaggatggattgataaggtgaagatagcaaggaaagggcttcaaggtactaagcaaaggtgaaggccaagcaacaacttgaggaccaagatgccaaggctaaggtaaagaagagagtacttgcattgagttgaggaactaatcaaggtacgaggagtcatattgtgttgaggatcaaatcattagtggaagtgatttggaagccatgaattgaactcatatgtgatgaaatcgttcaagtcacgtgctcaaggtgtgtttgcttgaagagatgagacaaagttgattgcaaccccttatgaagtgatattgagaacaaatggcatatgaagacattgaagactcaagtggttaaaatagttatattatcttgatcttgagtataggtatgtcgtactatcaagggggatgcaacacgaatcatagaaaagtctgaagtgctcaaactaaccaaaccccaagtgctagcatgagagaaacacaaagcacatcagttatggtgttttttatctttggacttgttctttgttgagttggatagccctcgaaacaagctttctgaaaagtccaagatcactgaaattggagttcagagtcaaaagttatggcgtttttc

SEQ ID NO: 182165 - DNA, 367 bp, Zea Mays
tgtcctttgactaggtagagagccgaggccgggtttgggagcatgggcgtctgcccgagctcgtcctgtacaggggtgcgaatgagacgtttccgagggtgtcgagtcggagtggttgaaacagagctcggcatggtgaaaaagtgtgtggtaatctggtccggatgtcattctggatggtggaaagtggattggacactggtcttgttgtttctgtagccttcctgtcttcagcgggagagcaggtggcatttaatgcgcgtgcttccctgttggggcagttggccgaggtcaagctcgggcgaggcgaagatttcttccgaggccgaggccgtgattagacgttgcatgtagtcacgctctgggt

SEQ ID NO: 182166 - DNA, 759 bp, Zea Mays
cttgcattccaatagaattattcaccgggatatgaaacctcagaacatccttatcgggaaaggatctattgtaaaggtaatctctcttctatcttggcatgcataacctgccaatgtcttgtctttttttccattcctgaatcctgaagtttttatcaagttttctttagtgtacgatgtatagtagatgcttcaaggtacaccgtacacatatctccaagatgttgctgtagctaatctattgttgaattgtcagttattctaacgtacacactcctatttttcgtgatccagtgtactttattgattctatctggtatgtttcagttttctgttaagtttcttatagtatgatggcagctagacgtatgcaatcattttattagaatgagctttcatcctgatggccttgattcacgcctttaatgttcgcttatccgctgttgtttatgtcttcaagttgcgattcttatccattacgctacaatggttgaaatttcatttatttcttgcctatttacagctttgtgacttcgggtttgctcgtgctatgtcagctaacactgttgtattacgctccattaaaggtatctatttttcatcttgacgtggtagttgtcatcttaaaaaataatttccttttttctcaaacgcgaaaaataataatttcctcatcttgtagcctgtaattaagtctatatatgctggttggaatacttcatttcatattctctggatcataggaagcctcctgctagc

SEQ ID NO: 182167 - DNA, 487 bp, Zea Mays
ataccatccaggggggcaacttcacagctaaaccgtcatttacagaagtgcacacagttccagaacaaattggctaaggcaaaatctcaacttcctcaaggtactctcacatttactgcaactgatggatctattattgttaaccctaatgaatatgatcatgatcacactagactattgattgccaagatgatcattgttcatgagtattcttttaggatggtagagcataaatggtttaatatcttgatgacatggatgaatagcaaatatgaacctatcggtaggaagactattagaagtgaatgtatgagagtctatgaatctgagaaagagaaactaaagaagagtcttagagaagctgaatcaataagtttaactactgatttgtggacatctaatcaaggtgtacaatatatgtgtttagtggcacattacatagatgttgaatgggttttgcaatgtcgtgtccttaactttgttgaat

SEQ ID NO: 182168 - DNA, 279 bp, Zea Mays
ggaggataaaccaaataatttgagtggtgcgtgccaaatgccatcacttgtgcccttattaagacaatgtgaaactaccaaatctgacgacggtgcaatatgtcaactggagtactacataatcagcgcatatttttcttccttctgatacgttactgtgtctcggtggaatgtacgcgaaggacagccggtggtggaaggagaaaacatgaaaattggttttggaaacgtccagattagctgtagattttgacaccttcacttatccacttgctcttg

SEQ ID NO: 182169 - DNA, 362 bp, Zea Mays
gccatttaaagtgttggaatgccttggaactgtggtgtatcatctggagctgccacctaactcacgcatccacaatgtcttccatgtagttttcttgaagaagttcgtgggcgagcctcctacatctgtgccacccttgccacccatcaaaaacgacagagtattgccagttctagaaaaagtattgcgagtccgattcaacaacgacaactgggaacttcaggtcaaatggactgggtgttctagttctgatgccacctgggagttgttggcaaaattcaaagactcctttccctcgtttcagctcgaggacaagttgtttcctgatgaggaggggaaatgttgtgaacactctatttggg

SEQ ID NO: 182170 - DNA, 780 bp, Zea Mays
gagaaattcattaggctttatgttgaatcattaattgactacaggtgattttgcttatctgatgtaattatatttgcatatttctctctggcattgtatgaacgtttataactcttaaaatgcgaacagtattgtcgatggtacctgccacacacacctgattgaaactattgagagtctgccaatgaagaatttcattgaaagtgtcgtgtgcaaaattcttggaaactgtatcaaggtatctcgggccacaggaatcccagatattaatcacacaggtaactgtaacagctgcttcaattccattttaaactaatcaagtaatttctttttttttgtgcatacatgtattttaagcatatcatggtgttctgtactgtatgtactatgtagtatttgatatatattgtttcatctatttttcagaattatgggctaagaaaatttttaaggcaattgaaagaaaatatcccctggagctacgtgatgctattcataaatttcttgaggtgcaaaatgacacactttccacttatgtaacttgtcagttcttattgctgttgtttgacacttctttctccctgttctcagaactctgaaactaattcaccgggaggggattctttggctgaggtttttgggatattgtttgatgaaaacaagaatttgccaactgaaatatctgactcaaacatttggttcagtctcgatcatccaaaggtacaatatgatatgggacttgctgtagaattttactttccatggaaactctgaatttta

SEQ ID NO: 182171 - DNA, 365 bp, Zea Mays
ctgcgatcttctcaatccataacttaaggtcacaattcctcagttttttatcagaaatgggcagccccagatacctgcaaggaaacaccgcgggactgcaatgcagcacactgcaaccagcaagcacctgctgatcatcacatctaattggaatagcactgctcttgagcatattggttaccagaccagaagccgaaccaaaacagtttagtattatcttagcacaattcagatctgcttcaattggcttaatgaaaaggaccacatcatccgcatagatggagactcgactgcgaacatcagctcccccaaggccctccaacaagcctctattttcagcaacccggaacaagctgctaagcaca

SEQ ID NO: 182172 - DNA, 419 bp, Zea Mays
ggaggatgaccaagggtttggagacgatgattgggaattcacggcggcgacggggcaacctgctgctgatcaggatggaggcggaccagggcatgcggatggatttggtaagatcgaggtgagcctgccgcacaagttgtcgtgagacgtttggacctgggagatctcgttgccaaattgtcgtgagatgtttagacttggagtgtaatggcatcgactctatccaatccagtatgcgatccaagctctcaggactgttggggggagatattttgacatttgacacccaattcacatgtctttcaagatttgacaccccctatcacaatgacatacggggtcactgagtgatttacatgtgggccaggatgtcaaatctcgaaaagcatgcgaattaggtggccagcgcaatgcattgg

SEQ ID NO: 182173 - DNA, 494 bp, Zea Mays
ctttcttgtcgccaataaccctgctattgcaggacaggtcttagctgttgctcgtgtggttcttcgcgatgacgatgagaaaaagccattctggaggtatgctgagatacttaaaagaactagaaagggtccgggggggatgtgaggattagatgtagactttctaaccatgattggaatggaagctattctagagttaaagcacatctgttgaaaattcgtagttttggggtgaagttttgtcgagtggtgacagtacatgtttttgaacaactgaaagttgaagttgctgcagccagtgttgttgctgatagaaccatgcctagagatatcccacttctagttgagggcaatgagaagaggaagaggaggggtgttttagctattgaatctagcttcaatttggatgtttggagacaacttgatgaactaacaactagaatgttttacactggtggtctgccttttaatcttgcacgtaacccatattttag

SEQ ID NO: 182174 - DNA, 365 bp, Zea Mays
cggccggctgccctcgggcctcgcgcagctcaagaacctgaggtttctctccctctccggcaacaatttcagcggcgagataccttccggtttgggccagctggggtcgctggaatttcttaatctgtccaacaattctctatcaagggaggttcctgctgatcttgtggcactgcgaaatcgcactgtcttactgcttggcaacaacaaactatctggggaggaggagataactgctgctgctcccggctcaccagttcatgtagttactgctcattcagttacaggtgaactgtttcctgtttctcctatagcaacagctatccgtaagctgatcgatacaggtccaggcacttctaatggca

SEQ ID NO: 182175 - DNA, 790 bp, Zea Mays
ttcctctctaggacatcttctagcgatgctcctcttgttgcctttgggtcatctgatggtgtcatcagggtcctttcgatgttgacatggaaggttaaatataccctaccctacacccttttcttcattactggtgtgctgcaagtttaaactgagtcatttgatccttgcagcttgtgcgtaggtatacgggtggacataaaggagcaatagcttgcttaatgacgtacatgtctgcagctggtgaggtaaacttttgcataaatatgtcttgtctttgactctggttgcttcattgtggtagttacaattatgttccttttgttgtgttcatatgttgtaattttctattctcatgtttcatttcttaacaatcaattgttgttaattcttctgattttcatttcttcagatattactgtcatatcttccaattaacaatgcattctcttcaggtacatttagtttctggtggcagcgatggcctgctgatattatggagtgctgatcatatccatgactcacgtgagcttgtgcctaaaattagtatgaaggtactggcatactgactttgattcactgattatttatgtatcaagaaaaaataaaatggtacaaaatgtttgtaaataacttgtaaaaacattacttagcatgcaggttgcttaataatgtttttttgggtgttttctgaaggcccatgatggaggtgttgttgcagttgaactttctagggtgatggggagtgctccgcagctcattacaataggggctgataaaactttagcca

SEQ ID NO: 182176 - DNA, 282 bp, Zea Mays
ggacaattgctagacttagatcgcggatcaaatatctgaaagagggagatgccaacacttccttttttcatctacaggcttgctatcggaaaaagcggaactttatctctgaattagtgcatggggaccagatcgccaccttgcaagagcaaaaacaggaggtcttgtttgattttttctccaatttgttgggtgtagcgaagcagcgtgagttcactctagatttggaggcttgccacagtgctgatgttgatcttggggccttggaccttcccattacag

SEQ ID NO: 182177 - DNA, 931 bp, Zea Mays
ggcctcaccaaccttgctgctatgccttccacgacgctcgctgcagtccaccaccaccggacaggaagcaccacctagttcctgaccctgatgtccatggcacccgaccatcccttcgatgccttcgtcgccgcagctcgtggcgccataacccaccttcaccttcccgtcatccacatccctggatccaattccagtcctaaccccgactccaagcagcaccacgaacccgaggtcgactgcctgctccacctccacgtcgtcgtcaccaacttcttccacaagcccctcagatcattcgctaggtgcttcaggcccaagcgacgggcaggcaaacactccccgccgctctaccaggagcccagcaatggcgcgaccccgcagcagcaactggagctcctgctctgcattgcgttcgatgccttcgcccacaacctccacgcgctggaggacgcctgcaagcacaaaggcgaggaatttgctgtcgctacccgacagttggagcaatttgtggttttcaggaaggtaatcgatgggaagagggccgatttcgatgggttcctttcaaatctgggctttgcaaaggttgggccaccgccaccgccagcaagcatcatgggtggtgcttcccctgtcccagcaccagcaccagtcagcaatcaggaggatggtgctgtgattgggaacggcgagagggtggacattgctagtggtacacaacagcaggcacaaaaattgcctgcccggttgcttaacattcctttgtcgaatgtggagcgtctgcggtctacgctttctgcagtttcactgacggagctcattgaattagttccgcagctggtgagcagatcatcgacatcggcagatgcacatcctgacaagaagaagcttttctcagtgcaagacttcttcagatatgcggaaattgaag

SEQ ID NO: 182178 - DNA, 305 bp, Zea Mays
atcagatctagttcatccgatatctaatcaacggctcggatttaacctaacgaaaggcattcaacacttaatcagggtcgttcattctgatcggatggccaggattctacagctctgaaggggggactctgattaaatcggagccacacattctccgatcaaaggttagcaaactctcttccctcccgagctctggtcaaggcagcgctgcccaccgcggcgtacgctacatcgccgattggtgattccgtccaacgatgggactgccccgagtttgacaagctctacacgaagctcagtgaaag

SEQ ID NO: 182179 - DNA, 475 bp, Zea Mays
cgggacaccactggtttctcgccgaagatcatctccgccgcggatccgaattccgccgtggccaacgatctgtgctacgtaatcaccagtgagttctagacgaccgcgttcgccttttcctcctcttccgatcgcgctaggtaactgctcgcatccttcgttgttccgtgatttggttgatcaccggcgagggcaccgccgtctgtgtagggcgcgccgccgggtgtgtcactcggttggggaagagggccagtgggccatcgatctagaaacgaggggccaggattgaatgtgagtactcttcgggtgagacgtaacccaggcggttggatggagatcgtgtggtcggagctacataccggatcagtgatcgatttagggccgtagatcgctgatcctgtgactctggtgcctaccggggctcggatctaatctgggccacagaaccggaatccaacggctgagaaccgataat

SEQ ID NO: 182180 - DNA, 978 bp, Zea Mays
aaaccaaagttcaagcatatcctggtaatggttaataccctcgttttcactcctgcactcatgctgttcactaaatagatgtggaagttatgagttgcttgccttaagtaaaatacagaaacacaacaacacagcctttttatctccactcccaagcaagttggagtaggctagagatgcaacccaacatgaggcacccgcaaaaacgaaaaacctgtgtaaaaaacatcattaagtaaaatatagcaccagaagtcaatgaaaatttgcatttggttcaggcagtgaaatctgcatgaatggtacttcaggattattcctcatgaaaaggtgctataatgtatagtgctatacttgtcgctagaaatatattgattttgttgaaatttaataggaagtcactgtcaagtcgtgtaaatcttaacaagcaccattaatcggataacagacagactggttccttgtcattgttacgagctattattgcatatatgcttgcaaaacttttagatgtcctcatgacatgtgatctgtcttccttgcataaagctaggaagttggcagttactcatgaccatggaccagttaattctggtggcaagccaatgaatgagggttcaaacgatgagaacagagacaatattgagagtaaggttgaatctaagcaaattactcaagacagcaggccaaaagagggtcagactccaaaaccttatcttccatagtatcactttaatctttatgatttgtcaggggcagttggggactaatacttatttccttgcaatgtgcagtcagcgaagctgttccagtccagaaccaagctgccgcgcagaagctactgcagaaaatgtcgcaggccgtgcctgaggacaggcgcggtcgcggtcatagattcaagggcaaaggcaaggaagaagatgctcaggtttttaccctcgatgaatgggagaagaggaaagccatcagttcgaagcc

SEQ ID NO: 182181 - DNA, 297 bp, Zea Mays
ggaaggagagtgccatcgggggcatccccacagagccaccgggaggggtgctggggctggcagtggtgagcatgctaatgacaagcatgggttggggagaagacaagtcctcaagcgtcatggagagagagtcggcgttgcagaacacaaatggcctagtagtgtggcggccctcttgaggttgggtggaggttggagggtggtagatctcgacacagtcacggagaacaaggttcatgactcgatcaaaggccattatggtgcatcagagaagctgattgtcgtgaagggagaggc

SEQ ID NO: 182182 - DNA, 301 bp, Zea Mays
ctagtacattcaaacagagtctaatacatgtaatgagcactaaaagatcgtctatatggcacggacagaattccttaattcaatcggtccgagatagcttaattcaatcggtccgagatagcttacgtacataatagttgcagcaaaatcacatatatgaagctaaatcgtagcaataggaaagggggagggggcaatcggtccgagatagcttaattcaatcggtccgagatagcttaattcaatcggtccgagatagcttacgtacataatagttgcagcaaaatcacatatatgaagc

SEQ ID NO: 182183 - DNA, 718 bp, Zea Mays
ttttcgacagatttcatgataaaaaagattcagactccaagaatgagatgggaggtgtggaaaaactgaagggcaatcttgatggaggacgaggcaatgctgctgaatctagcgacactcaaattaaaaatcaatctggtaaaatcaaacaccatagaaggtggaaaataactagggtatgtctgcttttttctatttgagagtttgtgcgaccttgtgttgactctatgggctagtcacaaatttgactattttttccttgttgacagataaaagcagttcattggacacggtacctactacaatatactgccacagagatattctttgatgatgcaaacgcaccagtatttcttaacttttcatcccaaaatgatgctaaaagtgttgggtctcttttagtttccctgaggaatgatgctttgttccccaaaggaacaaccagagacaagaatagtttaatttcctttgttgacagaaaggttgcccttgaaatgtctgagagtgctagggaaagttggagaagaagagaaataagcaactttgagtaccttatgattctcaacactcttgctggacgatcttacaacgatttaactcaatatcctatatttccttggatattggctgactactcttcagaaaagcttgattttaacaaatcatctacattcagggacctttcaaaaccagtaggtgccttggatgcaaagcgctt

SEQ ID NO: 182184 - DNA, 457 bp, Zea Mays
aaaatagaccgagacattttatttggttgttgcttgggaattaaattctcgcgcataagtagaaataaaatgaatcgagatcaatcggcttcggattcgttatcgaattaaagcgaatcggattaataaaaatcattgctgatgctgattttcgaatttagattggacatagagattttaagccgagttggataaaattaaataggtgccaacacgtggagtatcccgtttgagagcacgggctcggattaatttttggacacagatcgaacatcgagaaattggattcggacacagctcgactagcaattgtcgagcgcctaattaaatgagttttagacgagatttataaatcgagattgattaccgaatttgcattcgttccgagaagtaaaagtttttaacaggctccaaatttgactgtccttgagatcgaataaaatcagaaatcggtgaa

SEQ ID NO: 182185 - DNA, 754 bp, Zea Mays
gaaggcaggaggaggaggaggacataggaggggataggagccgccgcagacatggctggcggggtggccgttggggtcgtggcgctgttcttggctgcagcttcatttggggctaatgccaacaccgactcgaatgatggtgagtgagttctgctcctttttagtcgttttcttcttctctcagagcactcttggcttccatgccacgcctactgcagaagaaatttcgggttggcgtatatgactgttgactggtttcgtgatatttcggttcagatacaggtgttgagccacaactctatacggtttcttcttcttcttcttcttgttgaaccagttaagatgaccaggggaatgctatcccttcgttttgctacttgcgaacatgcatcctagttaagcaaaaatgttgtagaacagcaaagcatatgaaagaaataccggctgctgactggtttcttgaaatttcggttcagatacaggtgttgagtccacaactctatgatttttttcttttcttgttgagccagttaagttgaccagtggaatgtcatcccttcgttttgctacttgcgaacatgcatcctagttgttataagaaaaaatgttgtagaacagcaaagcatatgccagaaataccatgtttacctgaaacatcaatcaccagttattatttactgattcgtcgcaagccttgttcttacatatgcagtgaatgccctcaatgtgttctacacaaccatgaattcgccgc

SEQ ID NO: 182186 - DNA, 336 bp, Zea Mays
gggagctccgtctggttcctgtgaagaagtttgtggctagccgggggtgatgggttgaattcgcaatggagtcgacatcgcgtgtatccgctccgtgtcatggccggatcacgccaggtccccaaacgtctcaggtgagtccgtaatgggttcgctttcctccccgctgctcgtaacttcatccgattcgatggtgtatgtccagcgtggtgggtcggtggttgtcgcaatggcgccaccgcgtcctgcttgcttgcgccgccgctctggtggtcgaaaggaagaagaacgccgtggtccgttggattgggatggacggctaagattagatgatgc

SEQ ID NO: 182187 - DNA, 861 bp, Zea Mays
aagaggaagttccacaaactgaagctgaactattggatggagtgctaaaaccaactgaaaggaactgtgcacgcagtgttgaggaactcataggagaggaagttgacacagatgggcatcccagtgtagacggtacagctgatgcttctggggagcaagaagccaagcccatgcaggtagaaggtgaggccacatgtggtattctcgaatttgaagaagtggataaggatggtgaggatagtttgtgtaatgactgcatggttggtgttgtttcctctaatgaggaaacagagcttcctatgaaggaaagaacagatgaagctgtccccagtgttaatgttggcgagtcagagcaagtaactgaggatacaagccaagatatcatgcagggtggattggccaggggagtttttataggcacaatttttgttaagccagtatcagatcctcatgttgaatcaagcctcgtacataaagtcaaggcagaagttcatttagttgatgaaatcacagcagcagatttgaaagctgaaaatatggtcgaagtgaaaagaacagatcgtgaagttgacgaaatagaggtaaaagcgccaggtactcacgaaattgggaattcttcagaagtagaaccgaaggaagagtttgagatggaggttgatgatgctgtttcattgcatgaagctgcagcttctgcatcagaaaatggttctgaagaaaaatctagcaacattgctgttgatcaagttgaacctgtcaacctgaatgtagatgaactcgcggtagatgatgatcaacccagttttaatccaggttatggatctgctaaatcttctgatgtggccgaaacaaaaaatgtggaag

SEQ ID NO: 182188 - DNA, 637 bp, Zea Mays
cctatgcttccaaatggtccaagcacctaggatcactaaagaattgaaaccttttctcacaagatccgatgcccgggagctgctagacttccaccacgactcaaaggattcctcatgagctggatacagaccccgcagcgccactgaattaaggaaatcaaaccagaactgcctagcaaaaacacacttgaccatcaaatgatttatggtttcagcctcttggtcgcacaaggggcactgctctggtcggtctagccctctttttctgagcctgtcagcagtccagcacctattatgttccacaagccatataaagaacttgcacttcccaggagcccaagatttccacacacgctctgctggttcgaactgaactgaaccaaggaagagagcattataagcataactagatgtataatcacctgaagcgctgaatttccataaatgtcgatcccttattccaggctggagcacaactgcatcaagcacttcacaaagttccaggaattcagcaatgactctgactgagattgcccctttcgcatcggagatccaatggaaattagggagagcatctttgaccaaccgtttgttggcaagacgtaagggcaccaaatcaaacattgcaggagctatg

SEQ ID NO: 182189 - DNA, 283 bp, Zea Mays
actatcttccactcccacaacattcaacttcgtatgtcttgcccctaaactttgcctcaaaacagtaaagccgaacacatgcttctcaccatcaataatgtcgttcactccttgttgattcaggatagtgtccttctcgcatattgggtcgaggcgcttagcactgttacgctcctcaatattctaccgactaagacacttaacttcacatcccatcgtgctatcttcggatccccaccctcatatatactcatcactatgttttcgaccgacgatgctatcc

SEQ ID NO: 182190 - DNA, 579 bp, Zea Mays
gagccccccaccctagccgcctcatgtttcttcaacaacgggcgtacactggggatctttctgattgagctagcatgacagttgcatgctttgctccaccccagtggatacacaggctaaggtctcctccgttgttggtgtccctgttagtgattccactgcatactggaccctcttcttgcgctatccagtatctcactttcaccaggctagatattgtttatgttggttagtagttgtgcctacatatgcatgatccctaggagtcacaccttaccgctgtgaagtggatcttttagtaccttcggggcacactcgactatggccttctctaatgctcctccgcatcagcacttgtctcctacactgatgttgactaggcgcgttgctcggacacgcgtcgctctacttctggctatttcttctttttgggcagtaaccttgtatcctggtcgttgaagtggtagcaggtcgtctcccgctcgagtgtcgaggccgagtatcgtgttgtggctaatggtgtggttgacacatgatggattcgatagtttcttctggagctttagtcctatctccagc

SEQ ID NO: 182191 - DNA, 442 bp, Zea Mays
gaagaaaggctcaatcttgtacaatcttgtaaaacctctgattgatgaaggtattgccaccgagctgttgtaagttggggagaatcgatgcctatctgccaaaaccatggtggttggtgcttagttcatggcctgggctgtcacattgagggcactgacaattaggtctacaatgggttatggaacactgattttacatttgaaatttgtagtcttgacctctcgaggaaggctaagcatcacaactttttaggccaattttgctacttagaaggtgaatggagggactttccatctggatcttacatagtagcttctgatactcaaacggacgactacatacctggattttgttgcttcaagttgacccaggcttctttatttagagcttgcagtttgattcagttttgttctcttataatcctctgttacttgccttgtt

SEQ ID NO: 182192 - DNA, 1583 bp, Zea Mays
ggcgagcttgagggttggaacgcagtggatatgggggtagtgggcagctgatgtcgcggctggctggatgagccagggtgaccgaagagctgtccactaaggaataacttcttcgatagatccctagtacaaactatcggctggctttatagatgatgagccaccaaacctttcctattacttaacctagatatttggaaacagaaatatcaaatctaaacttcctaacaactcagcccttgattggaggatttgatttattcaatcaaaaccttcctactgacctcttcttcctttcctgtgttgactccttcctttcctatgcatgctgcccctttcctgcgcctgctgccagccttgggcgcctgtgatactggcggcccacaaactagtccacaacatttccctccacaccgacaaagaactcgtccgtgagctcgaactctggatacctctgcttgaattcttcaagtggttccctggaagcatctgtctcagcacgaccaaaccactgaatcaacaattcctaaacacctctattgagcctggcacgtaccaccttggatagtgttggtaggacacgaccatgcaagatcacaggtaatggtaccacttgtgttggcgcctccccttcaaacttcctcagcaaggaaacatggaagacatcgtgtattcgagcacgaggtggtaactgcagcttgtatgagaccagccctacccgaaggaggacctggtatcgaccgtagtactttggcccaagtttggagggagcagcagaagtcaacctgactgctgtgaactgttgtaggcgaagccacacccaatcgccgacttggaactccacctggcgacgtttcttgtcctggtaagctttcatggttacttgggcctgaagaagacgctccggatttccaccaagaacgtgacgcggtcctgcagctggtggtacagtgctgccaccttagtggagcccggctgataggacagcagggttggcggctcccggccatagacgacacggaatggcgagcacttgatggctgtctggtatgaagtattgtagcaatactctgcccatggcaaccactgcagctaggacttcggtcgatctcctgcaagacacttcaaatacatggttatgacccgatttaccacttcggattgaccgtcgggctgtgggtggaatgttgagctcatgtttagtttgacaccagccaacttgaacaactcggtccagaaaaggctggtaaagattgtgtcgcggtcgctgacgattgagtagtggagcctatgtaagcagatgatgtcatcaaagaaggccttggccacggacgctgccgtgtaggggtgccgaatagcgatgaagtgtgcatacctcgagaatttgtccaccacagtaaggaccactgtcttgccaccagcacgtggaaatccttccacaaaatccatggaaatgtcgctccaaacctccaaaaggatggttaggggctgcgggagaccgctaggatgtagatgatccatcttgttcttttggcaagtggtacacccgcgcacataatcggcggacctactgcaatgcgcct

SEQ ID NO: 182193 - DNA, 404 bp, Zea Mays
aggtgctcagatttgtaccgctggcaagtgggacatgcccgcacaaagtcctgcacaacacgacacatgttgggaaaatggaagtcgcgtcggagccgttgtagggtgcactggacgccctcatgtccatcttcatggacagttgccacaacctcctgcagaaggggcgaggacggtgggatgtacagacgcctgtcgtagaggaccatgttgtcggccactgcccatggagcagcgtgtgtgcctgtgttgatttcgtcgtggagggcggccagggcggggtcaatggcctaggcgtggcggagccggctgatgaagtcgaagcggggcgccaagatcgcctgtagagccccgtgtcgtccttttcggtgtcgcggcgcgagagggcgtcgaccatcgtgttc

SEQ ID NO: 182194 - DNA, 1516 bp, Zea Mays
tgaacgttcaggtcatgctgcggtgcaggtgagttactcgagactgtggaggaagggttttcctgctaccgctaattggatgccgaaaaggaagaaatccaacgagtcgcttgcttttcttcagctcgagtttctagtttatgtaaatgttcaaaggacctggattctaagtaggatcgtttttgtccttgtattatcagattgtagcatcgggatgctatcgaattttataaaatataattcttatattatgtttgtagcatgtaatatgttataaagtttgagacctataatcttgattttgactgttttagaataataccccccctccgttctgataagacgttttgttttttaaaaaaaatatgatttttgttatgcacttacatatgtgcatggtgaaagcaataaatctaaaaaataaaaatcaaaacgttttatgagttaggatgggagggagtatttcgttacaaccgaatggtttaaaaatcatttatatcaattattacgtggtatcatgagatctatgggattacaaatttaacgtaggatcatatggagtcttcacgtagtatcgaagtactattgaatttaggatacactttaggattgatatcgtttggtttggtaggattatattatggtaaaattctaggatatggatcttgacaaccttgaagaccaactggtgcttcattgcggctgtgagaaaacctgctaccgttgcataactgcgcctgactgcggctaccggtactaacgtgtccgtctatcttttaggccactcagtgaggaggagcagagagtgaatgcgcagagcgctatctcttgtaatgaatcaaagagggaggtcacagttctgcacagcctcttcaagcaagcagacaagacatttaccttcgacaaggtaaagcctctttgacctgtgtatgtgtgtttatctttctttatatgattatagaggtttagcaactgaatctatttgtatgattcatgttgcttaccaccattgttcttagatatgtggttgttgttttgtcctaggtatttggaccacaatctcagcaaaggtcgatatataaccatgccgttgcaccattagtgactgaagtccttgaaggctataactgcactgtcttcgtgtttgggcagactggaaccggaaagacatataccatggagggagagatgagacagaaggtacccataatatctggacatcatctatgatgaagacaggaagttctttgtaactgttgaataatttgtcttacctaatatgtcaggttagtgaactaccggatactgccggtgtcattcctagagcagtgtgccatatctttgaaatacttacagcacggaaggctgattatagcatgaaggtaaccttcttagagctgtataatgaagatataacagacctattgtctttagaggaccaaagcagattccctgaaggtagacaaaaaaggcctataactcttatggaagatggcaaaggcggtgcggtaataag

SEQ ID NO: 182195 - DNA, 320 bp, Zea Mays
caaggtggcgcgaccgaaggggtatgcaagcgcgccagccgttggatctcaacctgacggttgcgattagatcggtccatataatgaaccggtatgcgattgcggccacaggattctaaatctacggtcagcatttaatgggacgcgattcaataaggaccatccgatccgcccaacggctcggatcaaatcaccgaaagggtacactctgctcttaatcggagccattacttccccgatcaacggctcaaaatccaccgtggaaccatctactcttagccctccgataatgatcctatggcacagaagccatcttctac

SEQ ID NO: 182196 - DNA, 433 bp, Zea Mays
ttgaagtagcctgtatgcttgtgaagtgcctatgcttgctttatggcaattgaaaagagtagtttttacctgctcactgacacaacgattggatcgaagtaagtggcgtttgctgggtgtcacaaactcatggttatgtccctcatgtagacctgttatttggtacttgccttcacttgtgcgcttaatataaatataagcttcacatccacatcatgtctccctttttctgcgcatattcctagaaggatctgtgaatttagtttgttcttttgatttatatcctgcccttgcacacaaaaacgcttccatttaagcactccattagaatcaaatctcttttgcccgatacgaacagaaaaaccagtttcatgtgcatattccttataaaatttctcaacagattctacatcgtcaaatgacattcctctct

SEQ ID NO: 182197 - DNA, 437 bp, Zea Mays
cgagttggctgcaacagggatggaagcacagcagttctggaagcgacgccgacgaagaatgtccaacattgcgcaccgtgttcatacacccgccagccacattgttatcatcatcggggtcagcagtagaggtgcacacactcgccaaggactgagcattcatgcggcgatgattgcttggtgcacgagctaccaggcgccaatccagccgctgagcagagaggtcagcccagacacctgaatcaatgcgtccgatagcggcagtccgctacacgatgtgagggtgacaagcagttgaagcacctacccttcaagtctttagggatagggtggcaggggcgaggtggaacgcgcaactgtctcagacgagaccaccagcactcatacatctgccaaccagcatcatcccagtcaacctggtgtaaggacttccagat

SEQ ID NO: 182198 - DNA, 416 bp, Zea Mays
tgccgaggccggcgaggatgacgacgctgatgtcggagctcgatcgctgaagacaacactgcatggacgtggcgccgttgcggaggcggccgagaactacgctgcgtggatggggtgccggtgtgaaggcgggtgaggacgacgtcgtgtggacggggcaacggtgcggaggcaccgtggcaaccagaggcagggctgcgccgcgttcgagctaaggctgggccggccggtgtggcttgcgaacaatggggcgaaggtggcctaggacggcgcgacgtgttttcctgacagctatagcagatttgcgggcgaggacaaggtgaggcaggcacaagcaaagaaaaaacggcggcgttactcataaagactagcttccgagatgtttggcaggtggctgtcggaagttacgcgtgttt

SEQ ID NO: 182199 - DNA, 460 bp, Zea Mays
gcgtggtttagatcccaggaaaacaccaggcgatgatcatgatcctgcagctgtggcgagatctgcttttccctgcctgcctgctcctcgtggttccgtgaatgaatctcatcaagcggttcggcaaacctctctctgtggggcagtcgcgagctctggtcatcatcattagtcggtagcactactgccacaagagcgcatgggtgcaaatggcacttggccttgcgacctttgcctgatgccattgcacgagcacgcacatacaggtggaagcagtgggcgcggggctttgtttgcaggcacagcacagcattgtaatgtaccaggtcacatgcaaaatgggttttccctctatttgcagtgctgaaaaaagggacccatatgtagcctgggcattcaccacccacataattcagacaggtaacctgggtcctccagtaattaagacagcaagattttt

SEQ ID NO: 182200 - DNA, 473 bp, Zea Mays
cagaagtgttgtacactggtaggcctaacagcagcatgggtcaatccctacgagaccttgagaatgaccgtgcagatttccaatcgacaccacatgaccctcattctgtggctggagaagctaatttgctgcaacataatgtcccaagggacagtgatctgagtcctcttggcttactttggtctgagctggaaggacgtccaaaacaacctctctcatctaatgtacttagtgtaaatgaacgtagaaatcccaagcctacaacacccaaggacattccacctgtaaacatgagacaagggccacttagcagaatgaatgaagtttctagtgtgcgcgatgagtggcctgcaaactttggtcggctggacaacatgaatgatgcaaacatttctggcagaatccatcaggttgaagcggagcatcatttgaattttgatgggcacctgctgcttcaacagatccgacgggag

SEQ ID NO: 182201 - DNA, 670 bp, Zea Mays
tgataccttagctaccataaggatgaaattgaagaagcggaagaaaggcaaggatagtaatgattttgatgcagtggctgaatgtggacccgaggttccggcattggttcaacaggaaggtgaacgggctgttgttgatataggtgatggtgttgctgatgagaagagcaatttgaatgtcgtgaaactggagggtagtgatgtttctgggaattgtgcacagggtttggatgatttggggttgaaagactccttggcagtgctgtttacaagacctggtcggaagtcacggcaggtctcagaggaggcagaaggcatggaagtttcttgtccgcatgatgaggatggtcttaacaagggatctggtttggctccagacacagcttccaagggcattaaaaggagaaggcgacgcacaaaggaagagatgaagaatgcttctgtgcaggatcagaaagcctcattgcctcggaaagcaaagacaaatggtagcaagtctactaaactctataaggtcggtgctggtcctgggcaagctttgggaggattgtcttctgtttctcctcaactggaaaagtctgggaaagagaatgctgtagatgatggatcattttaccaatcattaggtgaagtgcttctacaagatgtggaagccagcaaagtactgaag

SEQ ID NO: 182202 - DNA, 422 bp, Zea Mays
aacgaattatattttgggacggagggagtagaaaataattctacttgattacatatgcgtccaatgttcaggaaagtatctatacagctggcatctgatgcattgtttccttgtcaacaaaaagggaaacagatatcaactattcccataggtaaaaagggaaatgtatgccaaagctggaaatattgtgatgtaattaatgggttattgctataagataatttatagcatgattagtaagtagaacaagtgtgttttagagagcatgcatcgtcatccactgcctattaatggaaagaccatgagaagaatacccagcagtccaatctcagttcacaagcagcaggaaacatgttatagttacaccaggactgagtctgatagtgattcgaaaccagcacaaacaactccgactacacgct

SEQ ID NO: 182203 - DNA, 328 bp, Zea Mays
gctttctgaacaataagtgattgttgctcctctgtacatactccaactaaaagcttcatcccagtcattagtgagtcaaggaggccctgaaaaagaaatatttagtgtgccatcattacatgcaagatgtatcaccataagcacaaggtactcttaataactgggttaacagaaatgttcgatttaatagagcttcacctgtgagctgattctatctaacacagtcaaatcctcagtctcatccaatagatgcagtgcaaagctcaatgcaagttcattgacaccaccagaagctaataacctgcaataaaggggatattactcaggg

SEQ ID NO: 182204 - DNA, 343 bp, Zea Mays
gtcgacacttgtagcttttaaataacacaattctccagttgacataaagtcatttttatgtacccttatgattcctcgtgaaatcccaaaacgagaatcaagggcttccgataacctagcctcatcagtgcgcactgagctaggttgtgaatgtcttccattcacaggataatcaatatcctttaggtgtccaccaacaccatgttggttaccaacgaatagatggtctacatttactatctcagaaggtctagccttcattagcttgcaagcatcttaatcctaggatttgtgaccatacttctccccctcttatttacaacattattgtaatagggagttg

SEQ ID NO: 182205 - DNA, 314 bp, Zea Mays
aggagtcgggacctgctctccccttaaggacaggtatggtgctcgatgtgtcccaaggataaaagtttgaacaccctcaggtgggaccctgacccctatgtatgacgtgcagacccccatgggcgggtcctggacctccacgtgtaccttccagaccccctcattagggacgtagacctctctgtctgacatcaggacccccagtaggcgaggcccaagacttcaggccagcatgcactcttggtccctgctttccactcgagaagggttctgaagctgccacgtggtccatgggtgcatggcataagccattg

SEQ ID NO: 182206 - DNA, 1545 bp, Zea Mays
cattttggtattctttgtatggccttatgttatgctgacatccagctgcgggacatgtgtaggcagaagccatggttgctgaatggaaggagtttctttgggatatcccacaagaacgtgcagccttgtggggtcactgtcaatctctctttatgagatattctttccctcctttaaaggtattcttttcgataagtaaaatgcacagaaaagctgtactccctccatttgaatgcaaggtgtcctagttctatgcacatatatcaaggaggcattaagactcagtaggtagcagtgagaaaagacgagaatagagttccgctttctacctaagaaacaaccatgaaatgatcaatgccatctagctgctgcatttgttgagaacatctttcttacattctatgtttgaccactttattggaggcaccttttcagttctattgaaagctaaccaattaataagagcacattaggaacactcatagatgcatgcttgaagaatgtagtatgcctagtaaaaaaactgtctcaaatcctaaacgccttgtattatgaaatggagatcactaagttttatattcattttctgtacatgcaggctggattatttttccttaagcatgccgaagcagtaggaaaagagataccagcacaagagcttcatgaaatattattgctctctttacaatggctaagtggaactatgactaaatcctctccgtaagcttaatctttttatttatgttcacattgtgctcaatcttatcttctccttgccgattagcacttccgttttgcagggtctatcctcttcatcttttgcgggaaattgagactagggtgtggctcctggctgttgagtcagagagtcaatccaaggttgatggtgaatttgccacttctgctgttgctcataacaaagctgttggaaacagtagcagtattatagaacatactgctgatatcatcacaaaaatagacagtaacatgagcttgccgcacatgaaaattacagaaaggaatagcacacgggacagtttatcataccaacatgtgcaactctttgagtctaacagtgaagcatcttcaacaacaataaataacacgcgagcaaagcgaaggatgaaaacaaattcaccacttaaacgaggtgtcaatgacaatattgaaagtagagctaatgagctggataacaattctaacactttacatagttcaaagattggtgaacaagctagaaatttgctctctgaagaggaatttgtaaagatggaagcatctttatctggttgggaacaaaatgttaggcctgtagatatggagaaggctgtgctctctttactggaatttgggcaaataactgctgctaagcaactccaacaaaagctgtctccatcatatattcctgaagaacttgtccttgttgatgttgctttaagaattgccaaaaacagcagtaatggagagatcaatttgtcatgctttgacacacaggctcttcggatacttcagtcactgagagtagcaaatagctgcgatatgatt

SEQ ID NO: 182207 - DNA, 350 bp, Zea Mays
cctgttcctcgagttcttcatccagattggttacacaaaaaggtcagggagaaagatgatcgatttcggcagcgtaaactgcgtgatatcttcagtcccttggctaaagaagaggggctgcataacttgaataggactggagatatggaagatttattaatttcaaacaaggatttgaggaaaaatccttctcatggtttagacattgacaaagaaaacaatccaaatggagcatcagtgggatctggtttgaatattagtaaaaaacaacaaaactgtatgactgggttaaatgttccttgcacttcacaaatccaaaatgctgcttcttatgaaacagttgataaggg

SEQ ID NO: 182208 - DNA, 290 bp, Zea Mays
ttcgcgtttagtacaaaaggtccagaagagttaatatatgttaatacatggaaagctggggatgaactgaattggatttacacttttcatagcagtggcaagcaaacaagcactgtgggaagaacctcaaaggacaggcatgggtgtctacctccaattgtaggccagatgcatgtgtcttcctttttgtactctagcgttggagaagatggtattttaaagacctcagccaccactgaatttgttttgtatgacattgctcatgcaagacggagttctgctgttgagag

SEQ ID NO: 182209 - DNA, 2295 bp, Zea Mays
tcaggctcttgtcggtgtatatgcaaaagaactgcatgttaggcttgcctgcttaactgctataaaatgtgttcctgtgcactctgtgcaacgagatttgcaggtgtcaacaagcctctggattgctgctcatgatccggagaaggtttgtaagataacatccctgtgaacttgacttggaactcctctatttttttacgttactcatgtgggagcttccagcactggttctgccctttttagtgaaatatgttgaacttttttcattctagagcaggaaatgatgtttattttcttgctcttcggctcatgtaccttctctaggtggttgctgaattagcagaggaattatgggaccgctttggttttgatgccatcactgattactctggtattttcaatgcactttcccataaaaattacaatgttcgtgctgcatctgctgaggctctggctgcggcattggatgaaaatcaagacaaaatgcaagtaagtcgcctacaatgcaaattttctgttctgtatttgcaccccttctgctactatatagatgctcaagggttttgcaagacgagcaaaggcacatttaaacaccgacattagtttaattattactattgggatgggatgttgttttactcttcgtgaagacatttgaactggacatggacccactgaactaagatggcatgtagggacaaagaggtaatagcacatctcaaaatcatagaatgacatccatttaaaagctggaagatataatgccgtgtatttgggtacggtcttgtgtttctactgtatctttaatttcacattcaaataaaacttgaatagaaccacgttgatcggagattttttttgccaatttggagtaatttctttttattgcgggtgtcatattatttcaggatgcactttctacccttttctctctgtacattcgtgatattggcactagtgttgaatttggagatgcacactggctcggaaggcagggtattgcattagcactccactctatcgctgacgttttggcctctaaagatcttcctgttgtcatgacatttctcatctcacgcgccctggtcagtagtttgctttgtttatgtggatcttaacattgcagtgccacttatatttaacttttaatgcttctcatggtgaacttacaggctgatccaaacgtcgatgttcgtggtagaatgattaatgctggcatccttattattgacaggcatggaaaggaaaatgttcctttgctatttcctatttttgagagctacttgaataaaagggcaagtactactttcctattaataattgtactaatataattcaatatactacattcctattaataaatttattaatatattattgtggctctttgttttcttatttgctatgtaatccatatataacaggcatcagatgagaaaacatatgatcttgtgagggaaggtgttgttatttttactggtgctctggcgaaacatctatcaaaggtgtagatggatactgaactatcttttatttacaagatacattcacagtactaaatatagcatttgtaacaggatgatcccaaagttcacagtgtcattgaaaagttgttagatgtccttaacaccccatcagaggcagttcaacgtgctgtctcagattgtttgtccccacttatggtatccaaacaggtgtgttttgttttgtacaattggattttggttctgcattgatgactctgtatccatttgttacccattttttttatgctttcctttttctgatttattattaaaattctctattctttatataaccaggaagagggtcaggctcttgtttctagactcttggatcggatgatgaaatgtgaaaagtatggtgagcgacgaggtgcagcctttggccttgctggtgtggttaaaggatttggaatttcttccttgaaaaaatatggcatcgctgtgacattgcagaaaaatttggaagacaggttgtctactttgttaccttatccactagtgctatatatagggatgttgtaaataaaatcagtattgcatccatctgtcataattttccactaaattatgtgctgcagcctttgtattcagttttcatgtcttgttattctctaggcatttgagtaaagtttatctagggtattcaatgggaattttctgattgtcaaacattatagtgttgattttttttttccatttgtgcagaatgtctgcaaaatctcgtgaaggagctttacttggatttgagtgcctgtgtgagaagcttggc

SEQ ID NO: 182210 - DNA, 422 bp, Zea Mays
gagagaggagagagaaaaaaggagcctagcattggtaccaagttggaaaatgtgaaaccctaaccatggttgggtgtatattatatagagcagttaggttggccaagcccattacaaaggggtgatcaggtaaatacaaggggaccctagcctaaccctaaacaggagtctaatagaaaggtgtgacctcccccatcctgaagcttgctctctttgtgatcaagagcaagaaacaattcaacacctttttgttagaatagcaaccgggattgggtaagcgtctctgctaagaaggcagtccgcaatgatcgatttatataggcagatgactgccgcgtataaaaacctaagggttaactctgcataacagaatctgctatattttaggctagttatctatagtagagttatctcctggatta

SEQ ID NO: 182211 - DNA, 367 bp, Zea Mays
atagcctcgccctttgaccggtttgcaagtagagccaacaccgggtagtagccgagcagcgaaaagcgtagtggtttggtgagaagcagttgaaacatttaccctgaagcttcgatttgaacaggttggagcttgatgcatcgatctgctgctgagattttccaagatttcctaggtttttgcgccaccagtaccttggcttgacttccgtccaaccatcttcttccaccctctgtgaagcagacttgctccgattgatggcgagatggccattacactccggcgagcatccgctgaccaggacgcgctgacgtgatggggcactatccgcattcaaacccctcgcgccgctgcagatctgacggac

SEQ ID NO: 182212 - DNA, 356 bp, Zea Mays
tcctcttctacctattctgcgtttaaagtccccgacgccgttcaagcgcggccgtgctccggcgagccagcagaccggccgaacgggactgtgaccggtgcctagctttggcgtaaaccgaattcactacctgaagaatgtttcccctaagttaatttgaagaatggtgccctaatttgccctgaccacggcaaccgtgagtattgcggctaggtggtcgcgttcccggcgaccataggatttctaattcaattgcatgcgtcggtgagtttgagggaagcttaaggatgctaaaacgagattggggagggcgtgatcggacctgaggagggctggccacgacgagcttgggttca

SEQ ID NO: 182213 - DNA, 307 bp, Zea Mays
tttttggcctcttggtgacaaagtggacaagcagccaggtgggggagtcccctcctctccaggcgatctgcagtccaacaactatcttgcaaaaccaaccaaatgaagaatttgcacttggcaggcggccaagacttacataccctctcaaagggcctaaacatagtggacccaaaaaaggtaacctcataagctgacttagcggaatattcctttggactggagaaacgccaaaaatgtttatcagaaaaaccaggccacagtagcacactggaagtggcatcacatagctgtaggacctcaacaa

SEQ ID NO: 182214 - DNA, 1122 bp, Zea Mays
aactgccgcaaaaccaaagaagatgcctcaacatccaacttaagcgcaatcgcctctgcaatctctgcaatcggaatcaccaagtcactgataacaacaatagacactgcattcttcaaatcatcttcagcctgcgttagaagattattccagccaatgatgcaaggcacatgagactgtactgctattccttccaaaggggtctcatcacttcctggcaagacagctccatcttggccttgaccaggatccgaaccacccctcgacgatgaacggcgcttgcgatggcgcctgcgacgtgggcgaggcgggaggggttgctgcgagtgtgcggcagttgcgacctccatgaccgtggacgatgtcgcgacggtcgtcgacacagtctccttcctcttctcaccttcagcactagggggtgaaatcctgcgccaaaccttattacgaccctcgaatcgacttggatgaaaagccgggatgcggagccggttccaaactgacgctttagaagcctgctgcgaaggcttggttacagacgtcgtcttcactgctgtctgaacaccggccgccggcgcagctgaacccagtctatcccacacggagcctctagataaccgccggtgaaccgtgagcctgttgtcgttacgcatcggccctggacatgtataggatcgatgtcccagagccttgcagcgaaaacaccttggctccctgcggcacgacacagcgaagtggtcgtcggcaaagcagttgaaacagcggccgatcaagtcgacgggcacagccttgctagcccgcaacaatttagcactccgctgccttgtcttcttcgaccttactttaacccaaccgtcggcatccttcttcggggctctctccagaccacgaaaccagcggtgcttataccccggcgagatatgggggctctgtaccgcgatctcaagtggggagggcacactcgatgatggctgcgtagcagttgccccggaagacgactgctcggcaaggattctgggcgacggcgaccttgaaatagcaccaggagaggatcgcgggtggaggacgacgtcacgaaaagacggtcggttgcccgccgccaatatggactgatctccgtccggc

SEQ ID NO: 182215 - DNA, 415 bp, Zea Mays
taaacatctggatcgtgtcccacgtaaatatcgaagcacacgaagcaaatgaccataatgaactgaagttggtgtggatacaaattggctcaacatatgaacagcatgagcaatatcaggtctggtgatggtgagataaacaagactacccacaatatgacgatatcgagtggggtctcctagtggtgtcccatccttcggacgaagttttaaatgaatatccattggtgttgcagctgtgcgagtatcagtaattccaaagcgatcaagaagatcttgtatatacttggactgagacaggtaaaaaacttttggagtctgctgaacttcaatgcccaagaaatagctaagtggacccaaatcagacatctgaaattccttactaagatgctgcttgacatgagaaatatgttct

SEQ ID NO: 182216 - DNA, 383 bp, Zea Mays
ttcagactgagatactagattccccctccctcctgtgccgcacactgtccctgcccctgctgcccaggctgccagcctcctacggcacgggcaccatggccaccgccatgtccccgtcgtcctttgccctccaacctccttccactacaatctacgcttctcatcccctaccaatctaagcccatcacaaagacatatatagtttatcattatttacatttagctattcagtccaatattatacaccttccaagtggatcccttctatcccacagaaaagtttgccctttctgcacttgatacccttatctatagctaccaatcctcaaaagttgttcatccatattctttattaatgataatgataggtaaagttctgaaaa

SEQ ID NO: 182217 - DNA, 576 bp, Zea Mays
cccacccggagcggtggctgtctccccagtgattaaccaccatcgcatggtcacgcgcgccaaggctggcttccgggtgccagcattgttccacgccgcccctctatctccaattccgaagactttccgtggcgctcttgctgatcctaattggcgagctgccatggaagatgagtatgctgcactattgcagaatcacacatgggatctggtacctcgaccccatggggccaatattgtgaccggcaagtggattttcaagcacaaatttaatgctgatggctctcttgaaaggtacaaggctcgctgggttctccgtggatttacgcaacgacccgacattgattttgatgaaaccttcagccctgtcgtgaagcctgctactgtgagaaccgtcttatcattggctgtctctagcagctggccgattcatcaacttgatgtcaagaatgcttttcttcacgggactctttctgagactgtttattgcagccaaccctcaggctttgaggatacagccagtccacaacatgtttgcagactcaataagtccctctacggactgaaacaggcacc

SEQ ID NO: 182218 - DNA, 371 bp, Zea Mays
cgaggtgttgaggaagatggaaccaaggtgggccccacgtttgtttttctttcacgtgaccagtacagcacgtagcatgtttggaattgcttaccctccaaatgtggccatgtggtagtgtctctttggtctgcaagaccttctgtggccatgtactgtatagtcctctgcgtggccccggcgcaacagcaatcttgccgttctcatgcctcgccgttgactagtctggtcgtccgctgtcgttgcgaggtgagcatcgtctacacgttggtaaccttgtttcactatgtcgcgcattttaaatagttaattatatttttgtttaactaacgttagtcatttagacttttcaattaaactaatttatagta

SEQ ID NO: 182219 - DNA, 395 bp, Zea Mays
agtcgctgatatgcttttggatattatacgcccacatattaatcggttgcgtgatgctggtgtgattgaccatcgggactattcaaatgtatgtttatcatacctttaaaatcacaatcatccattccatgcatttgattataagaatgtttatccacttgtgacctgattatcgttagttgctcacatgatttcaccagtggacccaatttgaactgctgaaatttaaggataaattcaaggaagtacccccaccaaacatccatgaaatcgagagaggggaaattgaaagatcttttgtaattcttggcccactttgtcacacaaggaagttgcttttgagccatggaacccaatttgcacatgggtatcttgacaaacgattgaagggaggg

SEQ ID NO: 182220 - DNA, 733 bp, Zea Mays
gaaggacaggaggtgcggcgaggctgagaagagggcatcggcgccacgagatgtggtgatgagggacgacatgctggggaagctggaggaggagaaggccgctgtccagtgtaagctcaagtggaaggatgagcagttcaggcacctcgaggaggcactcaagaaggttcaggatgacttcagggctgccaagaaggagtggggctcagatagatcaactttggttgatcggattgacactcttgaggctgatttggattccaagatcagggttgcagaggatttccggtccaggctggatatgtgcagccaggcattagcccatgaggaaggccgcaggaagcgagtggaaacagagatgtctgagttgcgccacatgtatggcaatgtgatctctgaatatcaaggggccaaatcaatggtcgagtcgttgagctccaagacagatggggatattgcatatttgagaagctcactggctgagaaggccacaatgctcaaggaaatagaatacagtaaggcacgtattgaacaagaaaatgaggatttgcggtcaaagctcaaggagtatcaggaggcacagattggtggtgcagatgctgttgtatcattgaaaagtctgcgggagaagttccgagccctggagcagacacatagaagttgcaccgagaagctaagaggtaaggaagaagaatggagactgcagatgacaaagcttgtgaatgacttggat

SEQ ID NO: 182221 - DNA, 865 bp, Zea Mays
catttcacctgtctctgcttcagtacctgcgggcactgtactaatgaaggaactaggtgggattaagtttacgaccagagttcagcctctccgtcttgctgaatggaccaaggatgacaagtttgccttctttatgagtggaaggtttgtaaggccattcatattgcatagtgcacgatatgcgattttaattgtctctatttaataatatgttagcataaattatcagaaagtacacatttcgggagttcgagaagatggcaaataaagaatttgtacggagatactctagtgctgcttgtcttccatcaaggtatatggaagaggagttttggcatgaaatagcttttggcaagatggagtctgttgagtatgcatgtgatatcgatggtagcgcattttcttcttcttctcatgaccaacttgggagaagcaaatggaacttgaaggtacttattttgtggcccagtttgtacagacatttatgtacctcttaattttacgcaatgcctaaaacttatcttgcactgctttacctattttgccgtataggctggatacaatctgctgatattctgtgtcatgactctgctgaaaacttgtcttcaagtgatatacacgatttttctttgatcattacacagtagggatcagtctaaaatagtaaatgtagcctgtctaatttgtatgagtatttggtaaacaatgggaacattcttctgttcaagaaatcacattcctgctgttatttcttcatcaagatttctaaccctgatatgttttatgatcatttctggcaatgatgatgatgtcataaagtatttttgtccgtgctttgatccagagattctcacggttgccgaac

SEQ ID NO: 182222 - DNA, 457 bp, Zea Mays
caagtgttgtcgataagcgtctgatactcgttcgccacaacaccacaatcaacatgctctggtagttgttaggaagcagagatgtcgatgtgacaaagaccttggttgcttagcacctaattgagtcaagcccgctagaggagggaaggcggtggtgtcatgcgttgcataggccatggaggcggcgcaagcggctataacaccctagaagggaccctcgagacagttggggtgcatggaccacatggggcagcagggacagacacaacatcgcaaagaggctgacttgttgatgtcgtggtagtggacgactcagcccgtccatcgcaggggacaagaacgacgatggacgatgctagttgacaatgccactaaagcgatagtcagtaggagccaacaaggatcgacattggtagatgacctcaagccgagagctctcgctcggagctatagcggg

SEQ ID NO: 182223 - DNA, 382 bp, Zea Mays
tatagctagggggagggggcacaccaaatccctggaaataattaaacatttaaactagtcgacacacatgtacatgccgtttgttaatagtccgtgttaaacaacacggctgcatgatttgttccatgaacatgtgcgcttgcattgcatgcatcactttcagacatgtgggtggtctgcaaattccaggcgtacgcagatgagccagagaaaaccacaccaatcacctcgcacttgaattggaattttcggaaccaccaccaacgaccgcatgactatgctgcatggaacttggacgatggacactatacttaatataaactgcacgatcaccctccctccacatatgccacaacagagttaacaaactaaattaactcat

SEQ ID NO: 182224 - DNA, 531 bp, Zea Mays
cactctttcacgcaattattagaagagtaattcatcagaaaaatgtctaggcagcagcacggcggagcagcattctataggaaatccaagagccttcgccccatctctaaacccgttgcctcctctgttatctcgcctctaaaccattcctactgcggaactttgggaagccgaacccaaaatagaaattgaggcggacaaaaacgcgattcgcccacccagaacacctcccgaacgaaccaaaacctgttcagcgacccagagagggaaaaaaaggaaaacagagtgagctcctctctcctccacaggcgaaattacccgcgaggctccccgcaacacgacccacatttcggcacgcaggagagcggaaggcgaacgcagaccaaccacataccctccagaagctcacctcgacggcggagcagatcgggcgcgcccgccgagtcccgtggtccacccgatcttcggagaagcagattcagcggacagccccagaccaggcctccccctcctccctctgggctccgcgga

SEQ ID NO: 182225 - DNA, 323 bp, Zea Mays
taccgtcgtgttcccggcgaccagaggctactccgtgcaattaagtgggtcgatgggcatcacaggcatacgagagcacttaaacaaggtttgaattgggcagagttttaccaacacaggctggccacggtgaacttggtttcacggtgttcttcgactgatttggggggaatatgaaattggagcttgctggtgatcagctgggagcaatactaggtgtgggggtgcgcaatgatgttgcaaagctagttacgggctcaatttataggcagcttcgtcggtggcactcaatttgatcgaacaacgcggcggccggagataag

SEQ ID NO: 182226 - DNA, 1193 bp, Zea Mays
ccggacactcacactcccctgctgcgcctgccgcctgcgtttcggccaccgcactacttccccaatccccttgatatcgcccacccgcgctcgccgccgccgctgggcggcgatggaaaccctaatggtagaccgcgtccacagtagcctccgcctcttcatgtaccgcaacgccatattcctctgcgagcgcctctgcgcacagttcccctccgaggtagcccccttttatccatgttccttaacgaggctagtacgtctcgattcggtgtattgcgcgtgggaatggtacatctgggggtcggatcaggcgtgtggcagtgatttgagcgcggggctcacctccgttgtttagttcgattcagtagtcttctgtcgttttttttgaagtgtctagggttgcattaggagtagagtagcagagtggtgagcttttggtctgtagcttatctaggcttgaattagaacagctctctatagctggtgtagggaactggagtatcccgcgtgattcatctagggttcatagtgaacttttactggagagggtgattttctgcctaaatttttgaggcaatttcacaggtaaaagctctactggtgtttatgcataatgggcattggttacagtaacgtgtatgcctgtgagttcttttccttgtcagaaccttggggtgacaatatttatagcccattaggtattcagttgcttgaattctatgttcttacaggacatgctcacccactttcttttctaaccttataattacttgagggtgtgggttttaattttaattttggttcttgacgtggttcatgggtcttcatgtgggatgaagttcaggaatttgaatgcatggttttgtgttttagtttttatttaggttcttgatgtggatcataggtcttcatgtgggatgaaagtcgacataacttgaatgcatgtttagtgtgtatgagactatgcattcaatttcttagcagatgacctcactgattaacctgaatctgtgcctgctttacaatgctttcttttcaattagtaattcttgctcacaaaaaatcttagtttattttttttaattttaagtccatttgcaacatagttgtgggcactaaatgttcttgctctacctcctctgcacagaccaatgtgcaattgctagcaacctgctacctacacaacaatcagc

SEQ ID NO: 182227 - DNA, 274 bp, Zea Mays
gcggtggcctcaaacgttagaggagaggtcatatcgctttcatcctctacattgtcggagggtgagtcaaaaggttggcccttatggcggcgaactacatcgctggttccaccggccggcgctgtagacaccccagtcattgtcggtcgtcccgtgatggccgtgaggttggttagtgctggcccccaacctggtcatgtaatcttatgctggagggtcatcgcttcctcctcctcgcccctcatgtaccgtcttgcaaggtcgggtcctcatc

SEQ ID NO: 182228 - DNA, 460 bp, Zea Mays
cgacaaatgcaaacatcgaggaacaccagagaagaaggttgtagtcaagggtgtgaaagggaaatgtgttatatgtcatttctaacttggttttggtgattaatgaccaacacaaccccgaatactaactagtttgctaagtgtacacttgcaggttcataagtgccaatttgtggagacaacccaacttgtagctcaaacaaaggtaaaataggacaaaacttggatgaggtgagctatgtctagttcacaagtttggataagttctaactgcccttaggaatgtttttgagcatcttagagcctttggattgacagatttcagaaaaggtgtatttggagccgagtttgagcctagaacaggaatttgagttggagtcttcaaaaaaatcaagtactatggcttagacctgatggatagtctctaaataagtttgtttaaggcataggaaagttgtca

SEQ ID NO: 182229 - DNA, 375 bp, Zea Mays
atttggaacgtctgattgatatattttcgtcgacggctttttctatattcttgctgggtttggtgctggatgattgtcccttgcattggatctactgaaaatccgctctttcataggatgggaatcgatgtaatatcattgatttcatcaggacctctcaaagattcggtttttatttgggcacacactaggttcggctagagtacttgtgctgctcccacctacgcatcattatgctgtgcaaaattaagcattgacaggttcatcgtgatggcatgtagtacctataccttaaggcacgcgattttgttagcaaatgatcattctagactgcggcatttattatacacacattaaaaagatattgtcacatat

SEQ ID NO: 182230 - DNA, 438 bp, Zea Mays
tgcatattcaactatcgagggcaacaggctacagttcatagcaagccaccaaagcgaactgcgttcagaaactgtccaaggcatagctgacgccattgataagggcttcctcaatgctgattcgattggcggtcgtgtagttgttcctgccagcttcactggtggtagaaggtaccatgtcatgaattaccaggacgcgatggctatatgtagggtatacggacctccagatctttttgtgacttttacttgtaataccaagtggagggaaatagccgatgccttacgctttgaacctggccaacaaccatgcgatcattctgacttggtggtgcgtgtgttccatatgaaagtaaacgaattcatagcagatattagagagggaaagacatttggttcgatacttgcggtcctatacactgttgaattccaaaaacg

SEQ ID NO: 182231 - DNA, 381 bp, Zea Mays
catttccggtgctgcgggcgctgcgcatctcttgccacccaggtgggagtttgtgggccagtccgtttgaaaccgtgacactgtcgtcagggcccaccgccagtccaccttttcctctcaccccatcccatctccggatctatcgccctcgccatcggcaatcggcatcgccaccggtagtgggagggagcaagggggggacccaggccaacgccgcgcacctttgccctcttatcatcatcaacatcaccacgggcgggggagacggccctcgaagcgtacccgtccccatcctccttttccgaaccaccggagcgcggcggcgcggcgcgagacccttcccggcttctactcctccgatcctccgcaccggctgacgag

SEQ ID NO: 182232 - DNA, 663 bp, Zea Mays
gtggaatagtcatattcgtttgttcattaatggattttgtaacattctgccaaaaaaggtgagtgaattctgctacatagatgccgttctcaacctctttgaaacacgcatccacgaaaagtgtgtccaatacatcaggccgtgccatgtccaacggatccctccaacctaaaagggaaaaaaagatgcaaggagtttaaccatctgttctgaaagtattgtatggatttctgcaagcaaatcgtgtatcggtgttccagggtgatatgccatcccttgcgccctaacaattttaaacaatggtcagagaagtgaaacacaaaatagtacaactatttattggactgggcaattactgattatgtgctgagacaaagctgacactcgatacttctgtagcaagcaatcctattaagtgctctataatttaccactgtatttccaatattccacaagaaccttaggaccaagaaccctacttcgtggtcagcagatgcgaaggaagaggaggtacctggcaatcgactggaccgacaaggtgaagaccgagtcaaacgagaactgcaaccggcgatgcgacggctaaacctcaccaaagagccaccaccgatccagcaagaatatgggccgactatgcgtcggctgtattggtaagaaaatttg

SEQ ID NO: 182233 - DNA, 643 bp, Zea Mays
cactctgctgtcgcgcgctctcggctatgcgcatacaccaacagcagggtctccatggctggcttgggagcttcaccttgtgtccgggagggcgtctgaagtctcgccggcgcgtgtggtgcgcggggcaactggcgatttctcgccggagttggggatccgcaccaagctgtggccgggtgtccctgcttcgctgccgtcagtaagttccccctctgcgtgaccaccatcatcccctctttgcgttgcactggttggataggcaaactacgctctggtgcgcatttgggtgcggctccggcgaactcgcgaccaccgtcgatcgggcgccgccgctctgtcggccaggatggaggacgatctctcagccgtctatccggatgtgggcggtggagattggatgtcttgataaccccttcgtgacgaaatctgggtcgtcgatccgtgcgccagcggtttggatcgaatccaacgtgtattgtttcgttgatcggatgctgaccctcggattcggatcgggtggtctgagtgctctagcggccgcgatctaatctagacggttggatcatatcgggcggctgtgatcgaagcttaccccttcgcttggaatactttctaaagagaccctcgtcttttcctaaac

SEQ ID NO: 182234 - DNA, 334 bp, Zea Mays
gtgcaagaggagttggagtccctcctttctatcatgatgggtttcatatcttatgcctcccttgttacctgcgaaggggcagcaaatgccttgtcccgtgagggctgtaggcacttcgaagcctttgaccatagtaatgaggacttcgactagggagtgttctaggttgaagacgacgtgatgaaacgttcggccggggcgctatacgatcggatgtggggtccccacggtcgcggagtcgtctaagagagggttggttggatgtggggtccctaatgattgttctttttgttgggggaggatgctttttatctaatttctaatgctttgatgt

SEQ ID NO: 182235 - DNA, 685 bp, Zea Mays
gtcgactccgtccggctatcttctcggcgttgtttatccccttatgaactaggaaccataacatctggtatcatattccaggccatcctccccaccacttccgccacccaaatccatctcttcaccatcatccgacgcagcctcatcaacctctgctatggcggaacccaacacatccgatctagtcaccatcatctaattccttgcagcaacggtggaatacctcatgctgtcggccgccgaactccagcaggaccaccgaaccgagtcctctgcactgggcgggaagggacagcacaccggcgatcatcaccaggatcgacccccgcggttccagaagttggacttcccaaagtatgatggcaaaactgatccattggtgttccttaaccgatgttagtcctacttccatcaacagcgcatcatcgacgaggaacgcgtgtggatggcctcctacaacctcgacgacgtcgcccagctgtggttcatccaaatacagcaatatgagggcactccatcatggcactgcttctccgaactcctgaacctgcgctttgggcccccgtgcattcaaagccgctaggcgagcttgttgcatgccgccgaacgggctcggtggtggactaccaggaccgctttcaagccctcctgccacacgcagatctagagcaagcgtccagtgcag

SEQ ID NO: 182236 - DNA, 610 bp, Zea Mays
cagaagtttacctgctatagagttgatgttgccacttcttaaacgaggtattgcagtacaccattctggactacttccaataattaaggagctagtggaattgctctttcaagaaggtcttgtgaaagctctctttgctaccgagacagtatgatctctatcctgattatttcttaaacttgttttgatctcgtcacatgcagtgtaaggtagagttcagtttcttgaatggatttttttctttagtttttaaataggtaaagtaagagaactattgttgtacactttatgtaaatattgcatttcttactcttagtcgcaccattgatgagtaacagtcttgattttgatattgttctgcttcagtttgccatgggtcttaatatgcctgcgaaaacggttgttttcacgtctgtcaaaaaatgggatggcgatagtaaccgctatattggttctggagaatatatacaggtaaatctttcatatatgaaatgcaagtgaggcatgcattcagacatgtgagtttaggggactgatacaacccattcttacatgaactgtactcttagatgagtggaagagctggccggcgtggcaaggatgaacgtgg

SEQ ID NO: 182237 - DNA, 365 bp, Zea Mays
ctccagccacaccaccctctgcgcactggtggccgcgggaccatgagaggctgcactgcacaggatccacttgctgcaggcaacaccaacttcggcttccacgggaccgcctctgaaggctgatgtatctttacctccgtggtttcagctcgcgccctcctcttcgttgtgcaacgtttccttgggacacaggatgatgcttgcagttgcagtatatctagaataattaaaagatgagccaagatgtaaaaggttcatttttcggtgataggttaggtcattacaggtcgtttgttggatgctacagctcgaggacgagctgcttgtccaaggggatgtagtgtcagggcctaaggaggcccaca

SEQ ID NO: 182238 - DNA, 639 bp, Zea Mays
ctggccctggtttcgttccctctcgtcctgctgctcataatcccgggactcatctacggcaagtacctcctctacctgtcccgccggtcgcgccacgagtacgccaaggcgaactccctggtcgaccaggctctgggctccatcaagaccgtctactccttcacggccgagaagaggatcatccagaggtacacggcgatcctcgacaagacgatcaagctggggatcaagcagggcatcgccaagggtctcgctgtggggttcaccggcctttctttcgccatttgggccttccttgcgtggtatggtgggaggctggtggtgttccatcatgtgaccggtggaaggatatatgctgctgggatttccttcgtcttgggtggcctgtatgtttcttgcactcttcacgctttatctgacttcatggcaccatttggtcatgtagatgtagaagcctgcctaactagacaaacttactgaatgttgcagatcccttggaatggcactgcctgagctgaaacatttcgctgaggcgtctgttgctgccacaagaatccttgatcggataaaccgtgtcccccagattgatgctgaggacccaaaaggccttgtgctggaccaaatccggggagagctcga

SEQ ID NO: 182239 - DNA, 282 bp, Zea Mays
cagaaaactaggagataaactctcacccagcgcgtgacaaaccatcgcagaaaagggtccacccctcacactgcataaaccccctagcaatccatgtcgattgctcgagggctcgggggctacatctagcagatagtcttgtgcacaccaaagaaggcaaccgtttaggaaaagcctctacgcaactccacgaagttacacaaaggctcgtgtgctgttgtcggatacctaggaaccgggtgcttaaagaaggcccaaaaggcttccaaagacgacccacta

SEQ ID NO: 182240 - DNA, 281 bp, Zea Mays
tggacatcgcgcacgccaaatccacctgctggcgctggtgcgtggggccctccggtcaactacttcttctcccctgtaaccgaacgtgctcagctacgcaagcgcgcgggcgaaaccacctccgcgtagcccaattagactccgcgcttccactgtgctactgtcgccgccaggtggggccggatcgctgactcgtcgtcttcagcggattcggttcacctgttgcacgaaaccagggcaagatccgatctctccgccctcccatccggactccctcacaa

SEQ ID NO: 182241 - DNA, 531 bp, Zea Mays
ctcccacgacaggcacgctctctcgctctcaccccctctcacccatcctcgatcgtcgttggaaacggttccactctgccagtcacctcagtaggtgcctcgtaccacatcactcacaatcttctttctgtccgtcgattcaccactgacaactcctgttccattgagtttgacccctctggtttttctgtgaaggatctggccaccaggacccttctcgcccgctgtgacagctcggggccgctctacacgctccagccctccaccgccggcgtgtctccacctcctgtctgttatcgccttggcgaggaagaagcagaagacaggcaggaaggaaagaacacggataggcaaagaagcagactgactctgttctggtatatttcctgtctatctttccattacacgcttgctttatattcctgtatagctatggcctaaggcccattactctatccattctgctcccttgacacggagattaggcctacgaatgcgacagcccaccatttgaacgccatcccttggttc

SEQ ID NO: 182242 - DNA, 1109 bp, Zea Mays
gatcagaatggcaaagaatcctctgtatcaaaaatgcattttcttgagttggcaggtatgtactttgcatacgtgaactgcaattttatattctacattatatgactaaataaaattttattctttaatttttattagaccatatcaatgataagcaaaagagccatggtgaaagatttgttcaacaaaattccaagaagtccttatatgccgtgatggatgttgtgcaagctctaaacagccaccagagcttcataccctatagaaaaagcaaaataacccatattttgcaagactctttatccaagacaggtggtgctttattaatagcatgtttggtaaggatagttggtcttaatattttgtattatgtatttctttttggtgatttttaagataaatattaagaaaaataaatgacttcacatatcatagattaaatgtttacattattttatgtttattgttattttttgtcggttttgataaaagaatctctataaagttgaaggtggttttaacaatgttgctcaacaacatatttcttaaaataaaacatataagtatattctgtattgccttttgttaaaactcaaaagatagtatatccatgtagctgctaaaaaagaatgtatacagatacattttttgttgtcgctattctatatcttctttgttgtttttgtttgacagaatacacatttctaaagttaggttgcattatttgttataacattctatattttaccttaccatactattggaattgatgcattgttattgctactatgccaatctaatgctatgcattcttgttactatgccgatctaatgctatgcattcttagtgtaggatgaagtctcatgccaagatgcaatctctactctaagcttggcttcacgctcaagccaagtggtcaatgaacaacggtacaacttatccttaatcacaaaaggttgttcaaagtcaaatgtaaagctttcagtgaacaataagaatttgtcaagatcgttattgtcttctatccaacaacaaagtcccgtgctggagaagccatacaaaacccaagttaataacattgcagtaaaagcaacaagatctctcaatg

SEQ ID NO: 182243 - DNA, 363 bp, Zea Mays
catagcatccttgttttcgatcagcacaaaaatgcaattcctgttgcgtggattataacccccaattttgcacatggtgaaatatataaatgggtgggtgctctttatgatcgagcgcatacaaaagatcctacttggcaattgggtggcttcattattgatggtcccttgactgacgttcgcacaataaggtagtgaatagcttttttaaacttcattttgccttttccctgtgctgcattgcctgaccatataacatgtttaacagagaagtattccattgccctgtgctgatcagtttatggcgtatccggcatgcttggcataaaaatttggttaacaaatgttcagacattgagaagc

SEQ ID NO: 182244 - DNA, 647 bp, Zea Mays
tagggaccaccaaacctgcagccaagagctcagccacctgcctttcaatctcggttttgtggaaaggtgaatatctgtaaggtcgagagttaaccggaatagacccaggcagaagtggaataaaatggtcatacaacctggaaggtggtaatccagatggtaccgcgaacacatctttgaactcctccaacaacaattgcaagggctcctgaatttttttgttctctgtctcctgaacttgttccagtatcaccattacccaaacctcatttcctttcatccacttagtcagctgcagtgctgttacctgatttacctctttattctcattcccatctcctctcagttgcacctgcactcctttatcccaaaaagtcaataccttattttcccagtcacactccattggactgtgaattttcaaccaatcatagccaagtatagcatcataagcttccaactccagcactcgcatatccgttttgtacacctgcatccaccttgcagctcttccctccatgtgcatagaagccgaggacgcccacatgaactctggaacctgataaatcatgaaatactccaagcatttgttgatccaaatccctggctccaccccttgaaacttggggaaagacatcttgggcaaa

SEQ ID NO: 182245 - DNA, 521 bp, Zea Mays
gtgaaagcaaattaccagtgttcatttgctgtaacaactttgataaatttaggcttaatagtgaactaacttctgtcagatttcttttttttttcttgcttcaatcaagtgtggactgtaatgtttgatgatgatgatgatggagtggacccacaaattgaggatgtcaacagatactactttgaggatggtgaagagaaaccagtttgtttcagtatcttgcctttccagtttggtgaggacgatagcgaggcagttttcctcagaaaggatgttttcttgtgtggatttgtggataaaaatcttcctgtgtacaaggaggtggtagcttggaagataaggcttgacagtgagcatcccaacatctatgtgctttctattgagcacaagtggataaagctgttgaaaccacgaaaatgctatggagacattgttcgatcaacattgattacggtgcaaatgctccacttttttgggagaggggagcaaagaagttcgaatcacctttgggatcaccttga

SEQ ID NO: 182246 - DNA, 631 bp, Zea Mays
aagcttatgctaccaagcggctgcaatagaatctcacaaagcacacatatctgagtcatctactgaaccacttccaacatttgctgtatcttcagtagtttgagcactatcttcattatagttatcaaaatttgcatcatgtatggcactatctgtaatgaagctgtggagagccattgtaacaattataatttttgcttgtttgtttattggatatctaggcaagtttaaaataatatgccacttcatcttcagaactccaaaagaatgtgctactcaactaaagaaatatgtactgctggcatggtcaaatgcatcaggaacaaataaaatctgtacaaccgccatggttaatgggatgctactgaacgactaaaaaactgtactggtgccatggcctactgaaaatgaaataaatcacgaagggacataaatccaactacaaatcaacattctcaaaggcatgaatgaattcatcatcactgaacataaatgagggggattagaagaaggcataaggacagaaaaggcaaacctccaatacgagctgtttctgcaggctgtccacaagttgcagataggtcgaggtcgtcggaggtggactggatctgcaggccgtcgtcgtgggtct

SEQ ID NO: 182247 - DNA, 331 bp, Zea Mays
ccatcgaccacccacctgacgtccaagtcaagctctggacaagggaggtgagagagctgtcctacgacctcgaggacagcatcgacagattcatggtgcgagttggcgatggcaagccacatagtttcaagggattcattgatagaagcctccacctgctgacaaggggcaggattcaacacagcatcggcatagacatcaaggagatcaggagccgcataaaggatgtgagtgaacggcgtgacaggtacaaggttgatctggttccttccaagcctgttggcagaagcattgacaacctgcggctgtcggctctttacagaaaggcgac

SEQ ID NO: 182248 - DNA, 411 bp, Zea Mays
attaaggaatgatttggaattgaatgcaaaactacaataaattggaaatcctgatgttggcttagggcgtccccaacaattgtcgaagtcgctagctgactcggattctcactgacatggaggagagagagaaaacagaaaaataacctcgctggcgacttgttcatcgctggtctcactaaaaaaacaaggtgagagaagatcaggtagaatgtggaaagaaagtgaaccagactccagtggtgcctcttggctacaaatgctggcatgtgctcgctggaggagtagcagcggacgatgcgtgcgcatgggtggccaccaactgcacgggcgtcctaccatcgccctgccccaactacaaatccaaatttctatgaaatgcctatgggagtggagtgagcggcaaggcca

SEQ ID NO: 182249 - DNA, 438 bp, Zea Mays
cgattacggagcgctctgattagatcggcccctggccaaatcacccgcttctcatctaccgttggatccgggatccatggctgctaattcatgtagacgaaaacgatttggggccgttagatctcatccaacagcacatgccccaacccgaagaggtatccctggattctaatctcagtcgttcatcctatgatcaacggcacacaaacctcctcctacctcacgactcagagcacggcggcgtagcccaccgcacggcggcaagaccgccggagttgcaattccggtccccctgcccgccaatttataattcactcgcccctcgcctaattgacgacctgatgaactcttttcccccactaatttcttccctcgacaagtgcaaggcaccgcccacggcgcgccgcggcaacgcatggccgaggcgatccaatccgc

SEQ ID NO: 182250 - DNA, 506 bp, Zea Mays
cagggagccattaccgacaacaatagatggagtaggataccgtggcgaaaaagtgtgtgaaagattgctagaagacgtcatgtgggaactagcacctaagtcgaagtaccactcagtggacgggggttgctgcagcgtctccgtgctgaacgcagaggccaacgactgacccaagagggtaggctggccatggggtgatagaaccctggcgaagcccactgactgaccccctcctcggccgcggcacgagcctcctcctcggccgcggcgaggcaggcaacatccgcatcgtaggccctctggtgttccagggcgacagcactggtcgtttccgtggcttggcgggtagctcatcttgttgaacgcgggtgagggtggccgaggcggacaagtcaacaaggtcgacggcggtagcaaccaccttgtcctgggcggtggcgcccttgggcgatggaggcgcagtagcggacatggtgcctcacaggagggaggccggtgcgcgagag

SEQ ID NO: 182251 - DNA, 401 bp, Zea Mays
gttctggatgctcaagttctcatggagtaccttcaactctgggatgtcatggaaacagttagtcttgcgccgggggttagtgaccagcacctctggaccccctcaacctcaagacagtactcttcgagatcagcttaccagaggttctttataggctccatcgcttttgaacctgcccataggatttggaagtcctgggcccctctgaagtgcaagtttttcctttggttagcgagtctaaatagatgttggacagcggaccgtttggcgagaagagggctggaacatcctgactgttgtgtgctctgtaatcaagaagaggaaacaattcaacacctgctggctggctgcgtcttctcaaggcaagtctggtttcaggtcctttccgcctgcaatcttca

SEQ ID NO: 182252 - DNA, 376 bp, Zea Mays
tgaggcgtcactctgtggatgtcccgctgtcaagaaccttggtgcagctcaagcgattgagatcgctgcgggatccagcgacaaactcaatgggcaagttcgcatctcctgccgaccacatggtgtgggagactgcttctagcaatggggtggctctggagctcggcaggtcggcacataatcaccaggttgaagaagacgaggacgtgggagccgagcctacaatggggtcggagcggagttttcggggaccaaacgcaaggactgcgtcctacaggagatcttctgctgtcaggatcagaggcttgaacccaccaagaaacaagcaggttcatcgtgtccgccgagacggtcaccgcaagtcagtggactctag

SEQ ID NO: 182253 - DNA, 455 bp, Zea Mays
tgccgatgtgtcgcgcatctctgcccgcctcgaggagcacagcagaccgtgtcctcctcgcgacggcgtcctgggcacgtacgagtcgatagtgggccgcctgcctccttccacggcgcacgtcgacggcccttgggggcaccgctctccaacttactatcgggagggaggccaagggtttccatacacccacggcctgcccccgaccaatggtatgctacctgctcctgagtttgctacagttttccagcagcctatgtatcctgatgcctttggtggatccatgaaccatcccacacccagttcactcggccagctgcccaaagtgcccttccttgtttttgatggtgataatcccaaactgtggcaaaccagatgcgaaaattactttgcaatgtactcagttgatccgcgtgtctggatctgtgtttccacaatgcacttcactggcccag

SEQ ID NO: 182254 - DNA, 535 bp, Zea Mays
catgcttctcttgtccgatggcaagcctgcgtacgtacgtggcgctctcggtgcgagcgcaatgggccacggcatgcatgagcacggaacttgccagcgccagtagatattgattggatgaaatatctataatatctacaatcgcagtttgtaggaaactatgaggtgatcgagtacatcaactatgatagagtgaaaaaggcgtggtctatcttctaaatttaaagcctttcgagcatcgaagctaacatgctcaaacacgcatcaaatcaaatgccaatcattgacaccccgcccctatcacctcacattttggccagacagtgcagactgtctaatcagtacacgaaaggagatcttaattagacctgcaggctcctctcgatcacatggccaatccaagatgatgcatgcatggcctagctggagcagagagagcagcaaacacgtacgtaatggtagacgtaccaattcccggccggcgggtgtttggtgatagtacgtgcaccccatgcagcatatatgttgttttaac

SEQ ID NO: 182255 - DNA, 514 bp, Zea Mays
caagatggggcaagtgtttcagttgtccaatactttaaacaccaatataattacagtttgaaacacattcactggccatgccttcaatctggcaatgatagtaggccgacttatttaccaatggaggtagtgcctatattttatctgtttgtgttaatattttgtcagtgttttgtcagatttctttaggatgtctcttatttatgcaggtttgcagtatacttggcggtcaacgctattctaggaagctaaatgagtaccaagtcacaagcatcctgaagaaggcatgtgagcgaccacctcaaagggagggcagcattttagaggtgatttttgtgactactatcccattgttgactctgttcttgtacattggctctgttcttgtacattgactctcttcttgtacattgtagtatatagttttgtgtggtgtttagtattttttttacctttttaatgaaagacctacctatttcgtatttttctcaggtagttaataggaacaactatg

SEQ ID NO: 182256 - DNA, 403 bp, Zea Mays
atcaaggatcgatgagactcacatggaaaaactgagggtcagcattttgagctccataatttcttgacttgttatcctttattctctttctcataagttggtttgccatcagcatggaacttgtggttttgatgatttcctgcgtgatgggttgattgaatatcttgatgttaatgaagaaaacaatgcactggtacatcatgattcttttgctttttttatggtttgttatccaaattatggtggtgtatactaatattttcaaatagattgcattgtatgagcacatggatcaagatgatgttgaaagaagcagcatcacacacattgaaatagagccattgagtatcttaggggttgtatctggacttattccatatccacaccataaccaatctccacg

SEQ ID NO: 182257 - DNA, 1251 bp, Zea Mays
ggtgaagttggtcaagcaatacgttggatacttcccgtatgtcaacctatctgcaaccgtgagcccaatcactaggacagttcttaaagtaagagtttgttccagttaagtattgtgtgccaattagaattttctatgatatgctcttatgcaaccacttattgtatttctgtaggtggacctgcatataactcctgaatttgtgtggaaagatcgttatcatggcatgtcagaacgatggtggatcattgttgaggtgtgtgattacatgtattgtacttatatcagaaagatggtgcaaaatttatttcacctgtctttcactaaatttattatcttgttgccatgccttttttgaggggtcaagagactgtttcctcttttctaatcttctttatggggtcttttggtatgtaactgaacaatgcaattatatttgctttgcttctaactttgtgaggagacacatatagacctagaaagattggtagtaaatgcatagaaatgtcattattttcaggaacctcttatataaaatgcgatgtgcatgcaattcttttaatggtcatataaatttgcacctttttaaagattaccaatttaaactttttgtagttgattcctatcgcaggcatgcagtggtcagtactcagtaacattaacattttattttacaggattctgaaaatgataccatttatcattcagagctattcacattaacgaagaagatggcaagaggaacacctacaaagatatcttttaatgtaccaatatttgaacctcatccgccacagtactatatacatgccatctcagactcatggctacatgctgaaacactcttcactgtttcttttcataatttgacattgccacaggtgaatcgaacaatcgctcactgatgctcgttaatgcttattttgattattgtatactgaatgctgcacccattgcccatgcagacacaaataacacacacagaactcttggacttgaagcctcttccactgagtgctcttggcaacaaaacgtatgaggatctgtacagattttcccatttcaacccgatacaaactcaggtgcctttggaacccagttatctaccgttccattgccaatgccattatctgcattatagggattgtaattaaacttttaaagctattccaaccattgttttttgttttgcaactgttccaggcattatcagttctttttgcatagtggtgagttgtttgtgggaactgg

SEQ ID NO: 182258 - DNA, 316 bp, Zea Mays
ctgatagcaaagcaatttaatgaatatccaatttgtgtacacccaacaacatagctctgtataaaggaaaccaacatccctattccacgtaaggccttgtttgactattttaattacatgtgaattggaatgtattaggataccatatggattattgttcaaagcttgttcaaatcatccttaacccatgtggattgggtggtattgagccaatttaaatccataaagtgaaaatccatctcaatccattctaatcgacatgtaattggaataaccgaacaaagtctaagtccttgttcgttttgctctcaatcca

SEQ ID NO: 182259 - DNA, 371 bp, Zea Mays
caagatcttgagacgcattgaagactcctctagttattgcagatgctgcaaaatgccgagcccccacgagctttctattgcaggatccagatgggaaatcatttgtaacctcacaaatgccagagtagtgagcaggtactggataactatcagttgatagatcatctgcaaagctagggtgggttggatctattcctgtgtcgatgaggccaatgacgacaccctgacccgcgaattgcggaccaccttcttgcacccaggctccttgcggcagtccaaggaattcaggggtatgagttgttgctgtcctaactgagtaatccagcatcacatttgctacttcttttctcctagatagcttatctgccttt

SEQ ID NO: 182260 - DNA, 764 bp, Zea Mays
ttccctgacgagtggtcaaggtctccttggtctgtgaatcaaaggccggattgtcaatcagcgcattgacaaagacccacaaatggctcttcacattgtgtagcttcatgtttgcattcttgtttttcttattcacaaaagccatcacatgggtggcaatttgattggtgacataatcaacatgagttccaccccttatggtggcaattctgttgacaaagctgacctgcaatagcagaacaagtttttatgatgcaagtgtaaccacaaaacaacaagcagctctcacataacaagtaacccaatatattacctgctgaaactgcccttcgctttgactaacacacacttcccaccgatcatttacttgctcataaatcctgaaagaataaaccaagtgtgaatgatcagatacagcccaaaaaagttttgtttgtcgacatcaccaaaacttcatgtatgtacaaagctaatacagactttttgaaattatcaggtctgtcacagttagcactcttcatatacaggtcgacataatcacagaagctctttatgggcaccctgtgcccatccaactcaaccttcactgttttgccaagagtgcctgccatatcaaccactctcttcctcatgagggctacaacatcatcttcgagatggatcatgttgaacttggcaagatcaggcttgaaggtgaccctggtccagttctcgccctgcttgcacttggtaatctggggctctgacttcttccccatgttttc

SEQ ID NO: 182261 - DNA, 574 bp, Zea Mays
ccaatcgccgtcgcgagtggcaaccacgcgtgcacgacatctttggccttggcatggagcgccagcgagggcagtgcgctggcgtttgaggcttctgttgcgccggccagagggttttgcgtggcggcgggctaagatagcgagccgcgggatgcgcaggcaagctcgggcgcgagcgacaggcggcacggttggaccattggcccttccatccttcccctcccccttgcacttcgtagacattccccaaggccactctccgtcaggtccacgtcgtctcgcttctccgccacccgacgctctcctgctccacgcctccataggcgccactgcccactggcctctctgcttgcctctgcggccactgctcgactctgcggctgtttaccccgccgccttttcgtttctggaccaaggtctggtcaaagaatcgtagcggatcgggggagggagggctaacggcggccgatatgatccacccgcagaggtcgggtcgttgcgggagctagcgatgcgcggtcggaaggggaagtcgtgagggcaccttgattcggtgaagtggaagctccaccct

SEQ ID NO: 182262 - DNA, 467 bp, Zea Mays
caaattcttgataccttcacttggcaacatcggagtgacacttcataacactggacatgttaaagaggtattccttctaagtttcttttcttctttttgctgggccaacccctttgagctaccattgaagtgaatattgttgtctctgctttaggcaccaaaggctttagaactgtgctgccaaacaatatgggcacacatcagccttttttactatagactatcttcaagaacaaaaggaaacgacattatgacagatctgtcgatggatacactgaaggatatggatatcattttggatgcattttcaagaattgcaaagatggttgatgctctctgtagatgtggcacagagatagaaacaccacttgtgattgttgcgaagagtttgtctataatgttgcctgatggcgacaattctgaatataacaaatgttcttttatactgatcaaggcatgggttaagg

SEQ ID NO: 182263 - DNA, 459 bp, Zea Mays
ttactcagatcacttggcttccaaaccgagtaccactgcaccacctcgaatttctacttgccttgggccatgtgatgtgctgcttacatttgtaattggtggttcagtgcagtggtacttggcatgggtgtcatactgctgtatgcatagcactgctcttgtttgaattacgtactatttaaatgttctttgttttttaccttagattctagattttacaaacttactaatatgttggtctaatagttacaaacctacaacatattgtgcccattttacaaacccacaactatttttgtttgttttgcatgaaactacaactttgtaactatccctctttcaaaatggccaattggattcacatgtcaatggcagtgcatcacatttggcaggcaggctttggtcatgagcatgtagctgacacgggcacaagtaagaccatgaaagtggaacaataac

SEQ ID NO: 182264 - DNA, 286 bp, Zea Mays
ctccagcgttcttgaggccaaacggcatggaggtatagcagaaagctccaaacggggtaatgaatgcagttttttcctcgtcttcttttgccaggctgatttgatggtatctagagtagcagtccaggaaggacaacatagaacattcggcagtcgaatctaccacctgatctattctaggaagtccggaggatccttcggacagtgtttgttgagatctgtatagtcgacgcacatgcgccaatccactttattctttttgagtacaagaacatgatttgctaac

SEQ ID NO: 182265 - DNA, 886 bp, Zea Mays
gaacggtatcgtcgccgctgcctggcggaatcatcgtcaaccacagggtcccgaggaggggggagcaatgcactctgatgggcaaccactttaatatggatctggtataccagggccagtctccccttgccagagggaaggccgtgtggctcaacaatccaaaggttccatgaagaaggaatggttgaagggtcgtagcaccacccagaacaccgaaaaacatcaaggcttcttgattccagagtatcagcatgcacctcctgaacccaagcaaaagggttaagaatctggttgaccgtagaaagctcccatgcatgcagcggaatgccactaagctcaaaatcaaccggagtgataaggttggatcctaaagaaccaagtagcttggaccatctcttacacagcaaagaaaaggagcctgatctgataatgtgcctcctatccgttagaaaaatagcctggtgctcatagggtagcataagcaagaactcagatggggaggactgccttagaattaacgaaacagccccaacttcaagcttcagagcgatctcctccaaaatgtcagcagtggtcacaggaagatcgctaataaccgaaatagagaccgcattccccaggtcatctaccgccttggaaaaatgattgttccatccaataatacatgatccatgcttaacaccagaatactgatccaaaagggtctcgtcacctcccggttgatcaatgtgatcggggccaggatcagaaccaccccggatcgaggaccgacgcttgcgatgacgcctacgacgatgacggggagggagggtccctagcaagcctggatcgtccatatgagacggctccaccggagacgaagaaataaccaacgtaggagtcctcc

SEQ ID NO: 182266 - DNA, 435 bp, Zea Mays
cgtctgccctgtggtggccgtcatccagtggactgaggagatcgaacgccacactgctagtggcagcgtgcgcgtgctcatctaccacggtgccaagcgtgtcactcagagtttcgatttcaacagctatgactttgttatcaccacctactctaccattgaggcggactaccggaagcacatcatgccgcccaagactcggtgccaatactgcaataaattgttctaccccaacaagatgaaggtgcacttgatgtatcactgtgggcctaatgctaaacgcacagaagctcaggctaagcagcagagcaagaggaagtgggacagcagcaaggaaaaggtgaaggagaagaggagggttcataagaagggtgatgaggtgaataaggattttcaagagttggctgatgaactgggcagacagttaaggggcca

SEQ ID NO: 182267 - DNA, 314 bp, Zea Mays
gccgtatatgataagatccttgattctatcgcagttgcgaagtgcatgtgaatgtgagattggagttcagtgttggatttttttactttggtaaggcgacgtgatggcatgggtgtagagcagcggcgtgataacgagcgagggagagacaacgcgtaggacaagcccttgtggcctagaaagatgtttgtcttgcttccttcgtctggttacatcgcccctgtatttatagttcctagaggacttggttcagaagcaaactagaggaggaattcctaacaaactaattctatttcctaaatgagtattgttca

SEQ ID NO: 182268 - DNA, 533 bp, Zea Mays
catgtttgtaggcatagccagaggcccacaacaggggaggtgggtggagttgctagggtccaggagcagggattcagggaagatgcgggtggagcagaggaaggaaatgcggacgctagcgaggtataggtagctggccaggcatggatggaggtggtgttgtggacagaggtaggaccatcagagtgagttgcagccttgcaggtgacgacgaggaagagatggagaggcataggcagaggtggaggtgtacgtgtacgtgcaggagacatgtgctgaggcacaagatgcgttagcgagggatagcggagaggtgactgaagcgggagaaatggagaacgaaaaaagacgcgcgcttgatgaaaatggcgaagactgctcatccgctcctcttcactgcttacatatatactagaaacctaatggaccagctaaaggttggccaaaatgttccagatcctcccatacagatttttgagctggcccaacaagtcatcaagatgctctacttatcaagattagccatctatttg

SEQ ID NO: 182269 - DNA, 320 bp, Zea Mays
cctttgtggcgcctggcatactgccggcccacaaaggtgtctacaacatttccccccctcgccgacaaagagctcgtcctcgagcgtcatggtcgggtatctaagcttgaagtcttccagctgctcccaagaagtatccgtctctgctcggcctgtccacttgatcagaacttcccacacccccaattcagccttgcatggaggactttttctggtgtagggatgactctgccgatgaggagctcgggcagtggtataacttgggttggagcctcccctatgaatttcttaagtagagaaatgtggaacacatcatgtat

SEQ ID NO: 182270 - DNA, 300 bp, Zea Mays
gcaaccagcgcagccattggcgggggcgatctccagtgaagcagcgcaggtacatcactatgactcggttggcggcttccgtctggccgttcgactggggatgaaaagcggacgtcatgtgaagcttagtacccataagcctcatgagctcctgccagaacgtcgaggtgaacacggggtcgcggtcggagacgacggactgcggaacgccgtggaggcgcacaatgtcggtgaagaatgcctgtgccaccgtctctgccgtgtacgggtgcgcgagtggaatgaagtggcagtacttgc

SEQ ID NO: 182271 - DNA, 325 bp, Zea Mays
ttcgctttgttggttgttatgatccttggaggattcatcataaccaaaggtcgagcctctctattttcttattgataacagttcaagattatatgtacctaatgttccctcgataactaacagaaagcataccagtatggtggatatggggttattgggtatctcctatgatgtatgcacaaaatgctatttctgtcaacgaattccatggtcattcttggaacaaggtaatacttgactttaaatcctctctctttcagcaaatgcacacgtagcgtatatctgttaagttttgcagtttgggttgtacacagctcaaaacatg

SEQ ID NO: 182272 - DNA, 516 bp, Zea Mays
caaccgctatctctttgccactgaagagatgcaactctggaacagttttgcaggtgcgtttcgctacacctccttgtttccaatggccacttgggcattgcttacatgatttggtagccaaaaatatgctggtattacattccaatcatagctgccaacagttacgtaggtccctatttcatgcttgtactttttggtagcgtgcctgatggggcacccctactgctacttaagtacttatgttgacgttcatattttttccctcatacacagcttaaggttcaatgtcttggcacaaaatctaagctgaggtaactagactgaagcctccatacttcattcttgccaagttctgttcagtcttcgcttccctcaaatcctgaattttgattcttccatttctatgtagtggtgtcagatcattgagggacatggctcctcgtcttgatgaccgtagtccaacgccaaccaatgacgagctggacaacaggtcagattgctctgatggtatgttca

SEQ ID NO: 182273 - DNA, 351 bp, Zea Mays
gtccttaatttatcagtcaatttaagtacccctttgggtaggtctaaggctgtcataatatggaccacagtagcagtcaacacagttctgacaaccaccagacgcccaacccgattcataagcgaagctttccatccaggaagtttctgtgtcactttatccaccagaggcaacagaacagactttgtgggcttgccgatggtgagagggagaccaagatacgtgattggaaaatatgagacaacacaagagagtaactcagtaaccgagcaacatcactatccgaacattgaattggtgttgctgcacttttggatagattgcacctgagaccagcagcatgcccaaaac

SEQ ID NO: 182274 - DNA, 675 bp, Zea Mays
tttcccgtagagctcgggaggctctagaagctgttccaaaggtactgggaagggatagctgtgcagctgaacctttctgcacagccagcagagatgacatggctgtagcggatgaatctgacattataagagcaccagcagaatagaacgcagactcaactttcaaagctaggtcctcaggatgaactctgccagctgcagaaacagcaccaaatgtaagcccgccaccaacccccagaggtggggacggcctagtagcaacaatttttaaacaggtgggcctccgcagaccactgttcaatccaactgaagaaccaatcccacctgatgtagtgaggaataatctcttcccatctgataaaacaacaacagcatggagccatttcgattccatagcggatagaggtgagatgcaaacaattgatggttttggtgatcgtgcagttcttggtggcggtgcattagtcctccggccaccataaggtgcatccagtggatcaacaatgttcttttcttcagtaatttttgtcaaagggccatcaccattagctcctagatcaaataattgcattttcatgccctcagtacgcgtatagatagtatttctctcctcatccatgaccatatcaactattggatcaacagttgaaaatttgaatgtgtttggcactaccc

SEQ ID NO: 182275 - DNA, 295 bp, Zea Mays
gagtaccgccgcaagatgaagaccatggcggactcacttggcgatctggcttgccccatggaggaccgcaacctagtcctcaacgtcctccgcggcctcagcgatcgctacacccacctccggtcgttgatcatgcgccagcgccccttccctaccttcctccaggtccgcgacgaccttgccctggaggagatcactctgggtgctcaggctgcatcgatctccggcccggggtcctcgtcctcctcgacaacactagcggctttcaccccgacccgtccacctactccgtcac

SEQ ID NO: 182276 - DNA, 350 bp, Zea Mays
aaaccggctgtcaatagctccttgacctgatgctctatttcgtccttgtgatgaggcgagtaccaatagggacgcgagttcacatgcactgctcccagaacaagaggtatggtatgattgtaaacccaagcaggaggtagagtgtgaggctcgcccaaacacatcctggaactaagctaacaacattgtaatatgtggatccaacaaggaaggctgatgactgcatctgttccagcacagctagcgcccaaatctcattgcccttactccacttaacgaactttttagctggtagtttagaaacttgcaatggcgggggaaccacaccttgaagctgaatgggttgtccg

SEQ ID NO: 182277 - DNA, 569 bp, Zea Mays
ctttccacaaacatcaagtcaagaagtcagctccgcagagatcaatcgatggtctctcattccaggaaaagcacattaagaagccaattgatggaaatggagaagatccaggtttttcatcctgcaaaagacgcatcgaggatcccttttgcacaaatgttgaagatgcaagcttctcatctacgaaaaggctgtctgagaagcccatgtctgagaagcccatcagtataaacaaagaagaggaccttgaccattgccaccaggaatcatctaagaaacctagttgcagagttgagcaagatgatcatggttactcatgtgatgaagaggctgttaaaaagccgggttgtatggatagccacgatgcccaaggttcagatatctctgctgcaactattgcttctgttggagatggctctaatggtttaagcatgccacagcctaataattctgaacctactggttgtactgtcgccaatggggttatagacaaagatatcagctctccactagatgaaataagatctgagaagactgacgatattttgggtactatattcttcttattt

SEQ ID NO: 182278 - DNA, 1039 bp, Zea Mays
catggctgtctgcaaatcttgtggtgctcgcatttcaacgtctacccggagatgttcgagaaggccgcccacgtacagctccgtcttttggagaggggagatgtcgcgcgctcgacacagcaacgctaggaagcggtccgagtactcttggaccgtagacaagaagggtaggcgccccagctcggcgatgcgtgaacctcgcactggtggtccgaagcggagacgacacaatttagcgaagcggtcccaaggaggcatgccctcatcgtgctccagggcgtagtaccacgtctgtgcaggccccttgaggtggtatgacgccagccatgtgcgatcggaggccggagtgcgctgtcccctaaagaattgctcacagtgattgagccaattcaatgggtcttcggatccgtcatacgtggcgaactccaacttataaaaacgtggggagggacgagcgtcgacgccctcgtaagccgtagcctccatgccagcatcatggcccatgggtgtgcgcatggtagggcgaccacgcggttgctgcggcggaaacgtggggtagtaggctgctgcgctcttgggagagcagtccatctaccccgttgtacagcgggttactggctgtgggaccgccatgccctccagtggcgctgcccggcatggaggaggtgatcgtcggccgaggcgagatcgacgagtagacgggggcggccaccgcggcagtgccataggcccatgatggaattggtgaaggcgacggtggaaactagatgtggtggattggggtggaagattgcagcggcgctgtggatgacggggtcggctctatgggcatgccgtaggggtaggagatggggtgtagtggtgcagattgcagcggtgcggatggatgagtgagggtaggccgatccacggatgatagcggcgcggataggtttggctgtggtggctgggcatttgggggagcagggatgctgatctggcccgacagcagcgtgcccaaggtgtcctggacgttgcgcatgcagtggctcaagttgac

SEQ ID NO: 182279 - DNA, 288 bp, Zea Mays
gggtattggagctgggcgtccgtggcgcgtcggggtggagtagaggcgacggggaggggagcaggtcaaggtcttcgaagtaggcgtagcaggatgctgtggacacgggcgaggtgacggcgagttcacccggaggagcagcgacggtagccgcggctgagcaggaggtctgatgaggcggcaacaaggaggagctagggtttggagttcagacgagatggagctcggggaccgtgagggacgcccaaacgaatctacttgaagtcgcggcgaggaccgtaggttggt

SEQ ID NO: 182280 - DNA, 370 bp, Zea Mays
ataatttgaaccgcccactaggcaaggcgaccgagggaggagaacgtggggtggcactgttgtcaggagcgttgctagccgatgggaggccatcatcgccggcttcattcgcggtaccatgtacgatattagaattggcgtaattggatggatgtattgcattgagcctcatgggctaattatatagggtacataggactaacaccccacatgggtagacaatatggtactatttctatttactctaactttcgcctcgtggtcttggtgcggtggtgagaactgtttcactgagttactgggttgctggttcgaacaagcttctttgtatttgcgggagaaagcttgcattggtttatcctttcccttg

SEQ ID NO: 182281 - DNA, 502 bp, Zea Mays
ttggtccagatgattataggaagggtggtaatgtacggcctagcaggcccatcgcggaaaagagaaaaacacctgctggccgccctaatacaaagaggggatgtgtgtgccattttattgtgaagcgcttgattgttgaaccatctgtggctcttgtgatatataaccacaataagcatgtagataagaaaggcatgccatgccatggttctatggacaagatggctgtagggacaaaggcaatgtttgcaccatacatatctgatgagttgcgtcttcaagttatgtctttgctctatgttggcattccagtggagaccataatgcagaggcatactgaaatggttgaaaagcaaggaggtccatcaaacagggacgatcttcttactcatagatatgttaggagactggaaaggaaaatacgtcgttctgtttatgagcttgatgatgatgacgctattagtattggcttatgggttgaaaataaccaggattgtgtgtt

SEQ ID NO: 182282 - DNA, 411 bp, Zea Mays
atcctcatttggttccgatgtctagggtggtcgcgcgggagaatcggattggagctgtgggtaacgctcaaaaccccacgagccgccttggcccgcgtttgctcattccctgcgtcggcccattctgcgagcagtcctcccctggcccacgaagggatggacttgcgagacagtaagtccaaaaactttctgtgagtccttctaaccttctagtggacccaggggatatctgtcccccacaaggggttaataggaagttagagttgtggaagcacatgttggagtcgaaaagttttagacttagtaggaccaagaccgagtacacgatgttcatttttagcgcgactagacatgaagatatggagatgttaccctcgatgggcaactggtggctgggaaggagtcttgtcg

SEQ ID NO: 182283 - DNA, 467 bp, Zea Mays
ccggttccttgcggactaccagcgccaccgtcagcctcacacctcggccacctcatcggaagccaaggggtgtaacatagtaaattgggtttgcgtgcttgtttttgcagagcaggaagataagaccaagcgattggcgtaccttgtgatactcctcgccgacgaagggcctgaagaagatctgggcatctgatgtatggcagcagcgactaaatctaccatagatgtagtaccgcaaagaatatgaactgtgggaatataatgaatgcatgctcacctgcacagctctgttcaacctcttgattggcctggaacacagatcaccgcatgaattttagcaaagagatcaaaggagcagaaaaaacagaacaaactttatttcttggtaggttgataatgcaagtaccaataaaattttagacaaagacatgtcaacgtagaccatttaaaactaagttattgagagg

SEQ ID NO: 182284 - DNA, 718 bp, Zea Mays
taggctcatctgtatagtcctcttttcctggtaagcggtcgttccaaggcccagcgagggaagacgaagggtcagcatcctccattgttggtgattgcagtgtccgccaatctgctgcggcggctactgtgcggattgccttatgtcgtctgtcgacgcagtgtttcaactgcctctcgcttgggcactatgcccaccaatgccataaggtggtcgaccgtagagtcccagtgtggaatcgacttggccctctcctcgtcgtctctgaaggagtatcggagggtgggcaggcatgttggtgtggcgcaaaatcacgccggcacccgccacgtcggcgttttctcctatgacagccacggagtccttgcatgcttcgtttccgggcaagaggcgacagcatcgatctaaggtcaggaggcctaggggctctgttaaccctggcattccagggaaggctggggaggcttcagagtcgcggcctatcagtgaacaagtcgagagattggctgctcttgcttcgtctcctctaatttgctttatttagagattggctgagctgacaaaagctgaagttgatctccggagggcgctgtttgttacggtggttggatcaaggccggcggtttctacggacctggtagcagaagtcgcagcgatgctagcaatcgatgtggactgcatctcgatgcacaaatccttgctggaggacttcctggcg

SEQ ID NO: 182285 - DNA, 456 bp, Zea Mays
gaggactgccggcgattgaccacgtcgaccaagtctgcgaggactgcgttctagcaaaacaaaagaggacgtcgttctcgcaggctgccaagttccgggctcagggggagctcgaactcgtacacggtgacctctgtggcccgatctcgccacctacgccggccgggaacgcctacttcctgctgttggtcgacgacatgagccgttacatgtggctcacgctgttgcgttcaaaggcagatgcaccagcagcgatcatggcgttccaggcgcgtgtcgagcgtgaaaccggcaagaagctgaaggtacttcgtaccgacaatggtggtgagttcacatctgtgcagtttggcaaatactgtgcaggagaaggcatccaacgacactactcagcgccgtactcgccgcaacaaaatggcgttgtagagcgccgaaaccagatgatagtgaacacgg

SEQ ID NO: 182286 - DNA, 283 bp, Zea Mays
tagggtgttgtcagtggtggaataatgctgccaagagagtagcaactctggaatttgatcgcaccagaaagtcaatgggagttattgtgaaagcaaactctgggaagaacttgctgcttgttaaggtaggtatttgtgctggagtttgcatcccttgtggttttagatcgttagttttaagtgcatagcaatcagctgcttcttgccttgtcatcgcctgtttaagctgtgatgttttccaaacgtttgtgcattttgcatttttgctactccttccttttcc

SEQ ID NO: 182287 - DNA, 349 bp, Zea Mays
aggacccttctcactcggcgtgacagccctaggccgctctacacactccgccttcctgcttcccctacattgacttctgccccacatgtccttgccgcggccgcctcttctgtgacttggcatcgtcgtcttggtcaccccagccgcgatgtgatgtccaagctctccagcagcacctctggttcaggttgtcgagcatcttttgagcacctctgtcatgcttgtcagttaggtcgccatgttaggctcccattccccacctcctcttctagagcagcatgcacttttgatctgatacattgtgatgtatggacatctcttgtaatcagcatttctggatctaagtaat

SEQ ID NO: 182288 - DNA, 359 bp, Zea Mays
ttttctaggaattgaggtctccacgcctgagaccttctatctgcctcaagaaaaatacaatcaaggtcttcttgactgtgcttctcttactggtcatcatacctttgggactcccatggagctcaatgttcatcttagtgacattgacggtgagcctcttttttatcctagttgctatcgtcacataatcagaagtgttgtttatcttggtatagtagaacaaacattgacggtgagcctctttttgatcctagtcgcctcttttccacacacaagttctttacaactccaagcctaaagtgatgctacctaggctaatgatccctttgatcgttgatctctttctgtatattatgttt

SEQ ID NO: 182289 - DNA, 842 bp, Zea Mays
cccgcctctgcgtgcaagacagatctctcctcactcaagcttcaggcatggtgtctggatccgaagaagctttgcagggatatggacctccacatcattgagcgagagccatttattcaggaggcgagatgtctgacctacaagattagcattgctgctagtccggctccccttcagttaccctcggacagcagtctgcctccttcagatgagaatgagtttcatggtgaggaggatggagatgtccggggtccgtccaatccccggttccgacaaccacgccctttgcagcgtcagcctgtccaccatcgcctcagatcacatcagggcgtgggcagagaacggtctgtggctgtgcatggaaataggatggtggcgccggtcctagcactggaagatggtgctgctgtctgtgctggtgatgggctgctgacctcacctggaccttcctcgcctcagcacagatgtttggctgagccgctggagaaggctaggttgagctcgccccttcctgccactcatgtgccatgcatgacaaccttgaagaatatcttagctgggccgtctgggtctgctgttgtgggatcgctggattctgtcctccccgtttcgccccagcgacacaggactgttgctgttgctgggtcgctggaacaggctggtgcgaattcgcccctaccaggtggttcatctaatgctgtggcccccctgagagtctactcgagaagcagattccgaagcaaacacgccccaattcaggaaggacagttgatacaggtcgtggaggtcaacattacagagaggccttgtctgaatcattcggagtctgtggataattcttt

SEQ ID NO: 182290 - DNA, 814 bp, Zea Mays
atcaaaccctttccaagggtgatcctctgtcgtccagctcttccaaagccatcttagccggagggcgcaactgaatttgtcgaggttgaggatgcccagaccgcctagggttttgggcttgctgactagtggccaagccacgagacaatggcctccatttgattcagcctttcctctccagaggaaggatcggcggatcctatcgatgcgtttacgagcccatgtcacgaggggaaagaccgacaagtggtatgtgggcatagcggacaggacggaagtcataagcgtgagacgaccagcccgattgagcatgcttcctttccatccggccagacggttccggattttctcgatcagaggttggacatgaattctctggagcgcccgggtgtgaagttggaggcccaggtaacgacacgggaaggtcccccgggtcccttggaacggctggagcacgtggtctaggtcaatgttatcacatcttatcgggtggatagagctcttctcaaggttggtgatcaagcccgaggcgcagccaaaagcgtgcaggatgtctttgactgccatgaggtcttctctagaggggttgataaagatagcagcagcatcggcatacagagaagtcctcagttttgttgtagttagcggaatgggggaaaggatcccatttcttgctgcaaggtccaggatacgctgcagcggatcaatggcaaggatgaacaacataggggaaaggggggtctccctgcctaacccctctcctgtgctggatgtttgctccatgtcggccattgaggagggctcgagacgaggc

SEQ ID NO: 182291 - DNA, 373 bp, Zea Mays
cccctcgagccatataatcgggaccctgaccgctgtgacccgttcgccgcacccccttttgcgcatgccatcaccggtgaggatgcgtagggtactggccagcgaattgggccaccggaataccatagatagcaggggaggtcgagttccagtcccggccgtgggtggtgctctcctccatcctcgccttccttgacgccaccgttgagcaggcatcgatgctcgtgccctgggtgcctccttcccgaccacctcgccggaggaagagaatcggacgcgggatttctcgccgcggtggcacgcttcgccgtggccgtggtgctctgcgttgcaaagcctggtaaggagcttcccttagagttcgcttattcgc

SEQ ID NO: 182292 - DNA, 327 bp, Zea Mays
tgacaaagagaataggatattcgtaaatttcatatttgaagcatctactaaacaagtagatcatcatccaattgaaagccttctctcccatctccagctgctgctgcaatagatggcccaactgcagcatgagcatcttcctccttctcatcagaatcatattctcctccatgtgttgctggtttattttcctccatctcctcattgtcctcttcaacaatatctagacctgcaactctagtattccttgcatgtttctgaaccctattgggtctaggccaaaattcctcaagaggccatgacataacgcatcgggcttagtcgttg

SEQ ID NO: 182293 - DNA, 393 bp, Zea Mays
ccgcaccatttccagtcggtgcctcctgtctcccatccccagatcccatcgactacggatccgcctgctccttcagaacagagatctgtactcgagaaggttgcttcgcagcagactgctgaaggccggtggtcaggcggccggacgcagggtggggcgtgggggacagggagggtctccggccaggcaaattcggctcagggtggcagccaaacaagcccctgatgccggagcagtctagatccggcgccccgatggagtggacgacggtgcagcacctggatctccgccactccggcggccgccgcggtgcctcggcccgccctatgcagccgcacgccgctgccttccgctcctcccaggccatcgtcgctgtggccatcggcacccacg

SEQ ID NO: 182294 - DNA, 487 bp, Zea Mays
gcgaccgatgatgctgttatgcacgctgcgcagcagcacacgcatgtgcagacatctagggctccgtcaagggctgctcctggggcgttgtctgcagctagggagttgctgcgcaaccccccaagttccacggcctcaccgggggccatgaggcagtggcgtgaagatgtagatccactcctcggcatggcacattatggttcggccaggcccaggcctcggtcattccggcgtcagcgtgaggtgtcggcgtctatgcactcaccctcagtgaggggtacacggactgacgacctacgggtagagctcaaccacaggtgtgtaggcgaggacgcccgaatctctctggagaggcatgacgacctacgagcagagctcaaccgtaggcgtgcgggtgaggatgcttgggtctctctggagagggcgcatgagcaccgacaaaacttcaagggtcacaacctcgaccaggacttcgctccagtttcac

SEQ ID NO: 182295 - DNA, 373 bp, Zea Mays
tcacgtggccgctgatccggtcatggatggccacgattagaagtaacataccagttcggctaagcgcgcggtggccgtggatccgggtatggacggttgggattagaatagggaggatcacgtcgtagccatccaactctgatcgggcgggtaagattagatcacatcattttaaaatttgaaccttcagatcatgatcggatgaccacatgtgcaataccggttcgtgtagaaggttggcctaatccgcgccactggtttatgatctgatggtgcagatcaaagcatacccctatggtcgcgctgatatgcaaaagaaccctcggacctctatgaaatcaacccgcagtctgtatgtagtgttagaatatta

SEQ ID NO: 182296 - DNA, 443 bp, Zea Mays
tccccagcagaatcatattcttcagggacggcgtcagcgagacgctgttctacaaggtgctgacggaggagctgcaggcggtgcggctggcgtgctcgaggcacccgggctacaagccggcgatcacgttcgtggtggtccagaagaggcagcacaccaggctgttccacagggagaagaatggcggcggtggcggcggctccacgcactacgccgaccagaatgtgccgccggggacggtggtggacaccgtgatcacgcatccgagggagttcgacttctacctgtgcagccactggggcaccaaggggacgaccaggccgacgcactaccgcgtgctgtgggacgagaacggcttcgggtccgacgagatgcagcagctgatacacagcctttgctacacgttcgcccggtgcaccaagcccgtgtccctcgtcccgccg

SEQ ID NO: 182297 - DNA, 288 bp, Zea Mays
ctcgccggagtttgccgcctgccgcgcgaatgccacgtgcctcgatgctttaccacgtcgcagtaaaccgccttcggtagcttgttcatcgcctgagacactaccccggtgaaagccacgacagctcgcaccagtgaacctcccctctctccagccgccagcgcgccttctccaaattgagcgccaccgctgatggactctataaattgatgccccagtgagctccgctaggttattacgcatccaaagcaccagctctcgcctctgatcgttcaccagagcctccca

SEQ ID NO: 182298 - DNA, 419 bp, Zea Mays
cggcgccgcaacccccacgcaatctcaccggaaaaacgcctcctccagttgagctgagcctgagctgcagctgagccgccatgtgcccgcggacccactgagccaaaacccctcgaccccgcccccactgcaggccgttccctttccaagatccgcgctttgatccgtccgccgccgcccgagaccatgccggccacggacctccagggctcctccccgttctcctccttcggccgcaccctcctctccctccgccgcgacgccccggcgtccgcgtccgcggcggctgcgatgccgccgcccggcgtcgacccggagctcgaggagttccacgcccacgtcgccgcgcacctcgcggacctgagcggccccggcgctgctggggaggaggagttcatttccatcgcgtggatccggcg

SEQ ID NO: 182299 - DNA, 370 bp, Zea Mays
gggatgttggtccttcggttcctgctgctgaggaagtgcatgtgcctgaatttaccgacgctgaccccaatgggtgtaattcatctgtcgctgatcccaataggtgtgatccatctatcgctgatcccaatgggtgtgatccatctgtcgctgatcccaataggtgtgatccatctatcgctgatcccaatgggtgtgctgtctgtgttgctgatgaaaacgagggggaggaagaagatgaggtccctttgactcggaagaacagtcggcaatatgtagccagtggggaaagtagtggagttccttctcctgctctgtgtgccctcattggtctacaagaattgtccctggcgaactttgatcagactct

SEQ ID NO: 182300 - DNA, 702 bp, Zea Mays
agacaacacattagagacagggtaactaggacgacgataccaggtagacgcagcaacaacagacatgacgcagggggcaggagacccaaagaggcattgtgtgtagaaagggtcagaggctcagagctattggacctcatgatcatgtttcgggtaacgagatccttcaactccaaagaacacgaattgtcaatagtgaagcaacaaatacaaaggaaattctaaatgatataaggggtgagaagaatgttgttgagatagaatggcccgggaagaaccgcgccacatgttgaggtgatggggaggatggagttattaccaacaacaatagatgaaggtgtagttgaattagatgagcagaagagggagatgttgccgacatgttggtggtatggttggaggcgccagagtcggccacccaattgatgaacgtaacatgtggatgcagagccatagtgctaaacgagttagcaagaatttactaatcccagctatcggttcatggagttcaacttggcggtgtaggcggttgtgatgggaatgttgaagcctataagggttaagagacaagtatgtcagacggtccaaacagtacaaacgccgccatcatggcctaggacacctggcgcagctattgctgctggctgctaggagccaggccaggagcatggtgatgctacccgtccaccggttgtagaaggc

SEQ ID NO: 182301 - DNA, 295 bp, Zea Mays
gtaaaatgtggtgtatgttggtaattagaaaatagtcacgtcattaaccgactcgtgttcagcaggagtcgatcgcgttaagtgattacgatatacatattgtgtctcagagtgctataataatgagttagcaggtttgttagatggttttgggttaagttcgaggtcatgatgaattgcttgttgtagtctaaatgcgtgtggttatggtcgcgggtaaaaatttagtagtgctcatgtggtgtctaagttaaaagatgaactagtgggtgaaaaacgtttcgacatacatgta

SEQ ID NO: 182302 - DNA, 717 bp, Zea Mays
tttcaatatctccaatgtgacccaaaaaccggatggttttaggggtgtccttcgcagatgtggtggccagtgataaggacagcatatgtaattcttctgcaggctctgctgtgggtgattcctcttcctcaggaagttgaagaaattgccaaatctcatcaaccaagtgtaactgaacagtatcagcacatttgtgacctcgggaataagttaagccacacttataacagagaccttttactttcctgtaggcatagagggcagcaagtttgtcgtctgtagcaggaggcttgggcactgtcacagctggtctgtcatcagtgtgaggagctttagtaaatgttcgactggatcctttaaaatcccgttgcttggtcgcctcagccacctcttcctgcaattgagcgagcacataggcagtatcgagatctcgtgggcgttgaatcaaaacaacagatttaatatcactcctcaagccatcaatgaatttggttgtgtagtatagtggatctgagggcagattgtatgcattcaactgatctaccaattgagaaaagtgctcgacatactcagtaacagtggagtgttggcgaatgtgtaagagctgtctaagtaggtactcatattggtttttgccaaaacgctcactgattaaccccccaaattcagaccatgtgaggctgggtaatttgtgctctatagactggagccagcgcg

SEQ ID NO: 182303 - DNA, 275 bp, Zea Mays
ggagaggaggggcgtgccgggctggggagccccatataaggcaggccatcccaaatccaaagccagaaacacaaaggacacaaacactcgctactggcaataatagaccaccaaacactaagccatgaacacaaacttccttggagacacatcataggggaaactactaccacacaccactggcccaatgacatggccttacgccacaaattccactgcatcgactggtgccaccgtcgccctggtagatttcttcatcttgttcgtctccttcg

SEQ ID NO: 182304 - DNA, 354 bp, Zea Mays
ctgttgtttattgccctgagtgcagatattgtgaagagagacctttgcttctctcgaatgcaggaatgggagcccgtctctgtacatattaccagaaaactacccctactgatcagacagctgcatcactgcgaaacaacagtgatggactgggcacagtgcttgcaattgatcctgctgataaatccccttttctaggagagatacattctgggtcccaccaatcttgtcttgaaacaaacatgtatagatcacctgtatttccccataaggttgcaccaactgattacttattagttcgttcagccaaaggggctctttccctccgtcgcattgacaagctatatgttgttg

SEQ ID NO: 182305 - DNA, 326 bp, Zea Mays
tcacaaggtggactattgaaaaaagttgtacttaactaaacacttaacaaaagttattgaggtttgcaccaaaaaggcctcacaaagatccctaatcatgtcaaatgttattgagggaaaatcaggaaattcattaactcaaaatcagccctacaacaaagaccacacccgcttcactaagctataagccttaaaccaaagtgacccaattacaaaaagtgtgtcaaaataccttaagtataccctgcaaaaaattgaacccaaggcgccatcgtttggaatgccatgacatcagatttccctcgggatggagcagctagatagac

SEQ ID NO: 182306 - DNA, 370 bp, Zea Mays
ctcaacatcaaccaaaatgtgctttggaagacccccggcgaagaggacagccttctagattggaagaagattcagcatgtgcacactagtgtgttgaagtgctcctgacagccctggatcgtggtgtggatgggcagcctcgcgagttcggcgagacaatgactgggaatggctaggtcgaaccgcaaatggcaaagatccttgaactactcccacaatgacatgccctcatcttgctccagggcatagtaccatgtccgggctaggtctgcgaggtggtacgaagcaagccagatccgatccaaggcgagcgtacattgcccacggaagaactgctcgcaatggttgagctagttctggggtccttgcc

SEQ ID NO: 182307 - DNA, 315 bp, Zea Mays
ctccgctctagggtgtcttggttgagacatggtgatgccaacaccaaggttttccatgcatgtgctcgttataggaagaagaagaacttcatcgccaagttgtctaatggtgaagggctggttactagtcatgatgataaagtggaggtgctgctcaattattttacggagctgattggtagcagcagcgacagggagtcttctattgatcttgaggcccttgggatccaacaccatcttctggatcaccttgtcagctcatgttcggaagaagaagtttgggataccatcaagctgatgccctctgacaaagcg

SEQ ID NO: 182308 - DNA, 295 bp, Zea Mays
ctttggttccttctttatctgtcgcttccaaatggagcaaaatattggttggcaagactattgaattcatctcagtatggctagcatgcaagcccatttctttaaggtgcccaataagccaatgcttaataaaaaatttctgccttgacactgattcagaaatgctctcaatatctgcacctcgaatatttttgttttcactgtaacgagctttctggaagaaatcaccattttctgaaggaattctggttatcctcgaagtgtccacttcctgactgactaatttactgctatc

SEQ ID NO: 182309 - DNA, 368 bp, Zea Mays
gtggtagagctcgacacattcacgaagaacatggttcatggcccgatcaaaggccacaagcatgccccgaagaagctggttgtcgtgatgggagacacaaatatggtagggaggcacatggattgggacagagcgaaggacatgcgtcacgggggcaggcgcagggaagccccatgttgccggatgaaggggacggttggtaacggtgtggtgggccacggtggagcaggggagctcaaggatggtggagcccacatggtcgtagtagcagcagagttcgtcgcgtcgggagcaggaatgaggtccgacgcgtgggcagggatggggggcactgcctgtaggtcaccagcgggcgtgccaacattgag

SEQ ID NO: 182310 - DNA, 341 bp, Zea Mays
ccaagaaccgctttaaggtgctccggggacaaaaacacgtgcggtggaacgcggacataaaaatggtcgctgggccatgaaaacgtgtgctatagctcacgggaggccaaaacagccttaccagtctcaatggtcaaatcatgggtggcggacgggaggcacgaaatcgctgttcgacgacaaaaacatgtgtcacgggacgccctaaaacctaaaccctacagcttgtgggaggccaagaacaactttaaggtgctctggggaccaaaacgctggtggtggaacacgtacttaaaaatagtcgctcgaccatgaaaacatgtgctatagcttacgggagg

SEQ ID NO: 182311 - DNA, 612 bp, Zea Mays
gtcgtggcccacgccgccggctgctccaccgtctgggccagttggttgggacgcggccgcccttgctgccttccagactcctactctgactccgtcgatgggtcccgagtggatcgcagacactggtgctacctaccacaccactcccaaccctggtatactcacctctgttcgccctccttcttcctctcttccttcgtccatcatggtggcgaatagctcgtgtcttcctatcacatccgtgggtgccgttggcgctcccggctcttttcgcattcctgatgttcttgtcgttccttctttggtccacaatcttctctctattcgccgttttaccgctgataattcttgttctgtcgagtttgactcttctggtcttactgtgaaggactcggcaactcggcgccccctcctcagatgtgacagcaccggccccctctacagccttcggctcccgcatgccacctcttcttcgtcttcgtcgcctgacacagctgttgtttttgccgccaccacatcttctactacctggcatcgtcgccttggtcaccccggacgtgatgccttgatgcagcttactcgtagtgccactatcccagaggagcatctttg

SEQ ID NO: 182312 - DNA, 1107 bp, Zea Mays
acactttgtgataaactgaagcaaacagatccatataaatcagagcttgagacaatgctggtccgacatgtctttcctgaattcagcagtcgtgttggacacctgcgagcaaaggtggaatgctctggaaatttgttttcctgcttatgtacagtgaataagtatttctaatgctgtattcatattctttgatgatttttggtaaattatactagctcttcactggtcaataatgatatagaagattaagttggattgccatggggtacactaaatctacaattttctataatgggtactccatttcaaaatgcagtttgatttggtactatacttccccatttgatttatcttatatatcatgccgctcatgacaataaaatcaatattataaaactgttacctcttctaaatgtgagtgtcatggtacctagcaaaaaatgccagttagctattgggtaaaaaaattctgatgtttgaattctcaaatatgtgcatacaaaaaaaatttgcagggagtaccaaatattaaacacccatattttaattgacacaaaattacaactattcccttttccagtggatgcattagttgtaccagtgtcgttaatcaataaaaaaccattgggtactattgatcaaatgaacagaattgaccgacgtacattaattaatgaaatgaaatcatttgatgtatttttatatcagtagtaggtgctaggttggtgtttccttcttgggaccttcaaatatgatctaggtctcttcatggttaatttctaactcattaattctattttacaataatgatctgatatattgaatcttataggcagcatgggttgctgggcagtatgcccatatcaacttttcagacccgaacaattttcgtcaggctatgcactgtatagtttcaggaatgcatgatccagatcttcctgtgagggttgattcggtctttgcacttcgttcttttgttgaagcctgcaaaggttatattatctgatattttctagttctaaattgtggacaccagttaagataactgattataattttatctctgcatttctgcagatttaaatgagattcgacctatacttcctc

SEQ ID NO: 182313 - DNA, 822 bp, Zea Mays
gcctacgccgcgattgggagaacattagcgtcaaccccggcgagcaagtggatgattttgccatgcgtttatcaaccctgcaccagcaacttgtcatccatggtgacaaggacatcactgaggagcgtgtggtggagaagtttctgcgcacggtgccggccaagtacgcgcagattgttgtcgccattgagcagtttctcgacttcgaggcgctgactcttgaggaggtgactggaaggctcaaggcggtggacaatcgcgaggaacaagtgctgaccgagccggtggctatcaacggcaagctgctgtacaccgaagagcagtggagagcgcgctgcagaaaggagaagaagggagaagatgcaggtggttctggtttcagaaatcagcgcggtggcggtggacgtagctgcggtggtggacgaggacgaggcaaaggcggtggacgtggtggcggacgaggagatggcaatgttgctggccacgtcggccccaacacctgcctaaactgcaaccaggagggccattgggcacgtgagtgtccccagccgcgccgtgaagatgcagagcgcggcgatggaggtggaaaccgtgctggccgcggcggtggcaatcgtggtggaggccgcggcggcagaaatcgggctggacagcgtggcgggaaccaaggaaggcatgaggcacgcgtccagtacgccgagtgtgatgaagatggcgctctgttcctggcacatggctttatcagcctggaacagagcacgccggcgcacagctacacggcacagcacgtcgagttctccgagccacgtgcttgtgcctatc

SEQ ID NO: 182314 - DNA, 339 bp, Zea Mays
agcacatcatctggaggtctctcctgctccctccacttctctcccttatttgtactgcatgtagtggatggttgctgacttgctgttgtccctcctgctcccccaattcaaccaatgttgtgttgctggcctgctgccctatacagagtttgttgttggccgtgcacaagtggaagttattatgaataatgtagaatcatcggccgcatcaggtggtgctcctggtgctggttcagcagcttctgctactctagactctgctgcttttgttgaaaaggctatagcagcacttccaccagagcttgcatcccaaactgttgacgtgaagaggaaagccaa

SEQ ID NO: 182315 - DNA, 365 bp, Zea Mays
ttgccattcttggttgatctggagattggaggcatccctgttcatgcctgggaaactagtacggtggaacatattcttagcccctatgcttggattcatcaggtgcatcaggagaccttggcactgcaagatttgtcctgctttcgatgctctgcttggtgtactgatccgtctactattcctgcttcacgtgacttgtggattgttgagtctgttcaggttgttgagggcaatgttgaagaaactatggctctgagctacccaatcactattagtttttccgttgccttccgaccgaatgattccaattcacagtctggtcttcctatggattctgtgaatgatggtgatcaaagtaatggcta

SEQ ID NO: 182316 - DNA, 323 bp, Zea Mays
caaacgtcaggaaataagttcaccgcaggatgatgtatcaaagatggtgtggtattataaagtccacggtgtttatgatgacaaaagatccttagttggcgccaaggaattgagaaatgatgaaattatcaatgggaacaagcaacttctattggatacatagttccgagtcctatgttcccaattgtttatagaactattgatatgtgctatttcaatgggcatcaagaagatgtttctcctgtgattcaagggtatccatgatcttttgacagatcgccccagttctcgttatttttagaaaataatcacgggtatccatg

SEQ ID NO: 182317 - DNA, 310 bp, Zea Mays
gtgagccaattgctatggatggccgtgccgaaccgcagatggcaaatattctcgaatcgctcccatgacgtcatgtcctcatcttgctctagggcatagtaccatgtcgggctgtgctcgcgaggtggtatgaggcgaggcacacccgattcgaggcaagcgtacgctgcacacggaagaattgctcgcaatggtcgagccagttctaggggcccttgtcgtcgtaggtgaagtcgagcttgctgaagcggggaacgcccaaaccaccgagcacaccagcaatgccgatagtggagaacaatggctccca

SEQ ID NO: 182318 - DNA, 463 bp, Zea Mays
aaattattgaacataaaggaaggttggatgttgcatctgcggagaaaaagttaatgaaacaaaaggtagactttttgggaaacaagaagactgctgtcaagtacttcaattcactttgagtcctttagatggagatatatgatgcactgatcacaagcaaaatatcttcaattctttatgtgcgatagcttaccatgcctgacactgacactgcaagctttgtataattaaatctacttatccatttagtttatttgataaacattaatttgatttttttcaaacttgtcaattacgtttgaaactagttccctgatttcagcatgatggagcacaagcagagttaactgatgcacaaaatcagatggaaagtataaaggagaaagttaaaacaaaggattcatacattgtggggcttcaagaaaaaatagagaagcatttgaatgaagcatctgaagctcgc

SEQ ID NO: 182319 - DNA, 314 bp, Zea Mays
gtttaaacagtggtttagcctatcatcttcagtgtatcatgccacacagtggatgcatcagattttcaagtagtcaaatgcaatgattgatccctccattgtctctttgattgtccaattgttagcagtttcaatctaacaatgatactattccaatatgttgattaagagtattgtactgtttttaggcaaataaagcttgcataggatgttagatctaactacaatttccggtaaagaaaactgtagaatcagcggagaaatttaactaaggagcaatatgatagagatgtaagcttgggaggccaggtagt

SEQ ID NO: 182320 - DNA, 405 bp, Zea Mays
atcaaagaactagtttttttgtggaggttgttggagtgtcgtggtttggaagttggttgctagagcctgctgatcccagccttgagacagagagggatggatggatgcagggggagggacgccccactgaccagcccattggccgggaggaccgacaacgtaggactacgacgcctgtcgcggctggtagggcacgtggggatgtggagctgttgaaacttgtggacccgaccacatgtagatgttgccggttcatgggttctggtaggtgtagatgacgggaggggagcacctaggggtgttggcgccacccttgaagcaccctgtgcaccaagggaggaagaggtggtgtccttgtatctcttgccaccatgcctgccatgtggttgctgctgtggaagtcgt

SEQ ID NO: 182321 - DNA, 293 bp, Zea Mays
gaggcgcttggcctcattgacgtcacttgggtggtaatatccttgcagaaacagggttattggggcccgccaatctttagtcataatgaggttgacgatgcgatggccctcggcgtcgttggttacttgtaagccctctgggttgcggacggctggtgtgccaatgacgtggtagaacacgtcggagggcaaggtctcgcctctggccgctgccttagccaacgcgttggcctcttcgttcctggcgcggtccacatgctgtagggtgaagcccttgaactgtctctcgagac

SEQ ID NO: 182322 - DNA, 724 bp, Zea Mays
caagagagctgcgcatcattaaaccaagaggagaaaagtccagaaaatgatcaaagtacaagcccaaaagagctgaaaacaaaaggaaaagaagaaaacctgccctgcaacagagctaaagcagactcttgactatgatagaatcaagtcaaggatttcagtatacgctgatgatgtggttttatttattaagccacaggatcttgaattgaggtgtactaaggttattcttgactgttttgaggaggcctcggtgttggttgccaacatgcaaaagagttgttttatccctattgcttgtaatgattaggcggttcaggaaagcgattccttactgcagtgcccttcaacaacctttccatgcacctacttagggctgcccatatccaacaagaagctatcgaagggtactctaatgggttgggttgagaagatagctgatcgtttaccttcctggaaggcctcccttcttaacttggcgggtagaactgctttggttcatttcgtgctctccactattcctgtttacctccttatcgccatgagtgtcccgaaatgggtgatcaaggggattgacagggttagaaggggcttcctttggaaggggagaaatgaagtaaatggtggcaactgtctggtgtcttgggacattgttactaggccctttttcctaggagggctgggtataccaaatctgcattttcagggattagctgcaggcaag

SEQ ID NO: 182323 - DNA, 666 bp, Zea Mays
atcaggtcacacaagtgctgtggagtcggttggttttgattccacggaagtgtttgtggctgcaggagcagccagtggaacaataaagctatgggatttggaggaggcaaagagtatgcagatatgaatatttaacttactatatgtgtatatgtatgaatcgttcagtaattgcatctcttggctcattttctatgcagttgtccgcactcttactggacatagatcaaactgcatgtcagttgattttcatccgtttggggaattctttgcctctgggtcactggacactaatctgaagatatgggatataagaaggaagaattgcatccatacatacaaaggtcacacacgaggggtgaacactattagatttacacccgatgggcggtgggttgtgtctggtggcgaagataatatagtaaaggtaagaatttgccaataactctatgctgtgtgtgttcaattgctagttcttctgctggaatttgatttttcttttgccttaatatttctaatgaaaaaaatcctttttttcccgaacatattacaatatgtttttctttggcagctctgggatctgacagctggaaagttattacatgaattcaagtgtcatgagggtcagatccagtgcatagatttccacccccacgagttccttct

SEQ ID NO: 182324 - DNA, 500 bp, Zea Mays
gggacttgtgcacttgatctagcgcgtttgttatgtcggtccggctgcacctgtaatcggtctttgtacggatagtcttttgggggagactttgattttgcgcacttgttgtgctagtccgtctgcacccttagacgacttttgcacggatagtctttggggaagacttcgattttgcgcacttgttgtgctagtccggctgcacccttgggcgacttttgcacggatagtcttttggggaagacttcgattttgcgcacttgttgtgctagtccggctgcatccttaggcgacttttgcacggatagtcttttggggaagacttcgattttgcgcacttgttgtgctagtccggctgcacccttaggcgacttttgcgtggagtgtcgcacgcgagggtagccagcgctgccccctcgcggtgacttcgttgtggtcgaatgccgaagaccgtcgatgcggtctttttcgacgttgtaatttttgcgggggattttttg

SEQ ID NO: 182325 - DNA, 361 bp, Zea Mays
tccgcaagctggttcttggtgctgatgtagcgcgccttgatgccctcttttgccaaacagtctcggattaagtgctatctcacccgaatgtgcttgctccgtttgcagaacacatggatcttggccaaagcccagagcagactggctgtccaccctgagttccaccgctccagtgtctctcctgaggagataatcgagcaagccagagcgcctgagttgaagcggtggaggccgctatgtatagacatagccaccacctgctgattgactgactgccagctgatagggcacttgccgaggaagaagtggatcatgctcatgcgttggtgtcgctgtacacgacatggtgtgcctccctaag

SEQ ID NO: 182326 - DNA, 658 bp, Zea Mays
actttatccttgcaaggagggaggatagacatgcttgcttagattgtaaggtgatacctgggccctagggagtgtgttgtccctctacacaagtttgtggtggtggacttttgttttcatgtacgtgtccacggggacaaacatgcaaagaccgcgagaacaaagtggtggaagcttagaggggaagcggtacaaacgtttaaggatagtatgctaggcaaggggccttgggaaggagaagatgcagacgacatgtggttaaagatggcaacatgtgttcggaaggtggcttcagaagtgtttggtgtgagtagaggcaaacaggaagcgaaagacacctggtggtggaacgacgaggtgcaaagggttattaaggaaaatgagtgtttcaagtgcctccaccttgacaagagtgcaaccaacatcgagggctataaaatagcaaagagggttgcaagtgagctgtgagtgtagcaaatggacagacgtatgatgacctttatcaggtgctagacacgaaggagggagagaaggacatgtttaggatggctaggacccaggagaggaagacaatggacatcaaccaaatcaaatgcatcaaggatgagacaaatcaacttctggtgaaggataatgagatcaaggacatatggcgaga

SEQ ID NO: 182327 - DNA, 427 bp, Zea Mays
tgaacactggcatccgtacctttgggatcgctgtgtcgccgccaagatggatgactacaacttgatgtaactccttgatcaacagttgttcacgacccacaacatcattggatcaacaagctaatggggcttgacttcttcgatgagtacaagcttgactgcaccaacatcatcatcaatgccctgtcccgatgcgatgttgagaccctgtgggtggccaccaactttacgttgtccttcccgccgtgggatgccctgctcgccgaggtagctacctaacttgagctccaagaactcattggctatgtcaccgctggtcgcaaaggtcctagctagaccatcgtcgataacctgatcacgatacgacaccatgtctttgtcctcgcctcgttgcctctgctttcatgcattctacagcagctccacc

SEQ ID NO: 182328 - DNA, 599 bp, Zea Mays
ggggggagttgccaagaaagacacaagacagagaggggcaagttttgagcagcggtggcagtaaggttgtgataacacttgcaacaaaaaacacatagatgctcatacaatggctgagtccccaaaagggagagatgtgagtaagagtcgcaacccaaaacgtgggaggaacactagcttggaagaggagggagtgaacaacattatttgtacaatggataatgcgttcaacttgactgttctgaggagagttgtaggggtaggacatgcgccagtgtatgccgtgggagaggaagaacatgcgagcgctggggttatcaaactcgcgggttgtcacattgaacccccttgatggtgacaccgaaccaggtacaaacataggcaaaaaagttagaaagagtggagaaagtgtcatacttaagtcgtagcggaaacacctaaaggtaatgcgagcagtcatcaaggaccaaataatacttgtgatcatagacactagtaatgtgtgaggtccaaagatcacaatgtattaacttgaaaattatgagtggcatgtgatgatggcacatgaaagtgaagttgtgtatgatgaccgagccaac

SEQ ID NO: 182329 - DNA, 375 bp, Zea Mays
ctgactgcagaggctgtggttgctgattttgttttcaagaacattcagccgttgaaggatagggcatacccggcctacctgtaccgaggcaacagaagaattcctgctgtagacttggtgaaccggcttgaaatgatacttagaggcaaggtatcaaatgttggcgcccctgtggcatactcggcctggaatctgcctccttccaaggccttcactcattttgtgtcgaatccacgtgttgctgatggcggtttgggccttagagtgcgaccctctgccgaagaagttagtgctttggttgcttcgcttggagaaattcctgatgatgaacagcaggtccactttgaggtgcctttggatcctagtgatgcaaag

SEQ ID NO: 182330 - DNA, 658 bp, Zea Mays
ttttttttgaaatatggcaaagatggatatattcgaatgcccaggccaggcagtcttgaatggttcttcctttgatgaagccatattgatttttatgaaccagggaagtcatcacagtctgaagccggttagccagcagcttagtaatgattttcatactattattcagaagagagattggtctgaaatcgcccgctactctggcattatccttcttcggaatcagaacaatataagagccattaatgcttcgaaggcaaacatctccgtggtagaattgatcacataagtcatagaagtcttgtgaaataatcggccagcattttttgatgaagttagtattaaacccatcaggtcccggggatttatcagaaggaagggccgccacaatactatcaatttcttgctttgaaaaaggctcatcaagccactgtaagtccctgttgcagagaatcaaactaggaagatcaaagacattgtccacgaaatcggaggaacccagtcgttgtttgaacgcattccagagcaggttggctttgaggtcatgctctgaaaagactgcaccactgtcatcttcgagcagcgcaattttattgcggccatgtcttaccgttgcatgggcatgaaagaatctggagcagatatctccatccgtaac

SEQ ID NO: 182331 - DNA, 305 bp, Zea Mays
atggcttcttggatagggagtgggtaagaatcacacgatgcagttacctccacctttctctcttctccttttgcgggcatattcttcacctccgcctgcctagatccttctttctttggcccggcttagcttccagtctcaccaacagttctgacctcggagcatctatcaatcggcccactccactctctggtaaggcaaccagccacgccacggcaccctttttgttcgagaatctgcttgcccgcgtcgccgtcgtggctttgttcctcctcgcgactgattcgtcggcctgagtcgtcact

SEQ ID NO: 182332 - DNA, 2453 bp, Zea Mays
ctgcatttgtaccgcagtttccaccgcttgtggatttttctgctattaatgttccaggttagtggtttgcgattgtgttctgtcataaataaatacatccggaatatttaatgttcaatatgtattttaattgatgatgcagctcttagctattattgcctttcaccatgggaagatggacattgacaccattagaatactacttagcgctgggccagccttttttgtactaaacttcattgaatgtatgttctctattgtaatattatagttatttttgctttatcttgattcctttctcatttctaaatgtaatctgggatgtgatcgatttatatttctacggttttttatattccatattttgtaggctgcttggatgtcatactcatgtttggtgcatataagacggcaagaggttttgctatctcaagattagttattcgatttctttggttaactgcagtttcaacatttgtaacctatctctatgtgtgagtactcacttagcttttgtaccttatactgtcaatgcacattaatgctgtctattcacttaaatgctgaatattgaacaggaaagtcctggaagagagagacacaaggaattcagattcgacttatttccgaatttatggtcttgttcttggtggttatgctgctgttcgaatcatgtttgcactgatggctaagatcccagcttgtcataggctctcaagtttttctgatcggtctcagtttttccaatttttcaagtggatataccaggtatgatgtcattgttcaacataacttggaaatatatttcgattacttatttatgcactgattatgtttttactaatttgttttcaggagcgatattatgttgggcggggactttatgagagtattagtgattatgccaggttctttcttttaccttaacgatttctgttatattatcatattgtggcacccttagtttattatgaactgtccaggttaacatctggagcagattttttttttaattttcaaatcttcacttcagaataccgatatctatctctatatgaaacctgtaaatattttcttgagtattgcatgtgaactagattttggttgaaaattaccaaggaattctgcttgtagtttcttttgtttcagggttggtacatgtgtcacttatcgcgaagcctacgaaattactaatttggaattgcgttaaaatagcttgacatacccttgttggttcatttacatgttgatgttaacagttagtggcaattgctcagtgtgattacttccagcctttaacagttactggcaattgaccaagatattaccatttagtagatttttgattacttgccataccgtcatttatatactcaccagacatcagttctctgaatagtgactagttctcacttattgttttcaagtgtgttgtgttatatgtttgtgacaattttttcttaagcagatacgtgatattttgggtcgtcatactggcatgcaaatttacttttgcatattttctccaggtggctctactaacaacttgcagaaagtttatgtttgttctatgttttgtatgatgataaaaaatactcataccttttcttacacgtttgcagattaggcctttagttgaaccaaccaatattattgtgcaactccatgatttgaagtattcctggcatgatcttgtatcaaggggttagtagatctgaaaaatattacactagaatcataacccaattgttgcactatctcaactaaagctgttattacattgtttttctatgcacattaaataaatgcaactataatcatgataatgtgttcattttagggaataaaaatgctttgaccattctgagcctatgggcaccagtcttagctgtaagttccggttttgacttcaaagttcctttgatataagaaaaatgactgcaactgataaattatgttctttcatttgtgtttacaattttacagatatacctgatggacatccacatttggtacactcttttatcagcacttgttggtggcgttatgggtgccagagatcgccttggagaggtgtatatttactcttttatgtcctggtcctgtttttggatccaagttcttatcaactatgcatacatttcttctgatgtgcaagctagattattgttctgacattctctaatgtaatgcagattcggtcaattgaaatgcttcataaacgttttgagagctttccagaagcgtttgctaaaaacctttccgcttcaaggttcttaaccctattctcaatatttgtcaatctgaatttttatgactcatgattaattgcatataagaggtctgtgtatttgtgtttattctgtcgtttagtataaattgcttttttgatctttgtttttataatgtttctattttatgctgcaggatacctagcagacgcattgatcgtg

SEQ ID NO: 182333 - DNA, 529 bp, Zea Mays
cacaggcctaggcgcccacgacatatcaatttggtatcagattcctctgacgcatcgaccaacatatccgcgttgatcacgatcctgcgaagacctcctccgactcagccaagttggatcagatattggcgcagctctccaccatcaactcacgcctcgacctgcatggacagcggatcacgcttttggagaagcgcccaatcgaccaacagctgccggaatcttcagaaaccagcccacgtaccgcagcgcctgtcggggtcatgcatagcacaagatctgcttctcatgaccgcatcgacgatggtggctatcgaagacccaatgtctcctttccccactacgatggtgagtccgaccccctgccgtggatcaataaatgtgagacttacttcaggggcatgaggactccagagaaggtgtggcagacatcactccatttggacggtgtggcgacaggatggttccatgctgtggagcgggacacgagcgacgtcctcacttggtcctgcttcgttgagttcaccca

SEQ ID NO: 182334 - DNA, 1053 bp, Zea Mays
gccagatgaagcagaagcggagtgcgtcccagtcattcttggttccttgtgacaacgactatgtcaagaagcagcgagttgcccattgtggtggctttgaagctctaaaggttggatcaagatacgctatccatccatccttagcatcgtcatatgataagtgatttcatgagtttcaactcttagtttggttctttgcaggagttagatgataatgtagcttccatgaagcaatgcatcaatcaccatggtggctcagaggctgtggaggtttagttatgcctgaacaagtcaaacctggaaccgtttctttgttttcctcttttccttttgaacttctcattatttccttttcatcaggaatctgttgagggggaacatgtgagttgtgttgggttttcggccttgcaaagatgtagctttaccccaagtactgcacagataaaagttgggttttctctagcacctgtggaaaccctaaagtctgtatcgaggaattcccttacttcacctggtgaggagttctggaatgcagcaattgaactcgctgatgggatatctgcccaggctgataaggtccgtggaaggccagaatttgatgcagcagaagacaagtcatcttgtgcagtagcagcattctttaagactcttcctagatcaggaagggatgagcttgactgtcaaaacacagtaggcagcaatgatacacatcatatagagaaattgtcaaataaagttgaatcactggcagtaaactgtcagcatataattagctcacctttgcctgtgaagcagctagatttctttcatgaggatgatattaaagtttcaggttcaaaatttgaaacaaaaggcagctatgaaacttgtaatgcacaagcagaccgtgttccactgaaaggcagtggccgcctagaaaaggaaaatctcatggaccctgtggatgtgttgaagagaagtgctattaatttgcacactgattctgcagccatgagatgtcagggtgttttcaagtcaacaactgaagggaaggttcatccaactcaagaggct

SEQ ID NO: 182335 - DNA, 399 bp, Zea Mays
taaacttgcatcattgaaggcttatcgcagagctcgtgggttatgcgaccggtgtgctgaaaaatgggtgccgggacatcgttgtgcaccaacagtccaacttcatgccctcgaagaattgtgggaattaattgaagacaagtcaagcactaacgaagtggatactgggctctcaccaccaggcgagctactgtctctctcactgtcagcagtttcagggattccttcgcgccggactatacaattctcgggcgaatgccaagggcatcctattgttctgttagtagattcaggcagctcacattcatttgttagctcaacattagctgggcagctctctggtatatctcctctacctcatcctgtgacagtccaagtggccgatggaggcaatgtttc

SEQ ID NO: 182336 - DNA, 368 bp, Zea Mays
gttcacggcgggtcacttcaatgactattgcgccgagctcggcgtaaggcgtgaactgaccacgccatatacaccccagcaaaatggcgtcgtcgagcgtaggaaccagacggtggttggcaccgccaggagcatgctcaaggccagcggcctccctggcacgttttggggggaggcggtctccaccgccgtctacctgctgaacaggacaatgacgaagggaaatggcggtaagacgccatatgagttgtggcatgggaggacgccagcggtccatcacctgcgcaccttcggttgtgtggctcatgtcaagagcacaggccccaggatcaagaagctggacgaccgaagcaagccgatgatttttg

SEQ ID NO: 182337 - DNA, 329 bp, Zea Mays
gccatttggtttgtataattcttgcttgaccatgttaaatcttcggtgcctgggtattgtatttgaccttgatgagacattgattgtcgccaatacatcacggtcttttgaggacagaattgacgcacttcaaagaaagctgagtaatgagactgatccacaacgtaggaatggtatgctatcagagatcaagaggtaccaggatgataagtccatcctaaagcaatatatagaaggtgatcaggtctatgatgatggaaaagtgtataaagcacaacctgagattgttccaccattgtctgataaccagcaaccaatgacacgtccag

SEQ ID NO: 182338 - DNA, 907 bp, Zea Mays
cggaaattcaagctattcttcagaggctaggcacaattacactgagactcccaaagagattcaaacacaacatcataccataaacccaagcccatcgtacagttttgtacaggatcgatgtgaaagagggatcgccaattgtgaatcatcgactaagctggattgcagaaagagaaggctaagcttccagcaacctctggcgatccctgttataaaccttgaaccagaaccagcaccagaaccatctccacacgtcgccagcagagtcgctgatcacctatattttgatgatggtttctttgagaaccttgatcttgatgcaattgaagctcaagcaaccgaacagtggagacagaagaccacacaatcgacgcagaaaccagtggaaattaagaatgcatcagacatgagttttgcacctccgtcattcgatttaggtctctgatagtggtggtaaagttagcatccattcatgatgtcatctagctgcagtacctagccatctcagagcatgctgagaactgcacaagcaatgaggttttctgcagaaggcccgaacctgcatcacatgacaatgccgcaggatctggcatgtctgccgctgtgatatttatcggcgccctggagctggaagatgcgctggcggcagattttgtagagtatttatctcagtacaggctcaatacaccatgtatattctcctgtaaatactgttcgatgtataagggtcttattgtatgcagacatttcagagacttgatgtgttaaacccagtggcaaaggtgacgtcagtgtcggtttttgttgcgcaggattatcctcgctctcgatgctgaaccgactggttttgcatagacgaggcatccgtgcagcatgatggcaacgtggagtttggtcaataggacga

SEQ ID NO: 182339 - DNA, 855 bp, Zea Mays
tcccgtctttgcgatgtggcgtgggaccttacaggagtttatggccctcaacatgagaacgagaaaatgactttcttaacagagctgcgcaatattcgacatatgatgaagcctgaatggttgatcttaggtgattttaacatgataaggagagcaagggagaaaaataaaggttcaataaatagaagagtgataagacaattcaatcacacaattgactaccttcagcttttagagattgagctcaatggtaaattattcacttggtcaaacgaacaagacgaccctacgatgtctagaattgacagatttttggcgactacggagtggcatgatacgtttcctcaggccgatctgcaagcttttgggaccatgacttcggatcattgccctctagttatgcaaggttgctcggattttggtttctataggggttttcgatttgaggctttttggacaaaaattgatgggttcaatgaggtggttcagcaagcgtggttgtctagggttagttcctcagatgccattctccggctgcatgtgaaaatggcccgtatggctaaagctctaaagatctggagtcgaaagactgtaggcaattttaaagtgcaactagcaatcattcagactgtccttgccttccttgagagagcacaagaattgagacagctctctggtgatgagctagaattcaggagaagcctaaaattgaaaatcctcggattagtgtcagttcaaaaggcaagagctaagcaacattcaagactcgactggatgcgtctgggtgacgcaaacacaaaatttttccacttgatggcaaataacagaagaagaaaaaattttattagatcgctg

SEQ ID NO: 182340 - DNA, 798 bp, Zea Mays
ctggcgagctgcagggtgatgaagcgaggaggcaaacgggatgacgggcaatggtgacacgcagtagtagatgttggggcgacggtgctgagcgcgggcatgcgaccgagggagaagagcatgagaagaggtgtggtgttgtgggaagcaagcgtgcaggcagcagtcaagcggagaagcgatggagcggttgtgtagaggatttttgatgtggaagcaacgtgaacggcactagacaagggcaaacagaggagatcattgtaagaaactcaccgacgtggtagaatgatgatagcgagttgtagagtatcacgaaacacagaggcgagaacgggacgctcgaactgagctctccgacaagcgacggaaagcggcacaacagctgcagtacacggcgtggaaagaggcttggcattttatagggccagagacgaaggcgaggagcgccggttgctggcactgatggccgaggaggtaacggcggcgttaatggcattgagcagaaaaaagtaacgcccgctgcggcttcatggggaagaagagaaatgaatcgacagtagttgagagaggaacggacgtctgctagcgcacggtcgggcttcagtgcggcgtaatgggtgaagggtggcggcggcgtcttctgattgggcggtggcgtgcgagctagcgtccagacagcgcgcacaggagtgtttcgctggggaagatgaaaagacagagaggctgagagtatggcaaggagggcccacacataagtgaaaataaagaataaagagagatgagatgaatacaaaaaag

SEQ ID NO: 182341 - DNA, 325 bp, Zea Mays
agtcgcgttctggcccctcaccacgccaggttgcccgcatatgaaagggagttgatcgtcttattcaaagtcgttcgcaattggaggccatacttgtgagaaaggtcattcacagtccgcactgatcatcgcagcttgaagtacatattggatcaacgcatgaccactattccacagcacacttgggtcacgaagctatttggttatgatttggatgtggtgtaccgcgcaaggaagcaaaatgcagcagcggatgccttatctcgtcgggatgaggaggccttaagtattcatgccctatcgactacatcatttgcagtttttg

SEQ ID NO: 182342 - DNA, 407 bp, Zea Mays
gcaaactgaagtgacgatggaacacggagcacccggacctgtcccaaagcaaccttctctcgtacgaagtggatgtcaatttcaatatgctttgtgcgacgatgatggacggggttggcagtcatatagacagcactgacgttgtcacagaagacgattgtcgccgaagagatgggtgcatgaagctcctagagtagctgacgaagccaacaagtctcagccacagcgtgcgcaacagcacgatactcagcctccgcgctcgaacgagaaactgtagtctgtcgtttggaggaccatgagactaagttgtcgccgaggaagacacagtaccctgaagtggagcgccgagagtctggacagcccgcccaatcagcgtcggagtaggcagacaaacccgtaatgctgct

SEQ ID NO: 182343 - DNA, 373 bp, Zea Mays
gtcgaagccatccatcgcgagtgtgtagcaggagatgtcgaaggtgtccttgtcgatggagatagccacctggcggcatacgcccgtgctggggacacgatcgccgttcgccaccttgatggagaggccggtccggcgttccaccatgatccccagcttggacaccagtccctcctggatgaaggtatgagtcgatcccgagtccaccaaggcgaccagggagactccgttgatgacgactgggagtttcatcgtgttgcccacgtcgatccctgttaaggcgtgcagggagatccccagctcttcttatacggactccgcgtcggcgtcgtcgtccatctcgatgaggaaaacgcccttgcctgcacacttg

SEQ ID NO: 182344 - DNA, 475 bp, Zea Mays
gatgattaacaaattaaggccttgcgttgcaatgccctgcacctgctcagagacttttttccactagtccatgaagacacaatcacctggctgaggcaccaaggctggaggttaacaagtcctaggaagcggaaccagaattctctagcaaaagggcagtccctttatgaagatatcagcaaattgggaggtcgtcagaacatgaactcaaatatcgccgatggcaactcgcttatggacgaaatggagatctatctcaacatgcttcgtgcactgatgttgaactggattggagaggtagaccgcactcacattatcgcaatagaccagggtgctcttggccaacggactataaagttcctgaaggagttggcacaactaacaagcttctgcaacataactggcaacaactttgtactcaacctcaacactagaccgtgagacattgggttggcgcttggacgaccaagagacg

SEQ ID NO: 182345 - DNA, 305 bp, Zea Mays
cgcgtttcgatctgtgtgaccagatcgtttcatgcgcgtttgggctctcaggtttggatgggaaggaccaggaggagattctagggttgtggactgtgtttgcggtagggttttgtgggtttgtagggtgtcttcaggtttgcggtttggtgcatggatcctgatctggggccgggattgtttgcctagattcctgtcgttgcacttggatgctgctctgcctgattactgattactcaagtgagtgttggctggcgccgtgtgttgtagacaacagtggtctcggagtcagtagggggctggca

SEQ ID NO: 182346 - DNA, 431 bp, Zea Mays
gggtatcgctagctcaaagagacaacagttcgccaagcactgttgatgcctttttgagctgagaccgacccctgtgatcataagcagccccgcgagaactctcccctacccaggctatcgggccttgtcattgtgcggacgtctgaggtcggagcacttcatttgtttgggagctggaaaaatgaaggtgcactggttggtttctctgaacttgtgaaagggttagcgaaggaccgtactgtaatgttcatggcctggaggaatgatgcagcaagtaggatcagaaatcagaactagccagcgacaatcacgctccagcttctgaaacgttgctgtagccttttgttgatgttcaggactgggagctagattgtcacgatttgacactgaggacgttactgtgcctgcaagcctaacctaagatgtatcaa

SEQ ID NO: 182347 - DNA, 384 bp, Zea Mays
tgaggacctcaccatctcctcctgttggttgttccaaggcccagcgatggagcgatgatggtggtcttgcctcttttgcgggtgcttcagcggatagtcggcctcaggcctcttacaaagaggtgttgctttcctcccgaccccccatccatcatcctgctgctgaggttgatggcgacggttgggtgagagtcaaggatcgtcgtgcatgcttcagggatcatcgtgcctgccagcgtgatcttcgtcaccctggcctctctgcccccaaggctactcctattgacttgcaggggtggtgcttcaattgcttttcctcgtctcatcgtgcaatcagctgttgtcgtcaggtacgctgctttctctgccggctgcctgggcacc

SEQ ID NO: 182348 - DNA, 320 bp, Zea Mays
tcttctttacttcgatctaggcaccactctgtccccttctccggccgccactgattctcctgcaaaccaaggacaggcttctagtcctcctcaatctgcatttgctcttggtccagtagctgttccaactggtagtagctctgaacttcctatgcgtttgtgacattatgctgtcagaccataatcagcactggagtgtaacgccttactgcattgcttcgtttcagcgccgaccactccatcggcgagtccttccccggagaaagccgcggctgtaagtcctgctgctcccacggagccacgaattgccccggctccag

SEQ ID NO: 182349 - DNA, 284 bp, Zea Mays
ccagaacacacatgttcagataacacacatgttcatgctcatgctgaccccacacaagttcatatcgtcttctgcgtgtatgtagttgtttcttcttcaattctctttgtggggaaaacgttaatgtaagttatatttttactttttgcacctctcactattgtttctacatctttctttcttgaaaactcgtgaatctgaattgtaatgggatttccttccaccaatctacccatcatgcagtgggattttcccagcaatcagcttgataggcgacaacgtca

SEQ ID NO: 182350 - DNA, 597 bp, Zea Mays
agaggacaccttgggcgaggaaaacggtggggcaaaggaggtagtgcggaggttcgaggaggaggaggtcgatgagctggagcggaaggaagtcgcattcagactgaccgtgcatatgcttgggggcgagggtgggctagagaccgagcagattgggaaggtcaggaatgctgctgcgcgacaggtccgatcactcacggattttctcaaggtaagattcttcccttcatttgtgcctctatatgatgcttgttgtgcttgctcattattgtggtgatggcttgcagattagaaagcgggactggagggagcagggtacacagctcagggcaaggataaacaccaaattgatgtgttgtcaagctgcagtgggggtgctggtgcgaagcgtttccaccatggatactgatatcaaatcttcgaaggatatgctccagcagactctagcttggttcatcgaggccaccaagtcgtgcatcctgtcatcctggcggaaactgaagatatgcgaggagctattttgcacactgctcaatgggatcagccagataactgtctcacgtgggggccaacttctgccggtgcttttgattccct

SEQ ID NO: 182351 - DNA, 375 bp, Zea Mays
aatcggccaacaagagtatgaagttgaactgttgtcgtaaggtgtgaaaccatcagtggacaagcctagacaaacactcctagcgtctcttgcaaattctgggtcaaaacgatccagagccttccaagcatcgccatctgatggatgcatcataatgtctaggtcttggatctcacgttctccttccttatgccacaacattagcttcacagtttctggggttaaaaacagacgtttaagccttggagtgatgggcatatatcgaagctgtttaactgccacttttgtagcaaaagtagctccatcctcttttagtacctccgcatatcttgatttaccgcatttctgacaatgggtggccgcttcatattcctt

SEQ ID NO: 182352 - DNA, 626 bp, Zea Mays
aaggagtggtcgaacatgcatgaatttctgtatgatctgaagaacacactgctatgcctacagtatgaggtccaacgtacgaagccagcactatctttcctctaccagtggcagctccttgatcctttcatggctgttgtttgcatcgataagaaggttgcagctcttaaagatggagtggcactgaaagctgttaacagcaccgtgacttgcctcaatcgcagtgagtgtaagatgttggatgccaagaattcaaataggtcacttggggtcaactccacaagtaaatatatgaatccatatctcagctcctgcaaaaaaagtcttctgccgcttctctctgaatctgattatcagcctgataaggaagggaatactatgcctaatgaagaagcttctctattttgtacaaacaagactagcgaagatgaagctgatcggcggtcattgtgtatgtcagaaatgaatgaaataggcataagaagcacagctcatcacatagttatgggtttacatgatgcaacagcttttcatggctcaagccaaacttgttcggggaggaaaagaaaatttccgtgcatcaagtctaaagaggataatcaaactgaagacaagtctgacccatt

SEQ ID NO: 182353 - DNA, 1568 bp, Zea Mays
catcggaccccaaacccaaatccctaaaccgtaacgcccaaaccctaaacatcaaaccctaaaccctatataccgaatgcttacacctatggattttttgccattaaatggtctccactaaaaacccaagaatgtgatttgtgtccaacccatattaaaatgtaaaccaagtaatactaaaatccaaatcataaagaattaagggcaaaccatagtaaaattgtagagatagtactatttatccaaacattaataaatgtgtaaagacaaaaaaatttgcccaaatcctaaatctttaaccctaagcactaaacgctgaaccccaaaccttgaactcgaaaccctaaacgccaaaccctaaaccctaagtatcgaaggataactcatatggctttttgaccattatggtctccactaaagaaccaagattgtgatttgtgtccaacataaacatcaaaccctaaaccctatgtatcgaatgcttacacctatggatttttttaccattaaatggtttccaccaaaaacccaagaatgtgatttgtgtccaaccaatattaaaatataaaccaagtaatagtaatatacagaaatcataaacaaactaagtgcaaaccatagtaaaattttagagatagtacaatttatccaaacattaataaatgtctagagacagaaaaaatttggccaaaccataaatcctgaaccctaaacactgaaagccaaacccttactcgaaactctaaaccccaaaccccaaaccctatgtatcgaaggataactcatatggctttttaccattatggtctccactaaagaaccaagattgtgatttatgtccaaacactaaacacttaatcataaccctcaaccctaaacactaaacaccagaccccaaacacttaaccctaaaccctaacgccagccctaaacatcataacctagaccctatgtatcgaatgcttacacctatgcattttttagcattaaatggtttccacaaaaaacccaagaatgcgaattgtgtccaaccaatattaaaatgtaatccaagtaatagtaaaatacaaagatcataaaaaaattaagtgcaaaccattgtaaaattttagagatagtacaatttatccaaaccttaataaatgtctagagacagaaaaaatttgcccaaacactaaacactaaacactaaaacacaaacccttaactcgaaactctaaaccccaaaccttaaaccctgtgtatcgaaggataactcatatcgctttttgaccattatgatctccactaaagaaccaagattgtgatttgtgtccaacctatattaaaatttgaccaaaagagtagcaaaatctagaaatcgaaaaattttaggccgaaccatagtaggattgaagagatagtacaattttatctaggccataataaatgtctagagatagataaaattttcccaaaccctaaagacttaaccataaccctcaatcgtatacactaaacaccggaccccaaacccaaatccctaaaccgtaacacccaaaccctaaacatcaaaccctataccctat

SEQ ID NO: 182354 - DNA, 315 bp, Zea Mays
accatctttcgtagttcagggtactttttgtctgggatctcggctgagatcaaaaggtcatactactcagggcacgtgagcttgtacttcctctgcatgattagtagaaaatgggcatggggcaaaccccgcttctgaaactccacgacatagacgtaggcccggaccttaccgagaatatcatgtttagtcagcctatgctttaactcttgtagcttcgcgtgaaagacacgcactacaagatccggacgatcttgcggtgtctgcccaaggagaagctccgtccttatctcatcccagttggggttacatgtc

SEQ ID NO: 182355 - DNA, 315 bp, Zea Mays
ttgctaatgacatcaacaagacctacttatctattattcacaactcgaacacagttacgcgccgcattctagtttccaacataatccttacataactcgtaacccaactacccactaacgataaatcactcacgacgactaccacatccactgatttatttatttggaacaccgactgcctagcgtaccactagtaccccgtattttgactcgagcttaataatacatcctttattcgattatacaacagcaacttaagcgtcgtgttacccaatgtgtacatcttttctcgttgcgagtgtaaccatatcacgg

SEQ ID NO: 182356 - DNA, 298 bp, Zea Mays
gacgtggtctaaccaccaaatttcgccaacgttggtcagactagatagagctctttgcacttctgatttagaggctatgttacctaatcatcttctttagagtgctgtgtatgaggactcagatcattgcccactgattcttgggcttaacagtaagtgttctggcaagcgtagattcatgtggcttaatagtaagtttatcaaggttggagtgataaaaaggtaggtcatgtggcttcccagctggcccttgctagagaaatcctgcatcaatttgaagttgctcaagattttcggc

SEQ ID NO: 182357 - DNA, 735 bp, Zea Mays
tgaatgcaagcagctagttgtcaggcaccaactttctatactcttgatagaaatctctatctaaacgagggcaagggacaatcaaacacatgtaaatatagaaactaaaattgatgaaaccacatgaaaacattgctttggccgcaatttcaaactgaacctattttgtaaaggaaatcaaatgcctaatctccaacaaactatcaacaccaagaaagaaacccagtagataatagctacagataaataatagctataggtaaacctaagaacaccaagagaggttcactaagactaaccatggtatgagcagttgcagtacccgccgaagaacttgcgatatacctaggatgaagacagaacaattattttttaatcctaccaaacagatagcaccccacctgacatgaggttacatgacatgttctcgccaatcactgttttcattacccaataaatctgccaatggatctatcagcgcccagatttcctaccaaatcggatgcctaccatcggtgagagacatgtgagcccaacaaagccatgtccagaagggaaagcaactgttggcttgtcttactattgagttgatggttcagaattattcctcgaaatagtggattagtggttatgattagtgtgccttggaggcagaatggcaccatcttttactaccaaaatgagcagggaaagtaagaggactgcaacagatgaatctgggaattctgaacttgt

SEQ ID NO: 182358 - DNA, 878 bp, Zea Mays
gaattaaaggcggacaagggtggtagcagtggatcggcacagggtactgagggcctcaaggggccgcaggaccaagtggagagcgcagcccgggaaggtgagatgaaaaacaaggacgtcgttcaggaggaaggtatgaaaattcagagcaaggcacactgtcatagatgttacgcaaagggccatgtgatgaacgactgtgtggcgaagttgtattgtgaagtgtgtgacgtcgattcacacatcaagcaacggtgccctgttttcaatgcgccaaaagtgcatgctgtcccggctggttttgcgatcagcaagggtgggttttttcacatccctaccaataagaaattggtcaaacagaagggggactcgaaagctgctttgatccttgtctctgatggtgcattatctctggacaatgtggtatgtgaacttaagaggctccttccgcacctagcaccgtggaaagtggatcaaattgatcaaggaaccttcaaaaccatatttcagtcctcctcggaattgaatagaatggttgaatggggtccggtcagggctaaaacgcagaaggcgactcttgagtttaaggtatgctcatctggaggtcgtgtcaaagctaagctggttgatacttggattcagtttaatgggttgccggttgaattttgcacggtgcctcacatctggggtgttggctcgaccctgggggttgcatccgatgttgatatggcgttttacagacagcatggcatatgtaggatgcaggtcagtgtgatcgatccacaggcaattccctgtgcggtggatgtcgaaatagccaaggtcatctacgaggtacacttgtgggtggaaaatggcgcagggacagcggtcccaat

SEQ ID NO: 182359 - DNA, 716 bp, Zea Mays
atggcgctgtgtgttgaacctgcataccaaggaagtggtgtagctggccgaggtccttcatggaaaattcctgctgcagagcagagatggtacgccgtaggagagcagccgaggaagcagtgaggactatatcatccacatataataggagatagatcatgtcagtgcctttctgatagacaaacaatgacgtgtcggactttgtcatagtgaacccaagctgaagatgtgaggcaaacctgctataccaggcatggggagcttgtttcagaccataaagatacggttgagatgacacacatgttctggatgtccaaaccggcaggaaagccttgttgacatccaactgatgaatgggccaaccgcgggagagagccagcgagagaactgtacgaactgtagcaagcttgaccacatgactgaatgtctcggagaagtctgatagaataagtcatgtggtctctgttttgtggtgaacaggacagcagcacagcagtacaggactgcagcacaacatcatcttttgactgctgcagcacagcagcagtgcagttgagtgcagttggagacagtcagtcacctttagacagtcagtcaccttttgactgctgcagcacaacagcaccttttgactgctgcagcagcaggacagtagcagtagctggcagttgcagttcttgactgcactttagcagtagctggcagttgcagttttt

SEQ ID NO: 182360 - DNA, 354 bp, Zea Mays
ttataacataacagaggtgtaggagtgtcacaacatacaccaagatcagccaatagccagcggagccaaataatttcagcagtggtagtagcaagagcacgaagttcggcttcagcactagaacgagatatggccgcgtgcttcttggatttccaagcaataggagaggatccaagaagaatacagtaacctgtagtagaacaacgatcaacaggatcacttgcccaagtggcatcagaatacgcatgtagccgaagtgggctaccaaaagcatagagtaaacatctggatcgtgtcccacgtaaatatcgaagcacacgaagcaaatgaccataatgaactgaagttggtgtg

SEQ ID NO: 182361 - DNA, 372 bp, Zea Mays
gtccaaaacccaaacccaagcacccaaatccgaccccaaaatgcctgcttctcagtgatgggatgacggatgctcccctcctgctgtagccccagctcgcgccgcctcgctttctcccttcgcgacgccggcatttcgtggccggcggcgccgccttatcctctgccattcttgtgggcaagataagcagcgggttgtttttctttaccgttgtttctgaaggtttcggggccagttcagccggatcccggctcttcggacgccgccgctccctcggcctggtggagctggtggagcggaggggaggggcgatccatacggaggtggcggttccatttcttgttttcctggtgagtaatcctaggttgcttg

SEQ ID NO: 182362 - DNA, 449 bp, Zea Mays
gagaggacatgtcgaaatgcttcggagtcaatcaggttgtcatcgcaaacttcatatcagctgttagattttagtattttacttctcccaaactcttagaagcgacacttgcctgttaaaatttaactgttacttagtcaaattgctgattagatttttaaggacttagtctgccattcatttcttcacagctatgttatcactgactgaacatagttcttttccctatttgtttgaaccaaagcacaaggctgctaaggtcaattgatgagatgcctttattatagcttatatactaactttgggatatctgtgacacactcttaaattttcagatctgctgcaactggaaagcttcgtgtggtggaagagaaacttatgcagcaaaatgctcaacttttactggacgaagctgcttcctggtcacttctttggcacatatatggcaa

SEQ ID NO: 182363 - DNA, 305 bp, Zea Mays
tggaggtctgcttagtgacgtagactctgggcccgtgctggactcgatgtgtaaagccggcctgctatcctccccacagttggcagcgaggcagtgatcactgctctgttgagccagcctcatcgtcaatgaggtgccgagctttcgctagagctcccgtcagccaccaagtacccaacttgagacgggcagcaagccggcggccaaggcacttgcccatacaccgagtcccaggcccagaagagtcgtaactaaagcgcatccgcaccacccttaatgcccccgcacgggttacaagccctcgc

SEQ ID NO: 182364 - DNA, 505 bp, Zea Mays
tactgcacatgctcctgcatgaacttcatgtagcgggttactgtctccaggtacaccaatgcaactaagcggtgtgtgtgacacgagaacctcgcagttaggagcatgggcacaagctggcctatcagccctgccccagtccgaatctcctcctcacccacagcttctccaagccggaagaacagggtaagagcaacctcaacatcctccacactagcttctgcagatgagagagctgtcacaatcagcccacttatgaatagctgagctgcagctggtgcaacacgacaaatgctccggaataatacgatcaaatctttccgttgctctgccatgaggtcctcctcctccttccctatcttgtcaagcacatcaagatgccccctatatactggatcaaatgacatctgtacccgcaccacctccaagatccgtcccaagtgccccaactgcttctcagatggtgccttcattgtgctcacatagccagataagaactcaagca

SEQ ID NO: 182365 - DNA, 581 bp, Zea Mays
gtttcttttgatacagctggcactctagttgttctgaaagaaaaacttgcacgttatgttgcctttgagcggaagacagattcatcaaagcttttagagtattgggttcctgcccgcctttcaccagtgcaactagagatgtactgttacatattactatcaaactccccagcccttagatcacattctaaaacagatagtgttggtgctcttcgcaacattcttatatctcttcggaaggtttgcttttaaaacttctttgcatgcaatgacttgttttgacgtagcaatttagctggacgagatggaacctgcatgtacaattacttatcatgcatgtctacagacaattctattgatcttcagttaatccttatgcaacagtgttgtgatcacccttatcttgttgatcaatcgctgcaaagcacacttaccaaggatcaccctgtaactgatatccttgatattggagtgcgttcatgtggcaagttgctgcttcttgacagaatgctccaacagatcaggattcaaggtcttagagttcttattctttcgcaggtgagatgtccatggtatcatgc

SEQ ID NO: 182366 - DNA, 385 bp, Zea Mays
ggggagtccacagccccggccagcaccagcgatggctcatggtggacgtgggcgacgcattgctcttgttcctcgcacaccattactgtcgtgctctgctaggcccgacctccctctctctgtccctggtcataacgttttgggcgagcagcgaggccacaaggcggggttgtagctagaggagaggaagcatgagataggcatgtgaaactggcacagcccgagagatccttggcagaggtacaagcgtcaaggaggaggcgaggtgcgaaggggagggaggccgggatggaggcgagctgacgtctagggccacggcgagcagtgaggccgtgggaggcgaggggcgaggcgaagaggagggggactggaatggatgcgagac

SEQ ID NO: 182367 - DNA, 289 bp, Zea Mays
aagaaaggtgggcttgttgttgaaaggaattgtgagatactagtgactgaaccgagaagagtgggatggaacagcaggactgatgaagttggattcagtgcctgggttggtaactgaaggagaatctcactgctgtggttgcacttgtgtgtatagttggagatatggatggagtacaatgataaggcctagaggcctcacttccaacagaaattatttactttggatctctttgagcctatccacaaccacaagtggagtccacatttgttttattcgctatccgcag

SEQ ID NO: 182368 - DNA, 524 bp, Zea Mays
cttagactgattacaataatacacataagcatctaacagtttaggccaaaaagattaaaaatggaaatgctcctttccattttgttatcattcagcccaagaacccacagacggtgatccgaatcattagaggtcgaactctgcaccaacagattatgaaaatgatcccccaaacagctgaacacaacactctatctaaatacatcatgacaccagtggtaacaggctagctacttcaccctagtaaaccattagaaaggtggtctggtgtaacgtttgtcctgtccgaagcgtcaggggttccagttacttgacacctacatgtttctccattacattatcggataatcatatccctccacttacccttaacgtccacctacaatacatcatacatacaacccatcagtaccttgattggcaaccacagcaagttcactataataaccaaatacaaaccggtgttctgccgataaaaaacgtcaggattgttatctaaaatatcctttcaattgccactacca

SEQ ID NO: 182369 - DNA, 441 bp, Zea Mays
ccacaaaccctaaaaccgggggtatgaatgtcaaataacctaaaattttttaaggtgcattgttcctctcattgttgtgccacttacataaatgtttagacttagttattggatggtatgaattgaatacaagcaacatctctaagagagggaagcaggtgatccaaactatttgcgactagtagataagctattctgcttgtgttttttgttctgtttggtaagacatgttttattcatcatcactaagatgattttcctccccacttctggattagtttagtatcaacacaggggctgtgcgtggtactttcctgtatccgttgatttggtaatgtaaaaatatctgttgtaacacaattatcttgtatttgtatacacaattatattgtatttaattatattaatttgatggtttctaacgtattaccccctttttcc

SEQ ID NO: 182370 - DNA, 2315 bp, Zea Mays
tgttgcaccccttgtgactgagaacttcagagctttatgcacaggtaaccttctcaccacttccttttcgtcaaatcagtaaaagttcatctgttagttagtgttacttattattttgtaaattggtttatgtggcaattggacatgttgctcgagatttttaatggtcgtggtttcacataatgcgttcatcaaaatacttgcgtttttattgtcagactattaaatatttgaagtagcatgatatgatgtaaaatgctgtaaattcacaaagccacactcttctgaaattataaaaaactgacaattccaagagcttgctttgagcaacaacactttttattgcctacggcgtagagcgacacccttttagtgcttggaggttactgagtagtaaaacactcaagtacactggagatttagaccatgcttagtgcttacaatggccacttaatgacatggtgctaggaaataggaaccaagtgcaaatcatgtcatattgtttaggagggattgtgatgttatcaccaaattgctagggttatgctacaattgcccttgtttatccagatgtgggtcatatccagggaaagttagatctgttgacgccccatccaaacagtaaaaatgaaaactgtttcactgagagtttctgtggtgaataatgttccagtgctaagattgcaattctttttaattttaggaaactacaagtttaatttcaagttcaagtgtaactttcttttaattactttgggatgcttgtgaaattttactctgattgaaataggccacagtttttctgctttgtttaatttcgctccaacgattccagttgttgaggaaatatttttcctatatttatgtacaaatgctttacttcctatccttactaatacaagcccattaggacattgatgcattgtccaatgcttaagtttgactagcaatatcaagaaaaatggataatatcaaaataaaagagttcatattttgaaaatttaccctgatgaatctactaatcgagatcttctgttgcaaatctttgtgaattatagatattgatgtttggaactagaaacaatttgacctaggacaaacttaaatgaacatgtacttgtggccaatggaagtaatgtgtagcttctttttgcaacattgaagaatgccgcaataatgtcttctattactgctcctactactgttttaattatctgcactaggcaattgtaactgatgttctggtgatactaatccttctatcatcacttggtagtcctaatgatttttattgttatttttttctttgcttaaaacccactttggaatatcattcaaacttccactctgtcatctttcaagccatatccaatgtgccattctgtgattctgtttgaatatttccgaaatctgagaacctaatcttttctttctgtgatgatcaaagatacacatttcgatgttcattgtttcataggaatttagttaatttcctggcaaagtaattctgcatccttaatggttgactatatttttatatatgtttagctttaatatactggactacaaatttatgatctctttttaaattatgaaacttcattttgaatttttgagcaaggtgattatgttactacaagggagtctcttacagatttcatgtaaagttggatgcatgacataccggttgatgtttctattttgaaaagttatgttttggcagacaatttgttataatattcttcggtttatgacatcaactaaaatcaggatatggaacgaagattctgaacttgtgtacatcagtaaacacatacatactcgcattcgcatgcaattagtataacttgggctgtagactttttagtccgtttcttgtcttgtaagctttccgcctaatttatgcataaaaagctattttgatgttgatctgagcggttaatatactaatatgtgttttggaaatcttctgataatgtagtgggtacctttgttctttgtgtcacagcccaccttgtgcttgtgcatagacaaatccacagaatatattccattctcagtttaaaaaggcctccttatttcctagcattgttgctcttaattgatgttgcacactttaggtgagctgggaattggacacaagactaagaagccattatgttacaagggatcatcgttccaccgtgtcatcgaagggttcatggcacaagttagtttttcttttgtatttatgcattttgcttccatcaccgttacgatgtttgtattttgtggttagaatttggttagctttgtcttgttctgtttttagtcag

SEQ ID NO: 182371 - DNA, 285 bp, Zea Mays
tgcgttgtggatctcagctcgttgattcgtacattaacgatcgcatatgcgatatgcgtaggtacgcaaaatctgccctttttgacagcccgaagcgtgcagagcagaggaggttgaaggtggtagatgagaagagagcacaggatgcaagggaatgggaggcggctagagccgagaaacagatgttggataatcttgctgatcgtctcaagggaagcgagtgagaaaaatgatactataattttgttagtacaatttatttatcctgactttgctaacttattt

SEQ ID NO: 182372 - DNA, 415 bp, Zea Mays
tggtctgtcgcctcacctgaagccagctaggcgggcgtctggctgacttagatgatgccacggtgattaggtgggctcccaggcgacgccgtgccaccgcctagctgctgaagtatgctccattgtgtcatatgtgtatgccttgtgccctatgcgtccaagtacatgtttcctcttctttctttccctgctgccgccacaagctctattagccgctgatgcaacttcgaccaaccttctccagctccttgctccccaggttgcccacccgcccgtgcctggagagtggagaccatgatcttttttggtctcatgttgatgaagctattagtacaacatcactacattgccacaattttcctgggatgaccaggacctatagtggtcaaaatggtgctgcttcaatatccaccac

SEQ ID NO: 182373 - DNA, 308 bp, Zea Mays
ggacaggaaaaaaggtggtgttttagtactctcaagctgttatgtggaacgttctactcattcatatttccagaggttgaaagacagtataaacaatgtggagagcgacttctgtataggacttagcccagatggtccatgggaaagttttactgcagctttgccagtgaccgtccttccaaaatcgcttaataataaccgttttgcatttgaggtcactatgaggaatggaaagaaacatgcaaccttgagaggtcttgcagttattgccaatgatgctgacataaaacttgaagtgtctatatgtc

SEQ ID NO: 182374 - DNA, 649 bp, Zea Mays
gccaacaagtggtattagagccatggtgatcgtcggcgatgtcccaagacgcgagcggttcaggcggaggtagagagaggactctgtaacagtcctattcaccaaagcgtcgggagattgttgtgtagaggactgtgcgagaggttggcagggccaactggccatgtaccaatatacttattgctatatgttgatgatattgtccttacaacttctagcaccgagcttctgcaacacaccatctcagctctttagcgggaattcaccatgaaggacctgggtgctagaatctcttcagcacttcctcaacatcttagtgtaacgacgatctgacgtgctcttcctgcatcagtgcttctacacacatgacattcttgaacgcgcagggatggtaggttgcaagcgttgcaccacgattgtttaccttcaggccaagctcgctgccaacttcggccctcctatggcggatgccacacaattttggagtctcactggcgccctttagtacttgatgttcaccaggcctgacattgcttatgttgttcaacatgtttgtctccacatgcatgatccgtgggagccccatctatgggatgaagcgcgttctacgctatcttcagggcactccaattcatgggcttcatcgatg

SEQ ID NO: 182375 - DNA, 417 bp, Zea Mays
ctagccagtgcccggaaaagcaggttatctgtgagcaaagtcatttaacccgtataaaatactacgggagttttgatgtgtccttgggcagatatttgcaagatattctgcagaatcaggtgacactacttcataaccttttagtgttttatgctcatttacgtgatgaaacatctatgttttgtgtttgtaaattgtaatacaacgtgatttggttgctgaaggctcagcttttaatgttttcctagcagaaactgagttgctcctcatgtggagagcctccagagtcgcacatgtactcttacacgcaccgcaatggaaatttgaccgttctagtgaaacatctggtgccccaacaccatttgcctggtgaatctgaaggaaaagtatggatgtggactaggtgctcaagatgtg

SEQ ID NO: 182376 - DNA, 558 bp, Zea Mays
tacagattgatagtccaatgcgtccagaagattggcagaaacggggaatgctcagccattttactgttgtgcgcaaacttgaaggtagcatatttcctataggtcttgctaaggaagcttctgataggaaccagaaggctggtagcaacgtgctagcactagaaagcaggtgggtgcttcctttgaccatggaaatttgttgtttaggaccaggtttggtcaaatcttagaaactaaaacaccaataactactatattatttcgtttgaaaacaagttatatgtgaagatttgcattcaaggttttgacaaaatctctaaattcaaaggattttaaaaatatattctagataaatataatggtcaaagatacccattcaagaccacgcaaaatcaaatggcttgactatttttgaccagaggtagtgcccatttattttgatgagttccattgttgaagaatgcattgattaattggtctactcctttttccagtgaacgtgcattattaaatcgcttgatgattgagctgagcaaacttgattgtgatgtacttgtg

SEQ ID NO: 182377 - DNA, 742 bp, Zea Mays
ctcggctgttgctcatgtcatttcccatgctgtcaacgaactccatgtcccacttatctctttcgcggccactgatcctaccctttcttcccttgaatacccgtattttgtgagggctactcagagcgattactaccaaatgggtgctatcgctgccatcattagtcaatatgaatggaaacaagtcattgccatatatgttgatgatgactacggtagaggtggcatcactgcactaggtgatgcccttgcaaaaaggaagtgcaagatatcctacaaagctaagttgccacctggtgctgcaaaaactactatcgaggatatcttgatgcaggtaaatgacatggagtctcgcgtctatgttatccacgttaaccctgactctggtcttaacgtgttctcagctgcaaaatctttgggcatgatgagcagtggctatgtatggattgcaacagactggctttctgcagtgatagattcttctgtgcatggtattcctgatgtgatggaacttacacagggtgttcttgtgcttcggcagcatatagctgattctgatatccagcatgcctttttgtccaagtggaataatctaactaggaatggaagctcttactttatgcatgcttatgactctgtatggctagttgctcatgctgttgagcgctttctgagagaagggaatgccatgtctttttctgctgacccaaaattgcaagctaaaaagggaagtagccttcag

SEQ ID NO: 182378 - DNA, 423 bp, Zea Mays
tgtcggtggtggaaggtcggagcatgtagagtggccctgcgctgtcacaatgggcgagaggggacctagtgaccagatccttcacagaaaaaccagaggggtcaaactcaatggaacaagaattgttagcggtgaaccaactaacaaaaagaagattatgggtggtgtggggctacaagaacgtcgttgagatagaatgacccagggagaaccgatgcacctactaaggtgaccggcagagtggaaccatttccaacgacgatcgaggagggatgggagcgagagagcgtgtatgtaatggggtggtgtggtaggaagcaccggaatcgatgacctagttagatgagggtgcggccatcgccatggtgttgaaagcggcggcaagggaggcgtggtcccatcctccggccggcggggaccaag

SEQ ID NO: 182379 - DNA, 366 bp, Zea Mays
ggctaaatgttcttcaacacagtcaatcataacggcttcagcagtcaagtctctatctttcagactagcaatctcggccagcaaaacccttgcctcagagaccttagaatcagttgggccctctatccaactaggcatttgaacatctgcctgtctcctagagcgaggaggcagtgaattattgtgaatttccatagtaaaccactcatatcatcacaccttgatactatccttcaaggagatgtctagatacccagtcttcctgccttggcgaagttctaagctggctcccccaaccacctggtgctaaccacccgccatacccgacttgcagtgataaagatacctccacaaaacaaaatgtga

SEQ ID NO: 182380 - DNA, 337 bp, Zea Mays
cggcggtggcatgattttatcatcctgacttgttcgcagtcccccttcactcgagataacaccgcggtggcacaactgatcaggagctgcttctcgtctttcctggggcctttggttgatgggcgctcctgctccgtagcaaacagaggagttgcgaatctgctggggcagagttctgatgaaaaagcacacaggcttgctgtagctccagggtttctctacatgagatcctgccggttatttccaaacaacacctttgtttgtgaagagatcttggaggtggtcattgagagagcccatgcgctagcaaatgaccgcagttctgacagacctgccc

SEQ ID NO: 182381 - DNA, 474 bp, Zea Mays
atcctgatcgtgaaggtgaagcgattgcttggcacatcaaagaaatgcttgaacaacaaggtgcattgggctgtgatgtgactgttgcaagagttgttttccatgaaataactgagaatgcaataaaaaaggctttaatgtccccaaggtatattgatatggacttggtcaatgcttatcttgcacgccgttcccttgattatgtaattgggtttggcatatcaccacttctgtggaggaagttgcctggttgccaatcagctggacgggtccaatctgctgctttggcccttgtgtgcgatcgagaatctgaaatagaacagtttaagccacaggaatactggacagtacgggcagacttcaaaatgcaatttgcagatctgtcaaatggcacatgtattccatttcatataaagcatttgaattcaaaaaagctgggtcaactttccataccctctcaagaagaagcgcaag

SEQ ID NO: 182382 - DNA, 409 bp, Zea Mays
gaaaaaggtgcaacaagattttaacagaacttgaggaaggtaattacctgccaaaggaattagcaaaggcaatgtcagtggtgaacttatatcagaagcagaagctgaaaaatgtgagtatttcacaatcagagtttttcccctttgcaaaagaaactatttctttgcagaatgatatcctgaatgccctttggtcacttccaaatctcaagcatgcgaagctgaaattgctgcacaccatactggatcatgattctaaatttgaaaggaagcacttagcaactttgaggaactacttgacagaatgtttgtttggatgtgatgatggtctaccagatgtggccctccaagccatagcctctataaatcagatttctagatgtcagcatgttgtgttaacggaagagag

SEQ ID NO: 182383 - DNA, 286 bp, Zea Mays
agaggacagggtgttcactgatcagaaggataagattgaggtggtctgggatttttacagcaatttgttgggatctgcgggacaacgtaacttcactcttgatcttcaatcctttcatcgatcagctgttgatcttaccgagttagaccggattattgacgaggaagaaatttggaacaccatcaaatccatgccttcagataaagctcccgggccagatggctttacaggcagattctacaagatggcgtggcaaattatcaaagtagattttatggctgctgtg

SEQ ID NO: 182384 - DNA, 352 bp, Zea Mays
cttatgtcagtcagcaagactggcatgcttcagaaatgacggtcagagaaacgctggagtttgccgggcgctgtcagggtgttggaataaagtatggtaggtcaccgcaccgaattagtaaagttttgctgttccttgattgtttggtctttgacatcaatcaacctgcagacatgcttgttgaactgttgaggagagaaaagaatgcggggataaaacctgacgaggacctagatgtgttcatgaaggtagactacatttaggcagaatgattatataaatatttaattattgtgtcataaatattgttctcaaattttcaggcgttggctcttgagggtaagcagacaag

SEQ ID NO: 182385 - DNA, 456 bp, Zea Mays
tgggctgccagtgcaaggagtcgcacaaattccatccatgtcacgggagcgaaggcgtcatcgaagtcgatcccctcctgctgcaagaaactgtgtgccacaaaacgagccttgtgcttgacgatggcgccggcttcatcccatttcagcttaaacaacaacttaagggtgatggcgcggtgaccacgagggaggtcagcaagctcctaggtgtggtccgtctcaaccatgtccatctctaactgcatcaccgcatgccatgccgcatgtttcttagcctccgcgaaagaccaaggctcaccctcatcgcacgcaagatgcaactacgcctccagattgcaaggcactaggcccggcaccggctagtcaccgagaaggtcctccattgcacgataccgcaacgactggtcgttatggtatgtgtcgatgcactccccgttgtgggagagcagggta

SEQ ID NO: 182386 - DNA, 401 bp, Zea Mays
ctgtgttcctttcatccactatcccgccgcagatcagctggggcgcctaatttttctctgcatctgtcctaccgagatccagagtgcgaccatctaattgctacaatgctactctatctacaggtgtattgtgatggatcctacgtccgaaccagcagacattgaatcaggagttggtgatgttacgacacctgtacgaggcagaccaaccatggtacgtggttccatgacggcaggtcgtcgtggcgcaggatttacactggcagggcgtagtgccggtcgtggcactagttgtgtgatacgcgatagtaggagtgccggaaggagcattcgtggtggacgaagtgttggtattgacatcgatttaaatgctcaaggtcgggaagatgatgaaccaattg

SEQ ID NO: 182387 - DNA, 585 bp, Zea Mays
gcgaagtacgtccacttggagagagatgaataaataaggcatggtcatgagcactaggtaaaaaacaagcaacctttatcatagagcaaagcactcaaaccaagcacgaggagcttgtttaagaccatacaaagcacgacaatgtttaagaccacacaaagaacgatgaatacgatagacataacctgaaggagcatcaacactgggaggtggttgcatatgaacttcatgtaaatcaccatgaaggcatttttaacatccatctgagagatagtccacaaagaagtagcaactattgcaatcaaagtacgaacaatagtcatatgtgcaacaagggcaaatgtgtcattataatcttgcattcttgtccttggctctgctgaatacctctggtgacaagacgagctttacatatcacaatggaaccatctcaatggaactatgtaacttggtcttaattttgaaaccccacttagatgtgatatgcattgtgtgtgacggtaatggaacaagataccaagttcatgtacgatcaagagcaacaggctccttagacatagccaactaccattctggaatgctaga

SEQ ID NO: 182388 - DNA, 295 bp, Zea Mays
gttttcccccagctaccgccgcggcggcgccaccagcatacacggtggtggccatggccgaaaatggccagatcgatattccggccacgaaattcacatcctgatagctccacacgatgttgcagtcacgacgaagatgggggttagttcctcgcctgagatgatgtcgagacgagccgcagccatggagcagtgcggtccgcggcgacgtcctgcgctccgatgaggaattctccggacccaagtgacctgcgcatccaaggaatggcaaggacgagcaccatgaatgccggcg

SEQ ID NO: 182389 - DNA, 370 bp, Zea Mays
tggatactatggatttcatgaatctgattgataacatgatgagtaagcaagtgtttgtttgtaggaaacacgtgcattgagtgcagcgagaacaatccacattgtcttccagaacaattgacgccctaattgtactgattagccttttccctgaacaggcaaacttgtcaaccaatgccgaatctgcaatcttagaagccattcaatctcaaaagcatagagattccttttatttttgggttcggatggatcaagatccaagaaaccacgctaataaagatttttggtccttctgtgacgtgatcaatgctgggaactgcaggttagccagataaatatgtttcatcattgtattaattttcaactctgc

SEQ ID NO: 182390 - DNA, 324 bp, Zea Mays
gcagcagcaggatgtagggcactaacgctagtactagtgctgtgccgtcgtcttgcttggcatggtcgcatggacatgtcacatgtgtcctctctgcagcttgccgtcgcagcatggcgttggctggcatccattttcttgagatcagcgagccctcttaccgattcttggaaaggatttatgatagggatactaccgttacagcagatatgtctccgttttatcttgtagggagtgaataacaaagtgaatgggtgtcattgatagtttgatacagacgatatgtctatgggttctcttaccaatccttagaaatgatccaac

SEQ ID NO: 182391 - DNA, 1169 bp, Zea Mays
ggatgttgttgagtttgctgaggtcttcaatggacacatatttgtgaatgaaaagggtattttcttccatattgttgaattttgttcatgataatctatatttaggatgtgcagcttttatacattttaatttgatcatattgtgccaacttcagcagttacaagcactgactctttagtctctttaatagcaaaaactatttgtccttagtgccatacccatttcattgttcagacttcctgtgatctaagtttattatgggtgcacgccttatcatttactatgtagcatcacaaacacaaattgatgttatatcttgatgctggattattcacatagccattaaactgaaagttgtatatgactgggtctagttatagtttgcttcctattggttgggcctaagttatagtcagctttctagaatattgtctacttgacctgatggtgtataggattctgttttcccttggtgagtgtggaagaagagatcaatagaaacacactagtaaaaacttgttatgaagtaaattttgaaatcgaattggatgtacttacataaggtcacaacattgatagcacgtgaactatgtcatactgacattaatattgtccttgacgttatcgtgcttgttgatccaacttaggtcagcgctagaggtggtggctggaagcaagaacaccatatgttggcttgataatatttcttgtacagtgtgttatattgttatgctgaaacagaaattaactacttagtgtctgaatgtttggtgttttttgcaactgtagaccacatgtctgaagttttttttgggggagtgccatctatgtttgctttgtgtaaattgggtctcatggatgttatttatggttgtcaggtgctcaatttaaagctttcgtggaatatgcaccatcacaacaggttcccaagtcaaatgtcaagaaggatggccgtgaagggactgttacgaaaggtcctaggcaatcactttacctaattctttgtcaattgtattgttctatcatattaccattttcctaaacttggattttgtcattttggaattactagatcctgagtacttggagtttcttgagtttatttcaaagcctactgagcatctacctagtgctgaaattcagcttgaaaggaaagaagccgaaaggg

SEQ ID NO: 182392 - DNA, 551 bp, Zea Mays
agatcgaccccgtttatgctgccgggtcacccgaaacaagatcgaccccgtaatgcctggtcacccgaatcaaaacttgtttattgtctagaaggcaccgtgttgtttgtattccattgtagctggtacttgtttcttggttgtttacaggacaatgttgatttgaagtatcatgttagcatcaagaattctctgcgatacgcgattcaagagatgaggagacaatcaacactgctacatacaattaattctatctgttctagtatcccagaagttgaggggggcaagatagggaaggttgttggccacctggaccatgtctgcaagatgctagagaagacttctattgtttgcgaacaagatttggataataagtgtcctagttgggacctatttgaccccccttcggatgttgaagatcaccctgatgttgatgaactacttgaaggatacaactcagaagatccggagctgtgggaaatggcgtttgaggaccggaagtgggaggagaataaagtggcagtctccttggctgagcattgtcgtattat

SEQ ID NO: 182393 - DNA, 1383 bp, Zea Mays
ccaaagcggggaagaagtggaccttggatggcgaggagtctgacgaggaagaggacaaggaggacggcaagaaggctgaggggaatggtggtgctggtgacatggacgtgggtttgcccagtggaaatggtgatgccaacggtggtgctgagatggaggaggacgaaattgatccgctcgatgccttcatgaattccatggtgctgccagaggttgccaagctggagagtgctgcagtagcaatggatacagcccctgctgcaggtgcagatggcaagaatggtaagagctcaaaggatgtcattagtaatggggataagaaagggtcaaggaaagctacggggagaattatgcaaggggatgattcagactcggactacgatgatgctgatgatgatggggctggagaggatgatgaggatgatgaggaattcataaagcgtgtcaagaagacgaaggctgagaagttggcgatcgttgaccattcgaagattgactaccaaccgttccggaagaatttctatattgaggtgaaggacatcaccaagatgacatccgaggaagtggtagactaccggaagcacttggagctcaaggtgcatgggaaagatgtgcccaagccaataaagacatgggtgcagagtgggctgacaagcaaactccttgataccatcaagaagcttggttttgagaaaccgatgcctatacagacacaggctttgccgatcataatgagtggtcgtgattgtataggcatcgcaaaaactggatctggcaagactctagcatttgtcctcccaatgctgaggcatgttaaagatcagccccctgttgtccctggagatggccctattgggcttattatggctcctactagagagcttgtggtccagatacattcagacatcaagaagttctctaaggtgcttggcatcaactgtgttgcaatctatggtggttcgggagttgcacagcagatcagcgaattgaagaggggtgccgaaattgttgtttgtacaccgggaaggatgatcgatatcctttgcactagcagtggaaaaataactaaccttcgcagagtgactttcttggtgatggatgaagctgatagaatgtttgacatgggttttgagcctcagattactcgtatagttcagaatacccggccagatcggcagacagtacttttctctgccacatttccacggcaggtggagatactggcacgcaaggtgcttaccaagcctgttgaaattcaggtgggtgggaggagtgtcgtgaacaaagatatcacacaactggttgaggtccgaccagacaccgagaggttcttcaggctattagagttgcttggtgaatggtatgttaaggggaaaatccttg

SEQ ID NO: 182394 - DNA, 373 bp, Zea Mays
agcattttttcagaagtgagaaagattggcgagttaagtcccttagggacaccgtccttagggacacacaggtggggatctcacttaccaaagcctatagagcaaagagatacgcagtgcagaagattggtggtgagtaccatccgacaaaagtctacaatttatgtgtgattctttctttgctttatgtgtgattctttctttgctttatgcagggtctaaaagacggtgttagggccattttcccacatgtagagcatatatattgtttgaggcacttgtatgctaacttttcaaaggctgggttcaagggtccccgactaaaagagctaatggatagggctgcctatgcgtacaaggagtttgatttcaa

SEQ ID NO: 182395 - DNA, 386 bp, Zea Mays
ataaaacttaatggttaattgaaaaaattatatgaatattgatctatatagcacaccaagttgaactttgctaagtacttcctgcccataattaacattgtcctatttttttagttcagaaacagttatttatataccccttaatttgcaataagtacaatcatttgcttataatggaggaaagtacctgtatcattaatctcaggaagatcataagatctgatatccttccccatcgaccgaaccaactcccgaatgtctttaaggaccatttgttgtacgcatgtcgatttaggattgtctcggttataatcttcagacattgagtcattgtgtttgtcccacagtccacgtacattagtggcctcacaaaatacaagaattgt

SEQ ID NO: 182396 - DNA, 373 bp, Zea Mays
tgtttagctttggatgtttggcttacaatctggttgctcgtagaccacttctggactgccataacaatgttaaaatggtatgttttaaaatctgaatgttgacatttacccaatgtagatttgttcttttagcctcagtggtctgaactgtatattttacactttctctgcttcagttttgcaagtagaccatcttgttcaggctttatccacattctacagcacctatctgatgggattctctgccccctctattcttgcagtacatgaatgccttgacatatttaacaagtgaagccttttctaatattccttctgatttggtattggatttgcaaaggatgctatcgatggatgcactatcacgtcctag

SEQ ID NO: 182397 - DNA, 309 bp, Zea Mays
ctgtcctatatgcatgtcccaatcccatctccatgtaatggtcttcttcccttcccatccatcgtccgtgagctccgagcgtgagggcgagaggcgtcgctagctggctctcacggccggcaaatctgcgatcaactgcaggtgtgtacttgcctgcaactcatggagattcagcatgcatcgcacagtttgcttgtttattcttctctaaaaattggtcgtcatgggcctggtcaactcgtcctgcagactctgctctagcactctgcaggctctgaaactctgcgtctcatggccaagattagttca

SEQ ID NO: 182398 - DNA, 389 bp, Zea Mays
atgaagctggttcgccgctccagtgaacgaggacttgccgcacgccacgcgacaagcgagcccccgctattcttgcaggctcaggcactaccgcaccattgagcagaggcggtagaggcggcggtgtggtgggtggtgagcccacgtacttccggagcacgtcgacatgaaacacgtcgtgcaggcgcgcgccgggcggcaattctagccgaacagccacgtcattgatgagctcggtgacgcggtagggtcccacgtagcgaggcttgagcttcccggtgatggttcgtggtagggacgccgccacacgttggcgaaggcgaaggaatgcccagtccccaacctcatatgtgacctcccggtggtgcttatcgtactgcagcttttgg

SEQ ID NO: 182399 - DNA, 848 bp, Zea Mays
caacaacaccctagcaacaggagcacacaacagctctgacaagacgagcacacaacagctctgacaagacgagcacacaacaaaaagccacccaacacaacaaagacaatctgatgaaaaggcaaatgaacctctgccacaaagtttcaaaaggcatgaccttttaaactcaaaagcttcttaaggaggtctggtggcaacaactcctttagatgatctgcacatgcttgaattgaactctcgttgggcttcctgtcaatcccaacaatgccaaaatatttaaacgcaccacgctgagcaagacaggcacttcgacgaagtgacgagctattataggacttacaccgacacctaattgtcgtagtcgatggcaaggatggagctaaaggagggcatgcaaggtcctcatccactctagctctagtggatgaataagaccttgtcgctatcggaagatcctctaccagtcgaggttttgtattgttcaaccatagaaagagaaggaccatgcacaaccaaggtagcttcctcatcatttggtgcgtcctccatcaaaacaggctttgtatagccctcaaccatagaatgagaaagaccgtcttcgatggtggtaagaaagatggggtcctcaaaagtactttgcggtttgcgcaaccaatgcagcttcctcatcatctgatgcatcctccaccacaacaagatcctcgacatatgtgacaacctaaagcaacgtggaggtctctgaaggcacttcaatggtctgcttggtggacatcatttggcgagaatcaacttcaaatgcccctacgaccacctcattagtggtaaggtctgtctctctatgaatc

SEQ ID NO: 182400 - DNA, 533 bp, Zea Mays
gggctgaatagctcccccgcaggcacgtttcctgccttcatttttcccctttctacctggatgcatcttgcgtgtgggttcaacgccggcaccactcgtcgttctcctccttgccatgcgggtccggtcaaacagaaattccccagccactctctaactaatctcgctgagttttcggtggccatcgcaaccgctgccgtaatcagcgcgctctgggcacctggccagccgtgcgacctcgggattatataattgctaagtcgtcgctgttcaacggccaagccgaaccggcgttcggagcagtggtgcaggcaacggcgtagcgggtggagggaatcaaagctgctgcggcctggggagttcatctcgggcgctgaaatcattggtgagaactcccatctgttttctccttgttctaccgtgcgtgtcgtattttttcggaattaggatcggggcaggcgcttggctgtcataccagcgtgtggtgatgccctccgccgcgggctcttggccatcgccgctagcaacgatcg

SEQ ID NO: 182401 - DNA, 293 bp, Zea Mays
gcttggcacactgagatatttttcctctttgctttcatgaataaggttggcgcaatgttctttggggcctgaccctgaatccagcttgatctccagaaatcagccattttgccatcaccaattgttacaatcgtagatgcattaaatagatcgacatctgctttatcacaaggtaattgcaacccagtccatgctttgtctctattcgtccatcgtagccatagccatctaagccttaacgctcttgcaaagcgctctagatcgagtatgccaagacctcccttattttttgg

SEQ ID NO: 182402 - DNA, 334 bp, Zea Mays
ggttgacaagaacttgctcaatgcagtgaaagattcaattgttcaagggtagggctctgcactcttcagttagtttagtccatttggaatcctttacattgccttttttaaccagattatttattaacctatacataggttccagtggggtgctagagaaggtcctttgtgtgatgaaccaattaggaatgtaaaattcaagatcttaaatgcaaacatagctccagaaccattgcaccgtggtggtggtcagataattcccacagcacgtcgtgttgtctactctgcattccttatggctactcctcgccttatggaacctgtgtattatgtt

SEQ ID NO: 182403 - DNA, 637 bp, Zea Mays
cggtctctcacctacgggtcttcggctgcctctcgttcaccaaggagcttggccacatcggcaaactcgataacaggagcaccccaggggtgttcattagctacgcggagggctcgaaggcctaccgcatccttgacccaggaacactacgtgcgcacagcgcgcgacgtaatgttcgacgaagggcgaggatgggcctgggacaaggcggtggacggcggcacaactccgacgtacgacgacttcaccatcgagtacgtccacttcgagggagccgggggagtaggaaacccttctccgagtaggcctaccccagcccccaagtctccaccgactccagcgccacgctctccagctctggatacaacgagctctttgccaccacgcaatccagccacgactccggctacagcgagctcttcatcaccacatactccagcaccgacggtaccctctccggaaatgtcctctctgatgccaactcgtgtcgagcatgacccggtgaagctcgtgacctcgctctcccacgacgaggagcgtgtcggcgcgtgctacgatggcgagccgttgcggtatcgaaaggtggatagccttctcattgactcgttggtcccgggcctagcgtctcgcattctgg

SEQ ID NO: 182404 - DNA, 546 bp, Zea Mays
tgatggcattagctgctgtttcggaagtgcaaccaatctgggtgcaagaggtgatcaactcatatgtcacagatgcagaagcccaagagctcatcacacaactgttgattaagagtccgaatgaggaagggttcagtttgcagcaaggcattatcaggagggaggggaagatctggattgggtctaattctgccctgagaactaagttgattgctgctcttcatgacagtgctgcagggggtcactcagggatgcatgcaacataccaaagggtcaaaggagtgttctggtggaaaggaatgaagacagatgtcattctgtttgtgcagcagtgtgcaacttgccagcaggccaaggctgagagaactcatccagcaggacttctccaacctttacctattccaaaaggggcatgggaggatgtcactatggatttcattgaaggtctgccgaggtctgaagggtttgacacaatcatggtgattgttgatcgctttacaaagtatgggcacttccttccactaaagcatccttttactgcttcag

SEQ ID NO: 182405 - DNA, 574 bp, Zea Mays
tttttcttcacttctctggaccaacttctgctctgccagccatgttacaaatacttgcagattttgcgtcttctgaaggttaattacatttttaattcatttccatctgattgagttggactactgaatttgcaacatgtgtttgtttctttgaagctttgcagttcaccccacggttgaaggacgtgcttttgcgtgttttacctatcctaggaagtgtgcgagatggccaacggcctgtttttgcgaatggtattgctaatgcatttcccgaatcatcagtgattctcctctaatgtttctgaaaaattttcaatatttagaaaaattgcttattacttttgctctcttctgttttgcagcattcaagtgttggtgccaggctgcatggcagtacctgggagatgccccctctgagcttcctcttgataacgatgttatgtaagctttcagtttgtcaaaacttgtttttggaggtaatggaagttggcatgccatttatctaatatcttaatgacaggtccttcatgaattcagtatttgagttacttataaaagtatggacaggctcacg

SEQ ID NO: 182406 - DNA, 374 bp, Zea Mays
cccgacccgaacccgaaatatgatacgggtgaaaacagagacccacacccgaacccgcggggacccgtaacccgatgggggacccgtggacccgaaagacagagcagcaaacgcaatacacaattcacagcaacaggcagcatgtactgtgcagtctgcacaacacaaactggcgcacagcatgacagcaagcactagtgctgtagtgcacagcaatcagcaactcagtatttaacaaaatagcagtttgaactaactcagcaagtcactaagtcagcaagcacatactgagaaacatagcaaaatagcattttgaacttccaagttccactgtttcatgctcttgcaaggcagcaacatttagcaagcaactg

SEQ ID NO: 182407 - DNA, 973 bp, Zea Mays
ggaagatgagtatgcggcactattgcagaatcacacatgggatctggtacctcgaccccatggtgcaaacattgtgaccggcaagtggattttcaagcacaaatttaatgttgatggctctcttgaaaggtacaaggctcgttgggttctccgtggatttacgcaacgacccggcattgattttgatgagactttcagccccgtcgtgaagcctgctactgtgcggactatcttatctttggctgtctccagcaactggccaattcatcaacttgatgtcaagaatgctttccttcacgggactctttctgagactgtttattgcagccaaccctcaggttttgaggattcaggcagcccacaacatgtttgcagactcaataagtccctctacggactgaaacaagcaccacgtgcctggcatagtcggtttgccactcatctgctctccctgggattcatcaaggccaagagtgacacatctctgtttgtctaccatagaggaactgacacagcttatttgttactctatgtcgacgacattatactcacagcatcctctactattctcctccaacacatcattcaggccttacagctggagtttgctatgaaagatttgggtgatctacatcactttctggggatgcaagttcaacgacgagatggaggcctctttctttcgcaacgtcaatatgtgttggatattctggatcggtctggtatggcagattgcaagccctgttctacacccgttgacacaaacccaaaggtttctgcagctactggtactcctgtttctaatccatcggatttccgcagcttagctggagcactacagtacctcacttttacccgaccagacatagcctatgttgtgcaacagatttgtcttcacatgcatgatcctcgcgagcctcaccttgtcgccttgaagcgcactctacgttatgttcgtggcactctgcatttg

SEQ ID NO: 182408 - DNA, 812 bp, Zea Mays
cggggaagcaaatgggctgacactcggagtaatcaaaccggccttcaacaactcaatcacttgcttttcaatttctgttttgtgatgaggagaatacctataaggacgagagttcaccgggatagccccgggaactaggggaatatgatggtcaaaaggcctagatggtggtaactctgtgggagtatcgaagagatctctgaactcttccagcaaaccctgcaaatctccactgatctcctgcctatcgccctctgtcacctgttccagtaaagcgaatgcccatatatcattccccttcaaccacctttccacttgcgcagttgacacttccaccactgcttctgtctgatcaacatttccccttaactgaacccaaactcctctatccacaaaactaataacctttttctcccaatcacagtgcatgggactgtgacccttcaaccagtcgtaccctaaaatggcatcatacgcccccaactccaacaccctcatattactcacatatgtatgtccattggcccaccactccatcgccttaaccatagtgttacttcttaaaatattcccattggccacccggacccgagcggacacacatggaaccaccttcagacccactctctcaacaaaccggctactgacaaaactagatgagctgcccgagtcgaccaagattaacataatctgattttgcaacaaggctctaactcccatacactcctcattagtggtaccactaatggcattcagtgacaataagtaagtctcctcttcctgcttttcctcctgctctatgtgtgtcaaca

SEQ ID NO: 182409 - DNA, 465 bp, Zea Mays
tcaattgaagggggaaccgaaatgggagagcatatgtcaaggacactcgtttagaggattacatgcaagatcaataccttcttcggggtgtccatcagtggaaacaccggagactgacagtggatccgctgggctctcaggaaaaaggccccgtggccgtgattacagtaaagctgagagaaagaaagctggttcttcttcgtccccggagtacttaagccgattacaagaaattactgagaaacaaatacagaggtccatagaaaaggggaaaaaaagaaaagaccactgaagaagacagggagatacagaagaagagattggaattggaagcccaaaagttaagcattagacaaagggaactcaaacttgaagaactcaaatcggcagaacaacgtttgcagatgctgttgtcgacaaacgaagaagatgtagatcctgaagtttgggttgtgatgaaggaac

SEQ ID NO: 182410 - DNA, 342 bp, Zea Mays
atttaattacatcggcttgaccagaaacagtgcaatgactagacagtaaataacatctacacttggtgcatgcataaaacaagcataagcataacttctcaataaaagtgtaccttgtttcagcatccaccaacctccgacttagatatgtcaccacatgttcctttccttcagtttcttgtgtcagaacagccccaatgaccttatcttcagctgcaatgtataatcggaatggtactcctactcgtggtgcttttaatacgggagccgaagacaagtattttttaatgagatcaaatgcttcctgctgctctgccccccaagcgaattcggcatcattct

SEQ ID NO: 182411 - DNA, 409 bp, Zea Mays
aaggaagaagaagctgaggataagagaaaggctgaggccgaagaagctgagattaagagaaaggctgaggccgaagaagctgagattaagagaaaggctgaggccgaagaagctgagattaagagaaaggttgaggccgaagaagctgagattaagagaaaggctgcagctgaagaagttgtgaagaagaaggctgatgccgagaagaaggttgaagcggaggagaaaaggatacatgttgcaatccagaaacagctgaaggacaacatcaaagctttgaaaaagccggtgcccgctgccaagttaaagaagatgttccagttacaaatgtcaaaagaatatgctgagcagcgccaacagtacgaggataggttgaacatgcttcgtcaggaggccaaagctgagattg

SEQ ID NO: 182412 - DNA, 330 bp, Zea Mays
gaaaattgaacagctttcttcaattttgtctcacggcaagacatttgctatccttattaagccctctaatattccaattcaacacattccaggtttgggtttcagttggaaagtgggttcctcggtgacaaagtgatgacatggccaacagcagggtgcacctgtagtatttggagaggtgggtgatggttttatcgagtccctcagcaatgcttcttaggtttggctgtcgtgagcagttcccatggttggcttggctgctgtgcccccttacttattatataatggaatttcaccttaacacatatcaattgcaaaatccggaatcag

SEQ ID NO: 182413 - DNA, 584 bp, Zea Mays
cagatcgttgcaattacagttttcttccttctgctggttgcgttttatgtcttctttgctccgtttttgggaaagcaagtactcgagtatattgccattggcgtttatactcctgtggtaagttccctcacattaaaattttctccaatttccatcttattaaaaaaaatctgctaacatgagttgtttctcctccctacattacattcaggcacttgcagttttcatcctttatattcgatgcacaagtataaaccctgcggatcctgggatcatgtcaaagtttgaggatggccttattaagataccaaccaatggctctggaatagaaggcatgaatttgccccagaaagcaaacaatgctacaggaacaaactccccaacgtctacttgcagaagttctttagatggacattctaatcaaagaggttcatccataggggaggcaaacatgaatctaggatcacaattgccaaagaaaagatcaagctgttggttgctaggtgggcttctgtgtgctatatttgtcaaggaggattgccgaaaaactgatgactcagagttgcaagcaaatggtgaggagg

SEQ ID NO: 182414 - DNA, 288 bp, Zea Mays
ccatacccaaggtatcaaaaacggatacttcaatgcctgtgtccagagagggagatgatgagcaactttcaagttcaagtgatagcgatgaagatgatgttgaccaagcaagagttgaaggtgatggcagtgtaactaggtagttgctttaatctgactgaacagcatatctgtaggtagtagttacaaattactaatttctcaactaactcatctgtaactactaatggtgcttctacttgtcagacatgtgccacatccagctgaaaggatcactgcacaaactgg

SEQ ID NO: 182415 - DNA, 449 bp, Zea Mays
acaatgctccccatcccagtgccgacccttcgcaaacttgtcagggctgcggggctgggctgccacgccgcaaactccattgtagtggtgcctcccggttcggaatgattgcctcttccctcctgactgccggtggacgggcgacctgccgtcgcaactgtagcaaatctgttgtcggtctttggtctgtaatgctatcctgctgtctctccaagtctgttgtatggtcatacctatccctgtatgtcacatgtcgccgtggtgtgttccccctctgtcgtggtcgtagtgtgtcccctggtggtctgtcagttcagtcatgagtccgggttgtaaaaactgtgttgtgctctcgtggaacgtccgtggtttaggcgatccggataaatgcactatcgtccgtgatgttatctcccttgcctccccgtccgttgcttgcctacaagaat

SEQ ID NO: 182416 - DNA, 523 bp, Zea Mays
tgagggcgccatattggtatgttaattataatttgtttgctgcagttgttgcaacatctgcactcagaaaacaaactgagcaacagatttcctattggacttgaagagcaaatacataaatgggatcctgataagatccgcagatttcacgagcgttggtactaccctgcaaatgccactttatatctggtgggggaaattgatgatattcctagagctgtgcgggaaatagaggtaatccgaaaatgttagtgttttttataattttgacagcctctaggatcgcatagcaggttgatggtttgctttgttgcaatgcaggcggtatttgaacacactctttcagaaaatgaaggaaatcctgtaccgagcgctaatccatttggtgctatggcaagcctttttgcaccaaagctcccaggtggttttacttcaaacctaactggtgaaaaatcacctgccacagataaaataaagcctgcaaaaagggaaagacaagcagttaggccacctgtagagcata

SEQ ID NO: 182417 - DNA, 310 bp, Zea Mays
gagaaccccaaaccctaaacgagattctaacactaacatcaagttttgtgaaatatgcaatatctttgccaggtactaacagacacacatcctaaagtccaagcgtctggacagacagctctccaggaggtatcatttgcttctttaccatggcaattgcatgctattattccttgtctctaatggattatgctttgttttcatttttcaggttggaagtgtcataaagaatcctgaaatttctgcactagtccctattcttctgtcagctctgatggatccaaatgcccacactaaacactctcttgac

SEQ ID NO: 182418 - DNA, 307 bp, Zea Mays
cgagtagacacttcaagcaagtcaagtaggtttgtggtataagttgtgtaatggagttaattgttttaggataattattgaaatgctctgttcgtatgataaacatgtatgtgttcatgatcggggagtaaatgcatggtgattgtgagttggagactagtagtttacgattcgtatgatttggtcggtgtgcaaaaatacttgtgaatatgaatgtttataaaaatgttgtagtgtatgtggtgtctcggattttgataataatagacaagctcacgtgtatgatacttagcgggctatgtcgttg

SEQ ID NO: 182419 - DNA, 403 bp, Zea Mays
ctgaaacaaagatttccaaaacaaactggtgaacactttgtctctatcagaaaccaaagactttggtgtcccatgcaacttgacaatattgtcaagaaacacctgtgccactccaacagcagtgaaaggatgcttgagggaaaaaatgagcatatttggaatatcgatccaccacaaccaaaatagtatcatatccctcagatctaggtagaccttcaatgaaatccaatgtaagatcctgccaagccccttgaggcactggtaaaggttgtaggagacccgaataatgcaccctttcatgcttagcatgctgacacacctcacattgctgcacaaactgaaacacgactgacttgagccctttccaccagaacaacctcttgatcctttggtaagtggcctc

SEQ ID NO: 182420 - DNA, 509 bp, Zea Mays
caggattctgctgggaaccaatggtggttttttggagtgtatggcccgcatcaagatggcttgaagagttttctttattgatgagttacgagaggtgaggtctgcctgtcagggaccgtggattgttgctggggactttaatcaaattttcagagtggaggataagaataaccccaatatcaacagatctatgttgagacgttttaggaggttgatgaatgacttagagctgaaagagatccctttattgggtcgacgattcacttggtctaatgagaggacagtgatcagagaggtctgaagcattactaacgcagaagacagggacagtgatcagagaggtctgaagcattacttctgcatcctttgagttgcaacaatgtcaagaatagaatctccatttatgctgatgacatggttcttttcattaaacccgaggaagaggatttgagttgcactaaagtcattttagactgctttggtgaagcttcggggctgaaagtcaatat

SEQ ID NO: 182421 - DNA, 776 bp, Zea Mays
ggaatgacaaaaaagttgggaagattaagctgcagcttgagatggctagggagctcctacatcaattagaggtggcgcaggacaatcgctccttatctcctgctgaattgtggctccgaaacatgctcaaaaagcactcccttgccctctcctctatctctcgtaccatggcaaggttgaaatcgcggattggatggctcaaagaaggggatgccaatacctctctttttcatgcacaaacaaggttcaggaagaaaaagaatttcattgcagcaattcactcagaggatgggcagatctggaccgcccaggaaggaaaggcagcagccttctttaatttttatcaagggttacttggtactgcagaaataaggaatgttacagtggatctggatgctctagggatgccatcttatgaccttgctgcccttgatgcgcctgtctcggaggaggaagtctgggatacaattaaggtccttccttcagacaaatccccgggtcccgacgggttcactggtagattttacaaaagctgctggtcggtaatcatgactgatttcatggcggccgttcactgcatttgggctagaaatttcagaaacctgggtcctctgaattcagctttcattactcttcttcccaaggtggagggggccactagtgtgagggatttccgcccaataagtctggttcatagtttcgcgaagttggtgactaaattgttggctaaccggttagcaggccggctgcaaaatatggtttcccccaatcaaacc

SEQ ID NO: 182422 - DNA, 3524 bp, Zea Mays
cttccccttcgtagtccagtggaagtggaaccgccaaaatgtcgtcgtcggcggcggagacgccgcgggagcacgtggagagtatccggcggaagcgctactacatcggccgcggcgagcaaaacccgctggcggaggacttgcaccaggccacgaactacctctcgcaggagctctactccaaggacgtgcacttcctcatggagctcgtgcaggtaatccttttggcgcttatcttgctgtccctgttcttgtgtgagcgggaaactttgtgttgcatcaagggcctgtagctgagtatgggtgagctaggagtttgcattggggttttctcaacgggtcactgtaccgctgtgtataggtgtgacgaggggttaagttttttttaccttaatacaatgcgcttgttatttttgtttctacataatttttccacgtggtcagtaattattttctaatgatcacaagtttaaaaagcaatgtagtttttctaatcctttttcttcagtgaatactgaatagcataactaattggaaaaaaacgtaatgaacttatctttggtgtgtcctctgcatttacttggttccttttattttgtaacgacaataaaaatactaatccttgtgactttgttagtttggctaccttatttgtactagtgtgcagcgcagctgtttgtgcttaaatactactaatacttctcttactttgctttctttctaaaaaatagaatgctgaagataacgaatacccttctgaagtagcaccttctttggagtttctgattacatcaaaggatattactggatgtggtgcatcctcaactttgctcattttcaataatgagaggggattctctgcaaccaatatcgagtcaatttgtagagtcggaaaatcaacaaagaagggaaacaggcatcggggttacatcggagagaaaggtaaatattcactgttttttttcattcatagtgtttccttcttcaccattaaaaaaaatctcttcatccatggaaaaagaaagttaggacctatttgaggcattttcaggcaaatgatagcagtaaaagatcagaaaatatttttaattttgaatgactggaactatgctcagtactccatatgatgccactccatcatgggaatgtattccgtggaatcgtgaaaaccacctcaaaaactgcatcaagaagttctcaataaatttggcacttggctcattcatattacttgcaatttgtagaaaagttgttatccatagtcgttcttgaataattcatacaaaacttttgaggtccatgtgcattagaacacgaatgagttcacatctcaacttttgagaaatgtcttatatatcaatttactatggacgcgccaaggtttgaatcctatgggaacttctatgaatatttcacgattctaccaatgagatgttttccaccgaataattatacagcacactacttaaaacggtattactggaaacctatgtgttttgtaattacttttctggttgcccatgtccaactaaaacatagctatttaatgcaaattattttgatacacaaatactgcacatgtatgtattttgagatcctagcatgagtattcacaaactgaacatttgggatggattactttgatcaaattggtcaacatagttttatgaattcaagtagttattccatacgctcatatatgtattaatattaaaaaaactactttaaccctgccttagctacagcttgaacagggcagtttatcgttgcataatagtttaggatgattcacagaaaaatatactcaaatttgttcagctgtcaaatctgcatagcattttctgtcaccatctgttttttacccagccccaaccaatttactgcaaagagttacagaatgtactgcatatctgcttactattgctgcctattatcaacttataatattctgtggcttttgattcaggtattgggttcaaaagtgtgttcttgatatcaagccagccccacatattcagcaatggctatcagatcaagttcaatgagaaaccctgtgcagaatgcaatattgggtacattgtacctgaatgggtggaatccacacctagcctttctgacatcgaaacattgtacgggtgctcgaaagtcctgcctacaaccaccatcatcttaccattgaagagcgagaagattgatgcggtgaagacgcagctgtcaagcatgcatcctgaaatgctattgttcctgacaaagatcacgaaactttctgtccgggagaactctgatctcaaccatacaactgttagtgagatctcgataactagtgagaagaactaccaagccaggaagaacatgcatgcggagtcgtacacactccacttatctgctgaagagaccgggaaagaagaagcagaatgcggttactatatgtggaggcagaaattcccagtcaagccagagaacagagtcgataagcgtgctgaaattgacgaatgggtgataactctggccttcccacatggccagcgtctgactcgtgggaagcagctattacctagcatctatgctttcctcccaactgagatggtaacaagcttcccgttcatcattcaggctgacttcctccttgcttcgtcaagggaggctatactgtttgacagtccgtggaacaaggggattctagagtgtgtcccaaaggctttcatggatgcttttgtgacacttgtaaagtctgatgcaccatcaatgtctcggccatctatgttcaactttctacctgtcgactcctcacagatcccactgcttgaaccagttaggtctggcatcaaagacaaggtccttgcagaggatatagttccgtgtgaatcttacgcttcacagaagatattctgcaagcccagtgaagttgcacggctcaagccaacattttggactatccttgccaaagcatgggggctaggagtggatctgaagaatctgtcaacccatggaacttatattcttagctcacattttgacaaaagtatctatgacagtgtgctaaactttctggatgtgaaaaatgtgaaccatgaatggtatgcaaaatgcattgaaggctcaaatcttgtcaaggaggtagatgaacaactttacctggaaattttatattttgttgcagtcaattggcaaaacttttctggtacaaacatgatgtccattcccctgctgaagtatgttgataggggtggtgttctctcgttctggagcatatccagagctagtcagtgtaatgataggttgtgcattgcgtctgaaaacaagtacatatcatggctaatcagctggaatagggagttcctatcttctaaccggttctttctgcctcctagcacacaaacagctctagaaggttgctcggagaagatgaagagctggcttcagaaacatgcaagagttgaggttgtctctatttatagttatggatcagttgttgttaattccttgggttctgatcaaagagctgtcattgccttcgcacactt

SEQ ID NO: 182423 - DNA, 567 bp, Zea Mays
gcgcaccaccaaacggtccaaacccccagcggcggcgctaggatttgagtctcagcgcgccggcaccgccaccgccaccggcggtgatggcagggcaggagcgtaggacaatcgatctggaggagggatgggcgtttatgcagaagggtatcaccaagctgaagaacatcctcgagggcaagcccgagcctcagttcagctccgaggactacatgatgctctacacgtgcgcctccttctccccttactcctcctcgccgccaccgtctcctgcgcagcggccgcttggtttcacaccgcgatccgcctcgatccggttctgatctaggttttggtcctcttgtcgcaggacgatatacaacatgtgcacgcagaagccgccgcacgactactcgcagcagctctacgacaagtatcgggagtcgttcgaggagtatatcacctccatggtgagcctcctgttcatatctatctttcccatgtgaatgtctgtattagaacttcattgttttgtatttgcggcgttgtattaaggttagatttcctactcagagaggagtaaggcag

SEQ ID NO: 182424 - DNA, 710 bp, Zea Mays
atcatagagaagaaaagcttttagatgttcgtacggacatggagatccaggaaaactttcagttgctaaagaggtgtttgcaagaggcactccatgaaaaacattgtctgattgtcttggatgacctttctagcacagataaaaaccagttggatgaattgaaggaaatgctgaagggtacaaatgagtctatcaaggttttagtgacgacctccagcgaaataactgcagaactactgcacaccattccaccgtacaagttgtgtcctttatctgaagacgacagttggaaaatattttctcaaaaggcttttgggaattgtgatggtgataacactgaccttaagaaaatcggaaaggaaatagtaaaaaggtgtgagggaataccattattgactcattctcttggtttagttgtacaaaatgaagtcacaaatgtgtggttagctgcaagggatgaagagatatggaaactagaaagaagagttgccactaaaatagaattgttttcaccattatatcaaatatacaatgacttctcctcaactattaaattgtgctttctatatttatccatatttcctaaagggtctacaatagataaggaaaaactgatccaacagtggattgcactcgagattattggatcaaaacatgactccttgcctccttatgtgaatggagagatgtgcatccaggactttttgtca

SEQ ID NO: 182425 - DNA, 608 bp, Zea Mays
aagattgcacattcaggatcactgcaacagaattttgagtttctagctgaatgtttgacttaggacaactccagaagttgatttatttcggaataaagataatattttcagtttcgtgagtcgtaccagaatgacactataaggtgaggctgcagtgtgttaaccacttgatattaggagttacaacatcgtggaagacatcttaaaagaaacaaattgtgtcattcttagttgtttcagtagcaagaatgactattaatggtacagccatgtagctaagtgcctaagtcctcctccagacttgagagttgagaccactaaggcactaagtacacacacaacacaacacccacttttcagctaaattcaacagttaaatactaccaaagtaccaatcacattataaatttggaaagatggcctaagaacatgcagtttgaatatcacctttgagttcccaaaacaaacgagagagacaagatgtgcaaccattgaagtttctggctaagaaaatgtgaatgaaataactgtagtcatgaattgcaagctgagaagagatcttcaatagacaatagccactagactagtggctaatatatgaacatttt

SEQ ID NO: 182426 - DNA, 337 bp, Zea Mays
aggttgtcgtcatgaagaggttcgtttgctccagggaaggggtgtacaagaagaaacagacctcgccggatgaggcggcaaggaagcgtgagaggatgtctatgcgagagggttgcaatgctatgatggaggtggttagggaggcggaccattgggttgtctccaaacttgagaaggctcacaaccatgagctcggcacttgtagcgccaaggttgggtaccttcgtgcgagaagttctcttggtggctctgataaggccacaatggtggggcctgacgagatggcgtttcttaggcagaatgtcctgggggaaggaggagacgcccagggccttct

SEQ ID NO: 182427 - DNA, 331 bp, Zea Mays
agagacgaaccaggttttgttataagtgtacgagagaggaggctagcaccaatattggtttgcatgctaacccttatgctcaccctatttatataagtggtgtgaaagagacctacaactataagattattgcgcccttgatcggagcatatagacgagtatgggttgattccttaatcaagttgagattgaacctcgatagagataacccggtttacgctggagacggatgcatcctttccttggtaaaggcagcaatagacggggacgcgtatcatgtgtcacgaatgggtggtataatcactgaactcaaacacattgggtatgtttg

SEQ ID NO: 182428 - DNA, 2113 bp, Zea Mays
gccccctctggagaagttgcttgtccccaagcaagagcgtcgggaaagcgttgcttgaccacataaaagtcctcccaggtagctgaatcttcaggaagaccactccactgtaccaaaacttggggcactgcccgatgacccttcttcaccaatcgacgatccaacactgccacaggaagcaaattgcgagtagcaaaatccacagagcaaggcaagtcggaaaagacaggcgtatgatttggaataaacggtttcagctgggacacgtgaaaaactggatgaacttgagtagcagcaggtagatccagcttataggcaacctcacccactttctcaagcacccgatagggaccatagaatttcagagctagcttggggcaaggacggttgacaacagaacgctgtgcatagggttgtagtttcagcaagaccatctcacccacttgaaaatgtctttcagttcgaccccgatcagcttgcatcttcatacgattttgtgcagcagccaactgttccttgagcatttctgtaaaaacaacacgatcagccaacacctgagccacatcagcagcagttgcatctggaatcagaggagcagctgcaaatggagggtcataaccataaagcaccctaaacggggaacagcccaaagtagtgtgataagatgtgttgtaccaaaattctgctaaagccagccactgcttccactgatgaggagaattatgaacggcacagcgcaagtacatctccaagcactgattcacgcgctcgctctgaccatccgtttgaggatggtaagcagtaatgagactgagtttagtgcccaaaagcctgaataattgactccaaaatatgctcgtaaagattttatccctatcgctgacaatagatctcggaagaccatgcaagcggaccacctgatccaacacaacctgagccacttgtgctgtagtgaaaggatgtttcagagcaataaaatgggcatacttcgagaagcggtccaccacaaccaagatagtatcatagccactggacttgggcagtttttcgatgaaatccattgcaatatcctgccaggcgccttgaggaaccggaagtggttgcaataaaccagctgggtgaactctctctcctttggccttttgacaaatttgacactgtttgacaaaatcttccacatcggtcttcatgcccttccaaacaaacaatttcttcaatcgatgataagtggcgtgcacccccgaatgaccacccatggcactgtcatgcaatgctgccaccaacttcgtccggagagctgaattgtggccaacccaaattaaattgcccttcctgatgactccctgagaaagagaatatccatactcatccgggctgtggacacacaaccgagtcagcagtgactgcgcatcagaatcagtcacataagaattggtaacttcttgaatccagcgaggttgaacttcactgactgctgtcaacgccatcacacagcccacccgagaaagagcatcagcgactttgttctccttgcccggcttgtagaccactttaaactgcatccccataagctttgccatggctttacgctgcaactccgaatgaagctcctgactgcccaagaaactgagagccttgtgatccgtccggatttcaaactcgctccgttggagataatgacgccaacgatccacagccataatcagagcgatgaactccttctcatagatggaaagcttctgattggaaactcccaacgccttgctcaagaaagcgataggtctaccctgctgcatcaacaccgctccgaccccgtcatcacaggcgtcagtttcaacagcaaagggtatgttaaaatcaggtaatgctaataccggcgtggaaaccatggcctgcttcagacgctgaaaagcaacctcagcttctggtgtccacttgaaggcccctttctgcagtaacctcgttagtggtcgagcaattatcccgtacccttgcacaaagcgcctgtaatacccggtcaacccaagaaaacctcgcaaatcagtgacagtcagtggtgtcggccacttgagcatagcttcggttttctgaggatcagtagccacaccctcac

SEQ ID NO: 182429 - DNA, 398 bp, Zea Mays
cttgcgttccaagatacagtcagacataataaagcagtaaaataggtgaatctaaaacacataagtaaatattgcaatacttggctggcgaagcgaggttgtgccaggaatccatacattctattagtttgacaaccataataaacacggagaaagatgaacccgcaaactggaaagtatataaacttgggaagacagctgagaagaaacatatataagtattgttattccagttagaaagtaaaatcaaccctcaatgatttctttagaaaaaacagcatggcacaaggatttgttgctactctctttacctttttcagtttcacaattggaacattaatagatgtggccagtgacccaacttcctatggccacacatgactaaggttcaacttctg

SEQ ID NO: 182430 - DNA, 294 bp, Zea Mays
tggggggttgcgccctgacgctgttgcttatagtgttctgatcacagggtactgcaacgagggacaactaaaggaagcgaggtcgctgctgatggagatggctgggagtgggctcttggacatagctttcgctctcagggttgtcgttcagggtcatgtaaaatttggaaagctacttacctgcttgaacatggtggcaccactaaggaaatatggtatcgtcatcccatcacagagttatagctgcttgattggtgcattgtgtgaggatatgcgccctaatgctgcgagggg

SEQ ID NO: 182431 - DNA, 658 bp, Zea Mays
tgttaatgaaggttgagggaggagcagatatttgtgctacatttcaatggtctcagaagttactttatgatagcgggcgtttctctgttgacatacctttccgttttccgtactttgtgaatccattaccaaaagtgttcatgaagaaggaaaaaattcagttgactgtgcacagtggtttcagtaaagagattttgctgcaaggaacaagccacccgttgaaggtgatctaattttattaactgtcctgatgtgtgtttggagcattaggaactctacataggtttgatcttccatattttatttttatttcaggaaaagagtaggcaaggagataaattgtttttccatcatgaagccattgttgagaattggtcgatcaaagatttcaatttttcatacaatgtgagcttttctgcaatgatgttccctacaggccgatgctgaactaccttgtgaatctagctaatcatgatattcagctgataaaagtttataatcttgcagaatattcttttctttgtctaatttaaattttatgttgctatgtgtaggtttactcgggtgatttgtctggtggtgtgcttgtgcaaccagcaacattatgtgactatgatgatagagatatgttctgcatttttcttctacctggaagtgg

SEQ ID NO: 182432 - DNA, 309 bp, Zea Mays
ttcttccgcggtctccttgatttctatcacttgaatctgacccatctaaatcccaattccattctacaagtttccgtatttgttcatttgtgcgaagctttccttggtattttgccacacttcggcctatggaagtacttgtaccactatcggcctgggatggctgaagggcagcaccagcttgtggggggcgcgagtttggagatatgtcgtgggaggaagaccgactacctcgacatcccactcaaggacagcatcaaaggatggcgcctgaaatggtttatcgtggaaaatcacgggaattcccac

SEQ ID NO: 182433 - DNA, 464 bp, Zea Mays
tgggcaccgtctcctccttccccaattgcaagctccattcgcgctcctcgtcctccgctgcctccagcctagtcccatctctgctcgattggagaggtttgggccatgcttcctcctcgcgcgccacgttctcgacggaatttctcgtctacacaggagccaaggaacgctagaattagacgcttcccggggtcccttttagttcccctctaacgaatcataggtttgcagtttggtgtggacgtatcctgtgatttgtggatggttttggtgtagagtttagagagatcaagaacttccaacttggggtttcctgtagccttttttagctgttctggggcttttatgggagtgcccgtcgcgcagaagtccgattcttgggtgactgtgcttgcgatgacggacagcggcggcctcggcgttcggcctattaacggaggccgagggagtgccgtggagcagcg

SEQ ID NO: 182434 - DNA, 336 bp, Zea Mays
ggccagcgcccgcggtccttggtaccacgctcatcgtcctcggcgtctgggtctgcatctcgtaggcttaggctgaagatctgcttggtttagttctggcattacagtcgtcgcatggggggaaaaaaggaagttttgagggcaattctcagattccatttcactcctctgtgctgtgttgccaattgccatatgagtgaattattcccagtttgttgatggcagcggcgtttcattagctagatggtcagaatataatgcagtttcattctggtaattttggttactgaatccatttctgcttaggtgatgaatgaatataacactacggttcca

SEQ ID NO: 182435 - DNA, 287 bp, Zea Mays
ttggagttgtgaccttcacgaagggtcgagagatatgctgcagtaagctcggctctactgcgctccataaaatttcgctgcttcccgttaggatcctgtagtgcctttgcagcatgcatcggtgctactagtctactagtacatgctttgccgctgccaactcgctgccgacggttacgacatgatgctgcgcctgtgggtgtagtctgtagcgtggttcactcttcttctcatgtatctctaatcttcaaaatcagcacgctacccctatacggtgcatggaagaa

SEQ ID NO: 182436 - DNA, 341 bp, Zea Mays
atatatataaaccctaatacacatataggcagtgattaatactctaacattatataagcttcctcgttgaaatcaccatgaagaaaggcattcttggcatccatctgagagatagcccacaaagaagtagcagcgatggaaatcaaagtacggacaatagcatatgagcaatggtggcaaatgtatcatcctaatcttgtccctgagtccgctaaaaacctctagcaacaaggcgagctttatatcgctcgatggaaccatccgacttaatcttaattttgtatacccacttagatgtgataggcactgcatgaggcagtaatggaacaagatcccatgtt

SEQ ID NO: 182437 - DNA, 282 bp, Zea Mays
cttttttccagtctgtttgcagtccagcacctattatgagccaccagccaaaggaagaaccgacacttaggaggtgcccaagatttccagaccattttgtaatgctcaaaaccaacagagccagtggagaaacccttataagccgagcttgcagaatactgcccattagaagcaattgaaaagatatgcttatcctcagagttaggttgcaatacaacatcagatattgcattccagagatgtaggtaatctaccagagctccccaggtcaaggcatcttta

SEQ ID NO: 182438 - DNA, 712 bp, Zea Mays
ccaccgtcggcgtgtcccctgctactccccttcccactgcatcggtggccctctacgccacgggcgcgggcacccatgtcctccccatggtggctgcgttgcctcgctttgcgcctgtggcgctgaccatgaccctctggcccgccgccatcacctatgtgcccccctcttaagagccttccctcgttcgttgctcctgtggccctcggccttctcggcgccgccaccgtgtctattctttatcctagcctgcgcatggccccgactctccatgtcgtccctcctcttgtcgtcgggtgccctgcctttgccctggccgtcggtgccacttctttcccggctctgtccagttccaccacaatctttgtgcgcgtcagccttcatgatggccagcttatccgggtaacctttgtggcttttgatcgggccatggacccttttctccacgaccatgtagagatccatcctcaggcgggccgctacgagcctggaccacttgtcttcccctttgctgtgattgccttcctggtgatcgagaccttgttgtctccctcccctcctagtggctctgtcggagcacctcccctggctctctcctcgcaccacgtgcctttgccaccctccctctcccaccgattgggtgttcaacttcggagcttccttccacaccactcctaccactacctcattatctcactaccatcctccacac

SEQ ID NO: 182439 - DNA, 1239 bp, Zea Mays
gtcgaacacttcctggtcgtttttggtcgttgcagttttggtactgggcttcactctggtttttggcccatctacagtagcccgcccctccaaaaaccctcccaaccaccaggacccctcccagccgccagaaaccctactcctctcctctgtcctctctggtttctgccgacgtctctgctccaacctccaagtgctccagccagcaggtaatgcagtttggatgctctagcgcgatttgtttggatgttgatctgctctaggtagcagccagcaggttcctgctgtactttttactgaattactgcaagtaattatgccaatattactttcagtttggactttggactttggatggattctgttttacacttttactgaattactgctagtctgctactaattatgcctatattattgcagaaatacaatgtttatatagttaatatatagttatatacatatacatatgtccttaaatctataggacgactaacggacgaccagaggtcgaccaggaccgattaggtcgactaatcgtcgccctaatcgcgattagtcgcctggtcgcccctctcactcgaccagctggacgcccgacttgtaaacattgccgggcacgtcccccggcacaatgccaccaccgccgagcgcctaccctcccctggcgccacgtcgtcgagcccaataccctcttcacctctgtcgttgggtcgttgaagctagtccacccgactgtcgcacctatgttgctaggatcccccacccccaccatttgcgccattcccaccattgagggccccttcccctaccacaaccttcgcaccccctatgactaccctccatgtcgctgcggcctcggcactccaccaccagcggaccgcgtcggcccatcgctccagcctccactgcgcccctctggacggtgccaacagcaccccgacacccgtgactggctccctccctacactcggcggaaccctctccccatgggtcgcacaacaatacaagtgtgggccgtcacggttgtggtcgcgtccgccttaacctctccgagcaccgacgcacttgcaccttcctctgtcatcacttgtctcccttcccacgccatccacgcccatccccatcgcgtcgcacccaccaacttctgcatctccgtccttcagcttcaggcacccccacctcgacgtctttgccgaccactccacctacaacaacggcaaagcattttatccaaag

SEQ ID NO: 182440 - DNA, 356 bp, Zea Mays
gctgaaccaaaatcttcttcaaagtcaaaccttgagtgtgaaactcttgcacgcttgttggcattccttggaagatttcggcctcgcagcgagcttgatgcacccacaacttgatcaacaagttcccatgtaaggccattctcatcctcaccacaatcacacccacgagcaccttgaggctgcacataggaggaatcggcccactcattatcccaatcgaactcttcaatcaccaaagggtcaaaacctttccctttcttctcacgccttatttgaaacctagtcttcatccttcggttgtaggaaacatagacaatatcattcaatctcttatgcagcaacctattacgtttctt

SEQ ID NO: 182441 - DNA, 644 bp, Zea Mays
gatcgaccaaccaacgatggctaatcacatttgcaggtttgagtcaacaccgacaccatggttcaatcacttttgagtcttcagattctgagtcctggacttgaaatgcaactcataccagttgctcacaaatttaaatgcagaacaaaaaaagtctggttgcaactgttgatggtcagcaaaagtgaaaaatagatgtgattcttcaaacagtgatatatgtacacagtgactgtgttttttgggcgtcctcaaactcagattcttctatttcttgcaagttgtatgtgggtctgttagtcgaactgtgatatacacacattagctaatagatcaactttttattctcttagcttctatggcctatgggttaacacctgtactttatttgtgtgttctcagatttccatgtgtaatttgtttttgtttattaactaattccgttcttagataaataggcatatatttcatctgcttagtatttgattactctttgcaaaatggttatcatctcactaagtgtattgtttagctgacaaagcattgtggccatgccttgatgcataatagtaatactaatctactgtagtgggtgactgattgatcatgtgtacatatttgttcctcacagtgattaatttgcc

SEQ ID NO: 182442 - DNA, 487 bp, Zea Mays
cggcgatcgacggccttgaaacctagatccgagcaccttctgcaaagcaaggcgcagaaacttttctcaccccacctcgtagcgtctgcccgcaccaaatgcctcgcagtcgctattataccccgcgtcgcggagcgagggggtggaaaaaggagaatcgatgtgcggctggatccccgtggcgaagaatacccagcaccgatggcttgaactgggaggaggaaaaggaataatgacaccaccaaaaacaattacttgaacaccacgaacaccgccgcagcggatggggtggtgggtgaggcgacgaagaagggaaaggataggggtgtggcggagattggcgaagccgcaagccaggaacagcagcaacgggcgtgtggcgactgctcgaactgggattattacccacgcgctgcggagatggggattgggttcggatcgctgctgccattgtgtgcagccaataaaaaccaaacccccttttttc

SEQ ID NO: 182443 - DNA, 348 bp, Zea Mays
ccttcacagaaacaccaaacagatcaaattcaatggagtggtgattatcagtagtaaagcgccgggcaaaaaggagattcacgataatattatggcaagtaaaatgttgttaaggtagagcggaccaagaagaactgaatcacctactaagatgatcgacagagagaatctgttaccaacaaggatagaggaaggaagagcaagatgcggtggacgaagggtagatatggtaccggtgtcgaaagtagtgtggttggtggcgtcggagtcaacccaatatgctaccgcggtagacggctgggaaagggccatcgtgccgaaggactttgcaagactgctgatcccaag

SEQ ID NO: 182444 - DNA, 280 bp, Zea Mays
gattgttctagttttgaggcaaataacatcccacggtctatccgttacctatccatttccatgcaagatcattgtgctcagaatttcgaggaacaaatgggaaaactgaaagaaaagatatacattaacaatttgcggagtttgatgatatttggaaaatacattatgttacatctgctcaatattttaagggacacatttaaggaaataagacgtcttcgtgttctatctatattcatatactcccatagttccttgccaaacaacttttcagagcttc

SEQ ID NO: 182445 - DNA, 891 bp, Zea Mays
gctacccttgtcatggccaagttcgtcgttacgggcgcacaagagtgcaagcgggtcatcgctcttggcctgggagcaagagcgcgcttctgtgtatgcccttgcctatcaactcgtggaagctgagtgttagctagaggtgatcgttgccgattgcacgtccattagctttggtgatgtcgatgccccctcactttctctagtagccagcaacccaacattcacgctcaggcaagtatccaaaacatctgctcgctggtcacagttgttttcgacctagcgtcctccaactacactccttggcgtcactggtcgtcctcaccttgcaacactacaccctcgacgaccatgtcttcactgacggttgccttcctagcgtcgtatggacagtgtggtcctatcttggatcctcgccactgcaattgtcgagttgcaggacatcgtccacgagcgtggtggcactgttcgtctggcctgggttgccatcaagaaccaatttctcggcaacagcgaggcccatgtcgtccacctcgacgtcgcttttcagatctttgtatagggcgacttctccgtcattgtgtattgtcgccagatgaagggcattgtcagatgctcttcgcgacctcggtgagccggtctccaatcgcacccttgttctcaaccttcttcatggcctcaatgagtgctacgggcctcatcggactaggattgtgtgatatgttgtgttcccctccttccagaaggcttggaatgacctcattcttgaggagctcattgagggggcctcgccttcccctacaaccgcacaagctctctacagccttggtcctagcggaccgaccgtctttgcgcctcgagccctccatttctatcgctaggacctcgtctcct

SEQ ID NO: 182446 - DNA, 439 bp, Zea Mays
caagaaccaagcagtgggcgctggataggaggtcggtctcctatcgtggtcgggtttttcacttcggggattggtcagaggagtgctatgccaggaagaccagctttgagttcagagtgaaggtcagagtggaggggattccagttcactgctggggagaagatgtggctgctagggctttgggcaggagctgtgctattcactatgtccaggagcgctcgaggcgcagggagcgcacgaggtcctttgatctttgggcttggtgctcggacccttgtgatattcccaaggaggtctgtttaaccgtcacatagcctgatagagagctccctcctcctagtgcccctctgcctctggttggggctcagtatgacttaccaactgatctgaaggcaggccatgtgtacaccatccgcaaccacattgaggtggttgaaga

SEQ ID NO: 182447 - DNA, 275 bp, Zea Mays
ataggggaccatcagattctcagccgacggctgagattaggttttcaccgtaccgctttgggatattcaatcctaactggtgatcggtgattaaaaggttcagattagggttcccttgcacctatttgggtctgccaatttcagacaagaagctcagaaagaatgatctcatggtttgggtcgagaaagttgccgaccaccttcctaattggaaggctcggttgcttagtcttggtggcaggacagctatggtgcgctttgtgctttcagccatc

SEQ ID NO: 182448 - DNA, 302 bp, Zea Mays
tgcggtagggcccgaagtaccgtggctgcagcttgccttggaccgccggggacagggatgcaactaggcagtgtcgaaggcggagcaggacccagtcacccacttcgtaggagacctggcggtggtgtttgttatagtggagcttctgaacagcttgtgcttgctcaaatctataccacacatccgccaagaactcttcccgttcttccattgtcttggccacagcggctacgcgcgtatccccaggctcatatgaccggatggacggaggatcccggccatagaccactcaaaatggcgtg

SEQ ID NO: 182449 - DNA, 487 bp, Zea Mays
ctgctggaagcatgaaatagcttgcaccgtcccctcgctcggcttggtccgccatggtcatgcgtgtccctgccattgccgttgggtggctcagtttgccatcgtcacgcccatccggggtgcgctcacactacttggctcgctgctgctctcactccttgttaggctcccatgcttcttccccacctcgtgactaacggtgatgatgacatagaagatggatgacgcggtacctcagttttgagcggatgaggtggaacatcttgataggatatttcttgctggggtggtttcatcccacctgttccccaaccaaacagtgggatcccacttcgtccttctcccgccccctaaccaaacacacctaagcgccttgacaatgagggattgaggggaattggtttggcatgccttgccttacaacctaagaacgatgctttggcaatgctcttggtgaagttttacaattctgtaaatacacatcttt

SEQ ID NO: 182450 - DNA, 460 bp, Zea Mays
cctgaggcccatgatgcatatggaaatcatacaagtgatctcagcaactcagggaaaggttttgttgggagaactgctaaagtatctgctgctgtttctgctcttgtcgtgggggctgttgttcatggagctgttagtcttgagcggatggttgctgctttaaaaataaaagatggtttggatattctgcagctcctgagaggtttgaaatcaagttcgaatggtgtatcccgtcctactggaacttttaggattgaacattccacagatgttttggtacattggtttagggttctattggggaactgcagaactgtctatgatgggcttattgcagatattcttggagattcgtacattcttgcactctcaaggttgcagcagatgcttcctcttagtgtaatctttcctccggcctactcaatttttgccatggttctttggagacgatatattttta

SEQ ID NO: 182451 - DNA, 1144 bp, Zea Mays
gtgcactttgcagacccattgtttgaaaatggaagtttgcaatcttcagagcaattgaggatgcggccttccgagaacatgaggtcacaaacttcaaccaaatcaccatcaaacatagccagcaagtttagacatccatcagacttccaagatcaccatcatgtgcagattgttgatcctcgtgctaatgtgtataagtgagtgctttcgttcaattttcaccatatttgtactgatactttttatattcggttattgtgtcatcctgaccagaaaatgaatgttataattactctagccattggttatactttcagtacaaaatgtcgtttgctatggcctaaattatagtaccatcatgtacaacttttttcctcgttataacagtaatccattagtcctggatatgacaggcaatgttataccctgggaagtagttcatcttgtccatgttggtcacgtgagtaattttagtaatttaatgctatcatttatgattttatggtttaacaagacatggatgtgttcatggaaccacgaaagttctgtgagctagaattgttagaagtgctcataactttgatctgaatttcttctgcatgtacttttccatttttctttttttcttgtgggtgtgattgaactcaataatccactccatatggaatattgaacgcaataaccaagtccttatggaatagaagtcttagctcataaagcattccagatggaatattgtttatgtctattgtcttgccagttggatgttggagttgcactaggaatgctctagttgatatcacacggggcacattgggtttcagtaaatgcactcactgtttgtagggtttctgttgatgtttccttttttgaatgaatatcaatgaattataatactaacttaagcacatcgtggatgataaaaccaagtttcacactgtaattatttgttgaatgaaaattaaaatattgttattttcatgccattatacagttaaatataaattcaatgtccaaaactgtcgtattcagcgtgcacaaacgccttgtgcttttttgcttgtgtgcctgcatgtgtgtttatgctattgtaatgtgttttcttctttattagtagattcacgggttcaatgcagaatcaatc

SEQ ID NO: 182452 - DNA, 291 bp, Zea Mays
gtgctctcgacgaatgtggaggcggaggtcgaagcgcctggggcagggcgtggtggagacaaacctcctgcatcgcttcttcaggttgggcacgtcgaacaggggaggcaaaacagggagaaaaaattcattaccaaatttaatacatacacattttaaaatattaaatttgttttaaccattcagatatccactttcatcctccttatatctaattcgattttaacctctagtatcttcatccaaacgcactcagagtagacagatgcggttcagttcagttgactgcac

SEQ ID NO: 182453 - DNA, 291 bp, Zea Mays
atgtagtttacagacttaacagtcctactgtatgattgttctcttccaggtggttgatgcattgtttgggggtaataattagttttgcatcagtgaacttctgcaaccactcaatgtttcatattgacttgcattcttccaactgtatgctttgttgatatcacatcagtcctgaccaagtaaccactaggtgtaggtggacacatttattttttaagatgttcacatctgttgtttttcttgaaatcctcaaatcagtgaaggtgtacctcccagagaagttgttaccgc

SEQ ID NO: 182454 - DNA, 307 bp, Zea Mays
acagaagagttccagatcagcgagacgacttccataaaaccgggaagtttaggccaaagactttcaaagtggaaccgacgcttcccacgtgtaacagtatgcaggcccaacaacagaggacagtgatcgggaacacctgaggctgcactttggaggaaggaaccagggaaaatgtcatcccattcagggcagcagaataccttgtccagccttaccaggataggggaagacctttcgtccgatcaggtaaatttgcgcccgtgaaggggaagctccttgagattagtgtcatctaaaaacctccgga

SEQ ID NO: 182455 - DNA, 715 bp, Zea Mays
ggcaacgcctacgctcgacgtgcccagcctccagcagcaccggccaacgacgaggtggctcctgtggctgctgcacctccaccaccaccagcggctgcaccagcttcgccccctgcgactccagcagctcggctcctcaatactgcagcgaaccgaccaatgactcgctcacaaaccggctccctctacattgtctagcgcttctgcttctccgcctccgtcgcctcgccaatccctgcaaactatcgcagtgctcttgccaatccgaattggtgtgctgcaatggcggacaagtacaaggcattgatcgacaacaacacttggtgcctcgtacctcggtcacctggtgcgaacattgtcactggcaagtggctgttcaaacacaagctccactctgacggctccctcactcggcacaaggcgcgctgggacgtcagctacgacatgtgctccacaactccatcccacgtgcgaccgttgtctactgtgacaatgtgagcgtcgtttacatggcggctaacccagtccatcaccgccgcacgaagcacatcaaaatcgacatccacttcgttcacgagaaggtagctctagggcagtttcgtgttcatgtcccatctacgcaccagttcgccgacatcatgaccaagggtctgcccatccagctcttcactgattttcagaccagtctatgcgtacgtgatactcccgctcagac

SEQ ID NO: 182456 - DNA, 367 bp, Zea Mays
gtcctcagatgtgagtacaactgagagtctgagaatcaagttcatgtcccacctttttcacaatggaattattgtgtgcatgttctacaagattgtggcatgtatggtgggctcatatgggagccatgtgcaccaccagatgcaattataatcttgaggggaccacctgcatctggtggagtgtttgacttttgtcccttagattgacgtgtatggttaacctgcttctttttctcctgagaagtgtaattaaggattctcaggagatgacactatgaactatttttgttaattccacttaggcaatattttgtgtcattatgtgctaataatgagattactgtaagcatagaatcattcataaatt

SEQ ID NO: 182457 - DNA, 722 bp, Zea Mays
catcaatgctttactcattcattctattagatctgatctcacccttgtgcttgcgacatctttgtagatgacccctgaccatagccttttgtattttgggattctatcctcttccagcattaaagtgctaccatttgaccatccctattcccttggtattgacatgattgtacccctagattcttcaatactcttgtttcaaatacttacctctgaaaactctgttgtctatttaaacattccagtttatatgtccatgaatttcttgtcctctgaaatcccttcttattccgttgttaagattgttatcctttgccttttctattcccttgtcctggtatgcctgcatccttagggtattgcatactcttgtctttctagatctgcttatctttataccctaatgtttgtttataaacacttcagttaacatgcccttgaccacccttgtttctcgatgatccatgagcattcattttattttgcacattcttagtgatctcgttaattccttgtagcttccttctgtaatgaattttttacttcaacccttctgttggaaccatacctatcttacccttaattattttctccactttgccacttcgtgagtcctgccttaactctatcccttgttatgcttttcacgatcatcatctttacccttgttgcctccatatcttaccttgatgactatcttatgtctgttatctaaaattccc

SEQ ID NO: 182458 - DNA, 383 bp, Zea Mays
actatgctatactcctcgtgcttcacttggcatattcgcaaaggtgttgaacccatagagcacaatgatctcacgtatggcgcgacgatgaaaagcgcacaccacttggtgagctcaagtgctttgtccctactaccactaagcgagatgcaagagagcaccacaacgaagagcatagagatcagggaggtttcaacaacgtagatgtcacctagcatgaggcaaagagagatgaggccaacaatgtcatagagcatgggcttggtcatcgtcatggatgttcatcgagcgttcctgcctttctcccattctcataggcttctcaatctcgctcgcactcattgtgttatgtggggatacatcaagagagggagagaaattgt

SEQ ID NO: 182459 - DNA, 560 bp, Zea Mays
tgcacgaatatagacagccaatcaagagatggaacacataccactcatttgaaaaattcgtggacgcctacacgcgtatacctcatggatgaaccgacgacaagcaagccctagcagatttggtacctgcatgcaagaacagtaggtccatgaataaaacacttgcaccgcttttacaaaaagacaacttgtaccccagtgcactactatagaataggatgtgcacaaagtgacaccaagggtacagtaagtagatcctttccacgccattcggaatggacgagatagctaaaaccaaaaggtagtctagattattgctgcaaaacgtgtacaccctggtggaaaatagatgctttattatttccaggatgcactgaagcagaaaatggtcatccagtggctagtttcatactgccatccatgcatccacatcaaatagggaccggaccgtccattcaagtcaagttgatcaacaggagcagggcatccattcagttcggtttgatgctcataacatccttcacaaaagcagtggaagtattacaagaactagtggttcg

SEQ ID NO: 182460 - DNA, 501 bp, Zea Mays
caggcccacacctaggccagtggccctgctggggcagccaggccaacaagggccgcctaaggcctagtgatggtgggagtagcccaggccccgatggcaatgacgtcgagccctatccctagggccagcagccacaagagcagaggcgggcgagccaagccaggaggagcaggggaggggcggcaagggctccccaagctccagcgacaacgatagcaccatggggaagtgctcacgtccgagcggcgatggcggcatggaggtgaatgcaggggcggtgatagagaagagatgatcgttagcagctacaaaggcccatcagcgagttggagaggggagtagaggaggcgagcctatagggggatggggagcatcagccctgaggtcgtggccagcgacgacggccaccagtgcctggcagcgacggctaggggagcagaaacctggtcggataacatgttagagtgagtggaaaaaccctaatccatatataggcttaag

SEQ ID NO: 182461 - DNA, 940 bp, Zea Mays
ttacagtttaccagactggttactttcagcgagctagatgaccccactttattgagagggtaattgcaggcataataatagtgtcaatgtctggggtaaagtgcggttgtttgggggtggcgacagggcagaaaacgtctattggcaagtggggcggatttgtagtggaggaaaataagatggaaccgcacacccgtaactaaaggggtccctctccctctctatgaacgactcttgcaactcgggagtcatacagtatgactactgattgatacttgtattgctggtcaaggcagctaaagcgcataatatccctgtgcgcacgacagacccatttcgttaggcatttactagaagatggtcttacctataggcctccttgggcatgcggcaggcccaggggtattgttagcgttcgacagatgctatacctcgaatgtgtgcaaaacatgttctagaattccattagcagaaggcaaacccaaagtggacctcatttagtgccagcctagcatcctcggggccctatgctagcctggcatcctcggggccctatgctagcctggcccctacaggccgtggctttatgcattaaccctctatcactccccaagacgcccttagggtggcacgacctcggcaccacgttcgcccccaaccaggctagtcgggtggcgccaggtggttgagataaggttcttgtcctttgtatttattgcaagggatgacattgcgatcaaaaggtgtaattgtggccacatctgagaccgcaggcgtacctatgagctctatgcagtgcgtgcgactaccaacttgctggactcaacggcatggggtgttactgtagccacgcttgaggccacaggcgtacccgcgggcactatacagtccatacggctaaaacggttaccaactatgatgtactcgatgatatggacac

SEQ ID NO: 182462 - DNA, 307 bp, Zea Mays
gcataaaaaaacaatcatcttcagaggcaaagatacagccaagaggtaacgaaccaacatgcaaagtgagacaattgatcatggaaagcaagagcattggagcaggaaattgcaggcatgcaacgcgaagacccccctcaccaacaaccagttggtgcagtcaacaaccaaaatatttatcacttccataggccagccaacatgcaagttgctttccaaggattaaactacctcgatgagcgaagcctcctatcagcacagctccaggcctccccgtggccgcaaaactacagagcgggcacctatc

SEQ ID NO: 182463 - DNA, 443 bp, Zea Mays
gaaaaacacaatcaaaacacaccatctttcgggactgattggctcgatacgagccatgctgccaactctgcaattctgacgtccccattccagcccgcagattttcttttgcatttccacgcttttattcatgcgtctgtatgctgcatcgtaaaaaaattgatctgaaatactttgacagtggcctgtgacgaaactcagcaatcaaaaacaccatctttcggggctgattggcgcgagccatgctgtcacactgcaaagaattctgaggccaaacagagtataaccacttttgagtctgataccgcattggccatattttttttttcaggaaaatggtaacagcaaatcagaccagaaagacttcttggttcttaggcgtttcaaaatattgtagcctagtattttcatggtattgctattttttgaacaaaccactgaac

SEQ ID NO: 182464 - DNA, 361 bp, Zea Mays
tcttaacggtcgtggatcgcttcagcaagcagtgccatttcataccattgggccacccttactccgcagagtctgtggcccaagccttctacactgagatcgtcagattgcatggcattcctcaatccatcgtttctgatcgggacccagtgtttacatctctgttctggaaggagctcatgcgattggctggcatcaagctgcatatgtcttcagcatttcacccacagtctgatggacagacggaagccgccaacaaggtcatcataatgtacctaagatgcttcacaggtgacagaccgcgtcaatggcttcgttggttaccttgggcggagtttatctataacaccgcttatcaaac

SEQ ID NO: 182465 - DNA, 860 bp, Zea Mays
gaagaggttctccaaatgggattgcctagatcctgacaatgagacgatcgtggatgatgttagccaagatctagttgtcttggatcctgatgatgatgagctcaaagtagtaacgatagttgctagaggtgaggatcgatcggtgtatggctacgtcaagagtgaatatctgcatagcttaaggagatctctcaaagctatgtaccttgttgctgcgaaggatgaaggctgccatacgacgacaaattgtcaacatgatgcacatagattgtgttgttgttaggtctagcaagtcaccaaacatgaacttgccccgttgaagttgtttggcgagaggctcgagtgtctcaagtcatggatggtgttgatgtgttcttggtagcgaggaagtggcaattggcgatgtcgaagaagatgaaattgacgaaggaatgataccttgcggccactcacggatcataaggatgctgatagggaagctgcaggtgatggctgcagtcgttggtggcgtgtagaaccccaacactagtagtcgtagattcctcatttcgccaatgacgacgtgtctcgaagaggtcgagcaatagtggtaatgtcgtggggaggtagaattgtccgttgaagaagaggagatcttggtccatggactaagttgatgcagctctcccgcctatgatggtggtggtgatggcgcgtagctcgagtaccattgcctatgatggcgtcgtacaatgctgattttgtcgagggcattaggttgacacggttgaattgccttgctcatgttacatcatggctgcgatggagaccatgatcgtgggagaagtgatgggtgtcgaggcaccggtaggattggcata

SEQ ID NO: 182466 - DNA, 1598 bp, Zea Mays
cttaactgaaaacaagaaatttctagaaacttctctgtaacctgcaagatcctggtcaagtaaatagggctgctcggatgtactcaacacgacacgaccattgtgctcaacaggcatccagacttgggcaagaacaccatcgctcaatgacttcctgaacaaagatagcgccatgagcatcctgtctgcaagaatgttgccaaccgacctcggaatgatgctactcccttgttgtgaaccattatttggaacaagcccatctgagtcttttagtcctctgtccacttcagttggattgaatactgatgctgagttgatcctttgagcaagtgatgctgtcacgtccataggtccaggataggtgtcaaacgacatgtcttctctcacagcagaagcacgcggagatgaccccgaagatgaccacaaggcaaacatatgttgcacagacgagggatcattcagcagggagaatatgtgatcagcaactgatgggctgctgagctccgagtatccatcaaagctcgtcatggcagcaccaccaaagggatcatcaaaagattgcatggggctgccgatgttgctgatgttactgttgcagccggcacggttgggaggcgtaggcacatccatggttttgctccactcgttgaggcaaagatccttatccactcctagcaggctgatatggatttggagcactgtattgagctccggacaggatataaagaagagcactgtcttctggctgaatagaatctttgttcaaacacaagaagcaatttaatacactagcaaagcagtatctggctatctgcacaggatacaacttttgttctgcagaaatgccctgttgataatgcaggtagaccagcactccaagactcctcgaccaccaatcagttccggaacccaaaaggtcaagcctttgcatggaaaggtcgccaaaggtaatcgcttaaagcgttttcacagcagcaaaaacttcggcacaggaaagaccgtacgacaggcaggtccggcgccaatggcgatgagcctgcaagctagcagcctccttcgacggagaccaactccctgatcccaaaaagcctccaaaggctcaaattaagcaccaattgaatcgacagaaaaccaaattcatgccagcacccaccctcccggtccctataaccaacacggcatcaaacatccgcaccaaaccagtttctccaatcagcagaacaccgccttcaacgcagaaactccgaacacagccttcgacatagaaactccggcaccaggcggcaagaacagcgtggaaccgctcggcttggccgagccaccaaaccagttggtagcctccagaccctctcaagtctcaatcacctaacaatcattggaacatgggacgagagccgcagcggcgtctcctcgactggggctgaggagagagaggagaatacggggaaccggggataaggatcgtagatctgaggggaagacgggggaaggaatcaaaggcgactgggacacccaccacagccaccaggttgagagggatggctagacggcagaagattccagtccgtggaattcccaagccagtgcgctgttttttt

SEQ ID NO: 182467 - DNA, 526 bp, Zea Mays
ctccggaccaatattgtgatgatacatctttatcagatttttacatggatgtatcctccccagagtcaatatcctgtgagcagaaccagcctgaagatatttttttcaagagcgagtctagcactgactcttctccagtaccctctagcagaaattccaccacagaggatgctgataaatacttaggtcaaccatcaaaacagttgctggactccaaaatcgttcctttcagcaaccaacacacgtttaagaacatggaatatcaaaaacctctggtattggataaacaatatgcatatagaagcaacaactcttctattcacaattcaacaaaaggttgcttcagtagagatggggacatggtttctgatttatgtgtgctagagggtaataggaatcctgctcctgctcacctatggccttatcaggggaagttccatcataattttcagcaacctgtgtatggtaattccatcattcctgcatttggtggtacgagatacaaaccacacgatgaaagaaccac

SEQ ID NO: 182468 - DNA, 486 bp, Zea Mays
gctggagctgatcccaacgcagtagatggtgaaggtgaatctgtcctgcatattgccgtggccaggagatatactgattgtgctattgctatacttgaaaatggaggctgcagatcgatgggaatatcaaattctcaacataaaacgtaagaaatattcacctagtgcctagtggaagcgaagccagtgcatcagcttctattatcatgttctacaacttgaaaaagttttggaaatttatttagttgtggctgcattaaatcttcttcctttgcatgttttatctgtctatttatttccttctagtgacatttcgctctcacggtgagtaggccattgcatttatgtgttgagacatggaacacgactgtggtaagaagatgggttgatgttgcatctctagaggatatagcagaagcaattgatgtacccagccctgttggtacagctttatgcatggcagcagctcttaaaaaggagcacgag

SEQ ID NO: 182469 - DNA, 308 bp, Zea Mays
ctatcatgtcatttagcgggaaccgaagccctgctctgaagaagctcttaaagacgataacttcgtcatccctcggctccggaattgtctcttccccagcaaatcgaacaagcttgctctcagagtccccaaaatagcccggttttttcatcatagtcatgtcatcttctgttacagtaaatttttcaaattcaagatgactaggctttgccgggtttagaatgttgtagtcctcttcgctctcattatcactctcaccctcaaccatagtttgtccagcttcaacattggaagcaccttcgtcagta

SEQ ID NO: 182470 - DNA, 332 bp, Zea Mays
cagtcctgtaaatgagtggagacactagacgcgagcttcaacagagcttcatgaccaggttgaccgagacggcggtgccacaggggagaggtggtcatggcgaccaaagactgtgctagaggaaggtgcagggggtacagggccctggagctattgtacctgacgatcacgttccgagtttgcagatccttcacagaaaaaccactagggtcaaactcaacagagcaattgttgtcgatagtaaattgtcgaactaaaataagattcttaataatttgtggagacacaagtataatattaagaaataaagagtgggggtagtgttgttattg

SEQ ID NO: 182471 - DNA, 364 bp, Zea Mays
cagcattgccgcatccacatccccgtccctggtggtcgcccctcctggagctcgccgccaccatctcgattttgttttcccgaccacagcgccaccgcccaacgctaacctgccgctccacgagtctcgacaaattatcgacgcgactggcacccctccccctccactggtgattgtcgccgtcagcatcttcctccggtcctcccaaggtgagcgccgacctaattcacaaattatgtagcagtaattagaagatctcgaattctcgagctgccttcggtaggaaggcccacgtgttcccgatgcgaatttggtaggaagggccatatgttctatatgtgaatttgctccatgcgcatgtcca

SEQ ID NO: 182472 - DNA, 585 bp, Zea Mays
agtgcacaagtcctaaagttgtctttggtgctatggttggcctagtgggatacttctatgtagagtgtgataaaaagatctcattgctcgaaaacaagatttctgattcctacaagctgttgaataagatactacttttttgcttgggagaagccactgctcttgcaaaacttgttcctgagatcatttatcgaagtgaaaatgtaagtaacaatgatgtgctcctttggggcagcttcaggctgtgcgtacaggttattcaaggttcatttcgtagtaccaacatacaggtatataactacttcacctattaatggtacccacatgtcactctttgctagtggttagttatgaaattgttttaactaatcaggtgcacatgctgggtctgcaagtactgagaagctatgcacagaaggagctaactgaaggttcagaaacaaagttggattcttttatgatgttgcttacggaattgttgggagacttgtttttggtgatggagactacattgaaggtactatatagagtttatccttgttttaaaggcgtggcgacgagggacctgcctaacagcgtggcgac

SEQ ID NO: 182473 - DNA, 355 bp, Zea Mays
ctcgttgtattactttaacaatggcatatgtaaatgtgaaactgatcaagccatggcaggtggcggcagatctccaaggataaaatatttgaagaaataataaaactggaacagtcagaggtttcagctagtattattccttgttctggttgggctcttggaaatatagtgaacttagctaccaatcatgatgacttatccaattcagggtgtttcattcaagagttagatttctgcttatatgttgatgttattaattgtatttctgaaaacttactggaaagttttgagaaaagcaagggaacgtctcaaaatgttggtaatatcactttccatgccgacacatctgttgcag

SEQ ID NO: 182474 - DNA, 1369 bp, Zea Mays
gaaccattctgttgtaatgtccaggtaactgctgttggagtcaacactgaatgggggttgctaatggcaagcatatctgaagattcgggtgaagagacaccactccaggtttgattttgttgttgttgccagcctttgcgcgagtttatttcctttacatgcctttgttgttccggtgcaggttcgtttgaatggtgtcgctactttcattggaatggttggactttctgttgcccttgcagttctggttgtacttttggccaggtaaaattggcatattttagtgtgctaaccgtctactttgtttatctacatcaatctgtatcaccttgttttctcgtaggtacttcactgggcatacttataatcctgacggatctgtgcaatatgtgaaagggaagatgggtgtaggccagacgatacgtggagtagttagaatattcacagtggctgtaggtattctgttctctgtttatgcatactgctttagtgcttacagtttttggctcaccatcttgaggtgtaaataggtcactattgtggtcgtggctgttccagaaggactaccattagctgtcacactgacgtaagcatggtttgtgtgttattttctgccagccctttcgtcccttgccactcaacatactttatttttgtcaggcttgctttctcaatgcgcaaaatgatgaaggacaaggctctggtatgttcccaactttctataccttggttttgtcatactacttgatccgacattgaatgctttgcacgctcacttcctatggaatgtaggtcaggaggctttctgcatgtgaaacgatgggttctgccacaacaatctgcagtgacaagactggcaccttaactttaaatcaggtgcaatggtgtttattcactttatacatactgacatacatgtttcagataattctgtttgttgaatctgattggccctgatttttaaattctcttcttcctggttgattttaagatgactgttgttgaggcatattttggtggaaagaagatggactcaccagataatgcacaaatgttatctgctgatgtcacatcactgattgttgaaggaattgcacagaacacttctggaagcatatttgagcccgaggttagtcatctccattcgtggagaaagaaaaagcatatgtggttgcatatgcatttgagatttcaggttttagtaaagatatagcttcgtagtgatccctatgcgccatcactcagtggttagataaaatgtgcacccttacaatttttttattggaatttattgcacatgcatgcctgtgtagtgatcttcagaggaaattttatgtttggttctcaagttcaattgattttttctggc

SEQ ID NO: 182475 - DNA, 565 bp, Zea Mays
atccactcaattggctattattctgttgtctgctcttaatatcatacagtacccttagtaatctgatggtttcaactcttctcttttctgcaatagaaatttctgccttattttcttccacgaaagaaaaatcaactaatttcaaaatacttggagctggctgtagcatcccccttgtggtgttacaaggagatggatacttagaatcttcattgcatgttattgtcgatacaaaattggagtgacccagtataagttcaagaatttcatcagctgagaactttccttgtgatagcacaacaagaatacatcgaattgcttttatggcgacaagatcattgaatctatgcaagagggacgatctgatgaattgagcaaggaaaggtattgatttcagctgatttagatagctttgaatctctaaagacagttcaatgatattcttgagaaatacatattccagaaaacagatgacctttcgttccttggtagagagtgataagatattgtcactcgatgggaaattcatgagtattttatccatagttctgaccagtatgctaat

SEQ ID NO: 182476 - DNA, 1262 bp, Zea Mays
cccaaataacgacacggaaaggttgaaatttcacatggcatcaaggtttggacttcgagcagcacctcctcagagcatctaataggatacacatttgacttttgcacattattgtgtaactcagaggcatctccaaacagttgaagaatgctaagagtgaggtctatatctgtcagtgttgggcataagaaaaggaccacatcatcagcatacatggagacttgatggagcttttttgaactagaaagctgttgaagcaaaccatcattttctgcctttgcgaacatgtagacaaggacatccataactaaaatgaatagcatgggggagagggggtctccctgtcgaagtcccctgtgatgcttaatatgacgacctggaaatccatttaaaagaatctgagtagaggaggtggccagaagcccacatatcaaatccctccaaatctgcccgaaacccaacttcttcattacctcgataagaaaaggccaagagacagaatcaaaagcttttgtaatatctaattttagcagcaagctggccttctgatgcagcagcctggaggtttgttgaaccagcatgaaattgtcttgaatgaatctcccttttataaatgcgctctgattaggtgacaccatcacattgagcttgctggccaatctattagcaaggattttggtgaccaacttggcaaaactatgcaccaaactgataggcctgaaatctttaatattgtcaactccgtcttttttggggatcaatgtgatataggctgtattaaggcgcccaaaattggcaaatttcctgccccaaacagccgagatggctgccataatatcagtcttaataattgtccagcaagccttgtagaaccttcctgtgaatccatcagggcctagagccttatctgaaggaagacatttgatggcatcccagacttcctgttctgaaatgggggcttccagatcggttagatcaaaactaggtattccaagagcctctaactcaatcgtccgaaccctgtccgtactgttccccaacagattggtgtagaattggtccacacaggcagctttctcctcatgggtggttaggatttgttccccatcaaccagacatgccacaaaattttttctcttacgatgacgggcgtgaaggtggaataactttgtatttgcatccccatctttgagccatgaaatccttgctctcagccttgcaatagttctcttgcaagatgataatagtaatgcctgtttctt

SEQ ID NO: 182477 - DNA, 494 bp, Zea Mays
tacttgtctaaaatctcccccaaacacaatagtcttcccaccaaagggcagatcagggcgtcccatgatatcacgcatgctgttgtccaacgcttcaattgattgtctcttagccattgaagcctcgtcccaaataatgagcgacgctttctgtagcaactttgatgtcccactttgtttcgtgaaggtacatatagcaccatcatcaatagtaagtggtatcttgaagcgtgaatgggcagttctcccaccaggcattatggaagccgcaaccccagatgtagctgttgcaactgcaatcttgtcctgactacgtagcaccgcaagcaatgccttatacagataagtctttccagtaccaccaggcccatccacaaagaacacaccgccattactggtgtcaacaacagataagatcttttcataggcagacttctgctcctcatttagggtttcttgcaaagcaacatcttctgccgtcgcctcgataattt

SEQ ID NO: 182478 - DNA, 313 bp, Zea Mays
ggtttacgcccttctttcaaacaggtactcatcagcaaatagatggaatgattcagaggaagtatggaaacagaagaaacaaaaggaaattaggaagagcaaagacttgagctgggttgagttaggggggagcagccatgaatttaagctggtggtagatctcatcctgacactgaggatatatacctagtgctgcgtggattacgtaaaaagagctaaggttgaaggttatgctccattgactgatccagtaacaaaagatgtctcagaggaggaaagagaagaaaaccttaccttccatagtgacaagcta

SEQ ID NO: 182479 - DNA, 388 bp, Zea Mays
tccctttctcatcaggccttgactgttctcgactcccctaatcaccagctcggtctattctcctcttcctcgccgcgctccgtcctgtctccgacacacacacgccatctgctgccgcgtaaacaccgggaaataccaggccttcctttcctgctataagcaagtttcaactccccaagttcgctgcttttggtcaatcttatctgcgctcccaggtctcagcgtcgccggtccccttttacttcgatccctctatccgatcactgcaattctaagcttcaattacctcctttctgggaaaattcactctctgataaagcaagccgttgagcggctcacgcaccacaccaccagtagctagcttcagctaagatctccatcttccccc

SEQ ID NO: 182480 - DNA, 590 bp, Zea Mays
tcctagaccggcgggatagggcaacgactagggttcccgagcgacggacacggaattggactcatcccaaacctttcccccaacttaatttcactaatgatcaacagggttgtgctggccacggtgaccgtgaaggttgcggatggatggggatgttcctggcgatgggtgggcttctagtgtaattggacggtttggtgagcatcaagggcacatgaggacgctagaacaagaaacagagggacgcgagctaaccggattcgagctggccgcagcgagctgttcttcacggcggcgggaactgatttggggcgaattcaaaattcgcggattctagcgaatggatgcggctgattcgtggtggctggatagtttactgccctacggagattgtggcgcactcaatttatagatcccatcgacggtggtgtccaatttcgcaaggtcgtgctggcggccggagatgaggaaggactctggcgccacggtttcgtgtccaccgccgtggtgggctcaccggcatcggtgagatagcagcggggaaacacgatgacacgacagaggtgcccggatacgtggcgtagggtcgg

SEQ ID NO: 182481 - DNA, 491 bp, Zea Mays
ctatgatggcatacttgtcaattctattgaggcaagaccagtattctcaaggtagtatcagatacctagaattgtatgaccatagtttgttctgtttgaaattgatagaatactttctcaaagtcagatgtttgatttggaccatgtgtctgtggcttcctacagtcttctgcatgagcctttcaaatctatacctatcatttggactgtgcatgaatattctcttgcacatcgtgctaaagaatataatgtgagtggaatgattcagctcataaatgcttggaaagatgtattcagcaggacaaatgttatagttttcccaaactatatattaccggtatttacttctgatctgattgtgatttcaacaatcattgagtcattgtcatatggatgaagatcctctgaccaaaaattataattaaatatttccctgcaggtgatgtatgctgcatttgattctggtaactatttcgtgattccaggccccc

SEQ ID NO: 182482 - DNA, 631 bp, Zea Mays
gctttgtaagttcttgcttcacaggattattgaaaattgtatggctcctctattatcatagagaagatgtgtggaaacatcacaagaaatgccaaatcagccaacaaccatcgaagccatacaatctctgcaatactagtagcaaaagcttgaagttcgacctctgtactagaacgagatacaactgcttgcttcctggacttccatgcagtagtagaagagacaggaagaatgcaatatcaagggatggaacgtcgatatgttgggccactcatccaagttgagttcgagtaagcatgaacctgaagtggactatcacacacatagaataaactctgagatgatgtcccccgtaattagtgcaacacatgaagtaaaatgtccaaaatgaatagaagcacaaacaaacttactcaaaatatggtcctattaagcccggtgacagttagataaacaaggttgcccacaatatgtcaatatcgagagggatcctcaagaggtgcctcattcagtgggacaaagctgcaagtgaagatccataggggtgacaactatccgattatcagtaatacccaaacgagcaatgaggtcttgtatgtatttggactgagagagataaaagtccttgtac

SEQ ID NO: 182483 - DNA, 706 bp, Zea Mays
gaaatatgcaaacaactcattagcaaacaaaggtgagatttcaagaatcaaattgtacactttctcaaggcttcagctccaatatgtcttgtaaattcagtgtattaacgatacataaaggattggattttgtgttttgaatccttcgtggcagctttgtttttggaacaacgctgggcagtacctctactccttaaggactacaccaacgaggtaattattgctattagtcgtctgcacatcatgtcttgcttattttttttatttttttacagctttctttttcccctggttttgttttattacatgtgctttatgatccgtatttatacctatgtacatagacaaataggccattttatagccaatctaagtaaatataactgcacatgtgtatgcacacgcacagaaaaataaatatgtacagagagggagggattagcctatatctgatctatcaggtgtaggcttgtagcaacactagcttgcacatatatgtatatatgctacaaatgtataactcataaactctaaaaaaatgcaggttcacaactcagactacaaagtcattccagttctctctgttctaacaaattatggaacacataattatgcacaagaattgcttacgcaagatgatgcatttagccttccaagtacacaagattctccagcaatatcgtttggtatatattctccacgtgca

SEQ ID NO: 182484 - DNA, 307 bp, Zea Mays
aaaagatcggcatgtgacgggaacaaagtttttggtcttccgtaagattcatgcatgatgactcttgttttggtgaaacataatatatcgatccctactctagatcaaaatgccacaattctatgatcagacatcaagttgagcctcgtcctagagggacattgttggagataaggttcagcaagaccttgatcactggtccgatcaacactgtctgatcgattgttaggcttcattcctatgaatgcagggttcaccgaaggtcatgaggtctaccgtgaagacttcacccccatgggagttagat

SEQ ID NO: 182485 - DNA, 313 bp, Zea Mays
actccttattctttataatcttcttaccgatagctcagtaatttattttgaaatctaatttaggcatttatggagatacggtgtcctgatggtggggatggtgggagacaagaaccatttcctgcaactcatgaagagatccaccctacagctattctcagtgtagttgccaatctgacaccttggtctgatcacaaccaaagtcctaggaacatgtaccaatgccaggttagtactcagaagtcagatcttgtccttatagtgattggttgatcatgctttcctttttggactaacccccagtcatcctcct

SEQ ID NO: 182486 - DNA, 950 bp, Zea Mays
gccttgcacttggcaagggcattcgagcggcggctggcgtcagcatgcactgccactcgctcttcatcctccaactcatcctccagatccggggctaccaaacctgcaacatcgacgacaagtcgaccgcgtctccgtcgtctttctcctgacgaacttgcagccaaaagagccaatgaggaatgctatcactgctcagagaaacattcgctagatcacaagtgtgcaggtcgtggggtatttctcctggaattggaatatgatgacaacacagaaaccatcagtaccagaagacctcggcatctccctccatgccatcacggggattgacgtcgccgaaacactgaagccgccagtcactattaatggtgtcaccctcactgccctggtggactcaagatcgactcacacattccgcgccaacgcatcagctgctcgtcttggcctctaggtgacgcccctggctggtctctcagttctagtggccaatggagaccatgtcaccagcaagggccgcaccgtggcgaccatcaccatcggcaatgagtccttcaccacaacctgctagtccttaccccaggatggcttcgacgtggtgccggggattgaatggctgcgatccctaggccccatcatctgcaactctgacaagctgacaatggtcttctggcgcctggtgcactggactggactaggggccacgccaccccactgcgcagccttggacgtgagtcagggactcctagattcactgctggaatcattctcagatttgtttgaagaaccaactgatcttcctcccccacgtcgccatgatcaccatattcacctactacctgggacaacaccagtggcagtacgtccctactgttacccccagttgctcaaggatgagattgagcgccaatatgatcagatgcttcaccaagttatcatccgcgagtgtacat

SEQ ID NO: 182487 - DNA, 383 bp, Zea Mays
agtgtgtatagctgaacgtacgtgcatggtaggcgtagacacacatgcaactactatacacgagcgggaggtgccaggcaaaggcagcgatcgtcatggtcggcggcggcaccagaacactcacatgtacgtacagatcaattccatcgtatcttacaggaaataacattgccgatgcatctctcagatcaaatacgaacacgtttaagttcctagctagctcttcctcctaccccacccatggcgtacctcaacctcgtccatggcaagaagaaacactaacttatattagttgctgctacctctaccgcgcgctagcccagtttggctagccagccggttacgccttctacatcgcggcctgccactgctcctcctccgct

SEQ ID NO: 182488 - DNA, 294 bp, Zea Mays
tcctcaaatctgagttccctccgcctgttgtccgcataactcttctgccgactctgagcttcaagtaaccttctgcggatcagagcaactttctcttccgcctccttgacaaaggcaggtccttctagtgctttttcccctacgttggaccacatgagagcggtctggcatttccgtccatacaatgcttcgaacggtgacatcttgatgctggcctaatagctgttgttgtatgagaattctgcgtagggtagactggattcccaacttctatcaaatgctagcacatatgct

SEQ ID NO: 182489 - DNA, 468 bp, Zea Mays
ggatgcaggtgttgtggcatatagcgatggcgcagacgagaaggtggatctgaagccaaaagcggaagaggatgcggcaacgaacgaggccccgaacagggaggtctcaaaagtgggagcagaggcggcggcgacagcggcaggatcaccgtgcaggagtggggtgcacctatggtagaggggtggagtcgtggggagggagcaccagcctcgcggcgatcggattgtcctgcagcaaataggggtgaaaatgggacggatacagggtcatattgtatcctaccctaatgtatttccctcctatacaagaccgggtacgggtatttaaaattcgagacggatacaggacgggaccaggtaataatttgggtgggtaagaaacgaatatcagatattactcgggtagataatggatatttatcggataatttgtcccgataatattagttacccaaccgttcaacaaac

SEQ ID NO: 182490 - DNA, 317 bp, Zea Mays
caggattttgtcatcttctgtgatgcttccaaacaaggcttagggtgtgtcttgatgcaaaatgagaaagttattgcttatgcatcccgcctactcaagccacacgagcagaactaccctacccacgatctggaattggcagccatagtgcacgccctaaaaatatggaggcattatctgatcgggaacaaatgccacatcttcaccgatcacaagagtctaaagtacatcttcacgcaaccggacctcaacctccgtcaaagaagatggcttgaattaatcaaagattatgacctcgaaatccactaccaccccgg

SEQ ID NO: 182491 - DNA, 464 bp, Zea Mays
cattaacgcatgtgccattggacatattgttctacattatcatcctttctgatttgggagcacgttatacttccattagctttggtgaagtgagaataagtaggctcaggcttcattactccagatcataattgtaccgaataacaaccactgcttcctaggttctcaaaaccttaaatgacacatttgttatcatttgtacagaatatcccagaatagaagtagaagcaaaattgctggctggagaaatggatttcgagtatgattggaaggatattctttttaaagaggtcactatcaaggatagggagaagatacaggaagttgtgcgggatgaggaagcaataccaacaaatagtgattgggctgtaaaactgggcattaatctgtactatagtgctaatcttgctaagtctcctttatacagtaagcaagttccatacaatagagttatctatgaggca

SEQ ID NO: 182492 - DNA, 283 bp, Zea Mays
gggcttccttgaggattagctctagaattgacttgatgtcgggaacacatagctgatctttgaaccataccacgccttccgcgtcttctcgaaagtctttgccttacccatctatgattagctatcgaatctcattaatcttcttatcatttttctgtccatcatggatatctcgttctagagtgggttccaattcaattgtcactccctacatgctatttagaaatccaagactgggcctatcgaattccttcgctagctcatatggcatcgggtgagcgac

SEQ ID NO: 182493 - DNA, 339 bp, Zea Mays
aaaaccatagtcacagaaacagggtcaatgccgcattccatgacccaaggtcggcatcccaaatcgtgggtctaggtcaccataggtaatcgtcccaaacgctagggagtcatcgtaccaatacagatggggacgacgaccagtgctcgttcgtgatggaggatcatgcaggttggggcagggcagctcagattggggcaaggcagcgcagatgacagcaaagcgatgtcgatgtgtaaggagacgaggacggagatcctcctatggccagcaaatggtgacactctggattcttgcatcagtgctcctcctgcaggttccagaggtcctgggctgggc

SEQ ID NO: 182494 - DNA, 283 bp, Zea Mays
ctcttcatcctaagaaggtcgaattgtttccaaaggaggcacatttaaacctgagaacatatcagacagagaacctttcatccctgtaggttccagaggaaacattgttgactgtgaagccggagattgcagtccacagccattgagagcaggccttcaagatttcctgttcattccatgggttcaatcaatctacttccgtccttctcgtataagtcccactgatacctttatttcagaaatatgttccttaagaaccttgtagctgcaaatataaatgtca

SEQ ID NO: 182495 - DNA, 604 bp, Zea Mays
agcgactttctcaaactcatctgcacgtctattttcattttgcagtgtgaaacatgtggcacaaggctagatcgagccacgttattttcaggtaacacagcccaccaggtattcattcatatctagcttaacttttttggttctcatctacttatccataggagagagggaatcatagcgactaaattgaaaatccatattgtgacatccatccggcataaggataattgcccgttgtagctaggacgtgcgcttcattttcccactttcctttcgcctcctatttccaatgcatcatgcatgagcctttctttttaattctactattcatccatctatcctcttatttttgggacattgttgagctagaggtacaaatggagactactactatatttatattgacctggaggtaattatttgtttttcttcttttcactactatataaattgttaattgttggtaggtgctatcatgtatgttgctttgcatttattcatctaaatgctcatatcttgcaatgaaggaatgctcatctacatcgtgaatacccttatatcatattggactgtcatgtatctgccagcaacaaggtttttgaga

SEQ ID NO: 182496 - DNA, 338 bp, Zea Mays
catttaatttgttgtactcgagacttatctattaagatatcactatgagatagtcttcaaggcatttaggtgtggggctcatatcttggtctgcattgccactagtgggcccatcacatcccttagccccgagacaggcctaggctgtcactcagagtcctcgattcctctgggggccctctagcctcggaggtatataccatcaggtgccccgaggtgtgaggggccccgagggattataccgttagatgcgccgggatggaggggctctagtggcttataccgtcagatgcctcaggatgcgaaggtcctcgttggttaataatgccaggtgccac

SEQ ID NO: 182497 - DNA, 282 bp, Zea Mays
gccagagattgagctcgacgacggcaagacgttccagcacaactcgtgctgggaggacatctgccacgccatcctggaggcgcaccacatgatatatatcgtcggctggtcggtgtatgataaggtgcgactcgtgcgcgaaccatcgccgtcgcggccattgcccgatggtggcgaccttacgcttggagacctgctcaagttcaagtcacaggaaggtgtcagagtgtgcctgctggtgtgggatgataaaacttcgcatgacaagttcttcatcaagac

SEQ ID NO: 182498 - DNA, 482 bp, Zea Mays
gtaagaaccaagaaggcaagaactagagatgatgccggtgatgatagaaaagggggaggaggtaggatgggagcaggggcaaccttcagatgacgagctcatctcgtcaatcgtcagttcgtcttcgtcactggtgctggtcaggagacgacgctggtgacctggagtcctggagacgccagaagtggatgtggagccggcgcaggtggactggaggatccgccgatgaatacactggagactggacggccgccgctggacgatgggcaggggcacaggcaggtcttgagttatggctagggtttcagttgcactggatggccgccactgtttatgtgactgtagatgggccgaaaaaacaataaagcccaatagtaaaccctagccatcactaaaccctagccgccactggactggacgtccagaaaccctctaatcggacgcttaattgacgatctggacgcttaatcggacgatctaga

SEQ ID NO: 182499 - DNA, 291 bp, Zea Mays
atggcacggatagtaggtctacatggtgtgcccaataagatcgtgtcggaccggggatcacagtttacttctcggttttggcagatgttgcacgagtgcttggatacaagattgaatttcagttcggccgaccattctcaaattgatgggcagaccaagagaaccaaccaagtactagaagatatgttaagagcttgtgctcttaaacatggtggtagttgggataagagtttgccctatgcggagttatcttacaataatagctaccagaccagtttgatgatgtccccg

SEQ ID NO: 182500 - DNA, 360 bp, Zea Mays
gcggatgtgcgtataggaggggtggtgccgaacagggcgaagaaaggagtgggatgactatccaccttggagggaagacacttgagtagataggtggcaatgttgagacttgagcgcctccacccagtagttgtcgggcagagacctgtaagagtaagcaacacaacatgttggtggtaatgtgaatcatggattcggcccgaccattctgaggggtggtgtaggggtacgagagtcgcagctgaacaccatgagaatggatgaaggagcaggaggagtcatcgaacttgtgatcattttcacactggagagcacaaatagggtggtcgaactaggtggagacctaagcaaagaagtgca

SEQ ID NO: 182501 - DNA, 369 bp, Zea Mays
cttgccccgctttttccccttattagctaatcttattcgctgcgagcataactctggagaagttcaagttgcactgtatgatatcttccaatcatcaataggccccataatatcagcatagcgtatattgtttcctcgccagttgtacaattttgtcagattgtggtataagaaaagggtacagctttacagtactgtaaatgattcatggttgaggcatttctggtgttgaaggtgagttctccttctcaccctccacagctttcatatatcgatctttcagtaaaggcaggggactaatttatttgtgccatacttttttggcagctacatggaacatcgacccagatgtctaaacaaggtttttgc

SEQ ID NO: 182502 - DNA, 725 bp, Zea Mays
cgctgctcttgccacctcccgccctctccacgacgcctccatttctctccgctccccgaccagcacggctaccctgtctcagatgcactagaactaccaccgccacctcaagcgtctccacctgtcctcccgcatcgacgtcttctccctcgacctcctcgccggtggcgtcggacggcgcagttggaaggaagagcaagaataagagcaggcccctcaagccgagttttgaggaacaggccctccgccgctggtccgcccgggcaccttcccagcgtgcctcggtcccctgggaacaacctcagcagcagtcgcctttgccgccttcgctgccgcaccgggctggccgaggaagtggtgatgcgggcgatcaaaaacgcagtggtggaggctcaagcgcaacgttgcgctccatcgtggactactttgctggcggctcctccgatgacgaaggagttcgagtagaggaaggggcgtgcgacaccaccgcagtaccggaccaagcggcacgggagcaggacgatggatcgcattttcggccgagctatctgcttgggagccacccattctctgcgccatggattcacagggaggaatcgaccaatgataggggggtttccggtccggtggccgaagaggaggaaaggttggacattcgtgatgcttctgatgatgaactgggcttggtggatgaggataaggaagagacggataatggtgaggag

SEQ ID NO: 182503 - DNA, 394 bp, Zea Mays
caaacaaccaagaagtgcaagcaaagaagggaaagccgagggagaaggtcactacttaacagccttcttgagcatacttgtttctttacataccacacatgagtcatcgttcaagctttggcattaatttttttgcagggtccattgaagctcactaatgccgatggtggcaacaagatatctgctcagaaggaaaagaggagtaggcaacggccgcgagagcggatgaagatcgagaagatcaggccttcgccacctgcaggttcatcaagtgttgataccagtgctagtgaaccagaagtcactccgatcgatgttaaggaagtgggtaatgagggtacattggagaaaggagagaaaggtactgatggccttaagactgatgggtctggga

SEQ ID NO: 182504 - DNA, 479 bp, Zea Mays
gagctcctcccaccttccggcccactccctcgcctgctcactcgcctgcctgcgcactgatgttcggtcaccgccacgtgggcccgctcagctggcttccctgtccacggctctgactcgctgacagcatgggaccctaacgtcggtttcatcctcttccccaaatcctctgctcgctgcaacagaccgcaccgcaggacccagattccaccggtgaattcgctcgccttgttgtaaccacttggatgcgtggtgtgcctgccgaccttttcccctagcggagacctcttcttccccgcggactcgtcacgccgaaccggccgccgtgtggggcgcctggaattccggatcggtggttgggatccgaagctcgtggcagccgcgatctctggccctatagaacctggccgggtgcgccgtcgatacacaagaccgggcgtcatctcctccatccgtctcgccgcaagcctagaacagaa

SEQ ID NO: 182505 - DNA, 652 bp, Zea Mays
gttggccccgatagagttgcagagaaaagggtgtccgcattgcgacgggagagtgcatctgctactgtgttgaggcgacctggctggtactggacagagaaatcaaacccaaggattttactaatccactggtgttgcgggattgtggagagtcgctggtcgaggaggaacttgagactatagtggtctgtccgtatgatgaagcggcgtccccacaaatatggccgccagtgtcgtactgcttgtacgagaccaataagctctctttcatatgctgctaatttgtggtgtcttgctgcaaaaggacgactgaagaatgccatggctcctgttccttgatgaaggactgccccaaagcctgtgccagatgcatcacaatcaaccatgaagtctttggtgaatgatggtagctggagtacaggtgcttctgttaatgctgttttgagggctgcaaaggcagactcggctgcttcagtccatttgaagccttctttgcgcaaaagctgtgtaaggggtgctgctatgactccgaagttatgtataaatttcctgtagtaccctgcgagacccagaaatccgatgcccacgcagagtgcagaattttggcagtttttacaaggaaggagcaacggctcctaggccccaagtgggg

SEQ ID NO: 182506 - DNA, 305 bp, Zea Mays
ctttcttctagtcacttctttgtaccagatgtctaacaccaattttgctgtggtcaacttctgatgttcattatccagtctattttatattgcctccacaggtcttactgttccatctttccctatttatccagtccattttatattgcctccacaggtcctactgttccatctttccctatttgtttgcttttgacatttcagtttagtaatgctggtaccccaatttttctataggtgatttcaattgattattgtccatatctttgattggtgcttatgaaattgtcacccttctgttttta

SEQ ID NO: 182507 - DNA, 697 bp, Zea Mays
aggatcctcctgtggccagcaagaggtggcgctctggcttcctgcgtcggcgctcctcctacaggttgcaaaggtccttggttgggcggtggtgcttctgcctcgtgagctctatggctcctatgtgggtctagagcagaagtatacggtttcattgctatagtgggtcgatattgggctggtgttaggttttgttaagttggtattaagctaggccgctggggcatagcatatatggtccttgggattttggaacaccaccctcgacccttggaatcgatcagggatcatcgacacattagacttgggttcacgtacaaaactcacgattcacgtcccataaagccataaaggtatacccccttgtaccatatttttttcaagtgtcgacccatgacctgtgaccctgtttctcgacccaatcgacccgagaacattgtgactatggttgagaccttggttggcaatggggacaacaacacttcgttttggaaagacagctgactgggagagcaatccatacaagtgttaactccaaatctctccaaaataattccaacaagaatcggtaataaaagaacaattgctcaaggccttatagaaaggaattgggtgagggatattaggggcgtcctcacaatccagatgattcaagaatatcttcagttgtaggaaatcctaaatgactttgtgctac

SEQ ID NO: 182508 - DNA, 427 bp, Zea Mays
gtgtgcactttgtgagggtttgcaatctgcccttgagtcctatagacacgacaagacaagaatcgaggaagaaaacacataccttcgatctatcttgagttgggtgtcatgcagtgagccccagttgggcatgatggtcagtcagttcaagaggggaactagaggaccggggttaacctttgctactaaggatgggagtgtcgctcgctttgggaaggttggtgagtgcagtggtttgacaccttcagagaaaccttcgtccactcccaagcttatcaaaaccacctttgctaagcctgtcacccctgtgagagatggtgtgattgatgaacctatgagagatcctcctcagaaacaagtgtggcttccaaaacctaaccatcttaggaacacacttgacacctttcccgacatctctagcgatccc

SEQ ID NO: 182509 - DNA, 1248 bp, Zea Mays
ccctcccaagacgccagtgcaagagaatgatgtttaatacgatgcctaagccattcctcatgccaagacaaagctctaatatctctagccatctccaacaggtgcagaatctccttggcatacaaaatttgctgcttaacatttcctgtttttttctgactccatgattgtaaatgaccagccaacctcttcagcttgtcagcgaaacattggaaagggcactgcatatcaagaggtatggaccaagagcgttccacctcatccatgaagccagggagcttaggccagaaattttcaaagacaaaacgtcgcctaccttgagtgaattcctgcagtcccagaataagcgggctatgatcagacaacatagaggccgagctttgcaacatacagtctgggaacaaatcctcccaatccaccatgaagaaaaccatgtccagccgcaccggcatcggagcagcctgctcatttgactaagtgtatttccttccatgcagaggaagctcgataagatgcagatcattcaaaagcctttgaaatctccccatcattgccctattcaggttgttgttattcttgtcttcagcgcgataaatcaagttgaaatctccgccgatcacccatggcccaccacaaagagaacgaatagcttgcaactcttgaagaaattgaaatttgagttcatctgattgggggccataaacacccgtgaaccaccagctggagccatcagcatacacaatctcaaccgtgaccgaaaaggagtccaccctggagttgaggattttacatggagtccctttccaagccaataacaccaccccgagtgccaattgcagggagataaataaaaccatcataatcactaccaagagtagacaacaccaattgatgagaaatagattcttttttagtttcttgcaagcatacaaggtctggacaggtagagtcaatcataacccgcactgcatcatgcctagccttcttgttcagccccctcaaattccaaatcagtatttttgataaatccattggaaaaacaatagaaaaaacaaccggaaggagagggagattagtacaagtcctccgggttatatccccagagacaaccagcacctccagagcagcgtcgacctcatcaggaactgaccatccgaacagcgccgccagagcaggaatatgtgactgatagagtggtttagtgaagagtcttccatactcgtcaagggcttcctgactgaaagcctc

SEQ ID NO: 182510 - DNA, 355 bp, Zea Mays
cggcgggcctgctccttcctctaccagtgccacagggtgtctggacggacatcgcgatggattttgtggaggccctccctcgcgtccgcggcaagtcggtaatccttaccgtggtggatcggttcagcaagtactgccacttcattcccctggcacacccgtactccgctgaatccgtcgcccaggctttcttcaccgacatcgttcgtctacatggtgtccctcagtccatcgtctctgatcgggacacggtcttcacctccgcattttggcgcgaactcatgcgcctgatgggtacaaagctacacatgacgacggcgttccaccctcagtctgacggccagtccgagtcggc

SEQ ID NO: 182511 - DNA, 279 bp, Zea Mays
gcaaaagtcgcctaagggtgcagccggactagcacaacaagtgcgcaaaatcgaagtcttcttcaaaagactatccatgcaaaagccgcctaagggtgcagccggactagcacaacaagtgcgcaaaatcgaagtcttcctcaaaagactatccgtgcaaaagtcgcctaagggtgcagccggactaattcaacaagcgcgccaaaacgcaagcgcattacatccatgcaaaagtctacaccaagaaactatccgcgcacagaccaactacatgcgtag

SEQ ID NO: 182512 - DNA, 603 bp, Zea Mays
gtcaaacgttctcagcgagcgtacacatacatgaaagtaggttttgcacgtggtcaaccaagggagcgggttagactcgccatgagagcttggagaacgttagcttgtggtgatgaaggtcaaagtcatcgcggaagccctagatgaagaagccatcacctcaccgctgccgctagcatcatcgtcgtcaccaccaccaccacccggaacatggttgctgcctttgctgccctagtggaggggacaggcggaggcttcttggatatatatcatccatgggtcgcttcaccagtcgtgccaccatacaatcatgggagaccattcgattgtcgagggttgtaagctatggcaggatctggtccaattttgccgtgtcgaagtcaccgtcttagggatcattgacaatgccgaacatagttgtcgatgcatcgattgtctcttatactaatcttagccactttggtttctatttcctttttggtttggctgtcctgcttggttgcaccttctctggtattggcgaccatagaaaaggtccataacacacaagcattccaagacaatttcttaaggacatttgtgattatatctctctctgacctt

SEQ ID NO: 182513 - DNA, 395 bp, Zea Mays
atttgagtgtgtttttcacgagtatagtgttgagcataagggatatcgttgttgggatccagttgctcatcagatgaggatctcttgggatgttgtcttcgatgatgctcatcctttttattctcattcttctttcgatgcttcatcaacatccttgactaatcccctttctttttgttcttcccagatgttcgtgcttctactatacctgcctcacgattagaacagtccttgatggagtccttatcttcttcaattgtgccttcttcagtggtacctcccttcccttggtgtcttctttagagtctccttccttggtttctgactagactaggaagcctccggtgacacatgtctactctcaacgggtcgtaaattcttctggtatgccgtct

SEQ ID NO: 182514 - DNA, 298 bp, Zea Mays
gtctcagcactggatgtagagactctctcaatgccctggcggttgacccgattcttgaagattgtgcttgagcaagtgcttctctcaatgaatagggctgattaggggaacttaattgagggctaaccctgttccacatgtatccattttctggtgttccctgaggctacattaaataacagtgattgttatgaaaagaaataactaatattaaactggcttaaattaaggaagcactttattcacatcagtttaggaagcatatgtgcatgacattgtttcaaattgctagattaat

SEQ ID NO: 182515 - DNA, 285 bp, Zea Mays
gtttggatcggatctaatttcaggtgtatacatgtagtattatgctttctaacttgattttcttgcaaaataaaaacatgggtccgctcatctcccctactgggtccgcctggcatatgtaggaattttagctatcttttagccgattgaatcaacttctagaatcactacataaacttgtattcgttgagatttacttctttaggttggtgacatattttgccagattactgggtatattgtcagctatattagtttactaatggattttgccttttcttggtg

SEQ ID NO: 182516 - DNA, 746 bp, Zea Mays
gcaatattcatgttccaagttgttgttgtacttgttctgggttattttgggaatacttggaaggacactcaggggcttaaggtgctatctctttttgattatcagtgttttggcgaagaaaatttactgtaatttgcatgcatgtcgttgtaccctctcatgggcacttgctattgtattttgtgatgtagatggttgcatttataagaaattgaacatataattatgccatttgtattctgtgacctgatatgtcattttatttatgtagcaatggtatcttatgtatcctatggaggtagagggcccatggtatgatttcttgattatcccgttacgctttgagctgttgtgctccataatgattccaatctccataaaggtatgcttgcagtttgaatcgttgttaactcttcctgtgtttgtagtcctgtttggttttggcctccagttactaagccaaaatttggcagtggccaaagttagcatttccaaaatttagtcatatacaagatgtttggattataactatgctaaaatgctagtaagactatcaagccattgtttgagtatgacatgtgggtcacatatgtcaaaatgttatgggtgttggccaggacgacccaacttaggttggcgcgaacagtacctgtgtgtactgtagtgtgtcctataacacccttgctaaggaaggaataaggactaggaaagagattaggggcgtgtttggcatggctctgctccac

SEQ ID NO: 182517 - DNA, 784 bp, Zea Mays
gacaagcacaataagcgcgtcatcgaagtcttttccgaacagacactccgtgcaaaagtcgcctaagggtgccgccggataagcgcaacaagtacgtcaatcgacactcctcgcaaaaagtcgcctacgggtgcagccggatcagcacaggcgtgcgaaaacggccaacaggccacattacaatacaagttgcagttacatacacacagcgagggcaccatatactacatcggctcaaccttcggggtgatacccaactctctataattaaacaacattattctcaattcctcaccctcaaaaagatttcgcagatccccctctcctatgctcgtcccaatcggcggggacaacagttctcgtttaccaatccggtctacacgaagacggtctcgctccatcccaatacgacggcgcctaccacttcgcgaaacctcacccacgctatgctttgacaccacccctcgccgcctgtacttggtcctcgcactaggaagatcagccgcctcgccaacctccacacgcggcgaggactccgccacggccacatctaatgcagcaaaataattcaagccttcatccgagaactcttcagtccaggaaaacgaactcccagattcaccatcagactcaaaacactcagatccagaaccatacaaattatcatcggcaggcacaacggttgcggccgccacaaaattagtattgccagtagcggttgcttgcgcaggcccaaacgtcggaacctgcgcagccaccggggttcagtatcacaaaaacaaaa

SEQ ID NO: 182518 - DNA, 279 bp, Zea Mays
cgggcaagaaacaaatccccagctaacttaatgttaagcatcagatttggcagaacaatccgccgccggagcaagctacgaaatcgatccggtccagaaggaccgccactccgcgaatacgtaccggtgggagtgggaaaggaggagggcgacgccgcaggatgactatgcgacaatacgggggcttgtatgggttctctacttgccggaggaaggcgcgggtggaagtggaacacgaagcaagaaaggggagttcttttcttcctgctagggttttag

SEQ ID NO: 182519 - DNA, 1051 bp, Zea Mays
atgcggaagctggtgaattctggggtttttttggcggctttgcccctcttcctaggagggcacctgcagaaggcaatgagaaacatgatgaaactgctttcaaattgctatggtaatcaactgagtttttattctgtatacggaagctccttttgtttggttgccaactaaatcagtttctacctgaaatcaattagtaatctatgaaatgtttacttttcagttttgaccaaggaaagctggagcctgtcgactgccaatctttagcacatgaattacttgagacaaacaagtgttacttcttagactgtggtgctgaattgtatgtttggatgggtagaattacatccctgatggagagaaagggtgctagtgaagctgctgaggtaacatttgttcagctagttacttatgctatttcattgtattcttagtgctacactattgaaaatgctgatgagtcttgctgagacttgctgatggactcattgattttgtaacatggcgtaggctgtctccttcagtttttacctttaaggctgtcttttggatctatattcctctatcttttagaggcttagttacttgttcaggctaattagaaatatttagagatattgcatattttcagaatgacttctttttgttgactatgttgttgtgatgtttattatttatttgtttaatactttaattgcctatgtagaaattgctctctgattcaaaccgaacaagaacacatataatcaaagtgattgaagggtttgagactgttacgttcaagtcaaaatttaaggagtggccacagacacctgagttgaagttgtcatcggaggatggaagaggcaaagttgcaggttgctatttacaaattttctaggttcagttttccgcctttaaaatttatgaaatgctttacacccttcacaatttgatcaattgtgttctttgtgaagctcttctcaaacgccagggcttaaatgttaagggtttgatgaaagctgctcctacacaagaagaacctcaatcctatattgattccactggcaat

SEQ ID NO: 182520 - DNA, 522 bp, Zea Mays
aggcttgagagaagagaggagaacaggaagtggtttttcttgcttgcccattccaagtgcggttacagcatataaggccatcagcccactaatttaggatctcataacaggaaagaactactaatactaggaaggttttacttatagaaagctatctcaataataggaaggatttattcatggaaggttattcccttatcttagccacctgtcgggccttcctcttcggaccttcctcatctcgcgcgcctgctgtgcgcgtcgcgcattccgctgcgcgtcgcatatctcggtgacgcctagtgtatgtgtggtcgtaacgcccagccatgacacctctcccctcctcgagaggcagctcgtcctcgagctgaagtgctggatactttggcgtggaatggctcgatatcttcccaggtggccgatgcagaggattgtcctttccactgtaccaggatctgttggacgccacgagcgatgcgctgacggacagcgcgttccggctctggaataatggcgccg

SEQ ID NO: 182521 - DNA, 636 bp, Zea Mays
aaggagctaacaccaaattcatggcacactgaaaggtggccggagcgttggtaagaccaaaaggcatgactcggaactgatagtggccctgatgagttttgaatgccgttttaaactcctcggatacacccatgcgtatctgatggtaacctgaagtcatgtccagactcgaaaagatttcagtacccgccaattcatccagaatttcctccaccactggcatgggaaaccgattcttaatagtcatatcattcaatttgcgataatcgacacaaaaacgccatgtaccatccttcttttgcactaagaggactggagacgcaaacgggctcacgcttggagtgatcaaaccagatttcaacaaatcagccacctgtctctcaatctcggtcttatggtgaggggaatatttgtagggccgagcattaactggtatggatcccggaagcaaaggaatgtgatgatcaaatggccgagatggaggtaagactgtaggtgcctcaaaaatatccatgaattctcctagcaacccttgcaaatctgtatgaatttcgttgctgctcgctgccgtcacctcttccagcagagcaaacacccagatatcatttccacgcaaccaccgctccacttgtaaag

SEQ ID NO: 182522 - DNA, 902 bp, Zea Mays
gagttggaggaagaccatttggtggtgcaaacacagctttaaattcctccaacaatgccatcagcacaggtgttaaatccaagtgtgcaaacagaggtggttcagattctatcatatctaattccactatcgacccaggtggaaaaacagcagacaatccatgtaatagcacccaggaacgttgatatggaatgatcatccacttttgggaccaatgcaccttcatcggactattagctgccaaccaatccataccaatgatcatatcatatgaagccagatccaaaactctcaagtcagtgtcaaacacgcagtgttgaacggaccatctagcgccaactagctggcaagaacacttcaaacgattgccatccgctacctgaaccagcactgacttggccatatcagttacacctgataacctcgatgccacccgggatgcaatgaatgaatgagaactacctgaatcgatcagcatcaccacttcaatgccttgaatcagtccccgcaacttcagagtatggttcaactccaatcctttaacagcagcaatggagatggccaaacattcagtctctatgatctgatcctcgaccacaacatcctcaggaatggtgtcttcatccccttcatataattcccagagttcctgtagagcatgtaactggactgtgggaggacacttatgatcacgcgaccacttctccgcacaacgctggcacaaccctttagctcgacgataagcgcgcaaggcagcaagtttgtcatccaagacacgagcacgatgttgttcagccggctttgtttcttcgatcacagctccagtcttgtcgggtcgtgctgtcaagaaaggaggcactgaagatttgccatacccctttcctgacgacgcccattctgga

SEQ ID NO: 182523 - DNA, 530 bp, Zea Mays
caggaccatatgctcaccaccctcgtctactctggctccacgccatgcttcatggcggctcaggtggcacgccggctccacctgactcccacgaccaaggatggcacaacggtggaggtgccaacggcaagcatctgtcttacctcagggtatgctccgcgctcacgttctccatcgacgacgagtcgttccacatcgacttcctcgtcatcgccttggaaggttgagccgatactcgagtgcaactggttgcacactctcaagccaatcatctaggaattcttacgcactcaccatggcgttctaaaggctcaacaactgggtcacatggacaggattgggcgtgtctcgcccgccggcattcgctctctccaccgacaatctccggcaacttatcgcaaagttcgcggacatcttcgctgagccaacaggtctgcctccatcacggcccttcgactaccgcatacccctcccatcggagcgcgccgcctatcgccatcagaccgtaccgcaacccacagttgttgaag

SEQ ID NO: 182524 - DNA, 639 bp, Zea Mays
cagaatgcttagcattggtaggtgcacttgaacattgtacctatgatcctggattggccggtggtattgttaagagctttcacgtgatcctacaacttgcaactgaacaaactctagcttctttcaagtcaattgatgtgctcactagagtcctgaaggttgcatgccttcaagcacaagaaataaggaagctgtcccaagatgacttaaatcaaaatggttctcaatccagaaatgctcagacgacttattcagatgagagaattaagaacacttgtgcatttgtgaaactggctttcaaccttttcaaggagtatgccacaatatctgacattggaaggattacagttttatgcaatgctaattgcatcgagtgtttatttgatttgttccaagaagaatacctcaggaaacacatattggagcaagtacttgccttatttagggtaagtcgtatccaccctcttttcttatattgttctttatactattgtctggatcttaaacctctcctgttctttcttacaatcagttaccttcgtcatcagcacaacaccacgcagcaaagatgctactatgctccaaatatcttgagactttcactcgtgcaaaagaaaaggaaaaggcttttgcagaatt

SEQ ID NO: 182525 - DNA, 1018 bp, Zea Mays
ttctaatgctctatattgccctgtggtttctggtgttgaatcacagagcatttgttccacagaaattcttccaaatgatcctgcagtctctgttgagaatgctttgccatctgcacagaacacggtatcaatgaatgagctttgttcggctagcttgttaaaccgtgagggtaatgcgtgtaaaagtgctctttcagatgattctgaactgcctatccacatttcacctaaatcaagtaataaaagagagtcaagtggcaggaggggaagaggaaggcctaaaacgataccactttctgctggaactggtcattttgtggcttctgttgccagtctcccaaagacaacctgtgtactgactagttcaagcaatctcacgtcgttgaacaagagtggtggcaaatttatagtaagtagcgttagttcatgtggctgtgatgttgagaaatgcagtgttcattcaggtgttttgttgtctgatgatgcaccaccagcacatggcttacaaaatacaaattgtaaggaagaatcgaataccaaaataggaaaagcgggatctagaaataagcctgttgcagttgagcacaatcattttactgatcttaatgtaaaagaacaaaaagtgcagacaactccaatgtcaggtgatcctgtgatcttggttgaaaattgtatggaaggacaaggccccagaaaggctggggggcaacttcaaaggatacctgcttcaaacaagagtagtggcgcatctgttggtggtggaacatataaaatagagacattatccacaccaatgactaaaggatcatctaaaaataatgacatggcttatggggctggtttgaatcagtctcagaatgcaattgttggttgtgaaggcatggaagttattgaaagcaacactgccaattatacttctcattgtaatgaaaatgcacgagcaaatcaagttgcacccagtttcaagaacagtgatagggtcattgatgaaacggaagctgcggaacttgggccactc

SEQ ID NO: 182526 - DNA, 393 bp, Zea Mays
tcgtgagtttcgtgctagagagaggcctgatgctattcctcagattcgagctgacgagttacccatacaaagtcctctgacagaagccatagtgaaaaaacgattgaagcattgtgcagatttgaaggtatctgtctatcacacattttattcatagtttctttatctgtatatttttattctggactcttattcaaccatatttaatgatctcctgcacttccttacagaaaggaccaaaggggcattttttctggacacagagacctgatttccgggttccatcagaagaagaactgaggagattattgacgccagaaagtgtgagtttctgcaaattattattgccctcatgttaatctcaatcaattgtttcttgttgacatgtttttt

SEQ ID NO: 182527 - DNA, 2534 bp, Zea Mays
gctgggacgagcttgggaccagtagggaagagcgctgtaaaaggtaacaattatgtatgctgttttttcttttccaagctagtttagtttagctatcaagtatgggcctggaagctggctattgattttgtcaaagctaggagttaattttttgctgttttgagcttgggaagggatgggggaaaacatgtgagcaaacaatagttgttagttactccctcaaatgcttactaagatgctatgagttgagattgcacaattcgtcttactccgctgtagccgtttacacttgaaacacgtgcaaacgaagcaagtttctagctgtttaaagcgaaatcagcaagctaggagggttatagtttataagtcgagttagcaagtgcttgctctttttgttgcttgaacgcaaggcatttctaatgagcaggctcataaacattgtttctatatatgcatcttattgtatatatgcttcattaagggtacgtttgatttctaaaaatattagtcaaatgctacttctgcagcagagatattgtttgtgtatgcgcatagtaatttctccaattccccttctttttgtctgttatgaaaattatttttgacaactaattggtgggctctccttttggagctttgttctatttttctctctccacaaccttttgtgatacatgggctaatccatctcattcacagctaaacctagtgcacagcggaaccattctggagatttgaggacacctactcacatacctgaggctgcggtagtgatatttctatttttcttcttccctatgactttcatttaagtaaacaatggctaatccatccttacatctttttgcttgcatttttagtgtgcatatgatccgtgtgagacaccaaaggaatccgagtccccacgctttaaagccattatgcaggctactagtgcaccgaggaagagactccctgcagatataaaaagtttttcacacgagctgaactccaaaggggtgcgcccatttccttttttgaaacctcggggcatttacaacttaaaggtaatccgagtccaccgtttgtgtgagacaagggtcattcatacgtcaccttgttttttttactctacccattccagtttcttaaatatttgttaataacaatactttctcctgttatctatgcaggaggtaataaaagttatccatgtgagatttgagaaggcaaaggaagaggtaaattcagatttggcagtttttgcaggagacttggttagcgtaatggaaaagtatgcagactctcatcctgagtggaaagatgccctggaggacttgctaatacttgcacgtacctgctgtgtcatgacacctggggaattctggcttcagtgtgaaggtatagtgcaagatttggatgaccatcgtcaggaactctcaatgggtgtgctgaagaaactatacacccggatgctttttatccttacaagatgcacaaggctgctccagttccacaaagaaagtggttttgctgaggatgaagttgttattgatcagcgtgataagattatacaatctgcagataggcagattttaactcaatcaggtgtgggtgacacaacatccagagccagtaaaagtgaggcaagaaaatcatacagtcaggagcagcataatttgaaatggaagcgtagccaggagataaagcctgttaaccttcttccaccacttgatacggatgttaagaaagtggctgattctccaaccaaagaacgaatatcttcctggaaaccttttccatctcctgttacgaaggtcccaaaagaatctactcctactaaattggaatcacctaataagaaaacagatgcacactctacagttagtagccatgttgaattaagcagtccagttgaatctttaccacaacaacagcttcctgtcaagcatcaacataaaacttcatggggccactggtctgaccagccaaatatttctgaagagggttcaataatgtgtcgcatatgtgaagagtatgttccaacacagtatgtagaagaccattcaagggtctgtgcaattgctgacaggtgcgataaaaaaggtgttagtgttgatgaacgcttaatcagagttgcggaaatgctagaaaagatggtagaatcttattcaccgaaagacctgccaaatgctgcagtcagcccagatgttgcaaaagtttcaagttcaagcatcaatgaagaatctgatggtccctctcctaaactctctgattggtctagaagaggatctgctgatatgcttgactatctccaagagactgataacactatttcattggatgacattaaaaatcttccttcaatgacatgtaagactcgttttggaccaaaatctgatcatggaatggccacatcatccgctggaagtatgactcctaggtctccattaactccaagatcaaatcatatagacatgcttttagctggtaaaaatgcaattaatgagagtggtgatcttccgcaggtaagagatacagtttcagtattttgc

SEQ ID NO: 182528 - DNA, 432 bp, Zea Mays
agccagcagcgtcgccatcgacttgttgatataaataatcaactgatagtgactccgatccaacaaacgctcatcaggtatatagctatagtttgtgtgcatcgacgaggacgacgaactggcctgatatttccgtgcatgccattgccaaaaaatggtcatttgaaatcgcgacgtcctgctagggaagttgcacgtactcagcctaccgctgcatgctgccaggaaccgatgtgggatgatggttagtttagttctcgttgctgctagttcttacagtacttgtgttagtggtgtgagctgcatcttttctttctttttttttgtttcttcgatgatcaagttggcgtggtggcgctcgatgaccgatcgatgcacatcagcacatgcacctaattctaattcgttatctgaccaccctagctaggcaac

SEQ ID NO: 182529 - DNA, 730 bp, Zea Mays
ctcgaaagcatgggttgccattgaggagcaattatttggcaactgtgaggctcgcgctctgcatctcgacgtggcctttcaaaccttcgtccagggagacctctccgacactgagtactgccgtcagatgaagggcatgatgacctccctctctgacctcgaggagcctatctctgatcgcacactcgtcctcaacctccttcacgacctcaatgagcgtggtcacctttggacctgggtcatcctcgaggagctgacgaaggggtgggcccctcgttcggacactgctgtcgctctctacagctccaccctcgggggctacgccttgcaacgtccctcttctacttttgtctcggggctcttccttgcgccttcccgcccctcccgccttaatagcctggtttgaggtatcccctttgtcatctcccctctacaccgctcgcgccttagccaccacttctgccactgccaccccactccgctccgtcctaaaccccatggtctagtgggtgggattagcggcctcttgctagctcctttagcacgatgatctggacccctcccgttgtcaccgattgggtggcttctggtgccttctattgcaccactccagacgctggtatactctctttttctcatccacctcatccgtccaccccttctatcattgtgggcaacgggaacatcctctaggtcacctctatcgatgatttgggtgtctttgggcctt

SEQ ID NO: 182530 - DNA, 860 bp, Zea Mays
ctttagtgaactcagaatagggcaaaagcttactgccagaattgtttcagaggctgaaccttctggaaagagtggcaaaaaattcaaatgggaattgtctattaggccatgtatagtcaatggtatggtttaagtttcaatatttttaactcatataaatcttacagctttcattcagttcatctattgctaaaatcttgtacgccgactgcttttcatttttatacctttttgtgtttcttaatctttgagatgactaacttttcttattattggatcttttttcttgaaattgaacaggagagtttgctcaaaaagaacaaaatcacaccacaaatgggattgtacgtgcttatgttgtcaaggtggataaggaatgggtctggttaactgtatcaagaaatgttatggctcatttatttttacttgatagttcttccgagcccagcgaactgaaagaattccagcagcgctttagtgttggccaagcagtgaaaggtcgtgttatcagtgtgaaccaggagaaaaggttacttcggttgaaggcacttgataaccaatgcacacaaccgaatatagatgaaacacaagaaccaaagtcctctgtgtttggacaaacaaaacaaggagatatcattggtggacgtgttcaaaaaattctacctggtgttggtgggctcgtcgttcagattggacctcatctccatgggagggttcattatactgaaattgttgactcttgggtgtctgaacccttgtctggattccatgagggccagtttgtgaagtgcaaggtcctgtctgtgagccgctcatcagaaggatcacttcgagttgatctatcactccgttcatcaaac

SEQ ID NO: 182531 - DNA, 1132 bp, Zea Mays
gattttaagacaactgcactttctaatgaagtaaggaatttgcagtcttttctggttgtcagaagatgtttcccagtggtgagaatttttactttggatgatattttcgtgaaacatagattcttaagggcactaaatttgagctatacagacatactagagttgccaatttctattggaaacatgaagcacctgcggctcttggctctcaacaacaccaagatcaaaagccttcctattgagataggacaagtaaacagtcttcagacattggaactgaaggattgttgccacctcattgacttaccaggaagcataagtaatttggcaaagctgcgacaccttgatgtgcaaaaagaatcgggcaacattattgttggcatgcctcatggtataggatatctgacagatctccaaactctcacaatgttcaacattgggaatgatatgttgcattgttcgatttcagagttgaacaatctgaatggactaaggggacatgttcatgtaactaggcttgagaatattatgacagccaatgatgccagagaagcaaatatgatgggtaaacacttgctagaggctttgacactggagtggtcttaccaggatgaaggcatggacgatgacatgggcaaagaaattgctagtgagattcttcaaaatcttcaacctaacagcaacattatggagcttatcattcgaaattatgctggagatctgtttcctgtctggatgcaggacaattacctttgcaagctcacctcagttacacttgataactgccatggctgtagtgagctcccttaccttggtgatctaccatctcttaaatctctcttcatacagagaataaatgttgttgaaagatttggaatcgagaccagttctttggccactgaagtaaaatatcccactagatttccatcactggaggtgctgaatatatgcgagatgtatgatttgcagttctgggttagcacgagagaggaggattttccacgactctttcgactttctatcagtagatgcccgaaactaaccaaattgcctcgccttatttccctagtgcatgtgtcatttcattacggtgttgaactgccgaccttctcagaacttccatcactggagt

SEQ ID NO: 182532 - DNA, 550 bp, Zea Mays
gtgcacgttgccgtggataagtccggccggaaaagtaaacccgaccaccgtacagagttgccgcggtggaaacccgataggttcgccgtcgaccgccgcttcccgaccgtgcgccgcgtggcctagccgttttacagcgtcgccatgactccctctacccgtcccatcgtcgctggggagcttgccacggcaatagccacgcattcaccgcacctgtgttcttccctatctccggccgccgctcatctccatccaaattgagcaccaccgcccgcgaacactataaattgagcctctgggcagctgcgctaggtcatcccaaagctattgcacccgctcccaccctcaatcctccaccagcacgctcgaatttctggtttcccccaaatcgggtcgaacaccccgcaagaacacctcaccgcggccagcccctctccggtcagcccccgtcccctgctttcttgtttaagcacttgcatagcttcgtgatgcttatcaagtcatcaatttgaactgtgtgaccacccatcaccgggaacgcgtagttctt

SEQ ID NO: 182533 - DNA, 681 bp, Zea Mays
cttgtcaggttggtatcttcaagggctaagaaaaggactgttcaggatgccctcactactggaagctgggtacaggacattagaggggctattactgttaatgtgttgtctgatttttttaaagtctgggacctcgctgccagctggattttgcacccggaacaggaggataagcatatatggttgctctctagctcaggaagtcggcttatgatggtttctttattggctcaacaacctttaggtcatggaggaggatttggaagagttgggctcctggaaaatgtaaattcttcatgtggcttgtggcgcacggccgatgctggaccgctgaccggctggcaaggaaaggcctgcctcaccctcaaagatgtttgttatgtgaccaggaggaagaaactatgaatcatctgctagtttcctgtgtattctcaagggaagtctggtttaatatcctgaaaacggtcggtttgcagcacctctctcccagtctcaattctacttcctttgatgtttggtgggaggaagtaagcatgacccttattagcccctccaataagaagctgcgcaaggggctgaactcccttatcatattaggagcttgggccatttggattcatcgcaatcaatgtgtcttcaacggagagcagcctagggctagcaaggtcataaattgggtca

SEQ ID NO: 182534 - DNA, 441 bp, Zea Mays
ccgcctccctgtgctgctcgacgctcgccgccaccgctctgtatctggctatctgccctgctcagcgctcatgctcaccactccagtgctccagctcgttgtccctttgctgccactgtccctgctctcatccttctccccttccctgctgatctgctcacaatctcctctaattttggttatgatgatgaagcaacaaacaatagtgctggctatggtgatgagcaagacaaagacaagaatgatggtggtatagatgatttggatgatgattattgagatatgatagagggagattgagtaacacttgtgtgcttacagttgtggacattcattccactttagttgcttttgtgctatgtttgtgcctttgtggttgtggacattgcattccactttagtcgcttttgtgctatgcttgtgattgtggactattacaca

SEQ ID NO: 182535 - DNA, 316 bp, Zea Mays
gaagaggaagggggagaggaatcgaaccgcgtggaagaggaaggggaatcagccgcgctgaagtctggccgcccgtggaagaggaccactctgttcgcgcgtcgtcggtggaagaggaagcgtagggttagggccgctcgccgcgttgcagtggagaagaggaagaggaatagactggatgccggcggccggccgctcgccacgttgcagtgggggagacgaacaggaatggactgggagtggacgcgttgcagtggaagaggaatggactgggtcactgggacttggacgcgtacaggctacgctattatttaaa

SEQ ID NO: 182536 - DNA, 416 bp, Zea Mays
aactcatcagcctagtccaggttgtacaggactagcgaccatatctttggggccatcgactccttatccacactaaccacaacagccttaagttggtcctcgaccaactaatgtccactatgccctagcaccagtggatcaacaacttgttcagcttcaactttgcgatgtagcaccgcctaaggcgcctcaactcgacagttgacgtcatgtcccatcgtgactctaactcaacagtcatggtctccaacttactcaaaacttgcacccgctgagctcctcgccctgtcaacacccttgttcagactcaagcacattcgtgtcaccacatgagctaaccctgaagttggtcgcatcaaacagcagttgttggaggctttccttgcccctatcctcaaggcaactcacacgtaaag

SEQ ID NO: 182537 - DNA, 432 bp, Zea Mays
ctcgaatggagaaagcgctatcagataatcaggggaatttgtgagggcttgcgttatcttcatgatgagaatgttcttcacttagatcttaagccttcaaatatactgcttgatcataatcttgttcctaaaattactgattttggtctctcaagatgctttgatgataataaaactcgaaccgttacagcaaatctgattggatcggtgtaagctaatcatgccttaaaaactattttgttcactaagtagatttgttatgttgctcctattgtgcactgttacaaattaaacattatgtcttcatgcaggggatacctggcaccagaattttttagtggattgatctctttcaagtcagatgtatatagccttggtgttataatcatggaggtggtgacaggaataaaaggatactgcgaaattgaagat

SEQ ID NO: 182538 - DNA, 412 bp, Zea Mays
ggagcgcgcagtgcgcttagggcttaggcccacaggctgcattgttgcacgcatgtctcgaagagcagcaagatacgtcgtcagctcagtcagatcagatgaggccggctaggaggagggatgttgaaattgatgaagccggcaagttcagttccgtttagccggccggagcctttttgattggagcggcggggtctcgagtgagtgacctctgccttgacagggagatgtagcgaggctgatggttaggaaggagagttcaggttgactatgcatgactaatgctcttttcatatgcttcttcattgttgttgttgttgtcagttttgaattctgtaggcagtgtacataggatcagtgtcctctgtaggggggtcgtgggatgttcatcatcaattcaccagccatgtac

SEQ ID NO: 182539 - DNA, 506 bp, Zea Mays
tacacctttattgttctttatactgtgcatactagaatggtgcactgcttagaagatgtgtatacttgaacatgggaagcagttactcaatttcttctgaagatgatgtagaggtttctgtgttagaaagttctttcacgaatgatgaagactgtttaaaccttgaagaacataaaaagagaaatctgcagaatgccattgatggtcccacaaaccaaatactgaactttacatttgaggctcaggtacaactagatctcagttgtgtaattcctgtagttgattttcttttcaaatctatatgagcagcttttatgtgacagaagaattgaaccggtatgaggtgggttttggttgtgtaaccagtggcatggtgggtattgaaacccaattccaggaggatttctgaaaccttgttctttggagcaacccttgaggagtgccatgaaaactatggggttggacccttggtccacatttttcgtggaggtggagttttttttttc

SEQ ID NO: 182540 - DNA, 1199 bp, Zea Mays
cttgtttaaagccttgtcaaacgttcgtcatagaaacaactttgagaaagaagcccggaggagttggagttgttaattttgagtccatgggtttgtttggaagcaaggagattggaggagaattgcagggattaaaatcttctcgatattcaaattaaatagcgagtggattttagcccttacagggctagtttggtgaatagcaagggatttcttatccatggatcctctctaattctcttgttaccaaattggctctcggtctcctttaatcctctcgctcccaaacaagcactaatggttcctagaagcatctacaatacaaccattttagaatacacatggaagtcgtttgagacttacaggaaaagcataaatatggccataggaggggcaagggaattaaatccatgttatttagatttgtttatgtattctaagtctgttctaaaaaaatatgaaatctcaacgtaaaaggtatagtaggtgaatagattcttaaaaatctacatagtcctctagttcaacccataatcttttgtcccctaatatttttcacattcttagcatccaaattttccaaaatattatccacatggcaatttataggatgaatcgttgtcttttctatttggaggcctctcatttcactcccacacgatggcaccttccaaggacgactagggctaccactgtgtccctgcgccacactccggctcaaccatctataatcgccgcacctcttgcctatctccccttcaatgctgcttcatcgtccaacatccatgttcttcttttccatctaacggtaccctccttagcacatcccgcctcacacttcaatgttcggtggagtgggtatgactacaaccacgacgcttgcgcctagtcgggcgtaggatctccatggcaggacgtaccccctgccggtgatgacatgttgttgaatcggttcgtctcaatgggcagagcggcatccctcctgctaggttgtcacatcatcataagaatctcttatagaatatatagttgacaagtgtttcaactaaacaacttttagcttttctacaaccatcaactcacatcgactttcccgtagtttacaactaaaatcagattttcaagaatctattactgaaccaaacaggcacttaatttaattcataaaaatatgtggatactacctatccagtaaagag

SEQ ID NO: 182541 - DNA, 1478 bp, Zea Mays
attggctgagaaaggtggttctgtgttagagaagattgtagcacatccaaacttcttcatccttgcaacgatgaaccctggtggtgactatggaaaaaaagagctttctcctgcattaagaaatcgatttactgaaatttgggttcctgctgttattgatgttgatgaacttaggagcataacttttgggaggttcaccaaaactgacttctcttgccttggagattgcattgttaacttctggaagtggttcaaccaattgcacatcgggagaacattgacgatacgggacctgctgtcatggatttcatttataaacgtgactgaacaaaatcttgggcccgagcaagctttgatacatggcctgtttcttattttgcttgatgggctctcattaggtctaaatgtttctaaaactgaggctactgagatgaggaatacttgcttgtccttccttctagaagaattgcagaaagttgggggcacggcagtagattcatacttgaatgatctaaataattatggctggggtgacaatatgaaaaaaaaagatatagatcatggttgtttggaagatcatttcggcattgcaccattctatattcctaaaggccattttccttgtaagcaacaggactttgaaataatggcgcccacgaccagtaagaatgtcttgcgagttttgcgtggtatgcaactacctaaacctctccttctggaaggtagtcctggagttggaaaaacaagtttaattgtagcattagctggattttctggtcatgatgttgtacggataaatctatctgaacagacagatatgatggatcttctaggttcagacctgccagctcaagggggaaatggaatggaattttcctggtctgatggtattcttctccaggctttaaagaatggaagctgggttcttttggatgagctcaatcttgctccacaatctgtcttagagggcctgaatgccattctggaccaccgtgctgaggtcttcatacctgagcttggtcaaacttacaaatgctcatcgtcttttcgggtctttgcatgccagaatccttcatcgcagggtggtggacggaaaggccttcccaagtcctttctgaaccgcttcaccaaagtttatgttgatgagctatcagaggaagattatctattcatctgtaaatcacgatatggttcattgatttctgaaagtttcatccgaaatcttattcactttaatagcagactgtatatggataccatggtatataggaagtatggccaacaaggttctccctgggaatttaatctacgtgatattatcagatcttgtgagatgatagcaggttccccaaatcctatgatggatgattcttttttaaatactgtttatctgcaaagaatgcgcacattggttgatcgccatgaagttgtcaagctttatgaggatgtctttaagaaaaagatcagcattcaccaac

SEQ ID NO: 182542 - DNA, 435 bp, Zea Mays
ggtggttgtgctgacagcagccggtcggcaggccgcgagcccctgccagtagaacgccctgccctggaaggtgaaggagatcgcgtggttgctgaaatcccacatgatcggtcccaacgctgccagccatcgggtgcccaggaccacgtcgtagcccgccaaaggcatgacgtataggtcagcagggaagcagtggccgccgatgtccagtggtgtgttgcggatgacgcccacacacgcgacgtgctccccattcgcgaccatggtcgtgaggcgtggccggtgttcgaggggcaggcctgtgcgtgcagccgcggcttccgatatgaagttgtgggtgctgcccgaatccagcatggcgacgagggaggtggcccccagcgtgacatgcagctgcatcgtgtcggtgagcgccacgcccgcaagagcttggag

SEQ ID NO: 182543 - DNA, 360 bp, Zea Mays
tcgagcagagctttaggaaccaacccttaagtttggtcaaggtccagacctttagggacccagtccgaggtattaggacaacaattctagggtggtggagggtgtaggcttatggtacggaaccaggctaagtggctacctagctccggaccacccctgagaacgtggtcctttcccctggttggaggtccctagctattcgatcctcgttcaacatcaaatggggccccaaactaagcgacaagctagttacatgatcacaacagaagttaggaaccacgtgagggctagaggaaacaatatatgtaaattaaagcaggaaaatgattgaattgagagcaaattcttccttcataaatg

SEQ ID NO: 182544 - DNA, 277 bp, Zea Mays
atttgggggaggcgaaattgtgattctggattgtgaataaaaattggaaacatgtgtttttgagataataaagttaattaagtttgtgaggatacgcatagaaattcaagctgatcggtgatgcctgcttagtgcttagtgatcgataggatacctgcacgataacctttggttattgatcacaattcacaggtatgtattttgctatttctctgttcatttagcactcaagtaggttatgtttactacatgtaaagaaaaagtagctgagttgcta

SEQ ID NO: 182545 - DNA, 396 bp, Zea Mays
gatttgatcaagcttgcctgcttgttgcctgtgaaagaagataacttaagaaccatcatcacaaaggtaaattctagagaccaaacgtcttgtactcatcaggtcatcttctggtgtacttattatcaatcattgctcaataatttagtacctcttggaagtatctggactctacggtaaagattatctggagcacattatgctacctgtatttcttgtagctgctggtgacattgatagtggcgattttacctattttcctctatcaatccagccaaaagtccgtggtaagagcatatctgcttaaaaggtgaggcagttcactatatttgtgtttgtgataccttaatattgattacattacaggcttgcgtccgaaaacttcaactgctgaaa

SEQ ID NO: 182546 - DNA, 880 bp, Zea Mays
aaaattaagtgatgctcttgctgtgtctgatcgttgtttgcgcaatggagcatctgataatttgcttcagttgctcatcgaacagaaggaagaaaaaggtccaggcacaggacaaattcatccatatggatctcacagtcttgggaatgatacttctcagtactgcttgaggctgagagacaaaaaagttgcagctcagctcgctctaaagtacttgcacagctgggaccttgatgctgcaaccaatgttctaactatgtgcatgtgccacttacctgagaatgatcctatgcgcagtgaggtagtttcacttgcatttattcatatttgaagttaaaaaaacatctgaaaatcctctgtctgattgaaccatgattatacatgccagctaaagatgttccaatacatatagctgaaatggcttatctagctaattatagtatttcacattacaatctgtggttgagtgctgtaaagatctgtcacgccatagggaagctattttatttctttataattttgtttgcatcattttgtaacaggtgttgcacatgaagcaatctttacagaggtatggccatatcatgagtgctgatgagcactacactagatggcaagaggtaacccgatgatatgttctttagctgcatcattgggaatataaatttgttttcttatcataaaggcattttttttctgaacaggtctttctcatcataaattattcttttaactcaaaaatgttgaatgttgttaggtggaagctgattgtgaagatgacccagagggcttggcactccgtcttgctgccaaaggagctgtttccgctgctttggaggttgctgaaagtgcctctttatcaattgatttgcggagggag

SEQ ID NO: 182547 - DNA, 475 bp, Zea Mays
gccacggtgagcgcgcggataaactaaagattcatgcgttcccaatggtcagtggacctctagtctaattggacgggtcagcaagcattgtaggtatgtgggaaagcttaaacgagggagagggagggctggactgaccggagtacggctggccgtagtgagcagttccttgcggtggcggaaagtgaatttggggcgaacgtgaaattggagagctgtgggaagtaatcggagctacgcgtgggttctctggacgcgcaattacctagcggcactggccgaggctccaatttataggcagcttcgacggtggctgggaattttaacgacgacgtgtggcggtcggagataaggaagaaggcggcgcagtgaatacgtgttcaacgtcgtggcagctattccggtgagcaacggggagctaaagtgaaccgtggcggtgcagtggcgaggctcagacacgcggcgcaaggccgag

SEQ ID NO: 182548 - DNA, 319 bp, Zea Mays
gtgcttttgtgctgtctctttaagcagggaacaatgttggattttcttctgctttagggtctgtttgtaatggattatttttattgtgcgtgtgactgagcattcaggcgtacatgtgtggactgtacacagttggctgccaagcccaagaggttggagtagaacaggaattgttctgaacttcagaaaataaccactccagactttaaaaatatcccctccacggaaaagatgcagttctagaataatgttaagtcaaatgatctgaaatttgatcagatctatataaaaagatactaatatttatcgtacaaaataa

SEQ ID NO: 182549 - DNA, 352 bp, Zea Mays
cgcttctgtttacgacacctgaaccagtttttggtaccggtgggggagcactgtcccaatggctggccgccgttcgccgtcggcggatcccggtctcggtcactgcgaagctcccgaaatgagatccggtggcgctttagagccctcgtccgttccaatacgcagtcggatgctgggttacgctcgcctctaaatctaagcttattatttatgcctttgcttcgtattcgtcagatctgatttcgtatttctgtctcgaccgaaattttgcgcggtgcagtgattataaaaacattcctcgtactgatgggtcatcctcgtgaacgactcctatacacccatagaatctgag

SEQ ID NO: 182550 - DNA, 311 bp, Zea Mays
caggaaggttgctgtcggtaaggcgggtggcgacgcggacaagcataggaagtatgcccaggcgtatggcagaggaggcaacggatgatggaacggcagagggcaacccggtggtgaggtgagaggcacttgaagcaccgtcctttaaaggtctccagagcttgaataccaaacagcctctccaggcggcgcctctgcttctgtgtgtggtgactctccacgagtgtgaaaccttcacgatccaccaagggcttctggcgcatgggctgaaccaaagagtgcagtggggaagaccgacggacgaaccgtcc

SEQ ID NO: 182551 - DNA, 314 bp, Zea Mays
ccattttcgatgagatagcagatgagttgagtggggctgttatcttttctaagctcgatcatagagcggggtaccaccagatacggattaaagaaggggatgagccgaaaacagcctttcagacacattctggccattttgaatatcgtgttatgccatttgggttaacgggagcacctgctacttttcaggagttcatgaaccatattttggccccactactacgcaagtgtgtagttgtctttctggacgatgtgcttgtttacagtcctagcctggaacttcatgtgcagcacttgaaagcagtatttcag

SEQ ID NO: 182552 - DNA, 296 bp, Zea Mays
tgatgcatgcacacatgatgagattgctctgccgattgtcagtcctctctccctcagccgcaaccgcaaccccgccaagggacaacgcaaatccttcctcttatcagcttcagtcactactacacctacctgtaccacactgttcgtcctcctcggttcttttgctcctaatccttgccactacccgatctatcccttcacttccgccgcgcacctgcatgtgcctttgtgtttatgtctagattcatcgcaccggacccatcttgtgcgattggattcgattgcttccgtattcc

SEQ ID NO: 182553 - DNA, 921 bp, Zea Mays
ctggcagtgccacaacagctacagcgcatgtggcctcggttctgatgggactgacagactagtcaacctggtacgagaagtgcaacacaggaggacatccgaaggcggaagccctagtctgtttggcgcaaagatcaccggcggaggctccggcggcacagtatgtgttgttgggaagaactgcgccaggagcagtgaagagattgcagaggtagctccacggactagcctttgttcatttggtgtttgggttttatcacgatgacagagaccgataattacctgcacttccagattcagcacagatacaaggctgagaccgggtatctgcccattcttttcgacgggtcgtctccaggagctgggaagtttggttacctgaagatccgacgtcgttgtccctagtggctgattgggaaacgaagaacttcagttcgagctttgtcacatatcactcaattgttaagaacctcactccaactctccaagccattgtagaacatagaggcgtattgccacttgcgatgattcgtcgttcacacacaaaatattatcatgtgctacaccaattctggaagctactagaggaaaatgtgaggaatataaagaaactcttgttgagcagatgtagtctagtggtctccgtgtgcttgctgcagtgtaaccaaactccaagtagatgtgctctgggctctggcatgtggtatgtgatgaagtcgaggatggtttcttgccgtttgatgaccagtgtagtcgttggttaacttgtcagtcgtaaactgatgttgtcagttaggagcggataaagtttgtgtgtgttgtcagtgtatctgtgtgtaagtttattggacagaccgaaagatacaccacgaacccagatgaagtaggtaatagtcgtatgtgaagtttttatcattaggg

SEQ ID NO: 182554 - DNA, 556 bp, Zea Mays
cttgatgcgaggaaggaggaggtggcagcactggactgcatggaggacgggtctccggaggcaaagcactgcacatcagtagaggttaagaagggggacttggtgcgcccagatggggattgcagcacgatggagttcaatgttgttgggcatggagttgaggttgcttcatatgacccacaaaggctcaaacatgtggaaaccagcaatgaggctgatcaaaatgaggatccagggttcaaaattgacgaagaggtatcattcaagcctgtgctagtatgtggtgatgtcgctgaggatcagactgttggagtgaagactgaggtggcagtctgtgatgttgctgttcaaagggagaatgtggaagacaaacatgatggaataatcaaagccaattcactgcctacctctgctctcgaagcagaggatcagttgggagcagatgtagaactggaggacctggaatgtattttgaacgagctcttagttgctaagccggaggaatttgaatcaccagtagtagaagataagtattctaggcgattgagttgcacag

SEQ ID NO: 182555 - DNA, 348 bp, Zea Mays
gttctctagtccatattgatggctacattatcatggttgatggaatggtcagtggagaatgtttgtgaggcatttttctcctatttcggggaaaatcagcatgtgagattgccatctaccccagtgatccccgttgatgatccgaaggtgccccttcttcatacatgtttgcaccggttcaaggggacccttggtggcagagagaggcatcgcacctgcttttcgccgaggtgcattattgcaagtggtgacgaagatttgattgaccgcttcagaattgacgctactttccatcgactcacagagatccttgggagttggtctcatgggtactatttcaaggaggaa

SEQ ID NO: 182556 - DNA, 272 bp, Zea Mays
gcaagctccaaaaacagaacatgtctcctgcgtgaactccgcggggtagttccaaccaaatctccgcgaaatccgtggctcctgtggttaagtatcgtgccggctacctctctctcctctccattcttctcccacgaccgagccctttccccggggcagcagctccctgctcgccgcgctgctcttcaatggcgcccaggtccggcgactccgctgctcgctccttcctcctccctccggcactgcgaccgcggactggccctggttcttcc

SEQ ID NO: 182557 - DNA, 764 bp, Zea Mays
gttcatggtgatatgcgtcattcctctcaggcgatgctcaatgactctctcccgtagcttcatagtgtggctcatgagcttaatccctcggtagttggtacaactttgaatatctcccttgttgttgaagattgatactaatgtactcctccactcatcgggcatcttgtttgatcgaaaaatatggttgaacaacttggttagccaaacgatagcaatatccccaaggtatttccacacatatattgggataccacctgggcccatcatcttgccccctttcatcctctttaaagcttctttgacctctgatttttagattctgcgtacaaagcatctatttaaatcatcaaaggagtcatccaattgggtgtccatagtctcattctcaccattgaaaagattgtcaaaatacctctgccacctttgtttgatgtcttgtcctttcgtgctacactgttgttatttcctgctgcccactgttgctgttggtgctgttgcctcttatcattgctgctgcacttggtcaactggattggtttggtgggctgggcttgcctgtcgtttctctccgatactgttgtcgcatgttgttcattacccactctaaacactgctgcttatagctaacatgacattgcctagctatgcacccaggagtgcttgacgtcttaataaccttggttgaaaatatttgtataattatgattatgatcttgttacgagttacaacaatatgttattcagtaaccgtgatgttagct

SEQ ID NO: 182558 - DNA, 650 bp, Zea Mays
gggcgagcgcatcgggaacctcgccggtgagctggttggaggacagattaagctggttgaccctcagcgttcccagcgccggcggtatggcgccggaaagctggtttgacgaaaggtccagcagggtgagctccggcatcgagcctaaccccgccggtatgccgccggtgagctggttatggcttaagttcatctgcgacatgccactgagcgacgcaatgctctgtgggattgccccagacagctggttcgccgacaggtccagctcctgcagaaggggcatcgcagcggtgaaccccggtggtatgtcgccggagaacaagttgttgctggcgtggaaccgcttgagattagtagccgatgcaggaatcggtccggtgaactggttgttgtcgatgctaagcctcgacaggttccagtacagcttctccggcaggctcccgcccaaccgtccattgttctccaacgacacggtcagaagcttcggcaccgtccatagagcggccggcacctcgccggacagctggttacctccgaggaacaaccatatgagactcgagcagttggcaagaccggtcggtattgagccgttcaagcggttaccgggggcggtgagcacccacagctggttgtgctcacagatccccgcc

SEQ ID NO: 182559 - DNA, 494 bp, Zea Mays
attaggttgtagctcgaggacgacctgcttgtccaaaaggggtgtagtgtcagggcccaagagattagaagttggcattgtagcacgcccctcaggttgtttagataaagatagactagtttgggataagatttgaattagagataagattagatctagtgcttaggggtcaaggaaccctctctatataaggagagggattgtatcaattgaaggtaagcacgagattagaaggaaatcccttctctcttgccggtcgtgggcaaagccctgcggctggcctccccaacgtctcctaaccctagccgcaagttctctctctagatcagccacgcacgccctgcgccgtgcacagcctcctcgcctccgccggcgacaacgcagctgccaccccccctctccctccccgctcatgcagccctaacccatgaacggtacccgtgggtactatagcgtggggacaacacaaccaccacccccttctccctcaccca

SEQ ID NO: 182560 - DNA, 520 bp, Zea Mays
gatccggacatttctaatgctactagattgcttgttagagcacgtgtgacttctctgcaggaggttccatagtttattgtgttttcagtagctgaaggttttcatggggtttcttggactgttcagtgtgacatagtgcagcagttcatgcttggtaacatgcctgaggatgaagaacctgtgcctccgtatcctcataatgggcatcaacttccggtggaattttttggattggggcaacctgtgcccaatttccaatttgacctcgacatccccccaatggtgaaattgaattagaggatgctaatgccaacaatgctgatgatggttgggatccatggccggttgaacaggtccaacaagatcaaccgcctgcacctgttcctttagtcaacaatgaagaggaacaattcagttaccaattctccggtcttgaggacttaccttcagatgaatctatgggtcttttcaacgatatcgttatcccgcaagctgtcaacttccctcaggaggatgtcca

SEQ ID NO: 182561 - DNA, 527 bp, Zea Mays
gaacagtaatatatagtggagggacaaaccagtgacaggcaaaggtttctaacaaatctgaaggtgctagctccagtactcctcacaaggtcaaattgacatcacaaggaacacctagaagaaaagggagatgcagaaactgtggcatctatggtcattgggcagaagacagtaaaagaccaaaaagagataagcaggatcacaaacagcaggaggcaaatgttgcagttggagatgtggagaatgcagcactactcttcgctgaggtgcaagactcattaggtggaacttctcaggaaatactcctgtctgaagaaaaagtagtgactgcagtctgttcagatgaagtctgggtattagacactggagctagtaaccacatgacacttctcaacttgatgacactgtcagtgggtcagtgaagtttggtgatgggtctactgtcaaaatctgtggactaggttcggtggtgatgaaaaccagacaaggtgaccacaaggtactcactagtgtgtactacattccac

SEQ ID NO: 182562 - DNA, 375 bp, Zea Mays
ctttgactactcatttaggaagctcgatgacaatagcattagcatgatagatggtactatggtagaagcagttagaaccaccttgaccatagtgaggcaccctgctctgttcatcagggaggccttccaacctggaagttgatcagccaccttgttcaccaaaggaaggtcagccttagaagctttgtggatggtgagagggggggtcaagatacttgcaggggaagtccttcacagagcaagccagattgccagaatatcagaggtctgctgcaaatgttccttttgcttgaccaccagaatatcaaagctttgtagatggtgagatggaaaactttgtagatgatcaccaagagggggaggggaacatgggct

SEQ ID NO: 182563 - DNA, 319 bp, Zea Mays
ataatctttgaaagggatcgaaggtggcaggtgcatgtacacacatgtaattagatggactcacagagcttagaacattaaaggggactgtgccttagtagatctatcagttaggataaaattgccatttgaatagcatgtaaacagtaaacaaaagttgctaaacaacacatgagcactacagtgccaagatttaagtataatcaatttccacttatgaagctaacatagcgagtgcattgagttatttgcagtctctttccaacatttctctgcactacataatcacatgttcagtagagacatgctacacttaaac

SEQ ID NO: 182564 - DNA, 311 bp, Zea Mays
cttcgtcccccccctgcctgcctagctgtctcaggctgccgcccgcccagccccaaaacattcggcagccgagtcaaccgagaacacgagccatccacccaccctgtcccttccccggctttcccccgtcctcggctccaccaattgctctcgcgtcagtggaaggaaaaaccaagggcgagggagggaggagcgcatctccgccccgcccgcgttcccgtaccccgatccgccacatgatctgacaccgcattgccgccgaggtgacccctcccgcccccagaatggaggcgctcaacgagctctgcgac

SEQ ID NO: 182565 - DNA, 376 bp, Zea Mays
cggcgatgaaagccgtcgtgttctgcttgggccccgccgtggccggtacccaggagagagaaaagtggggtccatcggatagcccatcgatggatgagattaaatgtatgggcgagtagtgcctggccatcggattcagatggacgctcccgattaagtgatgcataccccttcgttcttttgatccgagacgttgatcggcgatccgatgggttagatcggatcggaccttaatgaaatccgggtcgtagggtgtcctgtgggcggctgtgattaaaaggttgttaccctttcagttatgtggattttgggccctcggattgggatcggacggtccatatcgcgtactggttcgtacctatgctgatctaatcag

SEQ ID NO: 182566 - DNA, 486 bp, Zea Mays
tcgactgaccaactatccgatgaccaactccaatgaccaaatctaatgacctactctccgctaataagctctgaccgaccaactaaccatcgagcaacccgacgaggcagagatctaagtccagtggtactaatccacgtcagctacgacatgacgcgtcatcatcaacacatgtccggacaagctcacaccaaataggatgggcatcagggtctctacaatgacccgtacatcggaaggacaggacaatgcgccacatcgagcgtgcgcctacacacgctggtaggtgatgaagggcccatgacgataggagaagccacgccacgtacaaccgcactttgagactgatccatggaacccaatgcacaccattacgtccggtgcgccgccacgtcacccaaccgttagggttctaaagcagttgaccattggcgcccttgtcttcttgtggcaccagataatctggtggtgcaccggacagtccgg

SEQ ID NO: 182567 - DNA, 477 bp, Zea Mays
cgcccacccatgtcagaggttgtccagcaacttgtgcgcttgatgcagagggctagcatcgtgaggcggcaatcaggagaagagctagggttttcatacagagtcccagaacgagaaggagacctgagagacatttccttctgagcaagtgcgtccacgatagaagcgcaaaacagtttggaggcttaatgtgcaaagaaaatatctagagcactcgtatagtcatatcgattggagaactcgagctgaccgcaacaattcaggatcggatgagttttgagaagataatttcgttgcctattgttcaactttgttcattcttctacattcgtctcattttcagtcagtatacttgttgcagctgtatttaaaacgagactcaaattgatggtggtgtatagctgattattggtagagaagaaggaaaagaaatgtaaaattgatgctccgttatgttttaatgatagaaacctcaag

SEQ ID NO: 182568 - DNA, 545 bp, Zea Mays
gcacactgtaagtcacaacatcaggaagaactcctgcctttaccattttatcgtgcagagaaagagccctctccacattaccctccttgcagtggccatcaataagagatgtgtatgtaaattcatcaggttgtaggccaagcttaatcatatttttgaagagcacatgagcgtcactgagtcgtttctcctcacaaagaacccttatgagtgatgagtaggtgattgcatctggaagaacacccttctcaagcatctgttggttcaattcgaatgcagaatgtgtatcacaattcttacagtacgcactgataatcgtactgtatgtcacaacgtcaggcttcagtcctttagcttccatttcatggagtaactctcttgcttcatccattcttcctaccatacaataaccattaataagtgcattataacacaccactgaaggctttattctgcattgcctcatcccccttactgcaagcaatgcatcatccaagaatcccttcttgcagaacccatctatcaaggctgtaaaagtgacctca

SEQ ID NO: 182569 - DNA, 721 bp, Zea Mays
cccataaagaatgagagccgtgattagatggaatatcccagaaagagcagggcgtgatggatcatctaacttattgcttttctgtggctgcaagtaccaccagcggggcaaatctaacttgatcctcacagcaaatccaattgaactaatgagtgatatcaacacgagcacagtaaacaggatgtatatgatcaaatccatcttcctctcaatcctgctcctcttggatggcgactcagttgagttctgcatgactttactgtcatgaccggtaaaaatgaccactccatagacaaaggctgtattccttagttttgagtcccgcagaagtatctgagacggatcaagggcgtaaacctgcctctcatactcaaagttaccagtgaatgtgtacaagctcgggttgggatcctcacagcgtatcactgcctggaaatctttaaaggactcgtcttcttccaacggcagcgtaacctcaagtgacctcttcaccttaaggtttgtctcgccatcgaggttcattgtctcgacatagcaaatgccatcctcatagcttgaggacagtagcagtaaatcagcagggaagaactggtccttctcaaccctgaccacatcgcctacgcaaaggtcctcccagtgccggtagtcgaattcgccatcactcttgtgcacgctgacattgcggttgttcaccttcatgtcctgcatgaagcggcgccag

SEQ ID NO: 182570 - DNA, 3147 bp, Zea Mays
ctgagaacacacgggatttcaaaaaggcatcatcagatgagaaactcagtttactcaattctttgctgaagagttatcaagaggaagttgataacctcacaaagagagcaaagtttggagaaaatgcatttctcaacatctatcagaagctctatgaagctcctgatccatatccagctcttgcttcaatgactgtatgttctttcaattttttcttctgttgtatacttgcattcttctaattcaattctcttgtactcccaatcacaaatgcacagtgggaagtccttactctttcaaggctgaaagattgcacatcatcatgaacatgaagcaacagatatcatcttattataatttacctaacatattaaatactttatatgatcaaaattcttgtatagcacctattttgtactaaatcacccagctgtattcccacactcgaaaaatgcaaggtttttttgtgcaacaaatgatgcggatttaacattgagaaatataaatgtatcacggtaagttatcaaaatgtaaaaaaaaacatgatagtagtttgtgaaaaatatgacgtggtctgttttcctccgtagcatcatgaattttcaacttcactttttttgcttgatcttgaatcagtttatctaacaagaggcttgtctgaatatgataggtgggtttaataaacaattctagtgttaatgatctatttcatgcaggatcaagaccagaaattgtctgaactggagactgagaaccgtaagatgaaactagagcttgaagaataccgtgctgaagctgcacacttgaagaaccagcaggcaacaattaggcgacttgaagagcgtaatcgccaactggaacagcaggtcttttctgtacttctgtcaccatttagttatatgctctactattaatttatcgtacatgtctttgttttttttacttttatatgacattggtgttacaaataagagtttcttcttgtcctatttctttgtcaatcataagagttgacattatccatataataattccaattaaaatactagatctctacccattttaatgtgttgtaattttttttgagcatcacattattatctacattttattttgtagaaatatgtttctatgtgagtgttgtctaaatgtagtatagagggtagaagattcctttatctaccaatagcaagcatgcagtcaggagtcaaaatttttataaacaacaggggtccaaacttatataaaaaagcgttccagataaattataataaccaattcgatctctcaagctttgtaccttttcgctttattaccatttgtatcattttagatggaggagaaagtaagggagatggttgaaatgaagcagcgaagcatggctgaggatagtcagaaaactctagaagccctgaaagataggtatgcaaaatcatctgtagtactacctttggatcaaaccaggtgctgttttagagttggccacaagaactaagaagttcaatcatacggccattttactctcattttattattacccagttgtgtcttctaattggtgcgtgcatgactgcttacgtgcaacagcacgggaaacgagatatgcatgtggataatttagttaaattatgaaattaagtaggggtaagattggaaatttggctaaatttccctagaaactgtagaatgacatgtatttcgaaggtagtagaagaggctatactacatctatgaaaaaaatcgctctgttagagtgttagtctgttatcacctgaactgccatatagaattcttgcctgacatcaaaggctaattcatgtaccatgactcatactgtatattttgaccttcggcttgccatacttgtagggaacggtcattgcaggaccaactaaggcaagctacagaaagtgtaaagaatatgcaaaagctacatgaatcggcgcaaagccaattgtttgagcttcgcactcaatcaggtctctttccaaccagtgtgatcatgatcatctttgtgacttatattttaaaggttatagtgaattgaagcatttcatttttttccccagaggaggatcgagctgcaaaggaggttgaagtcagccttctgatggatgaagttgaaagggctcaagcacgattagtcagtcttgagagggaaaaggtagccttgtgatttgaaattccagtttaatgcttctgagttctgactgcttaacatgtccaacatgttacaatattttttaccaccagtcatgtgtgaatggtttaacatacttactggtgtcagtttttttggtggccatttctgtcctttattttttccagtttctgtagaaatttgtctatcagaatcatgtataaaatctatgtttccgtggcacgcaagcaagaggagcttgttcccacatactcattgttggtatgaggataggacattttggaatatgatttgaacttggagtaaactgtaccaaatctttcctgatgatctgcatccttaagagtcagggccaaattaactaaactatgattcaatcattcagggactaaatagtgttaccttatattgaaagtttagtgtcaaacactaaccacatttttctgagaaataatgctatgtagtggtaccgcgttaacgtttcacctttccttattcattatgttagcatcaaattgtggataacttcaaatgtgtaaaactattgttttgctcagtgcatggcccaagataacttttcctattcttttttacttgactacagggggatctgcgttcacaattgcagacaactaatgaggatgcaagcaaaagtaggtcagtttgcaacccccctccccccccccccccccccccccacacacagagactcatcctgtgtacgatacataattgcagtagtgcgctagtgctgcactttagcagtgggcttcaatgtctgtttaaaattaattggagcttgcgaactacataattctgcagtgactatttggaatcaagtgatatacttgagagttccttgaacgccaaggagaagattatttcggagttgaatgcagaacttcgcaacattgaaagtactttatcaagtgagagagaaatgcatgtgaacgagcttaagaagttgactactttactcactgaac

SEQ ID NO: 182571 - DNA, 405 bp, Zea Mays
ggtggggcgtatcgctgaagcgtgagaaccacctgagcccgccaacgagagtagtgggaggacgtcgtgtccaacacaacggatacaagggaccgaatgttgtgaatctcgacggcctgagcatggagggcggcgatggtgtcgtcgtcgagtccggaggcgtggggagcctcgggagcgaccgagggatcctcatgggtgactggtgggcgaccgaggaggtggcgctgcgcggtggccatctgggcgatcaacgtggcacccatggcacattcttgctccaaggcgagagacacgacatgttcgcgctcctgggaggcagggacggtcgcctggatggtggcgatggccacgacgagcgcggaggaagcggatggaggagcgaggactcgacggtgtcgaccc

SEQ ID NO: 182572 - DNA, 319 bp, Zea Mays
tgcgcgcgtgggctgagcgccgagggcgtgctctagcgttgatagggcgcgtcgaacacgtggtcgtgttcatctgcccaagttcttgcgcctgtagaggtcacaaacatgcgaatctcgccaagggtcttgtgcaagatttcttcctggcacctagggctagctagttcgtgtaagttccaagggaagatcttccctagcttagaagatatggggcaccaagtcttgtctgtctgcactattcaccaacgacaaaaaggatgccaaactgtgtcaaatggccctggtttggtttcaaatttttcaggggtgtgccttg

SEQ ID NO: 182573 - DNA, 391 bp, Zea Mays
gcgcggtgaggggtgctgcaatcttgccgtagtcgtggacgaacttgcggtagtacccggcgaggcccaaaaaacccacgcaccgcgcgcgccgaccgaggtgtcggccagtcgtgaatgacctgcaccttggccgggtccatggccacaccgtgggcggagatgacgtggcctaggtacgccaccgatggggacccaaaaatgcacttggatcgcttgacgaagaggacatggcggagaagttcgtcgaggacggcgcggatgtggcgcaagtgatctgcccaggtcttgctataaatcaaaatgtcatcaaaaaagacaagaacgaaccgacggaggaatggccggagcacgtcgttcatgagcgcctggaaggttgccggtgcgttgc

SEQ ID NO: 182574 - DNA, 312 bp, Zea Mays
agaaaccatgtatctgctccatgttttctaaaggagatatgtcatcctcttttgcgtactgggcagcagcttcaagtgctcatgaaccttctaaagtattgcaatctggctgctactgaaggagatgtttatccctctcgtaatatcattcatatggagggggttctcccgtggtttgatacaccaattgagtcttcaatgaattcatttacattttcaaaaagtgctatagaggcattaacatgcaaaagggatgctatgtacaagttgatgatggagaagctccaacattttttctctaatgttgaggtc

SEQ ID NO: 182575 - DNA, 339 bp, Zea Mays
tgagggtggtgaatgtgtcggacttcaatcgaagaggaaaagtccaaagaaaatgggaaaagtcatccaaaatcaccaaatagtatttataaccagaaagactgagtacaggagaggtccagagatcacaatgaaccagatcaaaagcctgctcagcccgagaagaagtggtgaatgggagacaagtatgccagcctaactcacaagcatgacagaggccctcaaaatgtcccctactacatgaaagatctaggctactggtaatcgtggtcatgacgtcaggttcgggatgtccgagacgaagatgccaagtggtggaggaggtggtggagaccaggg

SEQ ID NO: 182576 - DNA, 495 bp, Zea Mays
ccgctcccagcggggccgatgacgagctgcgcgtaccccatggtgacgcgagggcgggtagatcgaagcgagtcggcgggagaggttgcaagtatagtaggacctacaaagctggaggtggggtgtgctacaggggggaggttagggttggggagtggggagtgggaatcagaaggcggaggagatggcagcggcgaggtaagcggcgcaccagatggcggcggcgaggagggtgctgattagggcggacaaggccatcgacgccttcaatacggaatagaaaattcaaaaatatcgcaagccgagatgaagatgaatatatctactggcgccctcgtggcctccccttcctctttgctctcctatggccagttcaacggcggggatcaggagcaccaccaccgtcgacggaggcagaagaggcggcgcttcggggtgggggaaggagcggcggcgctggggcagggcaagacaccgacgccaggatggatgaag

SEQ ID NO: 182577 - DNA, 433 bp, Zea Mays
catatgtatctaactcagatggtcaataccaggcggggtggtggaattgatttgcctcctaatcgacacactcggtggatatatagacaaccccagccacagcctgcagagatgaatcctcctaatcctccaccaggcggagttgatccactggttgtagctcagatggcggtgatgcagcaaatggcggacactatggctgatatgcgtgctcagatccagcaagaacgccaggagatgcgtcaagaaagagaagagatacgacaggagttgcgccaggagcgagaggagatacgccaggaaaggagggcgcaacaacagcagctgcaacagcaaatgcagcaacaacagcaacagcaacaagtaccactgcctccaccaccaccaccagttccaccccgagataagcaccgagaattcatgagtcataagc

SEQ ID NO: 182578 - DNA, 605 bp, Zea Mays
gagaatgcccacatggttgacaggcacaaccataaggttttcagggtgaaccttcggttggtttcgaagctgagcggcgaggacttgaacaagtatttgaatgaagagaaggatggcattcctcttcctcaagactaccttcatgcactggatgtcatcctgagggaaggcgctatggagaaatctattcccataggccggtctttgtattcgcgttccatgggagaggcgaaggagattggtggtggagctgtcgtgttacgaggtttcttccagagcttgaggccaacgaagcaaggtcttgccctcaatgttgacctctcgcttacagcgttccatgaaaatacgggcataatcgcatacttgcagaagcgctgtgactttatgaaggacctttcgcaggtgaagactagggcattggcggtagatgagaggagggaggtggagaaagcattgaagaacatccgagttttcgtgtgccaccgtgaaactgaccaaaggtaccatgtgcatggcctgaccgaggagacaacggagaacctcaagttccgagaccgcagcggcaaggattatacggtggtagattacttcaaagagcactacaa
